(19) United States
(12) Patent Application Publication
(10) Pub. No.: US 2022/0275367 A1
(43) Pub. Date: Sep. 1, 2022

(54) COMPOSITIONS AND METHODS FOR TREATING HUNTINGTON'S DISEASE

(71) Applicant: VOYAGER THERAPEUTICS, INC., Cambridge, MA (US)

(72) Inventors: Dinah Wen-Yee Sah, Hopkinton, MA (US); Pengcheng Zhou, Lexington, MA (US); Jeffrey S. Thompson, Stoneham, MA (US); Christina Gamba-Vitalo, Arlington, MA (US); Jenna Carroll Soper, Winchester, MA (US); Steven M. Hersch, Cambridge, MA (US); Todd Carter, Winchester, MA (US); Jacob J. Cardinal, Cambridge, MA (US); Lori B. Karpes, Ashland, MA (US); Bin Liu, Boston, MA (US)

(21) Appl. No.: 17/629,552

(22) PCT Filed: Jul. 24, 2020
(86) PCT No.: PCT/US2020/043366

§ 371 Date: Jan. 24, 2022

Related U.S. Application Data
(60) Provisional application No. 63/021,861, filed on May 8, 2020.
(60) Provisional application No. 62/924,400, filed on Oct. 22, 2019.
(60) Provisional application No. 62/913,407, filed on Oct. 10, 2019.
(60) Provisional application No. 62/878,054, filed on Jul. 24, 2019.

(51) Int. Cl. C12N 15/113; A61K 35/76; A61K 47/02; A61K 47/26; A61K 47/10; A61P 25/28

(52) U.S. Cl. CPC C12N 15/113; A61K 35/76; A61K 47/02; A61K 47/26; A61K 47/10; A61P 25/28; C12N 2310/14

(57) ABSTRACT

The present disclosure relates to pharmaceutical compositions of adeno-associated viral (AAV) particles encoding siRNA molecules and methods for treating Huntington's Disease (HD).

### CROSS REFERENCE TO RELATED APPLICATIONS

[0001] This application claims the benefit of U.S. Provisional Patent Application No. 62/878,054, filed Jul. 24, 2019, entitled COMPOSITIONS AND METHODS FOR TREATING HUNTINGTON'S DISEASE; U.S. Provisional Patent Application No. 62/913,407, filed Oct. 10, 2019, entitled COMPOSITIONS AND METHODS OF TREATING HUNTINGTON'S DISEASE; U.S, Provisional Patent Application No. 62/924,400, filed Oct. 22, 2019, entitled COMPOSITIONS AND METHODS OF TREATING HUNTINGTON'S DISEASE; U.S. Provisional Patent Application No. 63/021,861, filed May 8, 2020, entitled COMPOSITIONS AND METHODS OF TREATING HUNTINGTON'S DISEASE; the contents of each of which are incorporated herein by reference in their entirety.

### SEQUENCE LISTING

[0002] The present application is being filed along with a Sequence Listing in electronic format. The Sequence Listing file, entitled 2057_1086PCT_SL.txt, was created on Jul. 24, 2020, and is 6,725,315 bytes in size. The information in electronic format of the Sequence Listing is incorporated herein by reference in its entirety.

### FIELD OF THE DISCLOSURE

[0003] Provided herein are compositions, methods and processes for the design, preparation, manufacture, use and/or formulation of AAV particles comprising modulatory polynucleotides, e.g., polynucleotides encoding small interfering RNA (siRNA) molecules which target the Huntingtin (HTT) gene (e.g., the wild-type or the mutated CAG-expanded. HTT gene). Targeting of the mutated HTT gene may interfere with the HTT gene expression and the resultant HTT protein production. The AAV particles comprising modulatory polynucleotides encoding the siRNA molecules may be inserted into recombinant adeno-associated virus (AAV) vectors. Methods for using the AAV particles to inhibit the HTT gene expression in a subject with a neurodegenerative disease (e.g., Huntington's Disease (HD)) are also disclosed.

### BACKGROUND

[0004] Huntington's Disease (HD) is a monogenic fatal neurodegenerative disease characterized by progressive chorea, neuropsychiatric and cognitive dysfunction. Huntington's Disease is known to be caused by an autosomal dominant triplet (CAG) repeat expansion which encodes poly-glutamine in the N-terminus of the huntingtin (HTT) protein. This repeat expansion results in a toxic gain of function of HTT and ultimately leads to striatal neurodegeneration which progresses to widespread brain atrophy. Symptoms typically appear between the ages of 35-44 and life expectancy subsequent to onset is 10-25 years. Interestingly, the length of the HTT expansion correlates with both age of onset and rate of disease progression, with longer expansions linked to greater severity of disease. In a small percentage of the HD population (˜6%), disease onset occurs from 2-20 years of age with appearance of an akinetic-rigid syndrome. These cases tend to progress faster than those of the later onset variety and have been classified as juvenile or Westphal variant HD. It is estimated that approximately 35,000-70,000 patients are currently suffering from HD in the US and Europe. Currently, only symptomatic relief and supportive therapies are available for treatment of HD, with a cure yet to be identified. Ultimately, individuals with HD succumb to other diseases (e.g., pneumonia, heart failure), choking, suffocation or other complications such as physical injury from falls.

[0005] The mechanisms by which CAG-expanded HTT results in neurotoxicity are not well understood. Huntingtin protein is expressed in all cells, though its concentration is highest in the brain. The normal function of HTT is unknown, but in the brains of HD patients, HTT aggregates into abnormal nuclear inclusions. It is now believed that it is this process of misfolding and aggregating along with the associated protein intermediates (i.e. the soluble species and toxic N-terminal fragments) that result in neurotoxicity.

[0006] Studies in animal models of HD have suggested that phenotypic reversal is feasible, for example, subsequent to gene shut off in regulated-expression models. Further, animal models in which silencing of HTT was tested, demonstrated promising results with the therapy being both well tolerated and showing potential therapeutic benefit. These findings indicate that HTT silencing may serve as a potential therapeutic target for treatment of HD.

[0007] The adeno-associated virus (AAV) is a member of the parvovirus family and has emerged as an attractive vector for gene therapy in large part because this virus is apparently non-pathogenic; in fact, AAV has not been associated with any human disease. Further appeal is due to its ability to transduce dividing and non-dividing cells (including efficient transduction of neurons), diminished proinflammatory and immune responses in humans, inability to autonomously replicate without a helper virus (AAV is a helper-dependent DNA parvovirus which belongs to the genus Dependovirus), and its long-term gene expression. Although over 10 recombinant AAV serotypes (rAAV) have been engineered into vectors, rAAV2 is the most frequently employed serotype for gene therapy trials. Additional rAAV serotypes have been developed and tested in animal models that are more efficient at neuronal transduction.

[0008] The present disclosure develops an AAV particle comprising modulatory polynucleotides encoding novel double stranded RNA (dsRNA) constructs and siRNA constructs and methods of their design, to inhibit or prevent the expression of CAG-expanded HTT in HD patients for treatment of the disease. The present disclosure further discloses formulations, dosing and administration of the AAV particle comprising modulatory polynucleotides (e.g, siRNA) targeting HTT mRNA for the treatment of HD.

### SUMMARY

[0009] Described herein are compositions, methods, processes, kits and/or devices for the administration of AAV particles comprising modulatory polynucleotides encoding siRNA molecules for the treatment, prophylaxis, palliation and/or amelioration of Huntington's Disease (HD) related symptoms and disorders.

[0010] The present disclosure provides pharmaceutical compositions for use in the treatment of Huntington's Disease (HD) comprising AAV particles, wherein at least one of the AAV particles comprises an AAV viral genome comprising modulatory polynucleotides (e.g., siRNA) targeting HTT mRNA in a pharmaceutically acceptable formulation.

[0011] In some embodiments, the concentration of the AAV viral genome in the pharmaceutical composition is from 1×10¹¹ to 1×10¹² VG/mL. In some embodiments the concentration of the AAV viral genome is from 1×10¹¹ to 9×10¹¹ VG/mL. In some embodiments, the concentration of the AAV viral genome is from 1.2×10¹¹ to 6×10¹¹ VG/mL. In some embodiments, the concentration of the AAV viral genome is from 1.8×10¹¹to 6×10¹¹ VG/mL. In some embodiments, the concentration of the AAV viral genome is from 5×10¹¹ to 8×10¹¹ VG/mL.

[0012] In some embodiments, the AAV particle comprises an AAV viral genome comprising a polynucleotide sequence selected from the group consisting of SEQ ID NO: 1352-1379. 1388, and 1426-1438 or variants having at least 95% identity thereof. In some embodiments, the polynucleotide sequence comprises SEQ ID NO: 1352.

[0013] In some embodiments, the AAV particle may comprise an AAV capsid comprising a capsid serotype such as, but not limited to, any of the capsid serotypes listed in Table 1. In some embodiments, the AAV particle capsid serotype may be an AAV1. serotype.

[0014] In some embodiments, the pharmaceutically acceptable formulation is an aqueous solution comprising: a) one or more salts such as, but not limited to, sodium chloride, potassium chloride, and potassium phosphate, or combination thereof; b) at least one disaccharide such as, but not limited to, sucrose; and c) a buffering agent that may be selected from Tris HCl, Tris base, sodium phosphate, potassium phosphate, histidine, boric acid, citric acid, glycine, HEPES (4-(2-hydroxyethyl)-1-piperazineethanesulfonic acid), and MOPS (3-(N-morpholino)propanesulfonic acid).

[0015] In some embodiments, the concentration of sodium chloride comprising the pharmaceutically acceptable formulation may be from 85 to 110 mM. In some embodiments, the pharmaceutically acceptable formulation may comprise sodium chloride at a concentration of 95 mM.

[0016] In some embodiments, the concentration of potassium chloride comprising the pharmaceutically acceptable formulation may be from 1 to 3 mM. In some embodiments, the pharmaceutically acceptable formulation may comprise potassium chloride at a concentration of 1.5 mM.

[0017] In some embodiments. the concentration of potassium phosphate comprising the pharmaceutically acceptable formulation may be from 1 to 3 mM. In some embodiments, the pharmaceutically acceptable formulation may comprise potassium phosphate at a concentration of 1.5 mM.

[0018] In some embodiments, the sucrose comprising the pharmaceutically acceptable formulation may be at a concentration that is 5 to 9% by weight relative to the total volume of the pharmaceutically acceptable formulation. In some embodiments, the sucrose may be at a concentration that is 7% by weight relative to the total volume of the pharmaceutically acceptable formulation

[0019] In some embodiments. the concentration of buffering agent comprising the pharmaceutically acceptable formulation may be from 10 mM.

[0020] In some embodiments, the pharmaceutical composition may be buffered to a pH from 7.2 to 8.2 at 5° C. In some embodiments, the buffering agent may be sodium phosphate and the formulation may be buffered to a pH from 7.2 to 7.6 at 5° C. In some embodiments, the buffering agent may be Tris base that may be adjusted with hydrochloric acid to a pH from 7.3 to 7.7 at 5° C.

[0021] In some embodiments, the pharmaceutical composition may further comprise a surfactant. In some embodiments, the surfactant may be Poloxamer 188. The concentration of Poloxamer 188 may be from 0.01% by weight (mg/L) relative to the total volume of the pharmaceutically acceptable formulation.

[0022] In some embodiments, the pharmaceutically acceptable formulation may have an osmolality of 400 to 480 mOsm/kg.

[0023] Further provided herein are methods of treating Huntington's Disease in a patient in need thereof, by administering to the patient a therapeutically effective amount of the pharmaceutical composition described herein. In some embodiments, the pharmaceutical composition may be administered via infusion into the striatum of the patient. The infusion may be bilaterally or unilaterally infused into the striatum of the patient. In some embodiments, the pharmaceutical composition may be administered via infusion into the putamen and thalamus of the patient. The infusion may be independently bilateral or unilateral into the putamen and thalamus of the patient. The pharmaceutical composition may be administered using magnetic resonance imaging (MRI)-guided convection enhanced delivery (CED).

[0024] In some embodiments, the volume of the pharmaceutical composition administered to the striatum may be 15 μL/hemisphere or less. In some embodiments, the volume of the pharmaceutical composition administered to the striatum may be from 5-10 μL/hemisphere.

[0025] In some embodiments, the dose administered to the striatum may be between 2×10⁹ to 3×10¹¹VG/hemisphere.

[0026] In some embodiments, the volume of the pharmaceutical composition administered to the putamen may be 1500 μL/hemisphere or less. In some embodiments, the volume of the pharmaceutical composition administered to the putamen may be from 100-1500 μL/hemisphere.

[0027] In some embodiments, the dose administered to the putamen may be between 1×10¹⁰ to 4×10¹³ VG/hemisphere.

[0028] In some embodiments, the volume of the pharmaceutical composition administered to the thalamus may be 2500 μL/hemisphere or less. The volume of the pharmaceutical composition administered to the thalamus may be from 150-2500 μL/hemisphere.

[0029] In some embodiments, the dose administered to the thalamus may be between 4×10¹¹ to 6.8×10^{13 VG/hemisphere.}

[0030] In some embodiments, the total dose administered to the patient may be between 8×10⁹ to 2×10¹⁴ VG.

[0031] In some embodiments, the methods described herein inhibit or suppress the expression of the Huntingtin (HTT) gene product (RNA or protein) in a tissue such as, but not limited to, the striatum, putamen, caudate, thalamus, cerebral cortex, primary motor cortex, primary somatosensory cortex, temporal cortex, and combinations thereof, of a patient comprising administering a therapeutically effective amount of the pharmaceutical compositions disclosed herein.

[0032] In some embodiments, the expression of the HTT gene product (RNA or protein) may be reduced by at least 30%. In some embodiments, expression of the HTT gene product (RNA or protein) may be reduced by 40-70%. In some embodiments, expression of the HTT gene product (RNA or protein) may be reduced by 50-80%.

[0033] In some embodiments, the expression of the HTT gene product (RNA or protein) is inhibited or suppressed in the putamen and is measured in one or more medium spiny neurons in the putamen. In some embodiments, the expression of the HTT gene product (RNA or protein) inhibited or suppressed in the putamen and is measured in one or more astrocytes in the putamen.

[0034] In some embodiments, the expression of the HTT gene product (RNA or protein) is inhibited or suppressed in pyramidal neurons of each of the primary motor cortex, primary somatosensory cortex, and the temporal cortex. In some embodiments, the expression of the HTT gene product (RNA or protein) may reduced by at least 20% in the cerebral cortex.

[0035] In some embodiments, the expression of the HTT gene product (RNA or protein) is inhibited or suppressed in both the striatum and the cerebral cortex of the patient.

[0036] In some embodiments, the HTT gene product is the HTT protein and the HTT protein expression is inhibited or suppressed in the striatum, putamen, caudate and/or thalamus of the patient.

[0037] In certain embodiments, the level of the HTT protein may be reduced by at least 10% in the putamen. In certain other embodiments, the level of the HTT protein may be reduced by 15-65% in the putamen.

[0038] In certain embodiments, the level of the HTT protein may be reduced by at least 5% in the caudate. In certain other embodiments, the level of the HTT protein may be reduced by 5-50% in the caudate.

[0039] In certain embodiments, the level of the HTT protein may be reduced by at least 10% in the thalamus. In certain other embodiments, the level of the HTT protein is reduced by 15-80% in the thalamus.

[0040] In some embodiments, the level of the HTT protein is reduced in both the striatum and the thalamus of the patient.

### BRIEF DESCRIPTION OF THE DRAWINGS

[0041] The foregoing and other objects, features and advantages will be apparent from the following description of particular embodiments described herein, as illustrated in the accompanying drawings. The drawings are not necessarily to scale, emphasis instead being placed upon illustrating the principles of various embodiments described herein.

[0042] FIG. 1 is a schematic of a viral genome of the disclosure.

[0043] FIG. 2 is a schematic of a viral genome of the disclosure.

[0044] FIG. 3 is a schematic of a viral genome of the disclosure.

[0045] FIG. 4 is a schematic of a viral genome of the disclosure.

[0046] FIG. 5 is a schematic of a viral genome of the disclosure.

[0047] FIG. 6 is a schematic of a viral genome of the disclosure.

[0048] FIG. 7 is a schematic of a viral genome of the disclosure,

[0049] FIG. 8 is a schematic of a viral genome of the disclosure.

[0050] FIG. 9 is a schematic of a viral genome of the disclosure.

[0051] FIG. 10A are panels of graphs showing HTT mRNA knockdown and vector genome levels in tissue punches collected from the left non-human primate (NHP) putamen.

[0052] FIG. 10B are panels of graphs showing HTT mRNA knockdown and vector genome levels in tissue punches collected from right non-human primate (NHP) putamen.

[0053] FIG. 10C are panels of graphs showing HTT mRNA knockdown and vector genome levels in all tissue punches collected from non-human primate (NHP) putamen.

[0054] FIG. 11A are panels of graphs showing HTT mRNA knockdown and vector genome levels in tissue punches collected from left and right NHP caudate, hCN-1.

[0055] FIG. 11B are panels of graphs showing HTT mRNA knockdown and vector genome levels in tissue punches collected from left and right NHP caudate, hCN-2.

[0056] FIG. 11C are panels of graphs showing HTT mRNA knockdown and vector genome levels in tissue punches collected from left and right NHP caudate, combined hCN-1 and hCN-2.

[0057] FIG. 12A are panels of graphs showing HTT mRNA knockdown and vector genome levels in tissue punches collected from the left NHP motor cortex (mCTX).

[0058] FIG. 12B are panels of graphs showing HTT mRNA knockdown and vector genome levels in tissue punches collected from the right NHP motor cortex (mCTX).

[0059] FIG. 12C are panels of graphs showing HTT mRNA knockdown and vector genome levels in all tissue punches collected from NUT motor cortex (mCTX).

[0060] FIG. 13A are panels of graphs showing HTT mRNA knockdown and vector genome levels in tissue punches collected from the left NHP somatosensory cortex (ssCTX).

[0061] FIG. 13B are panels of graphs showing HTT mRNA knockdown and vector genome levels in tissue punches collected from the right NHP somatosensory cortex (ssCTX).

[0062] FIG. 13C are panels of graphs showing HTT mRNA knockdown and vector genome levels in all tissue punches collected from the right NHP somatosensory cortex (ssCTX).

[0063] FIG. 14A are panels of graphs showing HTT mRNA knockdown and vector genome levels in tissue punches collected from the left NHP temporal cortex (tCTX).

[0064] FIG. 14B are panels of graphs showing HTT mRNA knockdown and vector genome levels in tissue punches collected from the right NHP temporal cortex (tCTX).

[0065] FIG. 14C are panels of graphs showing HTT mRNA knockdown and vector genome levels in all tissue punches collected from the NHP temporal cortex (tCTX).

[0066] FIG. 15A is a graph showing HTT mRNA knockdown in laser captured cortical pyramidal neurons from NHP cortex.

[0067] FIG. 15B is a graph showing HTT mRNA knockdown and vector genome levels in laser captured cortical pyramidal neurons from NHP cortex.

[0068] FIG. 16A shows a correlation of HTT mRNA knockdown versus vector genome levels in tissue punches taken from the putamen.

[0069] FIG. 16B shows a correlation of vector genome versus AAV1VOYHT1. miRNA levels in tissue punches taken from the putamen.

[0070] FIG. 16C shows a correlation of AAV1-VOYHT1 miRNA versus HTT mRNA levels in tissue punches taken from the putamen.

[0071] FIG. 17A shows a correlation of HTT mRNA knockdown versus vector genome levels in tissue punches taken from the caudate,

[0072] FIG. 17B shows a correlation of vector genome versus AAV1-VOYHT1 miRNA levels in tissue punches taken from the caudate.

[0073] FIG. 17C shows a correlation of AAV1-VOYHT1 miRNA versus HTT mRNA levels in tissue punches taken from the caudate.

[0074] FIG. 18 shows a correlation of HTT mRNA knockdown versus vector genome levels in tissue punches taken from the thalamus.

[0075] FIG. 19 shows a linear correlation of relative remaining NHP HTT protein and mRNA levels in the putamen, caudate and thalamus.

[0076] The details of one or more embodiments of the disclosure are set forth in the accompanying description below. Although any materials and methods similar or equivalent to those described herein can be used in the practice or testing of the present disclosure, the preferred materials and methods are now described. Other features, objects and advantages of this disclosure will be apparent from the description. In the description, the singular forms also include the plural unless the context clearly dictates otherwise. Unless defined otherwise, all technical and scientific terms used herein have the same meaning as commonly understood by one of ordinary skill in the art to which this disclosure belongs. In the case of conflict, the present description will control.

### DETAILED DESCRIPTION

### I. Compositions

[0077] According to the present disclosure, compositions for delivering modulatory polynucleotides and/or modulatory polynucleotide-based compositions by adeno-associated viruses (AAVs) are provided, AAV particles described herein may be provided via any of several routes of administration, to a cell, tissue, organ, or organism, in vivo, ex vivo or in vitro.

[0078] As used herein, an “AAV particle” is a virus which includes a capsid and a viral genome with at least one payload region and at least one ITR region. AAV particles of the present disclosure may be produced recombinantly and may be based on adeno-associated virus (AAV) parent or reference sequences. AAV particles may be derived from any serotype, described herein or known in the art, including combinations of serotypes (i.e., “pseudotyped” AAV) or from various genomes (e.g., single stranded or self-complementary). In addition, the AAV particle may be replication defective and/or targeted.

[0079] As used herein, “viral genome” or “vector genome” or “viral vector” refers to the nucleic acid sequence(s) encapsulated in an AAV particle. Viral genomes comprise at least one payload region encoding polypeptides or fragments thereof.

[0080] As used herein, a “payload” or “payload region” is any nucleic acid molecule which encodes one or more polypeptides of this disclosure. At a minimum, a payload region comprises nucleic acid sequences that encode a sense and antisense sequence, an siRNA-based composition, or a fragment thereof, but may also optionally comprise one or more functional or regulatory elements to facilitate transcriptional expression and/or polypeptide translation.

[0081] The nucleic acid sequences and polypeptides disclosed herein may be engineered to contain modular elements and/or sequence motifs assembled to enable expression of the modulatory polynucleotides and/or modulatory polynucleotide-based compositions. In some embodiments, the nucleic acid sequence comprising the payload region may comprise one or more of a promoter region, an intron, a Kozak sequence, an enhancer, or a polyadenylation sequence. Payload regions disclosed herein typically encode at least one sense and antisense sequence, an siRNA-based composition, or fragments of the foregoing in combination with each other or in combination with other polypeptide moieties.

[0082] The payload regions within the viral genome of an AAV particle of the disclosure may he delivered to one or more target cells, tissues, organs, or organisms.

### Adeno-Associated Viruses (AAVs) and AAV Particles

[0083] Viruses of the Parvoviridae family are small non-enveloped icosahedral capsid viruses characterized by a single stranded DNA genome. Parvoviridae family viruses consist of two subfamilies: Parvovirinae, which infect vertebrates, and Densovirinae, which infect invertebrates. Due to its relatively simple structure, easily manipulated using standard molecular biology techniques, this virus family is useful as a biological tool. The genome of the virus may he modified to contain a minimum of components for the assembly of a functional recombinant virus, or viral particle, which is loaded with or engineered to express or deliver a desired payload, which may be delivered to a target cell, tissue, organ, or organism.

[0084] The parvoviruses and other members of the Parvoviridae family are generally described in Kenneth I. Berns, “Parvoviridae: The Viruses and Their Replication,” Chapter 69 in FIELDS VIROLOGY (3d Ed, 1996), the contents of which are incorporated by reference in their entirety:

[0085] The Parvoviridae family comprises the Dependovirus genus which includes adeno-associated viruses (AAV) capable of replication in vertebrate hosts including, but not limited to, human, primate, porcine, bovine, canine, equine, and ovine species.

[0086] The AAV viral genome (VG) is a linear, single-stranded DNA (ssDNA) molecule or self-complementary (scAAV) approximately 5,000 nucleotides (nt) in length. The AAV viral genome can comprise a payload region and at least one inverted terminal repeat (ITR) or ITR region. ITRs traditionally flank the coding nucleotide sequences for the non-structural proteins (encoded by Rep genes) and the structural proteins (encoded by capsid genes or Cap genes). While not wishing to be bound by theory, an AAV viral genome typically comprises two ITR sequences, The AAV viral genome comprises a characteristic T-shaped hairpin structure defined by the self-complementary terminal 145 nt of the 5′ and 3′ ends of the ssDNA which form an energetically stable double stranded region. The double stranded hairpin structures comprise multiple functions including, but not limited to, acting as an origin for DNA replication by functioning as primers for the endogenous DNA polymerase complex of the host viral replication cell.

[0087] In addition to the encoded heterologous payload, AAV vectors may comprise the viral genome, in whole or in part, of any naturally occurring and/or recombinant AAV serotype nucleotide sequence or variant. AAV variants may have sequences of significant homology at the nucleic acid (genome or capsid) and amino acid levels (capsids), to produce constructs which are generally physical and functional equivalents, replicate by similar mechanisms, and assemble by similar mechanisms. Chiorini et al., J. Vir, 71: 6823-33(1997); Srivastava et al., J. Vir. 45:555-64 (1983); Chiorini et al., J. Vir. 73:1309-1319 (1999); Rutledge et al., J. Vir. 72:309-319 (1998); and \Vu et al., J. Vir. 74: 8635-47 (2000), the contents of each of which are incorporated herein by reference in their entirety.

[0088] In some embodiments, AAV particles of the present disclosure are recombinant AAV vectors which are replication defective, lacking sequences encoding functional Rep and Cap proteins within their viral genome. These defective AAV vectors may lack most or all parental coding sequences and essentially carry only one or two AAV ITR sequences and the nucleic acid of interest for delivery to a cell, a tissue, an organ, or an organism.

[0089] In some embodiments, the viral genome of the AAV particles of the present disclosure comprise at least one control element which provides for the replication, transcription and translation of a coding sequence encoded therein. Not all the control elements need always be present as long as the coding sequence is capable of being replicated, transcribed, and/or translated in an appropriate host cell. Non-limiting examples of expression control elements include sequences for transcription initiation and/or termination, promoter and/or enhancer sequences, efficient RNA processing signals such as splicing and polyadenylation signals, sequences that stabilize cytoplasmic mRNA, sequences that enhance translation efficacy (e.g., Kozak consensus sequence), sequences that enhance protein stability, and/or sequences that enhance protein processing and/or secretion.

[0090] According to the present disclosure, AAV particles for use in therapeutics and/or diagnostics comprise a virus that has been distilled or reduced to the minimum components necessary for transduction of a nucleic acid payload or cargo of interest. In this manner, AAV particles are engineered as vehicles for specific delivery while lacking the deleterious replication and/or integration features found in wild-type viruses.

[0091] AAV vectors of the present disclosure may be produced recombinantly and may be based on adeno-associated virus (AAV) parent or reference sequences. As used herein, a “vector” is any molecule or moiety which transports, transduces, or otherwise acts as a carrier of a heterologous molecule such as the nucleic acids described herein.

[0092] In addition to single stranded AAV viral genomes (e.g., ssAAVs), the present disclosure also provides for self-complementary AAV (scAAVs) viral genomes, scAAV viral genomes contain DNA strands which anneal together to form double stranded DNA. By skipping second strand synthesis, scAAVs allow for rapid expression in the cell.

[0093] in some embodiments, the AAV particle of the present disclosure is an scAAV.

[0094] In some embodiments, the AAV particle of the present disclosure is an ssAAV.

[0095] Methods for producing and/or modifying AAV particles are disclosed in the art such as pseudotyped AAV vectors (PCT Patent Publication Nos. WO200028004; WO200123001; WO2004112727; WO 2005005610 and WO 2005072364, the content of each of which is incorporated herein by reference in its entirety).

[0096] AAV particles may be modified to enhance the efficiency of delivery. Such modified AAV particles can be packaged efficiently and be used to successfully infect the target cells at high frequency and with minimal toxicity. In some embodiments the capsids of the AAV particles are engineered according to the methods described in US Publication Number US 20130195801, the contents of which are incorporated herein by reference in their entirety.

[0097] In some embodiments, the AAV particles comprising a payload region encoding the polypeptides described herein may be introduced into mammalian cells.

### AAV Serotypes

[0098] AAV particles of the present disclosure may comprise or be derived from any natural. or recombinant AAV serotype. According to the present disclosure, the AAV particles may utilize or be based on a serotype selected from any of the following AAV1, AAA/2, AAV2G9, AAV3, AAV3a, AAV3b, AAV3-3, AAV4, AAV4-4, AAVS, AAV6, AAV6.1, AAV6.2, AAV6.1.2, AAV7, AAV7.2, AAV8, AAV9, AAV9.11, AAV9.13, AAV9.16, AAV9.24, AAA/9.45, AAA/9.47, AAV9.61, AM/9.68, AAV9.84, AAV9.9, AAV 10, AAV 11, AAV12, AAV1.6.3-AAV24.1-NAV27,3, AAV42.12, A AV42-1b-NAV42-2, AAV42-3a, AAV42-3b, AAV42-4, AAV42-5a, AAV42-5b, AAV42-6b, AAV42-8, AAV42-10, AAV42-11, AAV42-12, AAV42-13, AAV42-15, AAV42-aa, AAV43-1, AAV43-12, AAV43-20, AAV43-21, AAV43-23, AAA/43-25, AAV43-5, AAV44.1, AAV44.2, AAV44.5, AAV223.1, AAV223.2, AAV223.4, AAV223.5, AAV223.6, AAV223.7, AAV1-7/rh.48, AAV1.-8/rh.49, AAV2-15/rh.,62, AAV2-3/rh.61, AAV2-4/rh.50, AAV2-5/rh.51, AAV3.1/hu.6, AAV3.12/hu.9, AAV3-9/rh.52, AAV3-11/rh.53, AAA/4-8/r11.64, AAV4-9/rh.54, AAV4-19/rh.55, AAV5-3/rh.57, AAV5-22/rh.58, AAV7.3/hu.7, AAV16.8/hu.10, AAV16.12/hu.11, AAV29.3/bb.1, AAV29.51bb,2, AAV106.1/hu.37, AAV114.3/hu.40, AAV127.2/hu.41, AAV127.5/hu.42, AAV128.3/hu.44, AAV130.4/hu.48, AAV145.1/hu.53, AAV145.5/hu.54, AAV145.6/hu.55, AAV161.10/hu.60, AAV161.6/hu.61, AAA/33.12/hu.17, AAV33.4/hu.15, AAV33.8/hu.16, AAA/52/hu.19, AAV52.1/hu.20, AAV58.2/hu.25, AAVA3.3, AAVA3.4, AAVA3.5, AAVA3.7, AAVC1, AAVC2, AAVC5, AAV-DJ, AAV-DJ8, AAVF3, AAVF5, AAVH2, AAVrh.72, AAVhu.8, AAVrh.68, AAVrh.70, AAVpi.1, AAVpi.3, AAVpi.2, AAVrh.60, AAVrh.44, AAVrh.65, AAVrh.55, AAVrh.47, AAVrh.69, AAVrh.45, AAVrh.59, AAVhu.12, AAVH6, AAVLK03, AAVH-1/hu.1, AAVH-5/hu.3, AAVLG-10/rh.40, AAVLG-4/rh.38, AAVLG-9/hu.39, AAVN721-8/rh.43, AAVCh.5, AAVCh.5R1, AAVcy.2, AAVcy.3, AAVcy.4, AAVcy.5, AAVCy.5R1, AAVCy.5R2, AAVCy.5R3, AAVCy.5R4, AAVcy.6, AAVhu.1, AAVhu.2, AAVhu.3, AAVhu.4, AAVhu.5, AAVhu.6, AAVhu.7, AAVhu.9, AAVhu.10, AAVhu.11, AAVhu.13, AAVhu.15, AAVhu.16, AAVhu.17, AAVhu.18, AAVhu.20, AAVhu.21, AAVhu.22, AAVhu.23.2, AAVhu.24, AAVhu.25, AAVhu.27, AAVhu.28, AAVhu.29, AAVhu.29R, AAVhu.31, AAVhu.32, AAVhu.34, AAVhu.35, AAVhu.37, AAVhu.39, AAVhu.40, AAVhu.41, AAVhu.42, AAVhu.43, AAVhu.44, AAVhu.44R1, AAVhu.44R2, AAVhu.44R3, AAVhu.45, AAVhu.46, AAVhu.47, AAVhu.48, AAVhu.48R1, AAVhu.48R2, AAVhu.48R3, AAVhu.49, AAVhu.51, AAVhu.52, AAVhu.54, AAVhu.55, AAVhu.56, AAVhu.57, AAVhu.58, AAVhu.60, AAVhu.61, AAVhu.63, AAVhu.64, AAVhu.66, AAVhu.67, AAVhu.14/9, AAVhu.t 19, AAVrh.2, AAVrh.2R, AAVrh.8, AAVrh.8R, AAVrh.10, AAVrh.12, AAVdt.13, AAVrh.13R, AAVrh.14, AAVrh.17, AAVrh.18, AAVrh.19, AAVrh.20, AAVrh.21, AAVrh.22, AAVrh.23, AAVrh.24, AAVrh.25, AAVrh.31, AAVrh.32, AAVrh.33, AAVrh.34, AAVrh.35, AAVrh.36, AAVrh.37, AAVrh.37R2, AAVrh.38, AAVrh.39, AAVrh.40, AAVrh.46, AAVrh.48, AAVrh.48.1, AAVrh.48.1.2, AAVrh.48.2AAVrh.49, AAVrh.51, AAVrh.52, AAVrh.53, AAVrh.54, AAVrh.56, AAVrh.57, AAVrh.58, AAVrh.61, AAVrh.64, AAVrh.64R1, AAVrh.64R2, AAVrh.67, AAVrh.73, AAVrh.74, AAVrh8R, AAVrh8R A586R mutant, AAVrh8R R533A mutant, AAAV, BAAV, caprine AAV, bovine AAV, ovine AAV, AAVhE1.1, AAVhEr1.5, AAVhER1.14, AAVhEr1.8, AAVhEr1.16, AAVhEr1.18, AAVhEr1.35, AAVhEr1.7, AAVhEr1.36, AAVhEr2.29, AAVhEr2.4, AAVhEr2.16, AAVhEr2.30, AAVhEr2.31, AAVhEr2.36, AAVhER1.23, AAVhEr3.1, AAV2.5T, AAV-PAEC, AAV-LK01, AAV-LK02, AAV-LK03, AAV-LK04, AAV-LK05, AAV-LK06, AAV-LK07, AAV-LK08, AAV-LK09, AAV-LK10, AAV-LK11, AAV-LK12, AAV-LK13, AAV-LK14, AAV-LK.15, AAV-LK.16, AAV-LK17, AAV-LK18, AAV-LK19, AAV-PAEC2, AAV-PAEC4, AAV-PAEC6, AAV-PAEC7, AAV-PAEC8, ANV-PAEC11, AAV-PAEC12, AAV-2-pre-miRNA-101, AAV-8h, AAV-8b, AAV-h, AAV-b, AAV SM 10-2, AAV Shuffle 100-1 -AAV Shuffle 100-3, AAV Shuffle 100-7, AAV Shuffle 10-2, AAV Shuffle 10-6, AAV Shuffle 10-8, AAV Shuffle 100-2, AAV SM 10-1, AAV SM 10-8, AAV SM 100-3, AAV SM 100-10, BNP61 AAV, BNP62 AAV, BNP63 AAV, AAVrh.50, AAVrh.43, AAVrh.62, AAVrh.48, AAVhu.19, AAVhu.11, AAVhu.53, AAV4-8/rh.64, AAVLG-9/hu.39, AAV54.5hu.23, AAV54.2/hu.22, AAV54.7/hu.24, AAV54.1/hu.21, AAV54.4R/hu.27, AAV46.2/hu.28, AAV46.6/hu.29, AAV128.1/hu.43, true type AAV (ttAAV), UPENN AAV 10, Japanese AAV 10 serotypes, AAV CBr-7.1, AAV CBr-7.10, AAV CBr-7.2, AAV CBr-7.3, AAV CBr-7.4, AAV CBr-7.5, AAV CBr-7.7, AAV CBr-7.8, AAV CBr-B7.3, AAV CBr-B7.4, AAV CBr-E1, AAV CBr-E2, AAV CBr-E3, AAV CBr-E4, AAV CBr-E5, AAV CBr-e5, AAV CBr-E6, AAV CBr-E7, AAV CBr-E8, AAV CHt-1, AAV CHt-2, AAV CHt-3, AAV CHt-6.1, AAV CHt-6.10, AAV CHt-6.5, AAV CHt-6.6, AAV CHt-6.7, AAV CHt-6.8,AAV CHt-P1, AAV CHt-P2, AAV CHt-P5, AAV CHt-P6, AAV CHt-P8, AAV CHt-P9, AAV CKd-1, AAV CKd-10, AAV CKd-2, AAV CKd-3, AAV CKd-4, AAV CKd-6, AAV CKd-7, AAV CKd-8, AAV CKd-B1, AAV CKd-B2, AAV CKd-B3, AAV CKd-B4, AAV CKd-B5, AAV CKd-B6, AAV CKd-B7, AAV CKd-B8, AAV CKd-H1, AAV CKd-H2, AAV CKd-H3,NAV CKd-H4, AAV CKd-H5, AAV CKd-H6, AAV CKd-N3, AAV CKd-N4, AAV CKd-N9, AAV CLg-F1, AAV CLg-F2, AAV CLg-F3, AAV CLg;-F4, AAV CLg-F5, AAV CLg-F6, AAV CLg-F7, AAV CLg-F8, AAV CLv-1, AAV CLv1-1, AAV Clv1-10, AAV CLv1-2, AAV CLv-12, AAV CLv1-3, AAV CLv-13, AAV CLv1-4, AAV Clv1-7, AAV Clv1-8, AAV Clv1-9, AAV CLv-2 AAV CLv-3, AAV CLv-4, AAV CLv-6,NAV CLv-8, AAV CLv-D1, AAV CLv-D2,NAV AAV CLv-D4, AAV CLv-D5, AAV CLv-D6, AAV CLv-D7, AAV CLv-D8, AAV CLv-E1, AAV CLv-K1, AAV CLv-K3, AAV CLv-K6, AAV CLv-L4, AAV CLv-L5, AAV CLv-L6, AAV CLv-M1, AAV CLv-M11, AAV CLv-M2, AAV CLv-M5, AAV CLv-M6, AAV CLv-M7, AAV CLv-M8, AAV CLv-M9, AAV CLv-R2, AAV CLv-R3, AAV CLv-R4, AAV CLv-R5, AAV CLv-R6, AAV CLv-R7, AAV CLv-R8, AAV CLv-R9, AAV CSp-1, AAV CSp-10, AAV CSp-11, AAV CSp-2, AAV CSp-3, AAV CSp-4, AAV CSp-6, AAV CSp-7, AAV CSp-8, AAV CSp-8.10, AAV CSp-8.2, AAV CSp-8.4, AAV CSp-8.5,NAV CSp-8.6, AAV CSp-8.7, AAV CSp-8.8, AAV CSp-8.9, AAV CSp-9, AAV.hu.48R3, AAV.VR-355, AAV3B, AAV4, AAV5, AAVF1/HSC1, AAVF11/HSC11, AAVF12/FISC12, AAVF13/HSC13, AAVF14/HSC14, AAVF15/HSC15, AAVF16/HSC16, AAVF17/HSC17, AAVF2/HSC2, AAVF3/HSC3, AAVF4/HSC4, AAVF5/HSC5, AAVF6/HSC6, AAVF7/HSC7, AAVF8/HSC8, AAVF9/HSC9, AAV-PHP.B (PHP.B), AAV-PHP.A (PHP.A), G2B-26, G2B-13, TH1.1-32, TH1.1-35, AAVPHP.B2, AAVPHP.B3, AAVPHP.N/PHP.B-DGT, AAVPHP.B-EST, AAVPHP.B-GGT, AAVPHP.B-ATP, AAVPHP.B-ATT-T, AAVPHP.B-DGT-T, AAVPHP.B-GGT-T, AAVPHP.B-SGS, AAVPHP.B-AQP, AAVPHP.B-QQP, AAVPHP.B-SNP(3), AAVPHP.B-SNP, AAVPHP.B-QGT, AAVPHIP.B-NQT, AAVPHP.B-EGS, AAVPHP.B-SGN, AAVPHP.B-EGT, AAVPHP.B-DST, AAVPHP.B-DST, AAVPHP.B-STP, AAVPHP.B-PQP, AAVPHP.B-SQP, AAVPHP.B-QLP, AAVPHP.B-TMP, AAVPHP.B-TTP, AAVPHP.S/G2A12, AAVG2A15/G2A3, AAVG2B4, and/or AAVG2B5 and variants thereof.

[0099] In some embodiments, the AAV serotype may be, or have, a modification as described in United States Publication No. US 20160361439, the contents of which are herein incorporated. by reference in their entirety, such as but not limited to, Y252F, Y272F, Y444F, Y500F, Y700F, Y704F, Y730F, Y275F, Y281F, Y508F, Y576F, Y612G, Y673F, and Y720F of the wild-type AAV1, AAV2, AAV3, AAV4, AAV5, AAV6, AAV7, AAV8, AAV9, AAV10, AAV11, AAV12, and hybrids thereof.

[0100] In some embodiments, the AAV serotype may be, or have, a mutation as described in U.S. Pat. No. 9,546,112, the contents of which are herein incorporated by reference in their entirety, such as, but not limited to, at least two, but not all the F129L, D418E, K531E, L584F, V598A and H642N mutations in the sequence of AAV6 (SEQ ID NO:4 of U.S. Pat. No. 9,546,112), AAV1 (SEQ ID NO:6 of U.S. Pat. No. 9,546,112), AAV2, AAV3, AAV5, AAV7, AAV9, AAV10 or AAV11 or derivatives thereof. In yet another embodiment, the AAV serotype may be, or have, an AAV6 sequence comprising the K531E mutation (SEQ ID NO:5 of U.S. Pat. No. 9,546,112).

[0101] In some embodiments, the AAV serotype may be, or have, a mutation in the AAV1 sequence, as described in in United States Publication No. US 20130224836, the contents of which are herein incorporated by reference in their entirety, such as, but not limited to, at least one of the surface-exposed tyrosine residues, preferably, at positions 252, 273, 445, 701, 705 and 731 of AAV1 (SEQ ID NO: 2 of US 20130224836) substituted with another amino acid, preferably with a phenylalanine residue. In some embodiments, the AAV serotype may be, or have, a mutation in the AAV9 sequence, such as, but not limited to, at least one of the surface-exposed tyrosine residues, preferably, at positions 252, 272, 444, 500, 700, 704 and 730 of AAV2 (SEQ ID NO: 4 of US 20130224836) substituted with another amino acid, preferably with a phenylalanine residue. In some embodiments, the tyrosine residue at position 446 of AAV9 (SEQ ID NO: 6 US 20130224836) is substituted with a phenylalanine residue.

[0102] In some embodiments, the serotype may be AAV2 or a variant thereof, as described in International Publication No, WO2016130589, herein incorporated by reference in its entirety. The amino acid sequence of AAV2 may comprise N587A, E548A, or N708A mutations. In some embodiments, the amino acid sequence of any AAV may comprise a V708K mutation.

[0103] In some embodiments, the AAV serotype may be, or have, a sequence as described in United States Publication No, US20030138772, the contents of which are herein incorporated by reference in their entirety, such as, but not limited to, AAV1 (SEQ ID NO: 6 and 64 of US20030138772), AAV2 (SEQ ID NO: 7 and 70 of US20030138772), AAV3 (SEQ ID NO: 8 and 71 of US20030138772), AAV4 (SEQ ID NO: 63 of US20030138772), AAV5 (SEQ ID NO: 114 of US20030138772), AAV6 (SEQ ID NO: 65 of US20030138772), AAV7 (SEQ ID NO: 1-3 of US20030138772), AAV8 (SEQ ID NO: 4 and 95 of US20030138772), AAV9 (SEQ ID NO: 5 and 100 of US20030138772), AAV10 (SEQ ID NO: 117 of US20030138772), AAV11 (SEQ ID NO: 118 of US20030138772), AAV12 (SEQ ID NO: 119 of US20030138772), AAVrh10 (amino acids 1 to 738 of SEQ ID NO: 81 of US20030138772), AAV16.3 (US20030138772 SEQ ID NO: 10), AAV29.3/bb.1 (US20030138772 SEQ ID NO: 11), AAV29.4 (US20030138772 SEQ ID NO: 12), AAV29.5/bb.2 (US20030138772 SEQ ID NO: 13), AAV1.3 (US20030138772 SEQ ID NO: 14), AAV13.3 (US20030138772 SEQ ID NO: 15), AAV24.1 (US20030138772 SEQ ID NO: 16), AAV27.3 (US20030138772 SEQ ID NO: 17), AAV7.2 (US20030138772 SEQ ID NO: 18), AAVC1 (US20030138772 SEQ ID NO: 19), AAVC3 (US20030138772 SEQ ID NO: 20), AAVC5 (US20030138772 SEQ ID NO: 21), AAVF1 (US20030138772 SEQ ID NO: 22), AAVF3 (US200:30138772 SEQ ID NO: 23), AAVF5 (US20030138772 SEQ ID NO: 24), AAVH6 (US20030138772 SEQ ID NO: 25). AAVH2 (US20030138772 SEQ ID NO: 26), AAV42-8 (US20030138772 SEQ ID NO: 27), AAV42-15 (US20030138772 SEQ ID NO: 28), AAV42-5b (US20030138772 SEQ ID NO: 29). AAV42-1b (US20030138772 SEQ ID NO: 30), AAV42-13 (US20030138772 SEQ ID NO: 31), AAV42-3a (US20030138772 SEQ ID NO: 32), AAV42-4 (US20030138772 SEQ ID NO: 33). AAV42-5a (13520030138772 SEQ ID NO: 34), AAV42-10 (US20030138772 SEQ ID NO: 35), AAV42-3b (US20030138772 SEQ ID NO: 36), AAV42-11 (US20030138772 SEQ ID NO: 37), AAV42-6b (US20030138772 SEQ ID NO: 38), AAV43-1 (US20030138772 SEQ ID NO: 39), AAV43-5 (13520030138772 SEQ ID NO: 40), AAV43-12 (US20030138772 SEQ ID NO: 41), AAV43-20 (US20030138772 SEQ ID NO: 42), AAV43-21 (US20030138772 SEQ ID NO: 43), AAV43-23 (US20030138772 SEQ ID NO: 44), AAV43-25 (US20030138772 SEQ ID NO: 45), AAV44.1 (US20030138772 SEQ ID NO: 46), AAV44.5 (US20030138772 SEQ ID NO: 47), AAV223.1 (US20030138772 SEQ ID NO: 48), AAV223.2 (US20030138772 SEQ ID NO: 49), AAV223.4 (US20030138772 SEQ ID NO: 50), AAV223.5 (US20030138772 SEQ ID NO: 51), AAV223.6 (US20030138772 SEQ ID NO: 52), AAV223.7 (US20030138772 SEQ ID NO: 53), AAVA3.4 (US20030138772 SEQ ID NO: 54), AAVA3.5 (US20030138772 SEQ ID NO: 55), AAVA3.7 (US20030138772 SEQ ID NO: 56), AAVA3.3 (US20030138772 SEQ ID NO: 57), AAV42.12 (US20030138772 SEQ ID NO: 58), AAV44.2 (US20030138772 SEQ ID NO: 59), AAV42-2 (US20030138772 SEQ ID NO: 9), or variants thereof.

[0104] In some embodiments, the AAV serotype may be, or have, a sequence as described in United States Publication No. US20150159173, the contents of which are herein incorporated by reference in their entirety, such as, but not limited to, AAV2 (SEQ ID NO: 7 and 23 of US20150159173), rh20 (SEQ ID NO: 1 of US20150159173), rh32/33 (SEQ ID NO: 2 of US20150159173), rh39 (SEQ ID NO: 3, 20 and 36 of US20150159173), rh46 (SEQ ID NO: 4 and 22 of US20150159173), rh73 (SEQ ID NO: 5 of US20150159173), rh74 (SEQ ID NO: 6 of US20150159173), AAV6.1 (SEQ ID NO: 29 of US20150159173), rh.8 (SEQ ID NO: 41 of US20150159173), rh.48.1 (SEQ ID NO: 44 of US20150159173), hu.44 (SEQ ID NO: 45 of US20150159173), hu.29 (SEQ ID NO: 42 of US20150159173), hu.48 (SEQ ID NO: 38 of US20150159173), rh54 (SEQ ID NO: 49 of US20150159173), AAV2 (SEQ ID NO: 7 of US20150159173), cy.5 (SEQ ID NO: 8 and 24 of US20150159173), rh.10 (SEQ ID NO: 9 and 25 of US20150159173), rh.13 (SEQ ID NO: 10 and 26 of US20150159173), AAV1 (SEQ ID NO: 11 and 27 of US20150159173), AAV3 (SEQ ID NO: 12 and 28 of US20150159173), AAV6 (SEQ ID NO: 13 and 29 of US20150159173) AAV7 (SEQ ID NO: 14 and 30 of US20150159173), AAV8 (SEQ ID NO: 15 and 31 of US20150159173), hu.13 (SEQ ID NO: 16 and 32 of US20150159173), hu.26 (SEQ ID NO: 17 and 33 of US20150159173), hu.37 (SEQ ID NO: 18 and 34 of US20150159173), hu.53 (SEQ ID NO: 19 and 35 of US20150159173), rh.43 (SEQ ID NO: 21 and 37 of US20150159173), rh2 (SEQ ID NO: 39 of US20150159173), rh.37 (SEQ ID NO: 40 of US20150159173), rh.64 (SEQ ID NO: 43 of US20150159173), rh.48 (SEQ ID NO: 44 of US20150159173), ch.5 (SEQ ID NO 46 of US20150159173), rh.67 (SEQ ID NO: 47 of US201.50159173), rh.58 (SEQ ID NO: 48 of US20150159173), or variants thereof including, but not limited to Cy5R1, Cy5R2, Cy5R3, Cy5R4, rh.13R, rh.37R2, rh.2R, rh.8R, rh.48.1, rh.48.2, rh.48.1.2, hu.44R.1., hu.44R2, hu.44R3, hu.29R, ch.5R1, rh64R1, rh64R2, AAV6.2, AAV6.1, AAV6.12, hu.48R1, hu.48R2, and hu.48R3.

[0105] In some embodiments, the AAV serotype may be, or have, a sequence as described in U.S. Pat. No. 7,198,951, the contents of which are herein incorporated by reference in their entirety, such as, but not limited to, AAV9 (SEQ ID NO: 1-3 of U.S. Pat. No. 7,198,951), AAV2 (SEQ ID NO: 4 of U.S. Pat. No. 7,198,951), AAV1 (SEQ ID NO: 5 of U.S. Pat. No. 7,198,951), AAV3 (SEQ ID NO: 6 of U.S. Pat. No. 7,198,951), and AAV8 (SEQ ID NO: 7 of U.S. Pat. No. 7,198,951).

[0106] In some embodiments, the AAV serotype may be, or have, a mutation in the AAV9 sequence as described by N Pulicherla et al. (Molecular Therapy 19(6):1070-1078 (2011), herein incorporated by reference in its entirety), such as but not limited to, AAV9.9, AAV9.11, AAV9.13-A,AV9.16-NAV9,24, AAV9.45, AAV9.47, AAV9.61, AAV9.68, AAV9.84.

[0107] In some embodiments, the AAV serotype may be, or have, a sequence as described in U.S. Pat. No. 6,156,303, the contents of which are herein incorporated by reference in their entirety, such as, but not limited to, AAV 3B (SEQ ID NO: 1 and 10 of U.S. Pat. No. 6,156,303), AAV6 (SEQ ID NO: 2, 7 and 11 of U.S. Pat. No. 6,156,303), AAV2 (SEQ ID NO: 3 and 8 of U.S. Pat. No. 6,156,303), AAV3A (SEQ ID NO: 4 and 9, of U.S. Pat. No. 6,156,303), or derivatives thereof.

[0108] In some embodiments, the AAV serotype may be, or have, a sequence as described in United States Publication No. US20140359799, the contents of which are herein incorporated by reference in their entirety, such as, but not limited to, AAV8 (SEQ ID NO: 1 of US20140359799), AAVDJ (SEQ ID NO: 2 and 3 of US20140359799), or variants thereof.

[0109] In some embodiments, the serotype may be AAVDJ (or AAV-DJ) or a variant thereof, such as AAVDJ8 (or AAV-DJ8), as described by Grimm et al. (Journal of Virology 82(12): 5887-5911 (2008), herein incorporated by reference in its entirety). The amino acid sequence of AAVDJ8 may comprise two or more mutations in order to remove the heparin binding domain (HBD). As a non-limiting example, the AAV-DJ sequence described as SEQ ID NO: 1 in U.S. Pat. No. 7,588,772, the contents of which are herein incorporated by reference in their entirety, may comprise two mutations: (1) R587Q where arginine (R; Arg) at amino acid 587 is changed. to glutamine (Q; Gln) and (2) R590T where arginine (R; Arg) at amino acid 590 is changed to threonine (T; Thr). As another non-limiting example, may comprise three mutations: (1) K406R where lysine (K; Lys) at amino acid 406 is changed to arginine (R; Arg), (2) R587Q where arginine (R; Arg) at amino acid 587 is changed to glutamine (Q; Gln) and (3) 8590T where arginine (R; Arg) at amino acid 590 is changed to threonine (T; Thr).

[0110] In some embodiments, the AAV serotype may be, or have, a sequence of AAV4 as described in International Publication No. WO1998011244, the contents of which are herein incorporated by reference in their entirety, such as, hut not limited to AAV4 (SEQ ID NO: 1-20 of WO1998011244).

[0111] In some embodiments, the AAV serotype may be, or have, a mutation in the AAV2 sequence to generate AAV2G9 as described in International Publication No. WO2014144229 and herein incorporated by reference in its entirety.

[0112] In some embodiments, the AAV serotype may be, or have, a sequence as described in International Publication No. WO2005033321, the contents of which are herein incorporated by reference in their entirety, such as, but not limited to AAV3-3 (SEQ ID NO: 217 of WO2005033321), AAV1 (SEQ ID NO: 219 and 202 of WO2005033321), AAV106.1/hu.37 (SEQ ID No: 10 of WO2005033321), AAV114.3/hu.40 (SEQ ID No: 11 of WO2005033321), AAV1.27.2/hu.41 (SEQ ID NO:6 and 8 of WO2005033321), AAV128.3/hu.44 (SEQ ID No: 81 of WO2005033321), AAV130.4/hu.48 (SEQ ID NO: 78 of WO2005033321), AAV145.1/hu.53 (SEQ ID No: 176 and 177 of WO2005033321), AAV145.6/hu.56 (SEQ ID NO: 168 and 192 of WO2005033321), AAV16.12/hu.11 (SEQ ID NO: 153 and 57 of WO2005033321), AAV16.8/hu.10 (SEQ ID NO: 156 and 56 of WO2005033321), AAV161.10/hu.60 (SEQ ID No: 170 of WO2005033321), AAV161.6/hu.61 (SEQ ID No: 174 of WO2005033321), AAV1-7/rh.48 (SEQ ID NO: 32 of WO2005033321), AAV1-8/rh.49 (SEQ ID NOs: 103 and 25 of WO2005033321), AAV2 (SEQ ID NO: 211 and 221 of WO2005033321.), AAV2-15/rh.62 (SEQ ID No: 33 and 114 of WO2005033321), AAV2-3/rh.61 (SEQ ID NO: 21 of WO2005033321), AAV2-4/rh.50 (SEQ ID No: 23 and 108 of WO2005033321), AAV2-5/rh.51 (SEQ ID NO: 104 and 22 of WO2005033321), AAV3.1/hu.6 (SEQ ID NO: 5 and 84 of WO2005033321), AAV3.1/hu.9 (SEQ ID NO: 155 and 58 of WO2005033321), AAV3-11/rh.53 (SEQ ID NO: 186 and 176 of WO2005033321), AAV3-3 (SEQ ID NO: 200 of WO2005033321), AAV33.12/hu.17 (SEQ ID NO:4 of WO2005033321), AAV33.4/hu.15 (SEQ ID No: 50 of WO2005033321), AAV33.8/hu.16 (SEQ ID No: 51 of WO2005033321), AAV3-9/rh.52 (SEQ ID NO: 96 and 18 of WO2005033321), AAV4-19/rh.55 (SEQ ID NO: 117 of WO2005033321), AAV4-4 (SEQ ID NO: 201 and 218 of WO2005033321), AAV4-9/rh.54 (SEQ ID NO: 116 of WO2005033321), AAV5 (SEQ ID NO: 199 and 216 of WO2005033321), AAV52.1/hu.20 (SEQ ID NO: 63 of WO2005033321), AAV52/hu.19 (SEQ ID NO: 133 of WO2005033321), AAV5-22/rh.58 (SEQ ID No: 27 of WO2005033321), AAV5-3/rh.57 (SEQ ID NO: 105 of WO2005033321), AAV5-3/rh.57 (SEQ ID No: 26 of WO2005033321), AAV58.2./hu.25 (SEQ ID No: 49 of WO2005033321), AAV6 (SEQ ID NO: 203 and 220 of WO2005033321), AAV7 (SEQ ID NO: 222 and 213 of WO2005033321), AAV7.3/hu.7 (SEQ ID No: 55 of WO2005033321), AAV8 (SEQ ID NO: 223 and 214 of WO2005033321), AAVH-1/hu.1 (SEQ ID No: 46 of WO2005033321), AAVH-5/hu.3 (SEQ ID No: 44 of WO2005033321), AAVhu.1 (SEQ m NO: 144 of WO2005033321), AAVhu.10 (SEQ ID NO: 156 of WO2005033321), AAVhu.11 (SEQ ID NO: 153 of WO2005033321), AAVhu.12 (WO2005033321 SEQ ID NO: 59), AAVhu.13 (SEQ ID NO: 129 of WO2005033321), AAVhu-14/AAV9 (SEQ ID NO: 123 and 3 of WO2005033321), AAVhu.15 (SEQ ID NO: 147 of WO2005033321), AAVhu.16 (SEQ ID NO: 148 of WO2005033321), AAVhu.17 (SEQ ID NO: 83 of WO2005033321), AAVhu.18 (SEQ ID NO: 149 of WO2005033321), AAVhu.19 (SEQ ID NO: 133 of WO2005033321), AAVhu.2 (SEQ ID NO: 143 of WO2005033321), AAVhu.20 (SEQ ID NO: 134 of WO2005033321), AAVhu.21 (SEQ ID NO: 135 of WO2005033321), AAVhu.22 (SEQ ID NO: 138 of WO2005033321), AAVhu.23.2 (SEQ ID NO: 137 of WO2005033321), AAVhu.24 (SEQ ID NO: 136 of WO2005033321), AAVhu.25 (SEQ ID NO: 146 of WO2005033321), AAVhu.27 (SEQ ID NO: 140 of WO2005033321), AAVhu.29 (SEQ ID NO: 132 of WO2005033321), AAVhu.3 (SEQ ID NO: 145 of WO2005033321), AAVhu.31 (SEQ ID NO: 121 of WO2005033321), AAVhu.32 (SEQ ID NO: 122 of WO2005033321), AAVhu.34 (SEQ ID NO: 125 of WO2005033321), AAVhu.35 (SEQ ID NO: 164 of WO2005033321), AAVhu.37 (SEQ ID NO: 88 of WO2005033321), AAVhu.39 (SEQ ID NO: 102 of WO2005033321), AAVhu.4 (SEQ ID NO: 141 of WO2005033321), AAVhu.40 (SEQ ID NO: 87 of WO2005033321), AAVhu.41 (SEQ ID NO: 91 of WO2005033321), AAVhu.42 (SEQ ID NO: 85 of WO2005033321), AAVhu.43 (SEQ ID NO: 160 of WO2005033321), AAVhu.44 (SEQ ID NO: 144 of WO2005033321), AAVhu.45 (SEQ ID NO: 127 of WO2005033321), AAVhu.46 (SEQ ID NO: 159 of WO2005033321), AAVhu.47 (SEQ ID NO: 128 of WO2005033321), AAVhu.48 (SEQ ID NO: 157 of WO2005033321), AAVhu.49 (SEQ ID NO: 189 of WO2005033321), AAVhu.51 (SEQ ID NO: 190 of WO2005033321), AAVhu.52 (SEQ ID NO: 191 of WO2005033321), AAVhu.53 (SEQ ID NO: 186 of WO2005033321), AAVhu.54 (SEQ ID NO: 188 of WO2005033321), AAVhu.55 (SEQ ID NO: 187 of WO2005033321), AAVhu.56 (SEQ ID NO: 192 of WO2005033321), AAVhu.57 (SEQ ID NO: 193 of WO2005033321), AAVhu.58 (SEQ ID NO: 194 of WO2005033321), AAVhu.6 (SEQ ID NO: 84 of WO2005033321), AAVhu.60 (SEQ ID NO: 184 of WO2005033321), AAVhu.61. (SEQ ID NO: 185 of WO2005033321), AAVhu.63 (SEQ ID NO: 195 of WO2005033321), AAVhu.64 (SEQ ID NO: 196 of WO2005033321), AAVhu.66 (SEQ ID NO: 197 of WO2005033321), AAVhu.67 (SEQ ID NO: 198 of WO2005033321), AAVhu.7 (SEQ ID NO: 150 of WO20050:33321), AAVhu.8 (WO2005033321 SEQ ID NO: 12), AAVhu.9 (SEQ ID NO: 155 of WO2005033321), AAVLG-10/rh.40 (SEQ ID No: 14 of WO2005033321), AAVLG-4/rh.38 (SEQ ID NO: 86 of WO2005033321), AAVLG-4/rh.38 (SEQ ID No: 7 of WO2005033321), AAVN721-8/rh.43 (SEQ ID NO: 163 of WO2005033321), AAVN721-8/rh.43 (SEQ ID No: 43 of WO2005033321), AAVpi.1 (WO2005033321 SEQ ID NO: 28), AAVpi.2 (WO2005033321 SEQ ID NO: 30), AAVpi.3 (WO2005033321 SEQ ID NO: 29), AAVrh.38 (SEQ ID NO: 86 of WO2005033321), AAVrh.40 (SEQ ID NO: 92 of WO2005033321), AAVrh.43 (SEQ ID NO: 163 of WO2005033321), AAVrh.44 (WO2005033321 SEQ ID NO: 34), AAVrh.45 (WO2005033321 SEQ ID NO: 41), AAVrh.47 (WO2005033321 SEQ ID NO: 38), AAVrh.48 (SEQ ID NO: 115 of WO2005033321), AAVrh.49 (SEQ ID NO: 103 of WO2005033321), AAVrh.50 (SEQ ID NO: 108 of WO2005033321), AAVrh.51 (SEQ NO: 104 of WO2005033321), AAVrh.52 (SEQ ID NO: 96 of WO2005033321.), AAVrh.53 (SEQ ID NO: 97 of WO2005033321), AAVrh.55 (WO2005033321 SEQ ID NO: 37), AAVrh.56 (SEQ ID NO: 152 of WO2005033321), AAVrh.57 (SEQ ID NO: 105 of WO2005033321), AAVrh.58 (SEQ NO: 106 of WO2005033321), AAVrh.59 (WO2005033321 SEQ ID NO: 42), AAVrh.60 (WO2005033321 SEQ ID NO: 31). AAVrh.61 (SEQ ID NO: 107 of WO2005033321), AAVrh.62 (SEQ ID NO: 114 of WO2005033321), AAVrh.64 (SEQ ID NO: 99 of WO2005033321), AAVrh.65 (WO2005033321 SEQ ID NO: 35), AAVrh.68 (WO2005033321 SEQ ID NO: 16), AAVrh.69 (WO2005033321 SEQ ID NO: 39), AAVrh.70 (WO2005033321 SEQ ID NO: 20), AAVrh.72 (WO2005033321 SEQ ID NO: 9). or variants thereof including, but not limited to, AAVcy.2, AAVcy.3, AAVcy.4, AAVcy.5, AAVcy.6, AAVrh.12, AAVrh.17, AAVrh.18, AAVrh.19, AAVrh.21, AAVrh.22, AAVrh.23, AAVrh.24, AAVrh.25, AAVrh.25/42 15, AAVrh.31, AAVrh.32, AAVrh.33, AAVrh.34, AAVrh.35, AAVrh.36, AAVrh.37, AAVrh14. Non limiting examples of variants include SEQ ID NO: 13, 15, 17, 19, 24, 36, 40, 45, 47, 48, 51-54, 60-62, 64-77, 79. 80, 82, 89, 90, 93-95, 98, 100, 101, 109-113, 118-120, 124. 126, 131, 139, 142, 151, 154, 158, 161, 162, 165-183, 202, 204-212, 215, 219, 224-236, of WO2005033321, the contents of which are herein incorporated by reference in their entirety.

[0113] In some embodiments, the AAV serotype may be, or have, a sequence as described in International Publication No. WO2015168666, the contents of which are herein incorporated by reference in their entirety, such as, but not limited to, AAVrh8R (SEQ ID NO: 9 of WO2015168666), AAVrh8R A586R mutant (SEQ ID NO: 10 of WO2015168666), AAVrh8R, R533A mutant (SEQ ID NO: 11 of WO2015168666), or variants thereof.

[0114] In some embodiments, the AAV serotype may be, or have, a sequence as described in U.S. Pat. No. 9,233,131, the contents of which are herein incorporated by reference in their entirety, such as, but not limited to, AAVhE1.1 (SEQ ID NO:44 of U.S. Pat. No. 9,233,131), AAVhEr1.5 (SEQ ID NO:45 of U.S. Pat. No. 9,233,131), AAVhER1.14 (SEQ ID NO:46 of U.S. Pat. No. 9,233,131), AAVhEr1.8 (SEQ ID NO:47 of U.S. Pat. No. 9,233,131), AAVhEr1.16 (SEQ ID NO:48 of U.S. Pat. No. 9,233,131), AAVhEr1.18 (SEQ ID NO:49 of U.S. Pat. No. 9,233,131), AAVhEr1.35 (SEQ ID NO:50 of U.S. Pat. No. 9,233,131), AAVhEr1.7 (SEQ ID NO:51 of U.S. Pat. No. 9,233,131), AAVhEr1.36 (SEQ ID NO:52 of U.S. Pat. No. 9,233,131), AAVhEr2.29 (SEQ ID NO:53 of U.S. Pat. No. 9,233,131), AAVhEr2.4 (SEQ ID NO:54 of U.S. Pat. No. 9,233,131), AAVhEr2.16 (SEQ NO:55 of U.S. Pat. No. 9,233,131), AAVhEr2.30 (SEQ NO:56 of U.S. Pat. No. 9,233,131), AAVhEr2.31 (SEQ ID NO:58 of U.S. Pat. No. 9,233,131), AAVhEr2.36 (SEQ ID NO:57 of U.S. Pat. No. 9,233,131), AAVhER1.23 (SEQ ID NO:53 of U.S. Pat. No. 9,233,131), AAVhEr3.1 (SEQ ID NO:59 of U.S. Pat. No. 9,233,131), AAV2.5T (SEQ ID NO:42 of U.S. Pat. No. 9,23,3131), or variants thereof.

[0115] In some embodiments, the AAV serotype may be, or have, a sequence as described in United States Patent Publication No. US20150376607, the contents of which are herein incorporated by reference in their entirety, such as, but not limited to, AAV-PAEC (SEQ ID NO:1 of US20150376607), AAV-LK01 (SEQ ID NO:2 of US20150376607)-NAV-LK02 (SEQ ID NO:3 of US20150376607), AAV-LK03 (SEQ m NO:4 of US20150376607), AAV-LK04 (SEQ ID NO:5 of US20150376607), AAV-LK05 (SEQ ID NO:6 of US20150376607), AAV-LK06 (SEQ ID NO:7 of US20150376607), AAV-LK07 (SEQ ID NO:8 of US20150376607), AAV-LK08 (SEQ NO:9 of US20150376607), AAV-LK09 (SEQ NO:10 of US20150376607), AAV-LK10 (SEQ ID NO:11 of US20150376607), AAV-LK11 (SEQ NO:12 of US20150376607), AAV-LK12 (SEQ ID No:13 of US20150376607), AAV-LK13 (SEQ NO:14 of US20150376607), AAV-LK14 (SEQ NO:15 of US20150376607), AAV-LK15 (SEQ ID NO:16 of US20150376607)-AAV-LK16 (SEQ ID NO:17 of US20150376607), AAV-LK17 (SEQ ID NO:18 of US20150376607), AAV-LK18 (SEQ ID NO:19 of US20150376607), AAV-LK19 (SEQ ID NO:20 of US20150376607), AAV-PAEC.2 (SEQ ID NO:21 of US20150376607), AAV-PAEC4 (SEQ ID NO:22 of US20150376607), AAV-PAEC6 (SEQ ID NO:23 of US20150376607), AAV-PAEC7 (SEQ ID NO:24 of US20150376607), AAV-PAEC8 (SEQ ID NO:25 of US20150376607), AAV-PAEC 11 (SEQ ID NO:26 of US20150376607), AAV-PAEC12 (SEQ ID NO:27, of US20150376607), or variants thereof.

[0116] In some embodiments, the AAV serotype may be, or have, a sequence as described in U.S. Pat. No. 9,163,261, the contents of which are herein incorporated by reference in their entirety, such as, but not limited to, AAV-2-pre-miRNA-101 (SEQ ID NO: 1 U.S. Pat. No. 9,163,261), or variants thereof.

[0117] In some embodiments, the AAV serotype may be, or have, a sequence as described in United States Patent Publication No. US20150376240, the contents of which are herein incorporated by reference in their entirety, such as, but not limited to, AAV-811 (SEQ ID NO: 6 of US20150376240), AAV-8b (SEQ ID NO: 5 of US20150376240), AAV-h (SEQ ID NO: 2 of US20150376240), AAV-b (SEQ ID NO: 1 of US20150376240), or variants thereof.

[0118] In some embodiments, the AAV serotype may be, or have, a sequence as described in United States Patent Publication No. US20160017295, the contents of which are herein incorporated by reference in their entirety, such as, but not limited to, AAV SM 10-2 (SEQ ID NO: 22 of US20160017295), AAV Shuffle 100-1 (SEQ m NO: 23 of US20160017295), AAV Shuffle 100-3 (SEQ ID NO: 24 of US20160017295), AAV Shuffle 100-7 (SEQ ID NO: 25 of US20160017295), AAV Shuffle 10-2 (SEQ ID NO: 34 of US20160017295), AAV Shuffle 10-6 (SEQ ID NO: 35 of US20160017295), AAV Shuffle 10-8 (SEQ ID NO: 36 of US20160017295), AAV Shuffle 100-2 (SEQ m NO: 37 of US20160017295), AAV SM 10-1 (SEQ ID NO: 38 of US20160017295), AAV SM 10-8 (SEQ ID NO: 39 of US20160017295), AAV SM 100-3 (SEQ ID NO: 40 of US20160017295), AAV SM 100-10 (SEQ ID NO: 41 of US20160017295), or variants thereof.

[0119] In some embodiments, the AAV serotype may be, or have, a sequence as described in United States Patent Publication No. US20150238550, the contents of which are herein incorporated by reference in their entirety, such as, but not limited to, BNP61 AAV (SEQ ID NO: 1 of US20150238550), BNP62 AAV (SEQ ID NO: 3 of US20150238550), BNP63 AAV (SEQ ID NO: 4 of US20150238550), or variants thereof.

[0120] In some embodiments, the AAV serotype may be or may have a sequence as described in United States Patent Publication No. US20150315612, the contents of which are herein incorporated by reference in their entirety, such as, but not limited to, AAVrh.50 (SEQ ID NO: 108 of US20150315612), AAVrh.43 (SEQ ID NO: 163 of US20150315612), AAVrh.62 (SEQ ID NO: 114 of US20150315612), AAVrh.48 (SEQ ID NO: 115 of US20150315612), AAVhu.19 (SEQ ID NO: 133 of US20150315612), AAVhu.11 (SEQ ID NO: 153 of US20150315612), AAVhu.53 (SEQ ID NO: 186 of US20150315612), AAV4-8/rh.64 (SEQ ID No: 15 of US20150315612), AAVLG-9/hu.39 (SEQ ID No: 24 of US20150315612), AAV54.5/hu.23 (SEQ ID No: 60 of US20150315612), AAV54.2/hu.22 (SEQ ID No: 67 of US20150315612), AAV54.7/hu.24 (SEQ ID No: 66 of US20150315612), AAV54.1/hu.21 (SEQ ID No: 65 of US20150315612), AAV54.4R/hu.27 (SEQ ID No: 64 of US20150315612), AAV46.2/hu.28 (SEQ ID No: 68 of US20150315612), AAV46.6/hu.29 (SEQ ID No: 69 of US20150315612), AAV128.1/hu.43 (SEQ ID No: 80 of US20150315612), or variants thereof.

[0121] In some embodiments, the AAV serotype may be, or have, a sequence as described in International Publication No. WO2015121501, the contents of which are herein incorporated by reference in their entirety, such as, but not limited to, true type AAV (ttAAV) (SEQ ID NO: 2 of WO2015121501), “UPenn AAV10” (SEQ ID NO: 8 of WO2015121501), “Japanese AAV10” (SEQ ID NO: 9 of WO2015121501), or variants thereof.

[0122] According to the present disclosure, AAV capsid serotype selection or use may be from a variety of species. In some embodiments, the AAV may be an avian AAV (AAAV). The AAAV serotype may be, or have, a sequence as described in U.S. Pat. No. 9,238,800, the contents of which are herein incorporated by reference in their entirety, such as, but not limited to, AAAV (SEQ ID NO: 1, 2, 4, 6, 8, 10, 12, and 14 of U.S. Pat. No. 9,238,800), or variants thereof.

[0123] In some embodiments, the AAV may be a bovine AAV (BAAV). The BAAV serotype may be, or have, a sequence as described in U.S. Pat. No. 9,193,769, the contents of which are herein incorporated by reference in their entirety, such as, but not limited to, BAAV (SEQ ID NO: 1 and 6 of U.S. Pat. No. 9,193,769), or variants thereof. The BAAV serotype may be or have a sequence as described in U.S. Pat. No. 7,427,396, the contents of which are herein incorporated by reference in their entirety, such as, but not limited to, BAAV (SEQ ID NO: 5 and 6 of U.S. Pat. No. 7,427,396), or variants thereof.

[0124] In some embodiments, the AAV may be a caprine AAV. The caprine AAV serotype may be, or have, a sequence as described in U.S. Pat. No. 7,427,396, the contents of which are herein incorporated by reference in their entirety, such as, but not limited to, caprine AAV (SEQ ID NO: 3 of U.S. Pat. No. 7,427,396), or variants thereof.

[0125] In other embodiments the AAV may be engineered as a hybrid AAV from two or more parental serotypes. In some embodiments, the AAV may be AAV2G9 which comprises sequences from AAV2 and AAV9. The AAV2G9 AAV serotype may be, or have, a sequence as described in United States Patent Publication No. US20160017005, the contents of which are herein incorporated by reference in its entirety.

[0126] In some embodiments, the AAV may be a serotype generated by the AAV9 capsid library with mutations in amino acids 390-627 (VPI numbering) as described by Pulicherla et al. (Molecular Therapy 19(6):1070-1078 (2011), the contents of which are herein incorporated by reference in their entirety. The serotype and corresponding nucleotide and amino acid. substitutions may be, but is not limited to, AAV9.1 (G1594C; D532H), AAV6.2 (31418A and T1436X; V473D and I479K), AAV9.3 (11238A; F413Y), AAV9.4 (T1250C and A1617T; F417S), AAV9.5 (A1235G, A13141, A1642G, 017601; Q412R, 1548A, A587V), AAV9.6 (T1231A; F411I), AAV9.9 (G1203A, G1785T; W595C), AAV9.10 (A1500G, T1676C; M559T), AAV9.11 (A1425T, A1702C, A1769T; T568P, Q590L), AAV9.13 (A1369C, A1720T; N457H, T574S), AAV9.14 (T1340A, T1362C, T1560C, G1713A; L4471H), AAV9.16 (A1775T; Q592L), AAV9.24 (T1507C, T1521G; W503R), AAV9.26 (A1337G, A1769C; Y446C, Q590P), AAV9.33 (A1667C; D556A), AAV9.34 (A1534G, C1794T; N512D). AAV9.35 (A1289T, T1450A, C1494T, A1515T, C1794A, G1816A; Q430L, Y484N, N98K, V606I), AAV9.40 (A1694T; E565V), AAV9.41 (A1348T, T1362C; T450S), AAV9.44 (A1684C, A1701T, A1737G; N562H, K567N), AAV9.45 (A1492T, C1804T; N498Y, L602F), AAV9.46 (G1441C, T1525C, T1549G; G481R, W509R, L517V), 9.47 (G1241A, G1358A, A1669G, C1745T; S414N, G453D, K557E, T582I), AAV9.48 (C1445T, A1736T; P482L, Q579L), AAV9.50 (A1638T, C1683T, T1805A; Q546H, L602H), AAV9.53 (G1301A, A1405C, C1664T; G1811T; R134Q, S469R, A555V, G604V). AAV9.54 (C1531A, T1609A; L511I, L537M)-NAV9.55 (T1605A; F535L), AAV9.58 (C1475T, C1579A; T492I, H527N), AAV.59 (T1336C; Y446H), AAV9.61 (A1493T; N498I), AAV9.64 (C1531A, A1617T; L511I), AAV9.65 (C1335T, T1530C, C1568A; A523D), AAV9.68 (C1510A; P504T), AAV9.80 (G1441A,;G481R), AAV9.83 (C1402A, A1500T; P468T, E500D), AAV9.87 (T1464C, T1468C; S490P). AAV9.90 (A1196T; Y399F), AAV9.91 (T1316G, A1583T, C1782G, T1806C; L439R, K528I), AAV9.93 (A1273G, A1421G, A1638C, C1712T, G1732A, A1744T; A1832T; S425G, Q474R, Q546H, P571L, G578R, T582S, D611V), AAV9.94 (A1675T; M559L) and AAV9.95 (T1605A; F535L).

[0127] In some embodiments, the AAV serotype may be, or have, a sequence as described in International Publication No. WO2016049230, the contents of which are herein incorporated by reference in their entirety, such as, but not limited to AAVF1/HSC1 (SEQ ID NO: 2 and 20 of WO2016049230), AAVF2/HSC2 (SEQ ID NO: 3 and 21 of WO2016049230), AAVE3/HSC3 (SEQ ID NO: 5 and 22 of WO2016049230), AAVF4/HSC4 (SEQ ID NO: 6 and 23 of WO2016049230), AAVF5/HSC5 (SEQ ID NO: 11 and 25 of WO2016049230), AAVF6/HSC6 (SEQ ID NO: 7 and 24 of WO2016049230), AAVF7/HSC7 (SEQ ID NO: 8 and 27 of WO2016049230), AAVF8/HSC8 (SEQ ID NO: 9 and 28 of WO2016049230), AAVF9/HSC9 (SEQ ID NO: 10 and 29 of WO2016049230), AAVF11/HSC11 (SEQ ID NO: 4 and 26 of WO2016049230), AAVF12/HSC12 (SEQ ID NO: 12 and 30 of WO2016049230), AAVF13/HSC13 (SEQ ID NO: 14 and 31 of WO2016049230), AAVF14/HSC14 (SEQ ID NO: 15 and 32 of WO2016049230), AAVF15/HSC15 (SEQ ID NO: 16 and 33 of WO2016049230), AAVF16/HSC16 (SEQ ID NO: 17 and 34 of WO2016049230), AAVF17/HSC17 (SEQ ID NO: 13 and 35 of WO2016049230), or variants or derivatives thereof.

[0128] In some embodiments, the AAV serotype may be, or have, a sequence as described in U.S. Pat. No. 8,734,809, the contents of which are herein incorporated by reference in their entirety, such as, but not limited to, AAV CBr-E1 (SEQ ID NO: 13 and 87 of U.S. Pat. No. 8,734,809), AAV CBr-E2 (SEQ ID NO: 14 and 88 of U.S. Pat. No. 8,734,809), AAV CBr-E3 (SEQ ID NO: 15 and 89 of U.S. Pat. No. 8,734,809), AAV CBr-E4 (SEQ ID NO: 16 and 90 of U.S. Pat. No. 8,734,809), AAV CBr-E5 (SEQ ID NO: 17 and 91 of U.S. Pat. No. 8,734,809), AAV CBr-e5 (SEQ ID NO: 18 and 92 of U.S. Pat. No. 8,734,809), AAV CBr-E6 (SEQ ID NO: 19 and 93 of U.S. Pat. No. 8,734,809), AAV CBr-E7 (SEQ ID NO: 20 and 94 of U.S. Pat. No. 8,734,809), AAV CBr-E8 (SEQ ID NO: 21 and 95 of U.S. Pat. No. 8,734,809), AAV CLv-D1 (SEQ ID NO: 22 and 96 of U.S. Pat. No. 8,734,809), AAV CLv-D2 (SEQ NO: 23 and 97 of U.S. Pat. No. 8,734,809), AAV CLv-D3 (SEQ m NO: 24 and 98 of U.S. Pat. No. 8,734,809), AAV CLv-D4 (SEQ ID NO: 25 and 99 of U.S. Pat. No. 8,734,809), AAV CLv-D5 (SEQ ID NO: 26 and 100 of U.S. Pat. No. 8,734,809), AAV CLv-D6 (SEQ ID NO: 27 and 101 of U.S. Pat. No. 8,734,809), AAV CLv-D7 (SEQ ID NO: 28 and 102 of U.S. Pat. No. 8,734,809), AAV CLv-D8 (SEQ NO: 29 and 103 of U.S. Pat. No. 8,734,809), AAV CIN-E1 (SEQ NO: 13 and 87 of U.S. Pat. No. 8,734,809), AAV CLv-R1 (SEQ ID NO: 30 and 104 of U.S. Pat. No. 8,734,809), AAV CLv-R2 (SEQ ID NO: 31 and 105 of U.S. Pat. No. 8,734,809), AAV CLv-R3 (SEQ ID NO: 32 and 106 of U.S. Pat. No. 8,734,809), AAV CLv-R4 (SEQ ID NO: 33 and 107 of U.S. Pat. No. 8,734,809), AAV CLv-R5 (SEQ ID NO: 34 and 108 of U.S. Pat. No. 8,734,809), AAV CLv-R6 (SEQ m NO: 35 and 109 of U.S. Pat. No. 8,734,809), AAV CLv-R7 (SEQ ID NO: 36 and 110 of U.S. Pat. No. 8,734,809), AAV CLv-R8 (SEQ ID NO: 37 and 111 of U.S. Pat. No. 8,734,809), AAV CLv-R9 (SEQ ID NO: 38 and 112 of U.S. Pat. No. 8,734,809), AAV CLg-F1 (SEQ ID NO: 39 and 113 of U.S. Pat. No. 8,734,809), AAV CLg-F2 (SEQ ID NO: 40 and 114 of U.S. Pat. No. 8,734,809), AAV CLg-F3 (SEQ ID NO: 41 and 115 of U.S. Pat. No. 8,734,809), AAV CLg-F4 (SEQ m NO: 42 and 116 of U.S. Pat. No. 8,734,809), AAV CLg-F5 (SEQ ID NO: 43 and 117 of U.S. Pat. No. 8,734,809), AAV CLg-F6 (SEQ ID NO: 43 and 117 of U.S. Pat. No. 8,734,809), AAV Clg-F7 (SEQ ID NO: 44 and 118 of U.S. Pat. No. 8,734,809), AAV CLg-F8 (SEQ ID NO: 43 and 117 of U.S. Pat. No. 8,734,809), AAV CSp-1 (SEQ ID NO: 45 and 119 of U.S. Pat. No. 8,734,809), AAV CSp-10 (SEQ ID NO: 46 and 120 of U.S. Pat. No. 8,734,809), CSp-11 (SEQ ID NO: 47 and 121 of U.S. Pat. No. 8,734,809), AAV CSp-2 (SEQ ID NO: 48 and 122 of U.S. Pat. No. 8,734,809), AAV CSp-3 (SEQ ID NO: 49 and 123 of U.S. Pat. No. 8,734,809), AAV CSp-4 (SEQ ID NO: 50 and 124 of U.S. Pat. No. 8,734,809), AAV CSp-6 (SEQ ID NO: 51 and 125 of U.S. Pat. No. 8,734,809), AAV CSp-7 (SEQ ID NO: 52 and 126 of U.S. Pat. No. 8,734,809), AAV CSp-8 (SEQ ID NO: 53 and 127 of U.S. Pat. No. 8,734,809), AAV CSp-9 (SEQ ID NO: 54 and 128 of U.S. Pat. No. 8,734,809), AAV CHt-2 (SEQ ID NO: 55 and 129 of U.S. Pat. No. 8,734,809), AAV CHt-3 (SEQ ID NO: 56 and 130 of U.S. Pat. No. 8,734,809), AAV CKd-1 (SEQ m NO: 57 and 131 of U.S. Pat. No. 8,734,809), AAV CKd-10 (SEQ ID NO: 58 and 132 of U.S. Pat. No. 8,734,809), AAV CKd-2 (SEQ ID NO: 59 and 133 of U.S. Pat. No. 8,734,809), AAV CKd-3 (SEQ ID NO: 60 and 134 of U.S. Pat. No. 8,734,809), AAV CKd-4 (SEQ ID NO: 61 and 135 of U.S. Pat. No. 8,734,809), AAV CKd-6 (SEQ ID NO: 62 and 136 of U.S. Pat. No. 8,734,809), AAV CKd-7 (SEQ ID NO: 63 and 137 of U.S. Pat. No. 8,734,809), AAV CKd-8 (SEQ ID NO: 64 and 138 of U.S. Pat. No. 8,734,809), AAV CLv-1 (SEQ ID NO: 35 and 139 of U.S. Pat. No. 8,734,809), AAV CLv-12 (SEQ ID NO: 66 and 140 of U.S. Pat. No. 8,734,809), AAV CLv-13 (SEQ ID NO: 67 and 141 of U.S. Pat. No. 8,734,809), AAV CLv-2 (SEQ ID NO: 68 and 142 of U.S. Pat. No. 8,734,809), AAV CLbv-3 (SEQ ID NO: 69 and 143 of U.S. Pat. No. 8,734,809), AAV (SEQ ID NO: 70 and 144 of U.S. Pat. No. 8,734,809), AAV CLv-6 (SEQ ID NO: 71 and 145 of U.S. Pat. No. 8,734,809), AAV CLv-8 (SEQ ID NO: 72 and 146 of U.S. Pat. No. 8,734,809), AAV CKd-B1 (SEQ ID NO: 73 and 147 of U.S. Pat. No. 8,734,809), AAV CKd-B2 (SEQ ID NO: 74 and 148 of U.S. Pat. No. 8,734,809), AAV CKd-B3 (SEQ ID NO: 75 and 149 of U.S. Pat. No. 8,734,809), AAV CKd-B4 (SEQ ID NO: 76 and 150 of U.S. Pat. No. 8,734,809), AAV CKd-B5 (SEQ NO: 77 and 151 of U.S. Pat. No. 8,734,809), AAV CKd-B6 (SEQ ID NO: 78 and 152 of U.S. Pat. No. 8,734,809), AAV CKd-B7 (SEQ ID NO: 79 and 153 of U.S. Pat. No. 8,734,809), AAV CKd-B8 (SEQ ID NO: 80 and 154 of U.S. Pat. No. 8,734,809), AAV CKd-H1 (SEQ ID NO: 81 and 155 of U.S. Pat. No. 8,734,809), AAV CKd-H2 (SEQ ID NO: 82 and 156 of U.S. Pat. No. 8,734,809), AAV CKd-H3 (SEQ ID NO: 83 and 157 of U.S. Pat. No. 8,734,809), AAV CKd-H4 (SEQ ID NO: 84 and 158 of 1358,734,809), AAV CKd-H5 (SEQ ID NO: 85 and 159 of U.S. Pat. No. 8,734,809), AAV CKd-H6 (SEQ ID NO: 77 and 151 of U.S. Pat. No. 8,734,809), AAV CHt-1 (SEQ ID NO: 86 and 160 of U.S. Pat. No. 8,734,809)-NAV (SEQ ID NO: 171 of U.S. Pat. No. 8,734,809), AAV CLv1-2 (SEQ ID NO: 172 of U.S. Pat. No. 8,734,809), AAV CLv1-3 (SEQ ID NO: 173 of U.S. Pat. No. 8,734,809), AAV CLv1-4 (SEQ ID NO: 174 of U.S. Pat. No. 8,734,809), AAV Clv1-7 (SEQ ID NO: 175 of U.S. Pat. No. 8,734,809), AAV Clv1-8 (SEQ ID NO: 176 of U.S. Pat. No. 8,734,809), AAV Clv1-9 (SEQ ID NO: 177 of U.S. Pat. No. 8,734,809), AAV Clv1-10 (SEQ ID NO: 178 of U.S. Pat. No. 8,734,809), AAV.VR-355 (SEQ ID NO: 181 of U.S. Pat. No. 8,734,809). AAV.hu.48R3 (SEQ ID NO: 183 of U.S. Pat. No. 8,734,809), or variants or derivatives thereof.

[0129] In some embodiments, the AAV serotype may he, or have, a sequence as described in International Publication No. WO2016065001, the contents of which are herein incorporated by reference in their entirety, such as, but not limited to AAV CHt-P2 (SEQ ID NO: 1 and 51 of WO2016065001), AAV CHt-P5 (SEQ ID NO: 2 and 52 of WO2016065001), AAV CHt-P9 (SEQ ID NO: 3 and 53 of WO2016065001). AAV CBr-7.1 (SEQ ID NO: 4 and 54 of WO2016065001), AAV CBr-7.2 (SEQ ID NO: 5 and 55 of WO2016065001), AAV CBr-7.3 (SEQ ID NO: 6 and 56 of WO2016065001), AAV CBr-7.4 (SEQ ID NO: 7 and 57 of WO2016065001), AAV CBr-7.5 (SEQ ID NO: 8 and 58 of WO2016065001), AAV CBr-7.7 (SEQ ID NO: 9 and 59 of WO2016065001), AAV CBr-7.8 (SEQ ID NO: 10 and 60 of WO2016065001 AAV CBr-7.10 (SEQ ID NO: 11 and 61 of WO2016065001), AAV CKd-N3 (SEQ ID NO: 12 and 62 of WO2016065001), AAV CKd-N4 (SEQ m NO: 13 and 63 of WO2016065001), AAV CKd-N9 (SEQ ID NO: 14 and 64 of WO2016065001), AAV CLv-L4 (SEQ ID NO: 15 and 65 of WO2016065001), AAV (SEQ ID NO: 16 and 66 of WO2016065001), AAV CLv-L6 (SEQ ID NO: 17 and 67 of WO2016065001)-NAV CLv-K1 (SEQ ID NO: 18 and 68 of WO2016065001), AAV CLv-K3 (SEQ ID NO: 19 and 69 of WO2016065001), AAV CLv-K6 (SEQ ID NO: 20 and 70 of WO201.606500 AAV CLv-M1 (SEQ ID NO: 21 and 71 of WO2016065001), AAV CLv-M11 (SEQ ID NO: 22 and 72 of WO2016065001), AAV CLv-M2 (SEQ ID NO: 23 and 73 of WO2016065001), AAV CLv-M5 (SEQ ID NO: 24 and 74 of WO2016065001), AAV CLv-M6 (SEQ ID NO: 25 and 75 of WO2016065001), AAV CLv-M7 (SEQ ID NO: 26 and 76 of WO2016065001), AAV CL M8 (SEQ ID NO: 27 and 77 of WO2016065001), AAV CLv-M9 (SEQ ID NO: 28 and 78 of WO2016065001), AAV CHt-P1 (SEQ ID NO: 29 and 79 of WO2016065001), AAV CHt-P6 (SEQ ID NO: 30 and 80 of WO2016065001), AAV CHt-P8 (SEQ ID NO: 31 and 81 of WO2016065001), AAV CHt-6.1 (SEQ ID NO: 32 and 82 of WO2016065001), AAV CHt-6.10 (SEQ ID NO: 33 and 83 of WO2016065001), AAV CHt-6.5 (SEQ ID NO: 34 and 84 of WO2016065001), AAV CHt-6.6 (SEQ ID NO: 35 and 85 of WO2016065001), AAV CHt-6.7 (SEQ ID NO: 36 and 86 of WO2016065001), AAV CHt-6.8 (SEQ ID NO: 37 and 87 of WO2016065001), AAV CSp-8.10 (SEQ ID NO: 38 and 88 of WO2016065001), AAV CSp-8.2 (SEQ ID NO: 39 and 89 of WO2016065001), AAV CSp-8.4 (SEQ ID NO: 40 and 90 of WO2016065001), AAV CSp-8.5 (SEQ ID NO: 41 and 91 of WO2016065001), AAV CSp-8.6 (SEQ ID NO: 42 and 92 of WO2016065001), AAV CSp-8.7 (SEQ ID NO: 43 and 93 of WO2016065001), AAV CSp-8.8 (SEQ ID NO: 44 and 94 of WO2016065001), AAV CSp-8.9 (SEQ ID NO: 45 and 95 of WO2016065001), AAV CBr-B7.3 (SEQ ID NO: 46 and 96 of WO2016065001), AAV CBr-B7.4 (SEQ ID NO: 47 and 97 of WO2016065001), AAV3B (SEQ ID NO: 48 and 98 of WO2016065001), AAV4 (SEQ ID NO: 49 and 99 of WO2016065001), AAV5 (SEQ ID NO: 50 and 100 of WO2016065001), or variants or derivatives thereof.

[0130] In some embodiments, the AAV may be a serotype selected from any of those found in Table 1.

[0131] In some embodiments, the AAV may comprise a sequence, fragment or variant thereof, of the sequences in Table 1.

[0132] In some embodiments, the AAV may be encoded by a sequence, fragment or variant as described in Table 1.

TABLE 1
AAV Serotypes

| | SEQ | |
|---|---|---|
| Serotype | ID NO | Reference Information |
| AAV1 | 1 | US20150159173 SEQ ID NO: 11, |
| | | US20150315612 SEQ ID NO: 202 |
| AAV1 | 2 | US20160017295 SEQ ID NO: 1 |
| | | US20030138772 SEQ ID NO: 64, |
| | | US20150159173 SEQ ID NO: 27, |
| | | US20150315612 SEQ ID NO: 219, |
| | | U.S. Pat. No. 7,198,951 SEQ ID NO: 5 |
| AAV1 | 3 | US20030138772 SEQ ID NO: 6 |
| AAV1.3 | 4 | US20030138772 SEQ ID NO: 14 |
| AAV10 | 5 | US20030138772 SEQ ID NO: 117 |
| AAV10 | 6 | WO2015121501 SEQ ID NO: 9 |
| AAV10 | 7 | WO2015121501 SEQ ID NO: 8 |
| AAV11 | 8 | US20030138772 SEQ ID NO: 118 |
| AAV12 | 9 | US20030138772 SEQ ID NO: 119 |
| AAV2 | 10 | US20150159173 SEQ ID NO: 7, |
| | | US20150315612 SEQ ID NO: 211 |
| AAV2 | 11 | US20030138772 SEQ ID NO: 70, |
| | | US20150159173 SEQ ID NO: 23, |
| | | US20150315612 SEQ ID NO: 221, |
| | | US20160017295 SEQ ID NO: 2, |
| | | U.S. Pat. No. 6,156,303 SEQ ID NO: 4, |
| | | U.S. Pat. No. 7,198,951 SEQ ID NO: 4, |
| | | WO2015121501 SEQ ID NO: 1 |
| AAV2 | 12 | U.S. Pat. No. 6,156,303 SEQ ID NO: 8 |
| AAV2 | 13 | US20030138772 SEQ ID NO: 7 |
| AAV2 | 14 | U.S. Pat. No. 6,156,303 SEQ ID NO: 3 |
| AAV2.5T | 15 | U.S. Pat. No. 9,233,131 SEQ ID NO: 42 |
| AAV223.10 | 16 | US20030138772 SEQ ID NO: 75 |
| AAV223.2 | 17 | US20030138772 SEQ ID NO: 49 |
| AAV223.2 | 18 | US20030138772 SEQ ID NO: 76 |
| AAV223.4 | 19 | US20030138772 SEQ ID NO: 50 |
| AAV223.4 | 20 | US20030138772 SEQ ID NO: 73 |
| AAV223.5 | 21 | US20030138772 SEQ ID NO: 51 |
| AAV223.5 | 22 | US20030138772 SEQ ID NO: 74 |
| AAV223.6 | 23 | US20030138772 SEQ ID NO: 52 |
| AAV223.6 | 24 | US20030138772 SEQ ID NO: 78 |
| AAV223.7 | 25 | US20030138772 SEQ ID NO: 53 |
| AAV223.7 | 26 | US20030138772 SEQ ID NO: 77 |
| AAV29.3 | 27 | US20030138772 SEQ ID NO: 82 |
| AAV29.4 | 28 | US20030138772 SEQ ID NO: 12 |
| AAV29.5 | 29 | US20030138772 SEQ ID NO: 83 |
| AAV29.5 | 30 | US20030138772 SEQ ID NO: 13 |
| (AAVbb.2) | | |
| AAV3 | 31 | US20150159173 SEQ ID NO: 12 |
| AAV3 | 32 | US20030138772 SEQ ID NO: 71, |
| | | US20150159173 SEQ ID NO: 28, |
| | | US20160017295 SEQ ID NO: 3, |
| | | U.S. Pat. No. 7,198,951 SEQ ID NO: 6 |
| AAV3 | 33 | US20030138772 SEQ ID NO: 8 |
| AAV3.3b | 34 | US20030138772 SEQ ID NO: 72 |
| AAV3-3 | 35 | US20150315612 SEQ ID NO: 200 |
| AAV3-3 | 36 | US20150315612 SEQ ID NO: 217 |
| AAV3a | 37 | U.S. Pat. No. 6,156,303 SEQ ID NO: 5 |
| AAV3a | 38 | U.S. Pat. No. 6,156,303 SEQ ID NO: 9 |
| AAV3b | 39 | U.S. Pat. No. 6,156,303 SEQ ID NO: 6 |
| AAV3b | 40 | U.S. Pat. No. 6,156,303 SEQ ID NO: 10 |
| AAV3b | 41 | U.S. Pat. No. 6,156,303 SEQ ID NO: 1 |
| AAV4 | 42 | US20140348794 SEQ ID NO: 17 |
| AAV4 | 43 | US20140348794 SEQ ID NO: 5 |
| AAV4 | 44 | US20140348794 SEQ ID NO: 3 |
| AAV4 | 45 | US20140348794 SEQ ID NO: 14 |
| AAV4 | 46 | US20140348794 SEQ ID NO: 15 |
| AAV4 | 47 | US20140348794 SEQ ID NO: 19 |
| AAV4 | 48 | US20140348794 SEQ ID NO: 12 |
| AAV4 | 49 | US20140348794 SEQ ID NO: 13 |
| AAV4 | 50 | US20140348794 SEQ ID NO: 7 |
| AAV4 | 51 | US20140348794 SEQ ID NO: 8 |
| AAV4 | 52 | US20140348794 SEQ ID NO: 9 |
| AAV4 | 53 | US20140348794 SEQ ID NO: 2 |
| AAV4 | 54 | US20140348794 SEQ ID NO: 10 |
| AAV4 | 55 | US20140348794 SEQ ID NO: 11 |
| AAV4 | 56 | US20140348794 SEQ ID NO: 18 |
| AAV4 | 57 | US20030138772 SEQ ID NO: 63, |
| | | US20160017295 SEQ ID NO: 4, |
| | | US20140348794 SEQ ID NO: 4 |
| AAV4 | 58 | US20140348794 SEQ ID NO: 16 |
| AAV4 | 59 | US20140348794 SEQ ID NO: 20 |
| AAV4 | 60 | US20140348794 SEQ ID NO: 6 |
| AAV4 | 61 | US20140348794 SEQ ID NO: 1 |
| AAV42.2 | 62 | US20030138772 SEQ ID NO: 9 |
| AAV42.2 | 63 | US20030138772 SEQ ID NO: 102 |
| AAV42.3b | 64 | US20030138772 SEQ ID NO: 36 |
| AAV42.3B | 65 | US20030138772 SEQ ID NO: 107 |
| AAV42.4 | 66 | US20030138772 SEQ ID NO: 33 |
| AAV42.4 | 67 | US20030138772 SEQ ID NO: 88 |
| AAV42.8 | 68 | US20030138772 SEQ ID NO: 27 |
| AAV42.8 | 69 | US20030138772 SEQ ID NO: 85 |
| AAV43.1 | 70 | US20030138772 SEQ ID NO: 39 |
| AAV43.1 | 71 | US20030138772 SEQ ID NO: 92 |
| AAV43.12 | 72 | US20030138772 SEQ ID NO: 41 |
| AAV43.12 | 73 | US20030138772 SEQ ID NO: 93 |
| AAV43.20 | 74 | US20030138772 SEQ ID NO: 42 |
| AAV43.20 | 75 | US20030138772 SEQ ID NO: 99 |
| AAV43.21 | 76 | US20030138772 SEQ ID NO: 43 |
| AAV43.21 | 77 | US20030138772 SEQ ID NO: 96 |
| AAV43.23 | 78 | US20030138772 SEQ ID NO: 44 |
| AAV43.23 | 79 | US20030138772 SEQ ID NO: 98 |
| AAV43.25 | 80 | US20030138772 SEQ ID NO: 45 |
| AAV43.25 | 81 | US20030138772 SEQ ID NO: 97 |
| AAV43.5 | 82 | US20030138772 SEQ ID NO: 40 |
| AAV43.5 | 83 | US20030138772 SEQ ID NO: 94 |
| AAV4-4 | 84 | US20150315612 SEQ ID NO: 201 |
| AAV4-4 | 85 | US20150315612 SEQ ID NO: 218 |
| AAV44.1 | 86 | US20030138772 SEQ ID NO: 46 |
| AAV44.1 | 87 | US20030138772 SEQ ID NO: 79 |
| AAV44.5 | 88 | US20030138772 SEQ ID NO: 47 |
| AAV44.5 | 89 | US20030138772 SEQ ID NO: 80 |
| AAV4407 | 90 | US20150315612 SEQ ID NO: 90 |
| AAV5 | 91 | U.S. Pat. No. 7,427,396 SEQ ID NO: 1 |
| AAV5 | 92 | US20030138772 SEQ ID NO: 114 |
| AAV5 | 93 | US20160017295 SEQ ID NO: 5, |
| | | U.S. Pat. No. 7,427,396 SEQ ID NO: 2, |
| | | US20150315612 SEQ ID NO: 216 |
| AAV5 | 94 | US20150315612 SEQ ID NO: 199 |
| AAV6 | 95 | US20150159173 SEQ ID NO: 13 |
| AAV6 | 96 | US20030138772 SEQ ID NO: 65, |
| | | US20150159173 SEQ ID NO: 29, |
| | | US20160017295 SEQ ID NO: 6, |
| | | U.S. Pat. No. 6,156,303 SEQ ID NO: 7 |
| AAV6 | 97 | U.S. Pat. No. 6,156,303 SEQ ID NO: 11 |
| AAV6 | 98 | U.S. Pat. No. 6,156,303 SEQ ID NO: 2 |
| AAV6 | 99 | US20150315612 SEQ ID NO: 203 |
| AAV6 | 100 | US20150315612 SEQ ID NO: 220 |
| AAV6.1 | 101 | US20150159173 |
| AAV6.12 | 102 | US20150159173 |
| AAV6.2 | 103 | US20150159173 |
| AAV7 | 104 | US20150159173 SEQ ID NO: 14 |
| AAV7 | 105 | US20150315612 SEQ ID NO: 183 |
| AAV7 | 106 | US20030138772 SEQ ID NO: 2, |
| | | US20150159173 SEQ ID NO: 30, |
| | | US20150315612 SEQ ID NO: 181, |
| | | US20160017295 SEQ ID NO: 7 |
| AAV7 | 107 | US20030138772 SEQ ID NO: 3 |
| AAV7 | 108 | US20030138772 SEQ ID NO: 1, |
| | | US20150315612 SEQ ID NO: 180 |
| AAV7 | 109 | US20150315612 SEQ ID NO: 213 |
| AAV7 | 110 | US20150315612 SEQ ID NO: 222 |
| AAV8 | 111 | US20150159173 SEQ ID NO: 15 |
| AAV8 | 112 | US20150376240 SEQ ID NO: 7 |
| AAV8 | 113 | US20030138772 SEQ ID NO: 4, |
| | | US20150315612 SEQ ID NO: 182 |
| AAV8 | 114 | US20030138772 SEQ ID NO: 95, |
| | | US20140359799 SEQ ID NO: 1, |
| | | US20150159173 SEQ ID NO: 31, |
| | | US20160017295 SEQ ID NO: 8, |
| | | U.S. Pat. No. 7,198,951 SEQ ID NO: 7, |
| | | US20150315612 SEQ ID NO: 223 |
| AAV8 | 115 | US20150376240 SEQ ID NO: 8 |
| AAV8 | 116 | US20150315612 SEQ ID NO: 214 |
| AAV-8b | 117 | US20150376240 SEQ ID NO: 5 |
| AAV-8b | 118 | US20150376240 SEQ ID NO: 3 |
| AAV-8h | 119 | US20150376240 SEQ ID NO: 6 |
| AAV-8h | 120 | US20150376240 SEQ ID NO: 4 |
| AAV9 | 121 | US20030138772 SEQ ID NO: 5 |
| AAV9 | 122 | U.S. Pat. No. 7,198,951 SEQ ID NO: 1 |
| AAV9 | 123 | US20160017295 SEQ ID NO: 9 |
| AAV9 | 124 | US20030138772 SEQ ID NO: 100, |
| | | U.S. Pat. No. 7,198,951 SEQ ID NO: 2 |
| AAV9 | 125 | U.S. Pat. No. 7,198,951 SEQ ID NO: 3 |
| AAV9 | 126 | U.S. Pat. No. 7,906,111 SEQ ID NO: 3; |
| (AAVhu.14) | | WO2015038958 SEQ ID NO: 11 |
| AAV9 | 127 | U.S. Pat. No. 7,906,111 SEQ ID NO: 123; |
| (AAVhu.14) | | WO2015038958 SEQ ID NO: 2 |
| AAVA3.1 | 128 | US20030138772 SEQ ID NO: 120 |
| AAVA3.3 | 129 | US20030138772 SEQ ID NO: 57 |
| AAVA3.3 | 130 | US20030138772 SEQ ID NO: 66 |
| AAVA3.4 | 131 | US20030138772 SEQ ID NO: 54 |
| AAVA3.4 | 132 | US20030138772 SEQ ID NO: 68 |
| AAVA3.5 | 133 | US20030138772 SEQ ID NO: 55 |
| AAVA3.5 | 134 | US20030138772 SEQ ID NO: 69 |
| AAVA3.7 | 135 | US20030138772 SEQ ID NO: 56 |
| AAVA3.7 | 136 | US20030138772 SEQ ID NO: 67 |
| AAV29.3 | 137 | US20030138772 SEQ ID NO: 11 |
| (AAVbb.1) | | |
| AAVC2 | 138 | US20030138772 SEQ ID NO: 61 |
| AAV Ch.5 | 139 | US20150159173 SEQ ID NO: 46, |
| | | US20150315612 SEQ ID NO: 234 |
| AAVcy.2 | 140 | US20030138772 SEQ ID NO: 15 |
| (AAV13.3) | | |
| AAV24.1 | 141 | US20030138772 SEQ ID NO: 101 |
| AAVcy.3 | 142 | US20030138772 SEQ ID NO: 16 |
| (AAV24.1) | | |
| AAV27.3 | 143 | US20030138772 SEQ ID NO: 104 |
| AAVcy.4 | 144 | US20030138772 SEQ ID NO: 17 |
| (AAV27.3) | | |
| AAVcy.5 | 145 | US20150315612 SEQ ID NO: 227 |
| AAV7.2 | 146 | US20030138772 SEQ ID NO: 103 |
| AAVcy.5 | 147 | US20030138772 SEQ ID NO: 18 |
| (AAV7.2) | | |
| AAV16.3 | 148 | US20030138772 SEQ ID NO: 105 |
| AAVcy.6 | 149 | US20030138772 SEQ ID NO: 10 |
| (AAV16.3) | | |
| AAVcy.5 | 150 | US20150159173 SEQ ID NO: 8 |
| AAVcy.5 | 151 | US20150159173 SEQ ID NO: 24 |
| AAVCy.5R1 | 152 | US20150159173 |
| AAVCy.5R2 | 153 | US20150159173 |
| AAVCy.5R3 | 154 | US20150159173 |
| AAVCy.5R4 | 155 | US20150159173 |
| AAVDJ | 156 | US20140359799 SEQ ID NO: 3, |
| | | U.S. Pat. No. 7,588,772 SEQ ID NO: 2 |
| AAVDJ | 157 | US20140359799 SEQ ID NO: 2, |
| | | U.S. Pat. No. 7,588,772 SEQ ID NO: 1 |
| AAVDJ-8 | 158 | U.S. Pat. No. 7,588,772; Grimm et al |
| | | 2008 |
| AAVDJ-8 | 159 | U.S. Pat. No. 7,588,772; Grimm et al |
| | | 2008 |
| AAVF5 | 160 | US20030138772 SEQ ID NO: 110 |
| AAVH2 | 161 | US20030138772 SEQ ID NO: 26 |
| AAVH6 | 162 | US20030138772 SEQ ID NO: 25 |
| AAVhE1.1 | 163 | U.S. Pat. No. 9,233,131 SEQ ID NO: 44 |
| AAVhEr1.14 | 164 | U.S. Pat. No. 9,233,131 SEQ ID NO: 46 |
| AAVhEr1.16 | 165 | U.S. Pat. No. 9,233,131 SEQ ID NO: 48 |
| AAVhEr1.18 | 166 | U.S. Pat. No. 9,233,131 SEQ ID NO: 49 |
| AAVhEr1.23 | 167 | U.S. Pat. No. 9,233,131 SEQ ID NO: 53 |
| (AAVhEr2.29) | | |
| AAVhEr1.35 | 168 | U.S. Pat. No. 9,233,131 SEQ ID NO: 50 |
| AAVhEr1.36 | 169 | U.S. Pat. No. 9,233,131 SEQ ID NO: 52 |
| AAVhEr1.5 | 170 | U.S. Pat. No. 9,233,131 SEQ ID NO: 45 |
| AAVhEr1.7 | 171 | U.S. Pat. No. 9,233,131 SEQ ID NO: 51 |
| AAVhEr1.8 | 172 | U.S. Pat. No. 9,233,131 SEQ ID NO: 47 |
| AAVhEr2.16 | 173 | U.S. Pat. No. 9,233,131 SEQ ID NO: 55 |
| AAVhEr2.30 | 174 | U.S. Pat. No. 9,233,131 SEQ ID NO: 56 |
| AAVhEr2.31 | 175 | U.S. Pat. No. 9,233,131 SEQ ID NO: 58 |
| AAVhEr2.36 | 176 | U.S. Pat. No. 9,233,131 SEQ ID NO: 57 |
| AAVhEr2.4 | 177 | U.S. Pat. No. 9,233,131 SEQ ID NO: 54 |
| AAVhEr3.1 | 178 | U.S. Pat. No. 9,233,131 SEQ ID NO: 59 |
| AAVhu.1 | 179 | US20150315612 SEQ ID NO: 46 |
| AAVhu.1 | 180 | US20150315612 SEQ ID NO: 144 |
| AAVhu.10 | 181 | US20150315612 SEQ ID NO: 56 |
| (AAV16.8) | | |
| AAVhu.10 | 182 | US20150315612 SEQ ID NO: 156 |
| (AAV16.8) | | |
| AAVhu.11 | 183 | US20150315612 SEQ ID NO: 57 |
| (AAV16.12) | | |
| AAVhu.11 | 184 | US20150315612 SEQ ID NO: 153 |
| (AAV16.12) | | |
| AAVhu.12 | 185 | US20150315612 SEQ ID NO: 59 |
| AAVhu.12 | 186 | US20150315612 SEQ ID NO: 154 |
| AAVhu.13 | 187 | US20150159173 SEQ ID NO: 16, |
| | | US20150315612 SEQ ID NO: 71 |
| AAVhu.13 | 188 | US20150159173 SEQ ID NO: 32, |
| | | US20150315612 SEQ ID NO: 129 |
| AAVhu.136.1 | 189 | US20150315612 SEQ ID NO: 165 |
| AAVhu.140.1 | 190 | US20150315612 SEQ ID NO: 166 |
| AAVhu.140.2 | 191 | US20150315612 SEQ ID NO: 167 |
| AAVhu.145.6 | 192 | US20150315612 SEQ ID No: 178 |
| AAVhu.15 | 193 | US20150315612 SEQ ID NO: 147 |
| AAVhu.15 | 194 | US20150315612 SEQ ID NO: 50 |
| (AAV33.4) | | |
| AAVhu.156.1 | 195 | US20150315612 SEQ ID No: 179 |
| AAVhu.16 | 196 | US20150315612 SEQ ID NO: 148 |
| AAVhu.16 | 197 | US20150315612 SEQ ID NO: 51 |
| (AAV33.8) | | |
| AAVhu.17 | 198 | US20150315612 SEQ ID NO: 83 |
| AAVhu.17 | 199 | US20150315612 SEQ ID NO: 4 |
| (AAV33.12) | | |
| AAVhu.172.1 | 200 | US20150315612 SEQ ID NO: 171 |
| AAVhu.172.2 | 201 | US20150315612 SEQ ID NO: 172 |
| AAVhu.173.4 | 202 | US20150315612 SEQ ID NO: 173 |
| AAVhu.173.8 | 203 | US20150315612 SEQ ID NO: 175 |
| AAVhu.18 | 204 | US20150315612 SEQ ID NO: 52 |
| AAVhu.18 | 205 | US20150315612 SEQ ID NO: 149 |
| AAVhu.19 | 206 | US20150315612 SEQ ID NO: 62 |
| AAVhu.19 | 207 | US20150315612 SEQ ID NO: 133 |
| AAVhu.2 | 208 | US20150315612 SEQ ID NO: 48 |
| AAVhu.2 | 209 | US20150315612 SEQ ID NO: 143 |
| AAVhu.20 | 210 | US20150315612 SEQ ID NO: 63 |
| AAVhu.20 | 211 | US20150315612 SEQ ID NO: 134 |
| AAVhu.21 | 212 | US20150315612 SEQ ID NO: 65 |
| AAVhu.21 | 213 | US20150315612 SEQ ID NO: 135 |
| AAVhu.22 | 214 | US20150315612 SEQ ID NO: 67 |
| AAVhu.22 | 215 | US20150315612 SEQ ID NO: 138 |
| AAVhu.23 | 216 | US20150315612 SEQ ID NO: 60 |
| AAVhu.23.2 | 217 | US20150315612 SEQ ID NO: 137 |
| AAVhu.24 | 218 | US20150315612 SEQ ID NO: 66 |
| AAVhu.24 | 219 | US20150315612 SEQ ID NO: 136 |
| AAVhu.25 | 220 | US20150315612 SEQ ID NO: 49 |
| AAVhu.25 | 221 | US20150315612 SEQ ID NO: 146 |
| AAVhu.26 | 222 | US20150159173 SEQ ID NO: 17, |
| | | US20150315612 SEQ ID NO: 61 |
| AAVhu.26 | 223 | US20150159173 SEQ ID NO: 33, |
| | | US20150315612 SEQ ID NO: 139 |
| AAVhu.27 | 224 | US20150315612 SEQ ID NO: 64 |
| AAVhu.27 | 225 | US20150315612 SEQ ID NO: 140 |
| AAVhu.28 | 226 | US20150315612 SEQ ID NO: 68 |
| AAVhu.28 | 227 | US20150315612 SEQ ID NO: 130 |
| AAVhu.29 | 228 | US20150315612 SEQ ID NO: 69 |
| AAVhu.29 | 229 | US20150159173 SEQ ID NO: 42, |
| | | US20150315612 SEQ ID NO: 132 |
| AAVhu.29 | 230 | US20150315612 SEQ ID NO: 225 |
| AAVhu.29R | 231 | US20150159173 |
| AAVhu.3 | 232 | US20150315612 SEQ ID NO: 44 |
| AAVhu.3 | 233 | US20150315612 SEQ ID NO: 145 |
| AAVhu.30 | 234 | US20150315612 SEQ ID NO: 70 |
| AAVhu.30 | 235 | US20150315612 SEQ ID NO: 131 |
| AAVhu.31 | 236 | US20150315612 SEQ ID NO: 1 |
| AAVhu.31 | 237 | US20150315612 SEQ ID NO: 121 |
| AAVhu.32 | 238 | US20150315612 SEQ ID NO: 2 |
| AAVhu.32 | 239 | US20150315612 SEQ ID NO: 122 |
| AAVhu.33 | 240 | US20150315612 SEQ ID NO: 75 |
| AAVhu.33 | 241 | US20150315612 SEQ ID NO: 124 |
| AAVhu.34 | 242 | US20150315612 SEQ ID NO: 72 |
| AAVhu.34 | 243 | US20150315612 SEQ ID NO: 125 |
| AAVhu.35 | 244 | US20150315612 SEQ ID NO: 73 |
| AAVhu.35 | 245 | US20150315612 SEQ ID NO: 164 |
| AAVhu.36 | 246 | US20150315612 SEQ ID NO: 74 |
| AAVhu.36 | 247 | US20150315612 SEQ ID NO: 126 |
| AAVhu.37 | 248 | US20150159173 SEQ ID NO: 34, |
| | | US20150315612 SEQ ID NO: 88 |
| AAVhu.37 | 249 | US20150315612 SEQ ID NO: 10, |
| (AAV106.1) | | US20150159173 SEQ ID NO: 18 |
| AAVhu.38 | 250 | US20150315612 SEQ ID NO: 161 |
| AAVhu.39 | 251 | US20150315612 SEQ ID NO: 102 |
| AAVhu.39 | 252 | US20150315612 SEQ ID NO: 24 |
| (AAVLG-9) | | |
| AAVhu.4 | 253 | US20150315612 SEQ ID NO: 47 |
| AAVhu.4 | 254 | US20150315612 SEQ ID NO: 141 |
| AAVhu.40 | 255 | US20150315612 SEQ ID NO: 87 |
| AAVhu.40 | 256 | US20150315612 SEQ ID No: 11 |
| (AAV114.3) | | |
| AAVhu.41 | 257 | US20150315612 SEQ ID NO: 91 |
| AAVhu.41 | 258 | US20150315612 SEQ ID NO: 6 |
| (AAV127.2) | | |
| AAVhu.42 | 259 | US20150315612 SEQ ID NO: 85 |
| AAVhu.42 | 260 | US20150315612 SEQ ID NO: 8 |
| (AAV127.5) | | |
| AAVhu.43 | 261 | US20150315612 SEQ ID NO: 160 |
| AAVhu.43 | 262 | US20150315612 SEQ ID NO: 236 |
| AAVhu.43 | 263 | US20150315612 SEQ ID NO: 80 |
| (AAV128.1) | | |
| AAVhu.44 | 264 | US20150159173 SEQ ID NO: 45, |
| | | US20150315612 SEQ ID NO: 158 |
| AAVhu.44 | 265 | US20150315612 SEQ ID NO: 81 |
| (AAV128.3) | | |
| AAVhu.44R1 | 266 | US20150159173 |
| AAVhu.44R2 | 267 | US20150159173 |
| AAVhu.44R3 | 268 | US20150159173 |
| AAVhu.45 | 269 | US20150315612 SEQ ID NO: 76 |
| AAVhu.45 | 270 | US20150315612 SEQ ID NO: 127 |
| AAVhu.46 | 271 | US20150315612 SEQ ID NO: 82 |
| AAVhu.46 | 272 | US20150315612 SEQ ID NO: 159 |
| AAVhu.46 | 273 | US20150315612 SEQ ID NO: 224 |
| AAVhu.47 | 274 | US20150315612 SEQ ID NO: 77 |
| AAVhu.47 | 275 | US20150315612 SEQ ID NO: 128 |
| AAVhu.48 | 276 | US20150159173 SEQ ID NO: 38 |
| AAVhu.48 | 277 | US20150315612 SEQ ID NO: 157 |
| AAVhu.48 | 278 | US20150315612 SEQ ID NO: 78 |
| (AAV130.4) | | |
| AAVhu.48R1 | 279 | US20150159173 |
| AAVhu.48R2 | 280 | US20150159173 |
| AAVhu.48R3 | 281 | US20150159173 |
| AAVhu.49 | 282 | US20150315612 SEQ ID NO: 209 |
| AAVhu.49 | 283 | US20150315612 SEQ ID NO: 189 |
| AAVhu.5 | 284 | US20150315612 SEQ ID NO: 45 |
| AAVhu.5 | 285 | US20150315612 SEQ ID NO: 142 |
| AAVhu.51 | 286 | US20150315612 SEQ ID NO: 208 |
| AAVhu.51 | 287 | US20150315612 SEQ ID NO: 190 |
| AAVhu.52 | 288 | US20150315612 SEQ ID NO: 210 |
| AAVhu.52 | 289 | US20150315612 SEQ ID NO: 191 |
| AAVhu.53 | 290 | US20150159173 SEQ ID NO: 19 |
| AAVhu.53 | 291 | US20150159173 SEQ ID NO: 35 |
| AAVhu.53 | 292 | US20150315612 SEQ ID NO: 176 |
| (AAV145.1) | | |
| AAVhu.54 | 293 | US20150315612 SEQ ID NO: 188 |
| AAVhu.54 | 294 | US20150315612 SEQ ID No: 177 |
| (AAV145.5) | | |
| AAVhu.55 | 295 | US20150315612 SEQ ID NO: 187 |
| AAVhu.56 | 296 | US20150315612 SEQ ID NO: 205 |
| AAVhu.56 | 297 | US20150315612 SEQ ID NO: 168 |
| (AAV145.6) | | |
| AAVhu.56 | 298 | US20150315612 SEQ ID NO: 192 |
| (AAV145.6) | | |
| AAVhu.57 | 299 | US20150315612 SEQ ID NO: 206 |
| AAVhu.57 | 300 | US20150315612 SEQ ID NO: 169 |
| AAVhu.57 | 301 | US20150315612 SEQ ID NO: 193 |
| AAVhu.58 | 302 | US20150315612 SEQ ID NO: 207 |
| AAVhu.58 | 303 | US20150315612 SEQ ID NO: 194 |
| AAVhu.6 | 304 | US20150315612 SEQ ID NO: 5 |
| (AAV3.1) | | |
| AAVhu.6 | 305 | US20150315612 SEQ ID NO: 84 |
| (AAV3.1) | | |
| AAVhu.60 | 306 | US20150315612 SEQ ID NO: 184 |
| AAVhu.60 | 307 | US20150315612 SEQ ID NO: 170 |
| (AAV161.10) | | |
| AAVhu.61 | 308 | US20150315612 SEQ ID NO: 185 |
| AAVhu.61 | 309 | US20150315612 SEQ ID NO: 174 |
| (AAV161.6) | | |
| AAVhu.63 | 310 | US20150315612 SEQ ID NO: 204 |
| AAVhu.63 | 311 | US20150315612 SEQ ID NO: 195 |
| AAVhu.64 | 312 | US20150315612 SEQ ID NO: 212 |
| AAVhu.64 | 313 | US20150315612 SEQ ID NO: 196 |
| AAVhu.66 | 314 | US20150315612 SEQ ID NO: 197 |
| AAVhu.67 | 315 | US20150315612 SEQ ID NO: 215 |
| AAVhu.67 | 316 | US20150315612 SEQ ID NO: 198 |
| AAVhu.7 | 317 | US20150315612 SEQ ID NO: 226 |
| AAVhu.7 | 318 | US20150315612 SEQ ID NO: 150 |
| AAVhu.7 | 319 | US20150315612 SEQ ID NO: 55 |
| (AAV7.3) | | |
| AAVhu.71 | 320 | US20150315612 SEQ ID NO: 79 |
| AAVhu.8 | 321 | US20150315612 SEQ ID NO: 53 |
| AAVhu.8 | 322 | US20150315612 SEQ ID NO: 12 |
| AAVhu.8 | 323 | US20150315612 SEQ ID NO: 151 |
| AAVhu.9 | 324 | US20150315612 SEQ ID NO: 58 |
| (AAV3.1) | | |
| AAVhu.9 | 325 | US20150315612 SEQ ID NO: 155 |
| (AAV3.1) | | |
| AAV-LK01 | 326 | US20150376607 SEQ ID NO: 2 |
| AAV-LK01 | 327 | US20150376607 SEQ ID NO: 29 |
| AAV-LK02 | 328 | US20150376607 SEQ ID NO: 3 |
| AAV-LK02 | 329 | US20150376607 SEQ ID NO: 30 |
| AAV-LK03 | 330 | US20150376607 SEQ ID NO: 4 |
| AAV-LK03 | 331 | WO2015121501 SEQ ID NO: 12, |
| | | US20150376607 SEQ ID NO: 31 |
| AAV-LK04 | 332 | US20150376607 SEQ ID NO: 5 |
| AAV-LK04 | 333 | US20150376607 SEQ ID NO: 32 |
| AAV-LK05 | 334 | US20150376607 SEQ ID NO: 6 |
| AAV-LK05 | 335 | US20150376607 SEQ ID NO: 33 |
| AAV-LK06 | 336 | US20150376607 SEQ ID NO: 7 |
| AAV-LK06 | 337 | US20150376607 SEQ ID NO: 34 |
| AAV-LK07 | 338 | US20150376607 SEQ ID NO: 8 |
| AAV-LK07 | 339 | US20150376607 SEQ ID NO: 35 |
| AAV-LK08 | 340 | US20150376607 SEQ ID NO: 9 |
| AAV-LK08 | 341 | US20150376607 SEQ ID NO: 36 |
| AAV-LK09 | 342 | US20150376607 SEQ ID NO: 10 |
| AAV-LK09 | 343 | US20150376607 SEQ ID NO: 37 |
| AAV-LK10 | 344 | US20150376607 SEQ ID NO: 11 |
| AAV-LK10 | 345 | US20150376607 SEQ ID NO: 38 |
| AAV-LK11 | 346 | US20150376607 SEQ ID NO: 12 |
| AAV-LK11 | 347 | US20150376607 SEQ ID NO: 39 |
| AAV-LK12 | 348 | US20150376607 SEQ ID NO: 13 |
| AAV-LK12 | 349 | US20150376607 SEQ ID NO: 40 |
| AAV-LK13 | 350 | US20150376607 SEQ ID NO: 14 |
| AAV-LK13 | 351 | US20150376607 SEQ ID NO: 41 |
| AAV-LK14 | 352 | US20150376607 SEQ ID NO: 15 |
| AAV-LK14 | 353 | US20150376607 SEQ ID NO: 42 |
| AAV-LK15 | 354 | US20150376607 SEQ ID NO: 16 |
| AAV-LK15 | 355 | US20150376607 SEQ ID NO: 43 |
| AAV-LK16 | 356 | US20150376607 SEQ ID NO: 17 |
| AAV-LK16 | 357 | US20150376607 SEQ ID NO: 44 |
| AAV-LK17 | 358 | US20150376607 SEQ ID NO: 18 |
| AAV-LK17 | 359 | US20150376607 SEQ ID NO: 45 |
| AAV-LK18 | 360 | US20150376607 SEQ ID NO: 19 |
| AAV-LK18 | 361 | US20150376607 SEQ ID NO: 46 |
| AAV-LK19 | 362 | US20150376607 SEQ ID NO: 20 |
| AAV-LK19 | 363 | US20150376607 SEQ ID NO: 47 |
| AAV-PAEC | 364 | US20150376607 SEQ ID NO: 1 |
| AAV-PAEC | 365 | US20150376607 SEQ ID NO: 48 |
| AAV-PAEC11 | 366 | US20150376607 SEQ ID NO: 26 |
| AAV-PAEC11 | 367 | US20150376607 SEQ ID NO: 54 |
| AAV-PAEC12 | 368 | US20150376607 SEQ ID NO: 27 |
| AAV-PAEC12 | 369 | US20150376607 SEQ ID NO: 51 |
| AAV-PAEC13 | 370 | US20150376607 SEQ ID NO: 28 |
| AAV-PAEC13 | 371 | US20150376607 SEQ ID NO: 49 |
| AAV-PAEC2 | 372 | US20150376607 SEQ ID NO: 21 |
| AAV-PAEC2 | 373 | US20150376607 SEQ ID NO: 56 |
| AAV-PAEC4 | 374 | US20150376607 SEQ ID NO: 22 |
| AAV-PAEC4 | 375 | US20150376607 SEQ ID NO: 55 |
| AAV-PAEC6 | 376 | US20150376607 SEQ ID NO: 23 |
| AAV-PAEC6 | 377 | US20150376607 SEQ ID NO: 52 |
| AAV-PAEC7 | 378 | US20150376607 SEQ ID NO: 24 |
| AAV-PAEC7 | 379 | US20150376607 SEQ ID NO: 53 |
| AAV-PAEC8 | 380 | US20150376607 SEQ ID NO: 25 |
| AAV-PAEC8 | 381 | US20150376607 SEQ ID NO: 50 |
| AAVpi.1 | 382 | US20150315612 SEQ ID NO: 28 |
| AAVpi.1 | 383 | US20150315612 SEQ ID NO: 93 |
| AAVpi.2 | 384 | US20150315612 SEQ ID NO: 30 |
| AAVpi.2 | 385 | US20150315612 SEQ ID NO: 95 |
| AAVpi.3 | 386 | US20150315612 SEQ ID NO: 29 |
| AAVpi.3 | 387 | US20150315612 SEQ ID NO: 94 |
| AAVrh.10 | 388 | US20150159173 SEQ ID NO: 9 |
| AAVrh.10 | 389 | US20150159173 SEQ ID NO: 25 |
| AAV44.2 | 390 | US20030138772 SEQ ID NO: 59 |
| AAVrh.10 | 391 | US20030138772 SEQ ID NO: 81 |
| (AAV44.2) | | |
| AAV42.1B | 392 | US20030138772 SEQ ID NO: 90 |
| AAVrh.12 | 393 | US20030138772 SEQ ID NO: 30 |
| (AAV42.1b) | | |
| AAVrh.13 | 394 | US20150159173 SEQ ID NO: 10 |
| AAVrh.13 | 395 | US20150159173 SEQ ID NO: 26 |
| AAVrh.13 | 396 | US20150315612 SEQ ID NO: 228 |
| AAVrh3.13R | 397 | US20150159173 |
| AAV42.3A | 398 | US20030138772 SEQ ID NO: 87 |
| AAVrh.14 | 399 | US20030138772 SEQ ID NO: 32 |
| (AAV42.3a) | | |
| AAV42.5A | 400 | US20030138772 SEQ ID NO: 89 |
| AAVrh.17 | 401 | US20030138772 SEQ ID NO: 34 |
| (AAV42.5a) | | |
| AAV42.5B | 402 | US20030138772 SEQ ID NO: 91 |
| AAVrh.18 | 403 | US20030138772 SEQ ID NO: 29 |
| (AAV42.5b) | | |
| AAV42.6B | 404 | US20030138772 SEQ ID NO: 112 |
| AAVrh.19 | 405 | US20030138772 SEQ ID NO: 38 |
| (AAV42.6b) | | |
| AAVrh.2 | 406 | US20150159173 SEQ ID NO: 39 |
| AAVrh.2 | 407 | US20150315612 SEQ ID NO: 231 |
| AAVrh.20 | 408 | US20150159173 SEQ ID NO: 1 |
| AAV42.10 | 409 | US20030138772 SEQ ID NO: 106 |
| AAVrh.21 | 410 | US20030138772 SEQ ID NO: 35 |
| (AAV42.10) | | |
| AAV42.11 | 411 | US20030138772 SEQ ID NO: 108 |
| AAVrh.22 | 412 | US20030138772 SEQ ID NO: 37 |
| (AAV42.11) | | |
| AAV42.12 | 413 | US20030138772 SEQ ID NO: 113 |
| AAVrh.23 | 414 | US20030138772 SEQ ID NO: 58 |
| (AAV42.12) | | |
| AAV42.13 | 415 | US20030138772 SEQ ID NO: 86 |
| AAVrh.24 | 416 | US20030138772 SEQ ID NO: 31 |
| (AAV42.13) | | |
| AAV42.15 | 417 | US20030138772 SEQ ID NO: 84 |
| AAVrh.25 | 418 | US20030138772 SEQ ID NO: 28 |
| (AAV42.15) | | |
| AAVrh.2R | 419 | US20150159173 |
| AAVrh.31 | 420 | US20030138772 SEQ ID NO: 48 |
| (AAV223.1) | | |
| AAVC1 | 421 | US20030138772 SEQ ID NO: 60 |
| AAVrh.32 | 422 | US20030138772 SEQ ID NO: 19 |
| (AAVC1) | | |
| AAVrh.32/33 | 423 | US20150159173 SEQ ID NO: 2 |
| AAVrh.33 | 424 | US20030138772 SEQ ID NO: 20 |
| (AAVC3) | | |
| AAVC5 | 425 | US20030138772 SEQ ID NO: 62 |
| AAVrh.34 | 426 | US20030138772 SEQ ID NO: 21 |
| (AAVC5) | | |
| AAVF1 | 427 | US20030138772 SEQ ID NO: 109 |
| AAVrh.35 | 428 | US20030138772 SEQ ID NO: 22 |
| (AAVF1) | | |
| AAVF3 | 429 | US20030138772 SEQ ID NO: 111 |
| AAVrh.36 | 430 | US20030138772 SEQ ID NO: 23 |
| (AAVF3) | | |
| AAVrh.37 | 431 | US20030138772 SEQ ID NO: 24 |
| AAVrh.37 | 432 | US20150159173 SEQ ID NO: 40 |
| AAVrh.37 | 433 | US20150315612 SEQ ID NO: 229 |
| AAVrh.37R2 | 434 | US20150159173 |
| AAVrh.38 | 435 | US20150315612 SEQ ID NO: 7 |
| (AAVLG-4) | | |
| AAVrh.38 | 436 | US20450315612 SEQ ID NO: 86 |
| (AAVLG-4) | | |
| AAVrh.39 | 437 | US20150159173 SEQ ID NO: 20, |
| | | US20150315612 SEQ ID NO: 13 |
| AAVrh.39 | 438 | US20150159173 SEQ ID NO: 3, |
| | | US20150159173 SEQ ID NO: 36, |
| | | US20150315612 SEQ ID NO: 89 |
| AAVrh.40 | 439 | US20150315612 SEQ ID NO: 92 |
| AAVrh.40 | 440 | US20150315612 SEQ ID No: 14 |
| (AAVLG-10) | | |
| AAVrh.43 | 441 | US20150315612 SEQ ID NO: 43, |
| (AAVN721-8) | | US20150159173 SEQ ID NO: 21 |
| AAVrh.43 | 442 | US20450315612 SEQ ID NO: 163, |
| (AAVN721-8) | | US20150159173 SEQ ID NO: 37 |
| AAVrh.44 | 443 | US20150315612 SEQ ID NO: 34 |
| AAVrh.44 | 444 | US20150315612 SEQ ID NO: 111 |
| AAVrh.45 | 445 | US20150315612 SEQ ID NO: 41 |
| AAVrh.45 | 446 | US20150315612 SEQ ID NO: 109 |
| AAVrh.46 | 447 | US20150159173 SEQ ID NO: 22, |
| | | US20150315612 SEQ ID NO: 19 |
| AAVrh.46 | 448 | US20150159173 SEQ ID NO: 4, |
| | | US20150315612 SEQ ID NO: 101 |
| AAVrh.47 | 449 | US20150315612 SEQ ID NO: 38 |
| AAVrh.47 | 450 | US20150315612 SEQ ID NO: 118 |
| AAVrh.48 | 451 | US20150159173 SEQ ID NO: 44, |
| | | US20150315612 SEQ ID NO: 115 |
| AAVrh.48.1 | 452 | US20150159173 |
| AAVrh.48.1.2 | 453 | US20150159173 |
| AAVrh.48.2 | 454 | US20150159173 |
| AAVrh.48 | 455 | US20150315612 SEQ ID NO: 32 |
| (AAV1-7) | | |
| AAVrh.49 | 456 | US20150315612 SEQ ID NO: 25 |
| (AAV1-8) | | |
| AAVrh.49 | 457 | US20150315612 SEQ ID NO: 103 |
| (AAV1-8) | | |
| AAVrh.50 | 458 | US20150315612 SEQ ID NO: 23 |
| (AAV2-4) | | |
| AAVrh.50 | 459 | US20150315612 SEQ ID NO: 108 |
| (AAV2-4) | | |
| AAVrh.51 | 460 | US20150315612 SEQ ID No: 22 |
| (AAV2-5) | | |
| AAVrh.51 | 461 | US20150315612 SEQ ID NO: 104 |
| (AAV2-5) | | |
| AAVrh.52 | 462 | US20150315612 SEQ ID NO: 18 |
| (AAV3-9) | | |
| AAVrh.52 | 463 | US20150315612 SEQ ID NO: 96 |
| (AAV3-9) | | |
| AAVrh.53 | 464 | US20150315612 SEQ ID NO: 97 |
| AAVrh.53 | 465 | US20150315612 SEQ ID NO: 17 |
| (AAV3-11) | | |
| AAVrh.53 | 466 | US20150315612 SEQ ID NO: 186 |
| (AAV3-11) | | |
| AAVrh.54 | 467 | US20150315612 SEQ ID NO: 40 |
| AAVrh.54 | 468 | US20150159173 SEQ ID NO: 49, |
| | | US20150315612 SEQ ID NO: 116 |
| AAVrh.55 | 469 | US20150315612 SEQ ID NO: 37 |
| AAVrh.55 | 470 | US20150315612 SEQ ID NO: 117 |
| (AAV4-19) | | |
| AAVrh.56 | 471 | US20150315612 SEQ ID NO: 54 |
| AAVrh.56 | 472 | US20150315612 SEQ ID NO: 152 |
| AAVrh.57 | 473 | US20150315612 SEQ ID NO: 26 |
| AAVrh.57 | 474 | US20150315612 SEQ ID NO: 105 |
| AAVrh.58 | 475 | US20150315612 SEQ ID NO: 27 |
| AAVrh.58 | 476 | US20150159173 SEQ ID NO: 48, |
| | | US20150315612 SEQ ID NO: 106 |
| AAVrh.58 | 477 | US20150315612 SEQ ID NO: 232 |
| AAVrh.59 | 478 | US20150315612 SEQ ID NO: 42 |
| AAVrh.59 | 479 | US20150315612 SEQ ID NO: 110 |
| AAVrh.60 | 480 | US20150315612 SEQ ID NO: 31 |
| AAVrh.60 | 481 | US20150315612 SEQ ID NO: 120 |
| AAVrh.61 | 482 | US20150315612 SEQ ID NO: 107 |
| AAVrh.61 | 483 | US20150315612 SEQ ID NO: 21 |
| (AAV2-3) | | |
| AAVrh.62 | 484 | US20150315612 SEQ ID No: 33 |
| (AAV2-15) | | |
| AAVrh.62 | 485 | US20150315612 SEQ ID NO: 114 |
| (AAV2-15) | | |
| AAVrh.64 | 486 | US20150315612 SEQ ID No: 15 |
| AAVrh.64 | 487 | US20150159173 SEQ ID NO: 43, |
| | | US20150315612 SEQ ID NO: 99 |
| AAVrh.64 | 488 | US20150315612 SEQ ID NO: 233 |
| AAVRh.64R1 | 489 | US20150159173 |
| AAVRh.64R2 | 490 | US20150159173 |
| AAVrh.65 | 491 | US20150315612 SEQ ID NO: 35 |
| AAVrh.65 | 492 | US20150315612 SEQ ID NO: 112 |
| AAVrh.67 | 493 | US20150315612 SEQ ID NO: 36 |
| AAVrh.67 | 494 | US20150315612 SEQ ID NO: 230 |
| AAVrh.67 | 495 | US20150159173 SEQ ID NO: 47, |
| | | US20150315612 SEQ ID NO: 113 |
| AAVrh.68 | 496 | US20150315612 SEQ ID NO: 16 |
| AAVrh.68 | 497 | US20150315612 SEQ ID NO: 100 |
| AAVrh.69 | 498 | US20150315612 SEQ ID NO: 39 |
| AAVrh.69 | 499 | US20150315612 SEQ ID NO: 119 |
| AAVrh.70 | 500 | US20150315612 SEQ ID NO: 20 |
| AAVrh.70 | 501 | US20150315612 SEQ ID NO: 98 |
| AAVrh.71 | 502 | US20150315612 SEQ ID NO: 162 |
| AAVrh.72 | 503 | US20150315612 SEQ ID NO: 9 |
| AAVrh.73 | 504 | US20150159173 SEQ ID NO: 5 |
| AAVrh.74 | 505 | US20150159173 SEQ ID NO: 6 |
| AAVrh.8 | 506 | US20150159173 SEQ ID NO: 41 |
| AAVrh.8 | 507 | US20150315612 SEQ ID NO: 235 |
| AAVrh.8R | 508 | US20150159173, WO2015168666 |
| | | SEQ ID NO: 9 |
| AAVrh.8R | 509 | WO2015168666 SEQ ID NO: 10 |
| A586R | | |
| mutant | | |
| AAVrh.8R | 510 | WO2015168666 SEQ ID NO: 11 |
| R533A | | |
| mutant | | |
| BAAV | 511 | U.S. Pat. No. 9,193,769 SEQ ID NO: 8 |
| (bovine | | |
| AAV) | | |
| BAAV | 512 | U.S. Pat. No. 9,193,769 SEQ ID NO: 10 |
| (bovine | | |
| AAV) | | |
| BAAV | 513 | U.S. Pat. No. 9,193,769 SEQ ID NO: 4 |
| (bovine | | |
| AAV) | | |
| BAAV | 514 | U.S. Pat. No. 9,193,769 SEQ ID NO: 2 |
| (bovine | | |
| AAV) | | |
| BAAV | 515 | U.S. Pat. No. 9,193,769 SEQ ID NO: 6 |
| (bovine | | |
| AAV) | | |
| BAAV | 516 | U.S. Pat. No. 9,193,769 SEQ ID NO: 1 |
| (bovine | | |
| AAV) | | |
| BAAV | 517 | U.S. Pat. No. 9,193,769 SEQ ID NO: 5 |
| (bovine | | |
| AAV) | | |
| BAAV | 518 | U.S. Pat. No. 9,193,769 SEQ ID NO: 3 |
| (bovine | | |
| AAV) | | |
| BAAV | 519 | U.S. Pat. No. 9,193,769 SEQ ID NO: 11 |
| (bovine | | |
| AAV) | | |
| BAAV | 520 | U.S. Pat. No. 7,427,396 SEQ ID NO: 5 |
| (bovine | | |
| AAV) | | |
| BAAV | 521 | U.S. Pat. No. 7,427,396 SEQ ID NO: 6 |
| (bovine | | |
| AAV) | | |
| BAAV | 522 | U.S. Pat. No. 9,193,769 SEQ ID NO: 7 |
| (bovine | | |
| AAV) | | |
| BAAV | 523 | U.S. Pat. No. 9,193,769 SEQ ID NO: 9 |
| (bovine | | |
| AAV) | | |
| BNP61 AAV | 524 | US20150238550 SEQ ID NO: 1 |
| BNP61 AAV | 525 | US20150238550 SEQ ID NO: 2 |
| BNP62 AAV | 526 | US20150238550 SEQ ID NO: 3 |
| BNP63 AAV | 527 | US20150238550 SEQ ID NO: 4 |
| caprine AAV | 528 | U.S. Pat. No. 7,427,396 SEQ ID NO: 3 |
| caprine AAV | 529 | U.S. Pat. No. 7,427,396 SEQ ID NO: 4 |
| true type | 530 | WO2015121501 SEQ ID NO: 2 |
| AAV (ttAAV) | | |
| AAAV | 531 | U.S. Pat. No. 9,238,800 SEQ ID NO: 12 |
| (Avian AAV) | | |
| AAAV | 532 | U.S. Pat. No. 9,238,800 SEQ ID NO: 2 |
| (Avian AAV) | | |
| AAAV | 533 | U.S. Pat. No. 9,238,800 SEQ ID NO: 6 |
| (Avian AAV) | | |
| AAAV | 534 | U.S. Pat. No. 9,238,800 SEQ ID NO: 4 |
| (Avian AAV) | | |
| AAAV | 535 | U.S. Pat. No. 9,238,800 SEQ ID NO: 8 |
| (Avian AAV) | | |
| AAAV | 536 | U.S. Pat. No. 9,238,800 SEQ ID NO: 14 |
| (Avian AAV) | | |
| AAAV | 537 | U.S. Pat. No. 9,238,800 SEQ ID NO: 10 |
| (Avian AAV) | | |
| AAAV | 538 | U.S. Pat. No. 9,238,800 SEQ ID NO: 15 |
| (Avian AAV) | | |
| AAAV | 539 | U.S. Pat. No. 9,238,800 SEQ ID NO: 5 |
| (Avian AAV) | | |
| AAAV | 540 | U.S. Pat. No. 9,238,800 SEQ ID NO: 9 |
| (Avian AAV) | | |
| AAAV | 541 | U.S. Pat. No. 9,238,800 SEQ ID NO: 3 |
| (Avian AAV) | | |
| AAAV | 542 | U.S. Pat. No. 9,238,800 SEQ ID NO: 7 |
| (Avian AAV) | | |
| AAAV | 543 | U.S. Pat. No. 9,238,800 SEQ ID NO: 11 |
| (Avian AAV) | | |
| AAAV | 544 | U.S. Pat. No. 9,238,800 SEQ ID NO: 13 |
| (Avian AAV) | | |
| AAAV | 545 | U.S. Pat. No. 9,238,800 SEQ ID NO: 1 |
| (Avian AAV) | | |
| AAV Shuffle | 546 | US20160017295 SEQ ID NO: 23 |
| 100-1 | | |
| AAV Shuffle | 547 | US20160017295 SEQ ID NO: 11 |
| 100-1 | | |
| AAV Shuffle | 548 | US20160017295 SEQ ID NO: 37 |
| 100-2 | | |
| AAV Shuffle | 549 | US20160017295 SEQ ID NO: 29 |
| 100-2 | | |
| AAV Shuffle | 550 | US20160017295 SEQ ID NO: 24 |
| 100-3 | | |
| AAV Shuffle | 551 | US20160017295 SEQ ID NO: 12 |
| 100-3 | | |
| AAV Shuffle | 552 | US20160017295 SEQ ID NO: 25 |
| 100-7 | | |
| AAV Shuffle | 553 | US20160017295 SEQ ID NO: 13 |
| 100-7 | | |
| AAV Shuffle | 554 | US20160017295 SEQ ID NO: 34 |
| 10-2 | | |
| AAV Shuffle | 555 | US20160017295 SEQ ID NO: 26 |
| 10-2 | | |
| AAV Shuffle | 556 | US20160017295 SEQ ID NO: 35 |
| 10-6 | | |
| AAV Shuffle | 557 | US20160017295 SEQ ID NO: 27 |
| 10-6 | | |
| AAV Shuffle | 558 | US20160017295 SEQ ID NO: 36 |
| 10-8 | | |
| AAV Shuffle | 559 | US20160017295 SEQ ID NO: 28 |
| 10-8 | | |
| AAV SM 100-10 | 560 | US20160017295 SEQ ID NO: 41 |
| AAV SM 100-10 | 561 | US20160017295 SEQ ID NO: 33 |
| AAV SM 100-3 | 562 | US20160017295 SEQ ID NO: 40 |
| AAV SM 100-3 | 563 | US20160017295 SEQ ID NO: 32 |
| AAV SM 10-1 | 564 | US20160017295 SEQ ID NO: 38 |
| AAV SM 10-1 | 565 | US20160017295 SEQ ID NO: 30 |
| AAV SM 10-2 | 566 | US20160017295 SEQ ID NO: 10 |
| AAV SM 10-2 | 567 | US20160017295 SEQ ID NO: 22 |
| AAV SM 10-8 | 568 | US20160017295 SEQ ID NO: 39 |
| AAV SM 10-8 | 569 | US20160017295 SEQ ID NO: 31 |
| AAV SM 100-10 | 560 | US20160017295 SEQ ID NO: 41 |
| AAV SM 100-10 | 561 | US20160017295 SEQ ID NO: 33 |
| AAV SM 100-3 | 562 | US20160017295 SEQ ID NO: 40 |
| AAV SM 100-3 | 563 | US20160017295 SEQ ID NO: 32 |
| AAV SM 10-1 | 564 | US20160017295 SEQ ID NO: 38 |
| AAV SM 10-1 | 565 | US20160017295 SEQ ID NO: 30 |
| AAV SM 10-2 | 566 | US20160017295 SEQ ID NO: 10 |
| AAV SM 10-2 | 567 | US20160017295 SEQ ID NO: 22 |
| AAV SM 10-8 | 568 | US20160017295 SEQ ID NO: 39 |
| AAV SM 10-8 | 569 | US20160017295 SEQ ID NO: 31 |
| AAVF1/HSC1 | 570 | WO2016049230 SEQ ID NO: 20 |
| AAVF2/HSC2 | 571 | WO2016049230 SEQ ID NO: 21 |
| AAVF3/HSC3 | 572 | WO2016049230 SEQ ID NO: 22 |
| AAVF4/HSC4 | 573 | WO2016049230 SEQ ID NO: 23 |
| AAVF5/HSC5 | 574 | WO2016049230 SEQ ID NO: 25 |
| AAVF6/HSC6 | 575 | WO2016049230 SEQ ID NO: 24 |
| AAVF7/HSC7 | 576 | WO2016049230 SEQ ID NO: 27 |
| AAVF8/HSC8 | 577 | WO2016049230 SEQ ID NO: 28 |
| AAVF9/HSC9 | 578 | WO2016049230 SEQ ID NO: 29 |
| AAVF11/HSC11 | 579 | WO2016049230 SEQ ID NO: 26 |
| AAVF12/HSC12 | 580 | WO2016049230 SEQ ID NO: 30 |
| AAVF13/HSC13 | 581 | WO2016049230 SEQ ID NO: 31 |
| AAVF14/HSC14 | 582 | WO2016049230 SEQ ID NO: 32 |
| AAVF15/HSC15 | 583 | WO2016049230 SEQ ID NO: 33 |
| AAVF16/HSC16 | 584 | WO2016049230 SEQ ID NO: 34 |
| AAVF17/HSC17 | 585 | WO2016049230 SEQ ID NO: 35 |
| AAVF1/HSC1 | 586 | WO2016049230 SEQ ID NO: 2 |
| AAVF2/HSC2 | 587 | WO2016049230 SEQ ID NO: 3 |
| AAVF3/HSC3 | 588 | WO2016049230 SEQ ID NO: 5 |
| AAVF4/HSC4 | 589 | WO2016049230 SEQ ID NO: 6 |
| AAVF5/HSC5 | 590 | WO2016049230 SEQ ID NO: 11 |
| AAVF6/HSC6 | 591 | WO2016049230 SEQ ID NO: 7 |
| AAVF7/HSC7 | 592 | WO2016049230 SEQ ID NO: 8 |
| AAVF8/HSC8 | 593 | WO2016049230 SEQ ID NO: 9 |
| AAVF9/HSC9 | 594 | WO2016049230 SEQ ID NO: 10 |
| AAVF11/HSC11 | 595 | WO2016049230 SEQ ID NO: 4 |
| AAVF12/HSC12 | 596 | WO2016049230 SEQ ID NO: 12 |
| AAVF13/HSC13 | 597 | WO2016049230 SEQ ID NO: 14 |
| AAVF14/HSC14 | 598 | WO2016049230 SEQ ID NO: 15 |
| AAVF15/HSC15 | 599 | WO2016049230 SEQ ID NO: 16 |
| AAVF16/HSC16 | 600 | WO2016049230 SEQ ID NO: 17 |
| AAVF17/HSC17 | 601 | WO2016149230 SEQ ID NO: 13 |
| AAV CBr-E1 | 602 | U.S. Pat. No. 8,734,809 SEQ ID NO: 13 |
| AAV CBr-E2 | 603 | U.S. Pat. No. 8,734,809 SEQ ID NO: 14 |
| AAV CBr-E3 | 604 | U.S. Pat. No. 8,734,809 SEQ ID NO: 15 |
| AAV CBr-E4 | 605 | U.S. Pat. No. 8,734,809 SEQ ID NO: 16 |
| AAV CBr-E5 | 606 | U.S. Pat. No. 8,734,809 SEQ ID NO: 17 |
| AAV CBr-e5 | 607 | U.S. Pat. No. 8,734,809 SEQ ID NO: 18 |
| AAV CBr-E6 | 608 | U.S. Pat. No. 8,734,809 SEQ ID NO: 19 |
| AAV CBr-E7 | 609 | U.S. Pat. No. 8,734,809 SEQ ID NO: 20 |
| AAV CBr-E8 | 610 | U.S. Pat. No. 8,734,809 SEQ ID NO: 21 |
| AAV CLv-D1 | 611 | U.S. Pat. No. 8,734,809 SEQ ID NO: 22 |
| AAV CLv-D2 | 612 | U.S. Pat. No. 8,734,809 SEQ ID NO: 23 |
| AAV CLv-D3 | 613 | U.S. Pat. No. 8,734,809 SEQ ID NO: 24 |
| AAV CLv-D4 | 614 | U.S. Pat. No. 8,734,809 SEQ ID NO: 25 |
| AAV CLv-D5 | 615 | U.S. Pat. No. 8,734,809 SEQ ID NO: 26 |
| AAV CLv-D6 | 616 | U.S. Pat. No. 8,734,809 SEQ ID NO: 27 |
| AAV CLv-D7 | 617 | U.S. Pat. No. 8,734,809 SEQ ID NO: 28 |
| AAV CLv-D8 | 618 | U.S. Pat. No. 8,734,809 SEQ ID NO: 29 |
| AAV CLv-E1 | 619 | U.S. Pat. No. 8,734,809 SEQ ID NO: 13 |
| AAV CLv-R1 | 620 | U.S. Pat. No. 8,734,809 SEQ ID NO: 30 |
| AAV CLv-R2 | 621 | U.S. Pat. No. 8,734,809 SEQ ID NO: 31 |
| AAV CLv-R3 | 622 | U.S. Pat. No. 8,734,809 SEQ ID NO: 32 |
| AAV CLv-R4 | 623 | U.S. Pat. No. 8,734,809 SEQ ID NO: 33 |
| AAV CLv-R5 | 624 | U.S. Pat. No. 8,734,809 SEQ ID NO: 34 |
| AAV CLv-R6 | 625 | U.S. Pat. No. 8,734,809 SEQ ID NO: 35 |
| AAV CLv-R7 | 626 | U.S. Pat. No. 8,734,809 SEQ ID NO: 36 |
| AAV CLv-R8 | 627 | U.S. Pat. No. 8,734,809 SEQ ID NO: 37 |
| AAV CLv-R9 | 628 | U.S. Pat. No. 8,734,809 SEQ ID NO: 38 |
| AAV CLg-F1 | 629 | U.S. Pat. No. 8,734,809 SEQ ID NO: 39 |
| AAV CLg-F2 | 630 | U.S. Pat. No. 8,734,809 SEQ ID NO: 40 |
| AAV CLg-F3 | 631 | U.S. Pat. No. 8,734,809 SEQ ID NO: 41 |
| AAV CLg-F4 | 632 | U.S. Pat. No. 8,734,809 SEQ ID NO: 42 |
| AAV CLg-F5 | 633 | U.S. Pat. No. 8,734,809 SEQ ID NO: 43 |
| AAV CLg-F6 | 634 | U.S. Pat. No. 8,734,809 SEQ ID NO: 43 |
| AAV CLg-F7 | 635 | U.S. Pat. No. 8,734,809 SEQ ID NO: 44 |
| AAV CLg-F8 | 636 | U.S. Pat. No. 8,734,809 SEQ ID NO: 43 |
| AAV CSp-1 | 637 | U.S. Pat. No. 8,734,809 SEQ ID NO: 45 |
| AAV CSp-10 | 638 | U.S. Pat. No. 8,734,809 SEQ ID NO: 46 |
| AAV CSp-11 | 639 | U.S. Pat. No. 8,734,809 SEQ ID NO: 47 |
| AAV CSp-2 | 640 | U.S. Pat. No. 8,734,809 SEQ ID NO: 48 |
| AAV CSp-3 | 641 | U.S. Pat. No. 8,734,809 SEQ ID NO: 49 |
| AAV CSp-4 | 642 | U.S. Pat. No. 8,734,809 SEQ ID NO: 50 |
| AAV CSp-6 | 643 | U.S. Pat. No. 8,734,809 SEQ ID NO: 51 |
| AAV CSp-7 | 644 | U.S. Pat. No. 8,734,809 SEQ ID NO: 52 |
| AAV CSp-8 | 645 | U.S. Pat. No. 8,734,809 SEQ ID NO: 53 |
| AAV CSp-9 | 646 | U.S. Pat. No. 8,734,809 SEQ ID NO: 54 |
| AAV CHt-2 | 647 | U.S. Pat. No. 8,734,809 SEQ ID NO: 55 |
| AAV CHt-3 | 648 | U.S. Pat. No. 8,734,809 SEQ ID NO: 56 |
| AAV CKd-1 | 649 | U.S. Pat. No. 8,734,809 SEQ ID NO: 57 |
| AAV CKd-10 | 650 | U.S. Pat. No. 8,734,809 SEQ ID NO: 58 |
| AAV CKd-2 | 651 | U.S. Pat. No. 8,734,809 SEQ ID NO: 59 |
| AAV CKd-3 | 652 | U.S. Pat. No. 8,734,809 SEQ ID NO: 60 |
| AAV CKd-4 | 653 | U.S. Pat. No. 8,734,809 SEQ ID NO: 61 |
| AAV CKd-6 | 654 | U.S. Pat. No. 8,734,809 SEQ ID NO: 62 |
| AAV CKd-7 | 655 | U.S. Pat. No. 8,734,809 SEQ ID NO: 63 |
| AAV CKd-8 | 656 | U.S. Pat. No. 8,734,809 SEQ ID NO: 64 |
| AAV CLv-1 | 657 | U.S. Pat. No. 8,734,809 SEQ ID NO: 65 |
| AAV CLv-12 | 658 | U.S. Pat. No. 8,734,809 SEQ ID NO: 66 |
| AAV CLv-13 | 659 | U.S. Pat. No. 8,734,809 SEQ ID NO: 67 |
| AAV CLv-2 | 660 | U.S. Pat. No. 8,734,809 SEQ ID NO: 68 |
| AAV CLv-3 | 661 | U.S. Pat. No. 8,734,809 SEQ ID NO: 69 |
| AAV CLv-4 | 662 | U.S. Pat. No. 8,734,809 SEQ ID NO: 70 |
| AAV CLv-6 | 663 | U.S. Pat. No. 8,734,809 SEQ ID NO: 71 |
| AAV CLv-8 | 664 | U.S. Pat. No. 8,734,809 SEQ ID NO: 72 |
| AAV CKd-B1 | 665 | U.S. Pat. No. 8,734,809 SEQ ID NO: 73 |
| AAV CKd-B2 | 666 | U.S. Pat. No. 8,734,809 SEQ ID NO: 74 |
| AAV CKd-B3 | 667 | U.S. Pat. No. 8,734,809 SEQ ID NO: 75 |
| AAV CKd-B4 | 668 | U.S. Pat. No. 8,734,809 SEQ ID NO: 76 |
| AAV CKd-B5 | 669 | U.S. Pat. No. 8,734,809 SEQ ID NO: 77 |
| AAV CKd-B6 | 670 | U.S. Pat. No. 8,734,809 SEQ ID NO: 78 |
| AAV CKd-B7 | 671 | U.S. Pat. No. 8,734,809 SEQ ID NO: 79 |
| AAV CKd-B8 | 672 | U.S. Pat. No. 8,734,809 SEQ ID NO: 80 |
| AAV CKd-H1 | 673 | U.S. Pat. No. 8,734,809 SEQ ID NO: 81 |
| AAV CKd-H2 | 674 | U.S. Pat. No. 8,734,809 SEQ ID NO: 82 |
| AAV CKd-H3 | 675 | U.S. Pat. No. 8,734,809 SEQ ID NO: 83 |
| AAV CKd-H4 | 676 | U.S. Pat. No. 8,734,809 SEQ ID NO: 84 |
| AAV CKd-H5 | 677 | U.S. Pat. No. 8,734,809 SEQ ID NO: 85 |
| AAV CKd-H6 | 678 | U.S. Pat. No. 8,734,809 SEQ ID NO: 77 |
| AAV CHt-1 | 679 | U.S. Pat. No. 8,734,809 SEQ ID NO: 86 |
| AAV CLv1-1 | 680 | U.S. Pat. No. 8,734,809 SEQ ID NO: 171 |
| AAV CLv1-2 | 681 | U.S. Pat. No. 8,734,809 SEQ ID NO: 172 |
| AAV CLv1-3 | 682 | U.S. Pat. No. 8,734,809 SEQ ID NO: 173 |
| AAV CLv1-4 | 683 | U.S. Pat. No. 8,734,809 SEQ ID NO: 174 |
| AAV CLv1-7 | 684 | U.S. Pat. No. 8,734,809 SEQ ID NO: 175 |
| AAV CLv1-8 | 685 | U.S. Pat. No. 8,734,809 SEQ ID NO: 176 |
| AAV CLv1-9 | 686 | U.S. Pat. No. 8,734,809 SEQ ID NO: 177 |
| AAV CLv1-10 | 687 | U.S. Pat. No. 8,734,809 SEQ ID NO: 178 |
| AAV.VR-355 | 688 | U.S. Pat. No. 8,734,809 SEQ ID NO: 181 |
| AAV.hu.48R3 | 689 | U.S. Pat. No. 8,734,809 SEQ ID NO: 183 |
| AAV CBr-E1 | 690 | U.S. Pat. No. 8,734,809 SEQ ID NO: 87 |
| AAV CBr-E2 | 691 | U.S. Pat. No. 8,734,809 SEQ ID NO: 88 |
| AAV CBr-E3 | 692 | U.S. Pat. No. 8,734,809 SEQ ID NO: 89 |
| AAV CBr-E4 | 693 | U.S. Pat. No. 8,734,809 SEQ ID NO: 90 |
| AAV CBr-E5 | 694 | U.S. Pat. No. 8,734,809 SEQ ID NO: 91 |
| AAV CBr-e5 | 695 | U.S. Pat. No. 8,734,809 SEQ ID NO: 92 |
| AAV CBr-E6 | 696 | U.S. Pat. No. 8,734,809 SEQ ID NO: 93 |
| AAV CBr-E7 | 697 | U.S. Pat. No. 8,734,809 SEQ ID NO: 94 |
| AAV CBr-E8 | 698 | U.S. Pat. No. 8,734,809 SEQ ID NO: 95 |
| AAV CLv-D1 | 699 | U.S. Pat. No. 8,734,809 SEQ ID NO: 96 |
| AAV CLv-D2 | 700 | U.S. Pat. No. 8,734,809 SEQ ID NO: 97 |
| AAV CLv-D3 | 701 | U.S. Pat. No. 8,734,809 SEQ ID NO: 98 |
| AAV CLv-D4 | 702 | U.S. Pat. No. 8,734,809 SEQ ID NO: 99 |
| AAV CLv-D5 | 703 | U.S. Pat. No. 8,734,809 SEQ ID NO: 100 |
| AAV CLv-D6 | 704 | U.S. Pat. No. 8,734,809 SEQ ID NO: 101 |
| AAV CLv-D7 | 705 | U.S. Pat. No. 8,734,809 SEQ ID NO: 102 |
| AAV CLv-D8 | 706 | U.S. Pat. No. 8,734,809 SEQ ID NO: 103 |
| AAV CLv-E1 | 707 | U.S. Pat. No. 8,734,809 SEQ ID NO: 87 |
| AAV CLv-R1 | 708 | U.S. Pat. No. 8,734,809 SEQ ID NO: 104 |
| AAV CLv-R2 | 709 | U.S. Pat. No. 8,734,809 SEQ ID NO: 105 |
| AAV CLv-R3 | 710 | U.S. Pat. No. 8,734,809 SEQ ID NO: 106 |
| AAV CLv-R4 | 711 | U.S. Pat. No. 8,734,809 SEQ ID NO: 107 |
| AAV CLv-R5 | 712 | U.S. Pat. No. 8,734,809 SEQ ID NO: 108 |
| AAV CLv-R6 | 713 | U.S. Pat. No. 8,734,809 SEQ ID NO: 109 |
| AAV CLv-R7 | 714 | U.S. Pat. No. 8,734,809 SEQ ID NO: 110 |
| AAV CLv-R8 | 715 | U.S. Pat. No. 8,734,809 SEQ ID NO: 111 |
| AAV CLv-R9 | 716 | U.S. Pat. No. 8,734,809 SEQ ID NO: 112 |
| AAV CLg-F1 | 717 | U.S. Pat. No. 8,734,809 SEQ ID NO: 113 |
| AAV CLg-F2 | 718 | U.S. Pat. No. 8,734,809 SEQ ID NO: 114 |
| AAV CLg-F3 | 719 | U.S. Pat. No. 8,734,809 SEQ ID NO: 115 |
| AAV CLg-F4 | 720 | U.S. Pat. No. 8,734,809 SEQ ID NO: 116 |
| AAV CLg-F5 | 721 | U.S. Pat. No. 8,734,809 SEQ ID NO: 117 |
| AAV CLg-F6 | 722 | U.S. Pat. No. 8,734,809 SEQ ID NO: 117 |
| AAV CLg-F7 | 723 | U.S. Pat. No. 8,734,809 SEQ ID NO: 118 |
| AAV CLg-F8 | 724 | U.S. Pat. No. 8,734,809 SEQ ID NO: 117 |
| AAV CSp-1 | 725 | U.S. Pat. No. 8,734,809 SEQ ID NO: 119 |
| AAV CSp-10 | 726 | U.S. Pat. No. 8,734,809 SEQ ID NO: 120 |
| AAV CSp-11 | 727 | U.S. Pat. No. 8,734,809 SEQ ID NO: 121 |
| AAV CSp-2 | 728 | U.S. Pat. No. 8,734,809 SEQ ID NO: 122 |
| AAV CSp-3 | 729 | U.S. Pat. No. 8,734,809 SEQ ID NO: 123 |
| AAV CSp-4 | 730 | U.S. Pat. No. 8,734,809 SEQ ID NO: 124 |
| AAV CSp-6 | 731 | U.S. Pat. No. 8,734,809 SEQ ID NO: 125 |
| AAV CSp-7 | 732 | U.S. Pat. No. 8,734,809 SEQ ID NO: 126 |
| AAV CSp-8 | 733 | U.S. Pat. No. 8,734,809 SEQ ID NO: 127 |
| AAV CSp-9 | 734 | U.S. Pat. No. 8,734,809 SEQ ID NO: 128 |
| AAV CHt-2 | 735 | U.S. Pat. No. 8,734,809 SEQ ID NO: 129 |
| AAV CHt-3 | 736 | U.S. Pat. No. 8,734,809 SEQ ID NO: 130 |
| AAV CKd-1 | 737 | U.S. Pat. No. 8,734,809 SEQ ID NO: 131 |
| AAV CKd-10 | 738 | U.S. Pat. No. 8,734,809 SEQ ID NO: 132 |
| AAV CKd-2 | 739 | U.S. Pat. No. 8,734,809 SEQ ID NO: 133 |
| AAV CKd-3 | 740 | U.S. Pat. No. 8,734,809 SEQ ID NO: 134 |
| AAV CKd-4 | 741 | U.S. Pat. No. 8,734,809 SEQ ID NO: 135 |
| AAV CKd-6 | 742 | U.S. Pat. No. 8,734,809 SEQ ID NO: 136 |
| AAV CKd-7 | 743 | U.S. Pat. No. 8,734,809 SEQ ID NO: 137 |
| AAV CKd-8 | 744 | U.S. Pat. No. 8,734,809 SEQ ID NO: 138 |
| AAV CLv-1 | 745 | U.S. Pat. No. 8,734,809 SEQ ID NO: 139 |
| AAV CLv-12 | 746 | U.S. Pat. No. 8,734,809 SEQ ID NO: 140 |
| AAV CLv-13 | 747 | U.S. Pat. No. 8,734,809 SEQ ID NO: 141 |
| AAV CLv-2 | 748 | U.S. Pat. No. 8,734,809 SEQ ID NO: 142 |
| AAV CLv-3 | 749 | U.S. Pat. No. 8,734,809 SEQ ID NO: 143 |
| AAV CLv-4 | 750 | U.S. Pat. No. 8,734,809 SEQ ID NO: 144 |
| AAV CLv-6 | 751 | U.S. Pat. No. 8,734,809 SEQ ID NO: 145 |
| AAV CLv-8 | 752 | U.S. Pat. No. 8,734,809 SEQ ID NO: 146 |
| AAV CKd-B1 | 753 | U.S. Pat. No. 8,734,809 SEQ ID NO: 147 |
| AAV CKd-B2 | 754 | U.S. Pat. No. 8,734,809 SEQ ID NO: 148 |
| AAV CKd-B3 | 755 | U.S. Pat. No. 8,734,809 SEQ ID NO: 149 |
| AAV CKd-B4 | 756 | U.S. Pat. No. 8,734,809 SEQ ID NO: 150 |
| AAV CKd-B5 | 757 | U.S. Pat. No. 8,734,809 SEQ ID NO: 151 |
| AAV CKd-B6 | 758 | U.S. Pat. No. 8,734,809 SEQ ID NO: 152 |
| AAV CKd-B7 | 759 | U.S. Pat. No. 8,734,809 SEQ ID NO: 153 |
| AAV CKd-B8 | 760 | U.S. Pat. No. 8,734,809 SEQ ID NO: 154 |
| AAV CKd-H1 | 761 | U.S. Pat. No. 8,734,809 SEQ ID NO: 155 |
| AAV CKd-H2 | 762 | U.S. Pat. No. 8,734,809 SEQ ID NO: 156 |
| AAV CKd-H3 | 763 | U.S. Pat. No. 8,734,809 SEQ ID NO: 157 |
| AAV CKd-H4 | 764 | U.S. Pat. No. 8,734,809 SEQ ID NO: 158 |
| AAV CKd-H5 | 765 | U.S. Pat. No. 8,734,809 SEQ ID NO: 159 |
| AAV CKd-H6 | 766 | U.S. Pat. No. 8,734,809 SEQ ID NO: 151 |
| AAV CHt-1 | 767 | U.S. Pat. No. 8,734,809 SEQ ID NO: 160 |
| AAV CHt-P2 | 768 | WO2016065001 SEQ ID NO: 1 |
| AAV CHt-P5 | 769 | WO2016065001 SEQ ID NO: 2 |
| AAV CHt-P9 | 770 | WO2016065001 SEQ ID NO: 3 |
| AAV CBr-7.1 | 771 | WO2016065001 SEQ ID NO: 4 |
| AAV CBr-7.2 | 772 | WO2016065001 SEQ ID NO: 5 |
| AAV CBr-7.3 | 773 | WO2016065001 SEQ ID NO: 6 |
| AAV CBr-7.4 | 774 | WO2016065001 SEQ ID NO: 7 |
| AAV CBr-7.5 | 775 | WO2016065001 SEQ ID NO: 8 |
| AAV CBr-7.7 | 776 | WO2016065001 SEQ ID NO: 9 |
| AAV CBr-7.8 | 777 | WO2016065001 SEQ ID NO: 10 |
| AAV CBr-7.10 | 778 | WO2016065001 SEQ ID NO: 11 |
| AAV CKd-N3 | 779 | WO2016065001 SEQ ID NO: 12 |
| AAV CKd-N4 | 780 | WO2016065001 SEQ ID NO: 13 |
| AAV CKd-N9 | 781 | WO2016065001 SEQ ID NO: 14 |
| AAV CLv-L4 | 782 | WO2016065001 SEQ ID NO: 15 |
| AAV CLv-L5 | 783 | WO2016065001 SEQ ID NO: 16 |
| AAV CLv-L6 | 784 | WO2016065001 SEQ ID NO: 17 |
| AAV CLv-K1 | 785 | WO2016065001 SEQ ID NO: 18 |
| AAV CLv-K3 | 786 | WO2016065001 SEQ ID NO: 19 |
| AAV CLv-K6 | 787 | WO2016065001 SEQ ID NO: 20 |
| AAV CLv-M1 | 788 | WO2016065001 SEQ ID NO: 21 |
| AAV CLv-M11 | 789 | WO2016065001 SEQ ID NO: 22 |
| AAV CLv-M2 | 790 | WO2016065001 SEQ ID NO: 23 |
| AAV CLv-M5 | 791 | WO2016065001 SEQ ID NO: 24 |
| AAV CLv-M6 | 792 | WO2016065001 SEQ ID NO: 25 |
| AAV CLv-M7 | 793 | WO2016065001 SEQ ID NO: 26 |
| AAV CLv-M8 | 794 | WO2016065001 SEQ ID NO: 27 |
| AAV CLv-M9 | 795 | WO2016065001 SEQ ID NO: 28 |
| AAV CHt-P1 | 796 | WO2016065001 SEQ ID NO: 29 |
| AAV CHt-P6 | 797 | WO2016065001 SEQ ID NO: 30 |
| AAV CHt-P8 | 798 | WO2016065001 SEQ ID NO: 31 |
| AAV CHt-6.1 | 799 | WO2016065001 SEQ ID NO: 32 |
| AAV CHt-6.10 | 800 | WO2016065001 SEQ ID NO: 33 |
| AAV CHt-6.5 | 801 | WO2016065001 SEQ ID NO: 34 |
| AAV CHt-6.6 | 802 | WO2016065001 SEQ ID NO: 35 |
| AAV CHt-6.7 | 803 | WO2016065001 SEQ ID NO: 36 |
| AAV CHt-6.8 | 804 | WO2016065001 SEQ ID NO: 37 |
| AAV CSp-8.10 | 805 | WO2016065001 SEQ ID NO: 38 |
| AAV CSp-8.2 | 806 | WO2016065001 SEQ ID NO: 39 |
| AAV CSp-8.4 | 807 | WO2016065001 SEQ ID NO: 40 |
| AAV CSp-8.5 | 808 | WO2016065001 SEQ ID NO: 41 |
| AAV CSp-8.6 | 809 | WO2016065001 SEQ ID NO: 42 |
| AAV CSp-8.7 | 810 | WO2016065001 SEQ ID NO: 43 |
| AAV CSp-8.8 | 811 | WO2016065001 SEQ ID NO: 44 |
| AAV CSp-8.9 | 812 | WO2016065001 SEQ ID NO: 45 |
| AAV CBr-B7.3 | 813 | WO2016065001 SEQ ID NO: 46 |
| AAV CBr-B7.4 | 814 | WO2016065001 SEQ ID NO: 47 |
| AAV3B | 815 | WO2016065001 SEQ ID NO: 48 |
| AAV4 | 816 | WO2016065001 SEQ ID NO: 49 |
| AAV5 | 817 | WO2016065001 SEQ ID NO: 50 |
| AAV CHt-P2 | 818 | WO2016065001 SEQ ID NO: 51 |
| AAV CHt-P5 | 819 | WO2016065001 SEQ ID NO: 52 |
| AAV CHt-P9 | 820 | WO2016065001 SEQ ID NO: 53 |
| AAV CBr-7.1 | 821 | WO2016065001 SEQ ID NO: 54 |
| AAV CBr-7.2 | 822 | WO2016065001 SEQ ID NO: 55 |
| AAV CBr-7.3 | 823 | WO2016065001 SEQ ID NO: 56 |
| AAV CBr-7.4 | 824 | WO2016065001 SEQ ID NO: 57 |
| AAV CBr-7.5 | 825 | WO2016065001 SEQ ID NO: 58 |
| AAV CBr-7.7 | 826 | WO2016065001 SEQ ID NO: 59 |
| AAV CBr-7.8 | 827 | WO2016065001 SEQ ID NO: 60 |
| AAV CBr-7.10 | 828 | WO2016065001 SEQ ID NO: 61 |
| AAV CKd-N3 | 829 | WO2016065001 SEQ ID NO: 62 |
| AAV CKd-N4 | 830 | WO2016065001 SEQ ID NO: 63 |
| AAV CKd-N9 | 831 | WO2016065001 SEQ ID NO: 64 |
| AAV CLv-L4 | 832 | WO2016065001 SEQ ID NO: 65 |
| AAV CLv-L5 | 833 | WO2016065001 SEQ ID NO: 66 |
| AAV CLv-L6 | 834 | WO2016065001 SEQ ID NO: 67 |
| AAV CLv-K1 | 835 | WO2016065001 SEQ ID NO: 68 |
| AAV CLv-K3 | 836 | WO2016065001 SEQ ID NO: 69 |
| AAV CLv-K6 | 837 | WO2016065001 SEQ ID NO: 70 |
| AAV CL-M1 | 838 | WO2016065001 SEQ ID NO: 71 |
| AAV CLv-M11 | 839 | WO2016065001 SEQ ID NO: 72 |
| AAV CLv-M2 | 840 | WO2016065001 SEQ ID NO: 73 |
| AAV CLv-M5 | 841 | WO2016065001 SEQ ID NO: 74 |
| AAV CLv-M6 | 842 | WO2016065001 SEQ ID NO: 75 |
| AAV CLv-M7 | 843 | WO2016065001 SEQ ID NO: 76 |
| AAV CLv-M8 | 844 | WO2016065001 SEQ ID NO: 77 |
| AAV CLv-M9 | 845 | WO2016065001 SEQ ID NO: 78 |
| AAV CHt-P1 | 846 | WO2016065001 SEQ ID NO: 79 |
| AAV CHt-P6 | 847 | WO2016065001 SEQ ID NO: 80 |
| AAV CHt-P8 | 848 | WO2016065001 SEQ ID NO: 81 |
| AAV CHt-6.1 | 849 | WO2016065001 SEQ ID NO: 82 |
| AAV CHt-6.10 | 850 | WO2016065001 SEQ ID NO: 83 |
| AAV CHt-6.5 | 851 | WO2016065001 SEQ ID NO: 84 |
| AAV CHt-6.6 | 852 | WO2016065001 SEQ ID NO: 85 |
| AAV CHt-6.7 | 853 | WO2016065001 SEQ ID NO: 86 |
| AAV CHt-6.8 | 854 | WO2016065001 SEQ ID NO: 87 |
| AAV CSp-8.10 | 855 | WO2016065001 SEQ ID NO: 88 |
| AAV CSp-8.2 | 856 | WO2016065001 SEQ ID NO: 89 |
| AAV CSp-8.4 | 857 | WO2016065001 SEQ ID NO: 90 |
| AAVTSp-8.5 | 858 | WO2016065001 SEQ ID NO: 91 |
| AAV CSp-8.6 | 859 | WO2016065001 SEQ ID NO: 92 |
| AAV CSp-8.7 | 860 | WO2016065001 SEQ ID NO: 93 |
| AAV CSp-8.8 | 861 | WO2016065001 SEQ ID NO: 94 |
| AAV CSp-8.9 | 862 | WO2016065001 SEQ ID NO: 95 |
| AAV CBr-B7.3 | 863 | WO2016065001 SEQ ID NO: 96 |
| AAV CBr-B7.4 | 864 | WO2016065001 SEQ ID NO: 97 |
| AAV3B | 865 | WO2016065001 SEQ ID NO: 98 |
| AAV4 | 866 | WO2016065001 SEQ ID NO: 99 |
| AAV5 | 867 | WO2016065001 SEQ ID NO: 100 |
| AAVPHP.B | 868 | WO2015038958 SEQ ID NO: 8 and 13, |
| or G2B-26 | | GenBankALU85156.1 |
| AAVPHP.B | 869 | WO2015038958 SEQ ID NO: 9 |
| AAVG2B-13 | 870 | WO2015038958 SEQ ID NO: 12 |
| AAVTH1.1-32 | 871 | WO2015038958 SEQ ID NO: 14 |
| AAVTH1.1-35 | 872 | WO2015038958 SEQ ID NO: 15 |
| PHP.N/ | 1439 | WO2017100671 SEQ ID NO: 46 |
| PHP.B-DGT | | |
| PHP.S/G2A12 | 1440 | WO2017100671 SEQ ID NO: 47 |
| AAV9/hu.14 | 1441 | WO2017100671 SEQ ID NO: 45 |
| K449R | | |
| GPV | 1518 | U.S. Pat. No. 9,624,274B2 SEQ ID NO: 192 |
| B19 | 1519 | U.S. Pat. No. 9,624,274B2 SEQ ID NO: 193 |
| MVM | 1520 | U.S. Pat. No. 9,624,274B2 SEQ ID NO: 194 |
| FPV | 1521 | U.S. Pat. No. 9,624,274B2 SEQ ID NO: 195 |
| CPV | 1522 | U.S. Pat. No. 9,624,274B2 SEQ ID NO: 196 |
| AAV6 | 1523 | U.S. Pat. No. 9,546,112B2 SEQ ID NO: 5 |
| AAV6 | 1524 | U.S. Pat. No. 9,457,103B2 SEQ ID NO: 1 |
| AAV2 | 1525 | U.S. Pat. No. 9,457,103B2 SEQ ID NO: 2 |
| ShH10 | 1526 | U.S. Pat. No. 9,457,103B2 SEQ ID NO: 3 |
| ShH13 | 1527 | U.S. Pat. No. 9,457,103B2 SEQ ID NO: 4 |
| ShH10 | 1528 | U.S. Pat. No. 9,457,103B2 SEQ ID NO: 5 |
| ShH10 | 1529 | U.S. Pat. No. 9,457,103B2 SEQ ID NO: 6 |
| ShH10 | 1530 | U.S. Pat. No. 9,457,103B2 SEQ ID NO: 7 |
| ShH10 | 1531 | U.S. Pat. No. 9,457,103B2 SEQ ID NO: 8 |
| ShH10 | 1532 | U.S. Pat. No. 9,457,103B2 SEQ ID NO: 9 |
| rh74 | 1533 | U.S. Pat. No. 9,434,928B2 SEQ ID NO: 1, |
| | | US2015023924A1 SEQ ID NO: 2 |
| rh74 | 1534 | U.S. Pat. No. 9,434,928B2 SEQ ID NO: 2, |
| | | US2015023924A1 SEQ ID NO: 1 |
| AAV8 | 1535 | U.S. Pat. No. 9,434,928B2 SEQ ID NO: 4 |
| rh74 | 1536 | U.S. Pat. No. 9,434,928B2 SEQ ID NO: 5 |
| rh74 | 1537 | US2015023924A1 SEQ ID NO: 5, |
| (RHM4-1) | | US20160375110A1 SEQ ID NO: 4 |
| rh74 | 1538 | US2015023924A1 SEQ ID NO: 6, |
| (RHM15-1) | | US20160375110A1 SEQ ID NO: 5 |
| rh74 | 1539 | US2015023924A1 SEQ ID NO: 7, |
| (RHM15-2) | | US20160375110A1 SEQ ID NO: 6 |
| rh74 | 1540 | US2015023924A1 SEQ ID NO: 8, |
| (RHM15- | | US20160375110A1 SEQ ID NO: 7 |
| 3/RHM15-5) | | |
| rh74 | 1541 | US2015023924A1 SEQ ID NO: 9, |
| (RHM15-4) | | US20160375110A1 SEQ ID NO: 8 |
| rh74 | 1542 | US2015023924A1 SEQ ID NO: 10, |
| (RHM15-6) | | US20160375110A1 SEQ ID NO: 9 |
| rh74 | 1543 | US2015023924A1 SEQ ID NO: 11 |
| (RHM4-1) | | |
| rh74 | 1544 | US2015023924A1 SEQ ID NO: 12 |
| (RHM15-1) | | |
| rh74 | 1545 | US2015023924A1 SEQ ID NO: 13 |
| (RHM15-2) | | |
| rh74 | 1546 | US2015023924A1 SEQ ID NO: 14 |
| (RHM15- | | |
| 3/RHM15-5) | | |
| rh74 | 1547 | US2015023924A1 SEQ ID NO: 15 |
| (RHM15-4) | | |
| rh74 | 1548 | US2015023924A1 SEQ ID NO: 16 |
| (RHM15-6) | | |
| AAV2 | 1549 | US20160175389A1 SEQ ID NO: 9 |
| (comprising | | |
| lung specific | | |
| polypeptide) | | |
| AAV2 | 1550 | US20160175389A1 SEQ ID NO: 10 |
| (comprising | | |
| lung specific | | |
| polypeptide) | | |
| Anc80 | 1551 | US20170051257A1 SEQ ID NO: 1 |
| Anc80 | 1552 | US20170051257A1 SEQ ID NO: 2 |
| Anc81 | 1553 | US20170051257A1 SEQ ID NO: 3 |
| Anc80 | 1554 | US20170051257A1 SEQ ID NO: 4 |
| Anc82 | 1555 | US20170051257A1 SEQ ID NO: 5 |
| Anc82 | 1556 | US20170051257A1 SEQ ID NO: 6 |
| Anc83 | 1557 | US20170051257A1 SEQ ID NO: 7 |
| Anc83 | 1558 | US20170051257A1 SEQ ID NO: 8 |
| Anc84 | 1559 | US20170051257A1 SEQ ID NO: 9 |
| Anc84 | 1560 | US20170051257A1 SEQ ID NO: 10 |
| Anc94 | 1561 | US20170051257A1 SEQ ID NO: 11 |
| Anc94 | 1562 | US20170051257A1 SEQ ID NO: 12 |
| Anc113 | 1563 | US20170051257A1 SEQ ID NO: 13 |
| Anc113 | 1564 | US20170051257A1 SEQ ID NO: 14 |
| Anc126 | 1565 | US20170051257A1 SEQ ID NO: 15 |
| Anc126 | 1566 | US20170051257A1 SEQ ID NO: 16 |
| Anc127 | 1567 | US20170051257A1 SEQ ID NO: 17 |
| Anc127 | 1568 | US20170051257A1 SEQ ID NO: 18 |
| Anc80L27 | 1569 | US20170051257A1 SEQ ID NO: 19 |
| Anc80L59 | 1570 | US20170051257A1 SEQ ID NO: 20 |
| Anc80L60 | 1571 | US20170051257A1 SEQ ID NO: 21 |
| Anc80L62 | 1572 | US20170051257A1 SEQ ID NO: 22 |
| Anc80L65 | 1573 | US20170051257A1 SEQ ID NO: 23 |
| Anc80L33 | 1574 | US20170051257A1 SEQ ID NO: 24 |
| Anc80L36 | 1575 | US20170051257A1 SEQ ID NO: 25 |
| Anc80L44 | 1576 | US20170051257A1 SEQ ID NO: 26 |
| Anc80L1 | 1577 | US20170051257A1 SEQ ID NO: 35 |
| Anc80L1 | 1578 | US20170051257A1 SEQ ID NO: 36 |
| AAV-X1 | 1579 | U.S. Pat. No. 8,283,151B2 SEQ ID NO: 11 |
| AAV-X1b | 1580 | U.S. Pat. No. 8,283,151B2 SEQ ID NO: 12 |
| AAV-X5 | 1581 | U.S. Pat. No. 8,283,151B2 SEQ ID NO: 13 |
| AAV-X19 | 1582 | U.S. Pat. No. 8,283,151B2 SEQ ID NO: 14 |
| AAV-X21 | 1583 | U.S. Pat. No. 8,283,151B2 SEQ ID NO: 15 |
| AAV-X22 | 1584 | U.S. Pat. No. 8,283,151B2 SEQ ID NO: 16 |
| AAV-X23 | 1585 | U.S. Pat. No. 8,283,151B2 SEQ ID NO: 17 |
| AAV-X24 | 1586 | U.S. Pat. No. 8,283,151B2 SEQ ID NO: 18 |
| AAV-X25 | 1587 | U.S. Pat. No. 8,283,151B2 SEQ ID NO: 19 |
| AAV-X26 | 1588 | U.S. Pat. No. 8,283,151B2 SEQ ID NO: 20 |
| AAV-X1 | 1589 | U.S. Pat. No. 8,283,151B2 SEQ ID NO: 21 |
| AAV-X1b | 1590 | U.S. Pat. No. 8,283,151B2 SEQ ID NO: 22 |
| AAV-X5 | 1591 | U.S. Pat. No. 8,283,151B2 SEQ ID NO: 23 |
| AAV-X19 | 1592 | U.S. Pat. No. 8,283,151B2 SEQ ID NO: 24 |
| AAV-X21 | 1593 | U.S. Pat. No. 8,283,151B2 SEQ ID NO: 25 |
| AAV-X22 | 1594 | U.S. Pat. No. 8,283,151B2 SEQ ID NO: 26 |
| AAV-X23 | 1595 | U.S. Pat. No. 8,283,151B2 SEQ ID NO: 27 |
| AAV-X24 | 1596 | U.S. Pat. No. 8,283,151B2 SEQ ID NO: 28 |
| AAV-X25 | 1597 | U.S. Pat. No. 8,283,151B2 SEQ ID NO: 29 |
| AAV-X26 | 1598 | U.S. Pat. No. 8,283,151B2 SEQ ID NO: 30 |
| AAVrh8 | 1599 | WO2016054554A1 SEQ ID NO: 8 |
| AAVrh8VP2FC5 | 1600 | WO2016054554A1 SEQ ID NO: 9 |
| AAVrh8VP2FC44 | 1601 | WO2016054554A1 SEQ ID NO: 10 |
| AAVrh8VP2ApoB100 | 1602 | WO2016054554A1 SEQ ID NO: 11 |
| AAVrh8VP2RVG | 1603 | WO2016054554A1 SEQ ID NO: 12 |
| AAVrh8VP2Angiopep- | 1604 | WO2016054554A1 SEQ ID NO: 13 |
| 2 VP2 | | |
| AAV9.47VP1.3 | 1605 | WO2016054554A1 SEQ ID NO: 14 |
| AAV9.47VP2ICAMg3 | 1606 | WO2016054554A1 SEQ ID NO: 15 |
| AAV9.47VP2RVG | 1607 | WO2016054554A1 SEQ ID NO: 16 |
| AAV9.47VP2Angiopep- | 1608 | WO2016054554A1 SEQ ID NO: 17 |
| 2 | | |
| AAV9.47VP2A- | 1609 | WO2016054554A1 SEQ ID NO: 18 |
| string | | |
| AAVrh8VP2FC5 | 1610 | WO2016054554A1 SEQ ID NO: 19 |
| VP2 | | |
| AAVrh8VP2FC44 | 1611 | WO2016054554A1 SEQ ID NO: 20 |
| VP2 | | |
| AAVrh8VP2ApoB100 | 1612 | WO2016054554A1 SEQ ID NO: 21 |
| VP2 | | |
| AAVrh8VP2RVG | 1613 | WO2016054554A1 SEQ ID NO: 22 |
| VP2 | | |
| AAVrh8VP2Angiopep- | 1614 | WO2016054554A1 SEQ ID NO: 23 |
| 2 VP2 | | |
| AAV9.47VP2ICAMg3 | 1615 | WO2016054554A1 SEQ ID NO: 24 |
| VP2 | | |
| AAV9.47VP2RVG | 1616 | WO2016054554A1 SEQ ID NO: 25 |
| VP2 | | |
| AAV9.47VP2Angiopep- | 1617 | WO2016054554A1 SEQ ID NO: 26 |
| 2 VP2 | | |
| AAV9.47VP2A- | 1618 | WO2016054554A1 SEQ ID NO: 27 |
| string VP2 | | |
| rAAV-B1 | 1619 | WO2016054557A1 SEQ ID NO: 1 |
| rAAV-B2 | 1620 | WO2016054557A1 SEQ ID NO: 2 |
| rAAV-B3 | 1621 | WO2016054557A1 SEQ ID NO: 3 |
| rAAV-B4 | 1622 | WO2016054557A1 SEQ ID NO: 4 |
| rAAV-B1 | 1623 | WO2016054557A1 SEQ ID NO: 5 |
| rAAV-B2 | 1624 | WO2016054557A1 SEQ ID NO: 6 |
| rAAV-B3 | 1625 | WO2016054557A1 SEQ ID NO: 7 |
| rAAV-B4 | 1626 | WO2016054557A1 SEQ ID NO: 8 |
| rAAV-L1 | 1627 | WO2016054557A1 SEQ ID NO: 9 |
| rAAV-L2 | 1628 | WO2016054557A1 SEQ ID NO: 10 |
| rAAV-L3 | 1629 | WO2016054557A1 SEQ ID NO: 11 |
| rAAV-L4 | 1630 | WO2016054557A1 SEQ ID NO: 12 |
| rAAV-L1 | 1631 | WO2016054557A1 SEQ ID NO: 13 |
| rAAV-L2 | 1632 | WO2016054557A1 SEQ ID NO: 14 |
| rAAV-L3 | 1633 | WO2016054557A1 SEQ ID NO: 15 |
| rAAV-L4 | 1634 | WO2016054557A1 SEQ ID NO: 16 |
| AAV9 | 1635 | WO2016073739A1 SEQ ID NO: 3 |
| rAAV | 1636 | WO2016081811A1 SEQ ID NO: 1 |
| rAAV | 1637 | WO2016081811A1 SEQ ID NO: 2 |
| rAAV | 1638 | WO2016081811A1 SEQ ID NO: 3 |
| rAAV | 1639 | WO2016081811A1 SEQ ID NO: 4 |
| rAAV | 1640 | WO2016081811A1 SEQ ID NO: 5 |
| rAAV | 1641 | WO2016081811A1 SEQ ID NO: 6 |
| rAAV | 1642 | WO2016081811A1 SEQ ID NO: 7 |
| rAAV | 1643 | WO2016081811A1 SEQ ID NO: 8 |
| rAAV | 1644 | WO2016081811A1 SEQ ID NO: 9 |
| rAAV | 1645 | WO2016081811A1 SEQ ID NO: 10 |
| rAAV | 1646 | WO2016081811A1 SEQ ID NO: 11 |
| rAAV | 1647 | WO2016081811A1 SEQ ID NO: 12 |
| rAAV | 1648 | WO2016081811A1 SEQ ID NO: 13 |
| rAAV | 1649 | WO2016081811A1 SEQ ID NO: 14 |
| rAAV | 1650 | WO2016081811A1 SEQ ID NO: 15 |
| rAAV | 1651 | WO2016081811A1 SEQ ID NO: 16 |
| rAAV | 1652 | WO2016081811A1 SEQ ID NO: 17 |
| rAAV | 1653 | WO2016081811A1 SEQ ID NO: 18 |
| rAAV | 1654 | WO2016081811A1 SEQ ID NO: 19 |
| rAAV | 1655 | WO2016081811A1 SEQ ID NO: 20 |
| rAAV | 1656 | WO2016081811A1 SEQ ID NO: 21 |
| rAAV | 1657 | WO2016081811A1 SEQ ID NO: 22 |
| rAAV | 1658 | WO2016081811A1 SEQ ID NO: 23 |
| rAAV | 1659 | WO2016081811A1 SEQ ID NO: 24 |
| rAAV | 1660 | WO2016081811A1 SEQ ID NO: 25 |
| rAAV | 1661 | WO2016081811A1 SEQ ID NO: 26 |
| rAAV | 1662 | WO2016081811A1 SEQ ID NO: 27 |
| rAAV | 1663 | WO2016081811A1 SEQ ID NO: 28 |
| rAAV | 1664 | WO2016081811A1 SEQ ID NO: 29 |
| rAAV | 1665 | WO2016081811A1 SEQ ID NO: 30 |
| rAAV | 1666 | WO2016081811A1 SEQ ID NO: 31 |
| rAAV | 1667 | WO2016081811A1 SEQ ID NO: 32 |
| rAAV | 1668 | WO2016081811A1 SEQ ID NO: 33 |
| rAAV | 1669 | WO2016081811A1 SEQ ID NO: 34 |
| rAAV | 1670 | WO2016081811A1 SEQ ID NO: 35 |
| rAAV | 1671 | WO2016081811A1 SEQ ID NO: 36 |
| rAAV | 1672 | WO2016081811A1 SEQ ID NO: 37 |
| rAAV | 1673 | WO2016081811A1 SEQ ID NO: 38 |
| rAAV | 1674 | WO2016081811A1 SEQ ID NO: 39 |
| rAAV | 1675 | WO2016081811A1 SEQ ID NO: 40 |
| rAAV | 1676 | WO2016081811A1 SEQ ID NO: 41 |
| rAAV | 1677 | WO2016081811A1 SEQ ID NO: 42 |
| rAAV | 1678 | WO2016081811A1 SEQ ID NO: 43 |
| rAAV | 1679 | WO2016081811A1 SEQ ID NO: 44 |
| rAAV | 1680 | WO2016081811A1 SEQ ID NO: 45 |
| rAAV | 1681 | WO2016081811A1 SEQ ID NO: 46 |
| rAAV | 1682 | WO2016081811A1 SEQ ID NO: 47 |
| rAAV | 1683 | WO2016081811A1 SEQ ID NO: 48 |
| rAAV | 1684 | WO2016081811A1 SEQ ID NO: 49 |
| rAAV | 1685 | WO2016081811A1 SEQ ID NO: 50 |
| rAAV | 1686 | WO2016081811A1 SEQ ID NO: 51 |
| rAAV | 1687 | WO2016081811A1 SEQ ID NO: 52 |
| rAAV | 1688 | WO2016081811A1 SEQ ID NO: 53 |
| rAAV | 1689 | WO2016081811A1 SEQ ID NO: 54 |
| rAAV | 1690 | WO2016081811A1 SEQ ID NO: 55 |
| rAAV | 1691 | WO2016081811A1 SEQ ID NO: 56 |
| rAAV | 1692 | WO2016081811A1 SEQ ID NO: 57 |
| rAAV | 1693 | WO2016081811A1 SEQ ID NO: 58 |
| rAAV | 1694 | WO2016081811A1 SEQ ID NO: 59 |
| rAAV | 1695 | WO2016081811A1 SEQ ID NO: 60 |
| rAAV | 1696 | WO2016081811A1 SEQ ID NO: 61 |
| rAAV | 1697 | WO2016081811A1 SEQ ID NO: 62 |
| rAAV | 1698 | WO2016081811A1 SEQ ID NO: 63 |
| rAAV | 1699 | WO2016081811A1 SEQ ID NO: 64 |
| rAAV | 1700 | WO2016081811A1 SEQ ID NO: 65 |
| rAAV | 1701 | WO2016081811A1 SEQ ID NO: 66 |
| rAAV | 1702 | WO2016081811A1 SEQ ID NO: 67 |
| rAAV | 1703 | WO2016081811A1 SEQ ID NO: 68 |
| rAAV | 1704 | WO2016081811A1 SEQ ID NO: 69 |
| rAAV | 1705 | WO2016081811A1 SEQ ID NO: 70 |
| rAAV | 1706 | WO2016081811A1 SEQ ID NO: 71 |
| rAAV | 1707 | WO2016081811A1 SEQ ID NO: 72 |
| rAAV | 1708 | WO2016081811A1 SEQ ID NO: 73 |
| rAAV | 1709 | WO2016081811A1 SEQ ID NO: 74 |
| rAAV | 1710 | WO2016081811A1 SEQ ID NO: 75 |
| rAAV | 1711 | WO2016081811A1 SEQ ID NO: 76 |
| rAAV | 1712 | WO2016081811A1 SEQ ID NO: 77 |
| rAAV | 1713 | WO2016081811A1 SEQ ID NO: 78 |
| rAAV | 1714 | WO2016081811A1 SEQ ID NO: 79 |
| rAAV | 1715 | WO2016081811A1 SEQ ID NO: 80 |
| rAAV | 1716 | WO2016081811A1 SEQ ID NO: 81 |
| rAAV | 1717 | WO2016081811A1 SEQ ID NO: 82 |
| rAAV | 1718 | WO2016081811A1 SEQ ID NO: 83 |
| rAAV | 1719 | WO2016081811A1 SEQ ID NO: 84 |
| rAAV | 1720 | WO2016081811A1 SEQ ID NO: 85 |
| rAAV | 1721 | WO2016081811A1 SEQ ID NO: 86 |
| rAAV | 1722 | WO2016081811A1 SEQ ID NO: 87 |
| rAAV | 1723 | WO2016081811A1 SEQ ID NO: 88 |
| rAAV | 1724 | WO2016081811A1 SEQ ID NO: 89 |
| rAAV | 1725 | WO2016081811A1 SEQ ID NO: 90 |
| rAAV | 1726 | WO2016081811A1 SEQ ID NO: 91 |
| rAAV | 1727 | WO2016081811A1 SEQ ID NO: 92 |
| rAAV | 1728 | WO2016081811A1 SEQ ID NO: 93 |
| rAAV | 1729 | WO2016081811A1 SEQ ID NO: 94 |
| rAAV | 1730 | WO2016081811A1 SEQ ID NO: 95 |
| rAAV | 1731 | WO2016081811A1 SEQ ID NO: 96 |
| rAAV | 1732 | WO2016081811A1 SEQ ID NO: 97 |
| rAAV | 1733 | WO2016081811A1 SEQ ID NO: 98 |
| rAAV | 1734 | WO2016081811A1 SEQ ID NO: 99 |
| rAAV | 1735 | WO2016081811A1 SEQ ID NO: 100 |
| rAAV | 1736 | WO2016081811A1 SEQ ID NO: 101 |
| rAAV | 1737 | WO2016081811A1 SEQ ID NO: 102 |
| rAAV | 1738 | WO2016081811A1 SEQ ID NO: 103 |
| rAAV | 1739 | WO2016081811A1 SEQ ID NO: 104 |
| rAAV | 1740 | WO2016081811A1 SEQ ID NO: 105 |
| rAAV | 1741 | WO2016081811A1 SEQ ID NO: 106 |
| rAAV | 1742 | WO2016081811A1 SEQ ID NO: 107 |
| rAAV | 1743 | WO2016081811A1 SEQ ID NO: 108 |
| rAAV | 1744 | WO2016081811A1 SEQ ID NO: 109 |
| rAAV | 1745 | WO2016081811A1 SEQ ID NO: 110 |
| rAAV | 1746 | WO2016081811A1 SEQ ID NO: 111 |
| rAAV | 1747 | WO2016081811A1 SEQ ID NO: 112 |
| rAAV | 1748 | WO2016081811A1 SEQ ID NO: 113 |
| rAAV | 1749 | WO2016081811A1 SEQ ID NO: 114 |
| rAAV | 1750 | WO2016081811A1 SEQ ID NO: 115 |
| rAAV | 1751 | WO2016081811A1 SEQ ID NO: 116 |
| rAAV | 1752 | WO2016081811A1 SEQ ID NO: 117 |
| rAAV | 1753 | WO2016081811A1 SEQ ID NO: 118 |
| rAAV | 1754 | WO2016081811A1 SEQ ID NO: 119 |
| rAAV | 1755 | WO2016081811A1 SEQ ID NO: 120 |
| rAAV | 1756 | WO2016081811A1 SEQ ID NO: 121 |
| rAAV | 1757 | WO2016081811A1 SEQ ID NO: 122 |
| rAAV | 1758 | WO2016081811A1 SEQ ID NO: 123 |
| rAAV | 1759 | WO2016081811A1 SEQ ID NO: 124 |
| rAAV | 1760 | WO2016081811A1 SEQ ID NO: 125 |
| rAAV | 1761 | WO2016081811A1 SEQ ID NO: 126 |
| rAAV | 1762 | WO2016081811A1 SEQ ID NO: 127 |
| rAAV | 1763 | WO2016081811A1 SEQ ID NO: 128 |
| AAV8 | 1764 | WO2016081811A1 SEQ ID NO: 133 |
| E532K | | |
| AAV8 | 1765 | WO2016081811A1 SEQ ID NO: 134 |
| E532K | | |
| rAAV4 | 1766 | WO2016115382A1 SEQ ID NO: 2 |
| rAAV4 | 1767 | WO2016115382A1 SEQ ID NO: 3 |
| rAAV4 | 1768 | WO2016115382A1 SEQ ID NO: 4 |
| rAAV4 | 1769 | WO2016115382A1 SEQ ID NO: 5 |
| rAAV4 | 1770 | WO2016115382A1 SEQ ID NO: 6 |
| rAAV4 | 1771 | WO2016115382A1 SEQ ID NO: 7 |
| rAAV4 | 1772 | WO2016115382A1 SEQ ID NO: 8 |
| rAAV4 | 1773 | WO2016115382A1 SEQ ID NO: 9 |
| rAAV4 | 1774 | WO2016115382A1 SEQ ID NO: 10 |
| rAAV4 | 1775 | WO2016115382A1 SEQ ID NO: 11 |
| rAAV4 | 1776 | WO2016115382A1 SEQ ID NO: 12 |
| rAAV4 | 1777 | WO2016115382A1 SEQ ID NO: 13 |
| rAAV4 | 1778 | WO2016115382A1 SEQ ID NO: 14 |
| rAAV4 | 1779 | WO2016115382A1 SEQ ID NO: 15 |
| rAAV4 | 1780 | WO2016115382A1 SEQ ID NO: 16 |
| rAAV4 | 1781 | WO2016115382A1 SEQ ID NO: 17 |
| rAAV4 | 1782 | WO2016115382A1 SEQ ID NO: 18 |
| rAAV4 | 1783 | WO2016115382A1 SEQ ID NO: 19 |
| rAAV4 | 1784 | WO2016115382A1 SEQ ID NO: 20 |
| rAAV4 | 1785 | WO2016115382A1 SEQ ID NO: 21 |
| AAV11 | 1786 | WO2016115382A1 SEQ ID NO: 22 |
| AAV12 | 1787 | WO2016115382A1 SEQ ID NO: 23 |
| rh32 | 1788 | WO2016115382A1 SEQ ID NO: 25 |
| rh33 | 1789 | WO2016115382A1 SEQ ID NO: 26 |
| rh34 | 1790 | WO2016115382A1 SEQ ID NO: 27 |
| rAAV4 | 1791 | WO2016115382A1 SEQ ID NO: 28 |
| rAAV4 | 1792 | WO2016115382A1 SEQ ID NO: 29 |
| rAAV4 | 1793 | WO2016115382A1 SEQ ID NO: 30 |
| rAAV4 | 1794 | WO2016115382A1 SEQ ID NO: 31 |
| rAAV4 | 1795 | WO2016115382A1 SEQ ID NO: 32 |
| rAAV4 | 1796 | WO2016115382A1 SEQ ID NO: 33 |
| AAV2/8 | 1797 | WO2016115382A1 SEQ ID NO: 47 |
| AAV2/8 | 1798 | WO2016115382A1 SEQ ID NO: 48 |
| ancestral | 1799 | WO2016154344A1 SEQ ID NO: 7 |
| AAV | | |
| ancestral | 1800 | WO2016154344A1 SEQ ID NO: 13 |
| AAV variant | | |
| C4 | | |
| ancestral | 1801 | WO2016154344A1 SEQ ID NO: 14 |
| AAV variant | | |
| C7 | | |
| ancestral | 1802 | WO2016154344A1 SEQ ID NO: 15 |
| AAV variant | | |
| G4 | | |
| consensus | 1803 | WO2016154344A1 SEQ ID NO: 16 |
| amino acid | | |
| sequence of | | |
| ancestral | | |
| AAV | | |
| variants, C4, | | |
| C7 and G4 | | |
| consensus | 1804 | WO2016154344A1 SEQ ID NO: 17 |
| amino acid | | |
| sequence of | | |
| ancestral | | |
| AAV | | |
| variants, C4 | | |
| and C7 | | |
| AAV8 (with | 1805 | WO2016150403A1 SEQ ID NO: 13 |
| a AAV2 | | |
| phospholipase | | |
| domain) | | |
| AAV VR-942n | 1806 | US20160289275A1 SEQ ID NO: 10 |
| AAV5-A | 1807 | US20160289275A1 SEQ ID NO: 13 |
| (M569V) | | |
| AAV5-A | 1808 | US20160289275A1 SEQ ID NO: 14 |
| (M569V) | | |
| AAV5-A | 1809 | US20160289275A1 SEQ ID NO: 16 |
| (Y585V) | | |
| AAV5-A | 1810 | US20160289275A1 SEQ ID NO: 17 |
| (Y585V) | | |
| AAV5-A | 1811 | US20160289275A1 SEQ ID NO: 19 |
| (L587T) | | |
| AAV5-A | 1812 | US20160289275A1 SEQ ID NO: 20 |
| (L587T) | | |
| AAV5-A | 1813 | US20160289275A1 SEQ ID NO: 22 |
| (Y585V/ | | |
| L587T) | | |
| AAV5-A | 1814 | US20160289275A1 SEQ ID NO: 23 |
| (Y585V/ | | |
| L587T) | | |
| AAV5-B | 1815 | US20160289275A1 SEQ ID NO: 25 |
| (D652A) | | |
| AAV5-B | 1816 | US20160289275A1 SEQ ID NO: 26 |
| (D652A) | | |
| AAV5-B | 1817 | US20160289275A1 SEQ ID NO: 28 |
| (T362M) | | |
| AAV5-B | 1818 | US20160289275A1 SEQ ID NO: 29 |
| (T362M) | | |
| AAV5-B | 1819 | US20160289275A1 SEQ ID NO: 31 |
| (Q359D) | | |
| AAV5-B | 1820 | US20160289275A1 SEQ ID NO: 32 |
| (Q359D) | | |
| AAV5-B | 1821 | US20160289275A1 SEQ ID NO: 34 |
| (E350Q) | | |
| AAV5-B | 1822 | US20160289275A1 SEQ ID NO: 35 |
| (E350Q) | | |
| AAV5-B | 1823 | US20160289275A1 SEQ ID NO: 37 |
| (P533S) | | |
| AAV5-B | 1824 | US20160289275A1 SEQ ID NO: 38 |
| (P533S) | | |
| AAV5-B | 1825 | US20160289275A1 SEQ ID NO: 40 |
| (P533G) | | |
| AAV5B | 1826 | US20160289275A1 SEQ ID NO: 41 |
| (P533G) | | |
| AAV5- | 1827 | US20160289275A1 SEQ ID NO: 43 |
| mutation in | | |
| loop VII | | |
| AAV5- | 1828 | US20160289275A1 SEQ ID NO: 44 |
| mutation in | | |
| loop VII | | |
| AAV8 | 1829 | US20160289275A1 SEQ ID NO: 47 |
| Mut A | 1830 | WO2016181123A1 SEQ ID NO: 1 |
| (LK03/AAV8) | | |
| Mut B | 1831 | WO2016181123A1 SEQ ID NO: 2 |
| (LK03/AAV5) | | |
| Mut C | 1832 | WO2016181123A1 SEQ ID NO: 3 |
| (AAV8/AAV3B) | | |
| Mut D | 1833 | WO2016181123A1 SEQ ID NO: 4 |
| (AAV5/AAV3B) | | |
| Mut E | 1834 | WO2016181123A1 SEQ ID NO: 5 |
| (AAV8/AAV3B) | | |
| Mut F | 1835 | WO2016181123A1 SEQ ID NO: 6 |
| (AAV3B/AAV8) | | |
| AAV44.9 | 1836 | WO2016183297A1 SEQ ID NO: 4 |
| AAV44.9 | 1837 | WO2016183297A1 SEQ ID NO: 5 |
| AAVrh8 | 1838 | WO2016183297A1 SEQ ID NO: 6 |
| AAV44.9 | 1839 | WO2016183297A1 SEQ ID NO: 9 |
| (S470N) | | |
| rh74 VP1 | 1840 | US20160375110A1 SEQ ID NO: 1 |
| AAV-LK03 | 1841 | WO2017015102A1 SEQ ID NO: 5 |
| (L125I) | | |
| AAV3B | 1842 | WO2017015102A1 SEQ ID NO: 6 |
| (S663V + | | |
| T492V) | | |
| Anc80 | 1843 | WO2017019994A2 SEQ ID NO: 1 |
| Anc80 | 1844 | WO2017019994A2 SEQ ID NO: 2 |
| Anc81 | 1845 | WO2017019994A2 SEQ ID NO: 3 |
| Anc81 | 1846 | WO2017019994A2 SEQ ID NO: 4 |
| Anc82 | 1847 | WO2017019994A2 SEQ ID NO: 5 |
| Anc82 | 1848 | WO2017019994A2 SEQ ID NO: 6 |
| Anc83 | 1849 | WO2017019994A2 SEQ ID NO: 7 |
| Anc83 | 1850 | WO2017019994A2 SEQ ID NO: 8 |
| Anc84 | 1851 | WO2017019994A2 SEQ ID NO: 9 |
| Anc84 | 1852 | WO2017019994A2 SEQ ID NO: 10 |
| Anc94 | 1853 | WO2017019994A2 SEQ ID NO: 11 |
| Anc94 | 1854 | WO2017019994A2 SEQ ID NO: 12 |
| Anc113 | 1855 | WO2017019994A2 SEQ ID NO: 13 |
| Anc113 | 1856 | WO2017019994A2 SEQ ID NO: 14 |
| Anc126 | 1857 | WO2017019994A2 SEQ ID NO: 15 |
| Anc126 | 1858 | WO2017019994A2 SEQ ID NO: 16 |
| Anc127 | 1859 | WO2017019994A2 SEQ ID NO: 17 |
| Anc127 | 1860 | WO2017019994A2 SEQ ID NO: 18 |
| Anc80L27 | 1861 | WO2017019994A2 SEQ ID NO: 19 |
| Anc80L59 | 1862 | WO2017019994A2 SEQ ID NO: 20 |
| Anc80L60 | 1863 | WO2017019994A2 SEQ ID NO: 21 |
| Anc80L62 | 1864 | WO2017019994A2 SEQ ID NO: 22 |
| Anc80L65 | 1865 | WO2017019994A2 SEQ ID NO: 23 |
| Anc80L33 | 1866 | WO2017019994A2 SEQ ID NO: 24 |
| Anc80L36 | 1867 | WO2017019994A2 SEQ ID NO: 25 |
| Am80L44 | 1868 | WO2017019994A2 SEQ ID NO: 26 |
| Anc80L1 | 1869 | WO2017019994A2 SEQ ID NO: 35 |
| Anc80L1 | 1870 | WO2017019994A2 SEQ ID NO: 36 |
| AAVrh10 | 1871 | WO2017019994A2 SEQ ID NO: 41 |
| Anc110 | 1872 | WO2017019994A2 SEQ ID NO: 42 |
| Anc110 | 1873 | WO2017019994A2 SEQ ID NO: 43 |
| AAVrh32.33 | 1874 | WO2017019994A2 SEQ ID NO: 45 |
| AAVrh74 | 1875 | WO2017049031A1 SEQ ID NO: 1 |
| AAV2 | 1876 | WO2017053629A2 SEQ ID NO: 49 |
| AAV2 | 1877 | WO2017053629A2 SEQ ID NO: 50 |
| AAV2 | 1878 | WO2017053629A2 SEQ ID NO: 82 |
| Parvo-like | 1879 | WO2017070476A2 SEQ ID NO: 1 |
| virus | | |
| Parvo-like | 1880 | WO2017070476A2 SEQ ID NO: 2 |
| virus | | |
| Parvo-like | 1881 | WO2017070476A2 SEQ ID NO: 3 |
| virus | | |
| Parvo-like | 1882 | WO2017070476A2 SEQ ID NO: 4 |
| virus | | |
| Parvo-like | 1883 | WO2017070476A2 SEQ ID NO: 5 |
| virus | | |
| Parvo-like | 1884 | WO2017070476A2 SEQ ID NO: 6 |
| virus | | |
| AAVrh.10 | 1885 | WO2017070516A1 SEQ ID NO: 7 |
| AAVrh.10 | 1886 | WO2017070516A1 SEQ ID NO: 14 |
| AAV2tYF | 1887 | WO2017070491A1 SEQ ID NO: 1 |
| AAV-SPK | 1888 | WO2017075619A1 SEQ ID NO: 28 |
| AAV2.5 | 1889 | US20170128528A1 SEQ ID NO: 13 |
| AAV1.1 | 1890 | US20170128528A1 SEQ ID NO: 15 |
| AAV6.1 | 1891 | US20170128528A1 SEQ ID NO: 17 |
| AAV6.3.1 | 1892 | US20170128528A1 SEQ ID NO: 18 |
| AAV2i8 | 1893 | US20170128528A1 SEQ ID NO: 28 |
| AAV2i8 | 1894 | US20170128528A1 SEQ ID NO: 29 |
| ttAAV | 1895 | US20170128528A1 SEQ ID NO: 30 |
| ttAAV- | 1896 | U820170128528A1 SEQ ID NO: 32 |
| S312N | | |
| ttAAV- | 1897 | US20170128528A1 SEQ ID NO: 33 |
| S312N | | |
| AAV6 | 1898 | WO2016134337A1 SEQ ID NO: 24 |
| (Y705, Y731, | | |
| and T492) | | |
| AAV2 | 1899 | WO2016134375A1 SEQ ID NO: 9 |
| AAV2 | 1900 | WO2016134375A1 SEQ ID NO: 10 |

[0133] Each of the patents, applications and/or publications listed in Table 1 arc hereby incorporated by reference in their entirety.

[0134] in some embodiments, the AAV serotype may be, or may have a sequence as described in International Patent Publication WO2015038958, the contents of which are herein incorporated by reference in their entirety, such as, but not limited to, AAV9 (SEQ ID NO: 2 and 11 of WO2015038958 or SEQ ID NO: 127 and 126 respectively herein), PHP.B (SEQ ID NO: 8 and 9 of WO2015038958, herein SEQ ID NO: 868 and 869), G2B-13 (SEQ ID NO: 12 of WO2015038958, herein SEQ m NO: 870), G2B-26 (SEQ m NO: 13 of WO2015038958, herein SEQ ID NO: 868 and 869), TH1.1-32 (SEQ ID NO: 14 of WO2015038958, herein SEQ ID NO: 871), TH1.1-35 (SEQ ID NO: 15 of WO2015038958, herein SEQ ID NO: 872) or variants thereof. Further, any of the targeting peptides or amino acid inserts described in WO2015038958, may be inserted into any parent AAV serotype, such as, but not limited to, AAV9 (SEQ ID NO: 126 for the DNA sequence and SEQ ID NO: 127 for the amino acid sequence). In some embodiments, the amino acid insert is inserted between amino acids 586-592 of the parent AAV (e.g., AAV9). In another embodiment, the amino acid insert is inserted between amino acids 588-589 of the parent AAV sequence. The amino acid insert may be, but is not limited to, any of the following amino acid sequences, TLAVPFK (SEQ ID NO: 1 of WO2015038958; herein SEQ ID NO: 873), KFPVALT (SEQ ID NO: 3 of WO2015038958; herein SEQ m NO: 874), LAVPFK (SEQ ID NO: 31 of WO2015038958; herein SEQ m NO: 875), AVPFK (SEQ ID NO: 32 of WO2015038958; herein SEQ ID NO: 876), VPFK (SEQ ID NO: 33 of WO2015038958, herein SEQ ID NO: 877), TLAVPF (SEQ ID NO: 34 of WO2015038958; herein SEQ ID NO: 878), TLAVP (SEQ ID NO: 35 of WO2015038958; herein SEQ ID NO: 879), TLAV (SEQ ID NO: 36 of WO2015038958; herein SEQ ID NO: 880), SVSKPFL (SEQ ID NO: 28 of WO2015038958; herein SEQ ID NO: 881), FTLTTPK (SEQ ID NO: 29 of WO2015038958; herein SEQ ID NO: 882), MNATKNV (SEQ ID NO: 30 of WO2015038958; herein SEQ ID NO: 883), QSSQTPR (SEQ ID NO: 54 of WO2015038958; herein SEQ ID NO: 884), ILGTGTS (SEQ ID NO: 55 of WO2015038958; herein SEQ ID NO: 885), TRTNPEA (SEQ ID NO: 56 of WO2015038958; herein SEQ ID NO: 886), NGGTSSS (SEQ ID NO: 58 of WO2015038958; herein SEQ ID NO: 887), or YTLSQGW (SEQ NO: 60 of WO2015038958; herein SEQ ID NO: 888), Non-limiting examples of nucleotide sequences that may encode the amino acid inserts include the following, AAGTTTCCTGTGGCGTTGACT (for SEQ ID NO: 3 of WO2015038958; herein SEQ ID NO: 889), ACTTTGGCGGTGCCTTTTAAG (SEQ ID NO: 24 and 49 of WO2015038958, herein SEQ NO: 890), AGTGTGAGTAAGCCTTTTTTG (SEQ ID NO: 25 of WO2015038958; herein SEQ ID NO: 891), TTTACUITGACGACGCCTAAG (SEQ ID NO: 26 of WO2015038958; herein SEQ ID NO: 892), ATGAATGCTACGAAGAATGTG (SEQ ID NO: 27 of WO2015038958; herein SEQ ID NO: 893), CAGTCGTCGCAGACGCCTAGG (SEQ ID NO: 48 of WO2015038958; herein SEQ ID NO: 894), ATTCTGGGGACTGGTACTTCG (SEQ ID NO: 50 and 52 of WO2015038958, herein SEQ ID NO: 895), ACGCGGACTAATCCTGAGGCT (SEQ ID NO: 51 of WO2015038958; herein SEQ ID NO: 896), AATGGGGGGACTAGTAGTTCT (SEQ ID NO: 53 of WO2015038958; herein SEQ ID NO: 897), or TATACTTTGTCGCAGGGTTGG (SEQ ID NO: 59 of WO2015038958; herein SEQ ID NO: 898),

[0135] In some embodiments, the AAV serotype may be engineered to comprise at least one AAV capsid CD8+ T-cell epitope for AAV2 such as, but not limited to, SADNNNSEY (SEQ ID NO: 899), LIDQYLYYL (SEQ ID NO: 900), VPQYGYLTL (SEQ ID NO: 901), TTSTRTWAL (SEQ ID NO: 902), YHLNGRDSL (SEQ ID NO: 903), SQAVGRSSF (SEQ ID NO: 904), VPANPSTTF (SEQ ID NO: 905), FPQSGVLIF (SEQ ID NO: 906), YFDFNRFHCFSPRD (SEQ ID NO: 907), VGNSSGNWHCDSTWM (SEQ ID NO: 908). QFSQAGASDIRDQSR (SEQ ID NO: 909), GASDIRQSRNWLP (SEQ ID NO: 910) and GNRQAATADVNTQGV (SEQ ID NO: 911).

[0136] In some embodiments, the AAV serotype may be engineered to comprise at least one AAV capsid CD8+ T-cell epitope for AAV1. such as, but not limited to. LDRLIVINPLI (SEQ ID NO: 912), TTSTRTWAL (SEQ ID NO: 902), and QPAKKRLNF (SEQ ID NO: 913)).

[0137] In some embodiments, peptides for inclusion in an AAV serotype may be identified using the methods described by Hui et al. (Molecular Therapy—Methods & Clinical Development (2015) 2, 15029 doi:10.1038/mtm.2015.29: the contents of which are herein incorporated by reference in its entirety). As a non-limiting example, the procedure includes isolating human splenocytes, re-stimulating the splenocytes in vitro using individual peptides spanning the amino acid sequence of the AAV capsid protein, IFN-gamma ELISpot with the individual peptides used for the in vitro re-stimulation, bioinformatics analysis to determine the HLA restriction of 15-mers identified by IFN-gamma ELISpot, identification of candidate reactive 9-mer epitopes for a given HLA allele, synthesis candidate 9-mers, second WN-gamma ELISpot screening of splenocytes from subjects carrying the HLA alleles to which identified AAV epitopes are predicted to bind, determine the AAV capsid-reactive CD8+ T-cell epitopes and determine the frequency of subjects reacting to a given AAV epitope.

[0138] In some embodiments, the AAV may be a serotype generated by Cre-recombination-based AAV targeted evolution (CREATE) as described by Deverman et al., (Nature Biotechnology 34(2):204-209 (2016)), the contents of which are herein incorporated by reference in their entirety. In some embodiments, AAV serotypes generated in this manner have improved CNS transduction and/or neuronal and astrocytic tropism, as compared to other AAV serotypes. As non-limiting examples, the AAV serotype may be PHP.B, PHP.B2, PHP.B3, PHP.A, G2A12, G2A15. In some embodiments, these AAV serotypes may be AAV9 (SEQ ID NO: 126 and 127) derivatives with a 7-amino acid insert between amino acids 588-589. Non-limiting examples of these 7-amino acid inserts include TLAVPFK (SEQ ID NO: 873), SVSKPFL (SEQ ID NO: 881), FTLTTPK (SEQ ID NO: 882), YTLSQGW (SEQ ID NO: 888), QAVRTSL (SEQ NO: 1176) and/or LAKERLS (SEQ ID NO: 1177).

[0139] In some embodiments, the AAV serotype may be, or may have a sequence as described in International Patent Publication WO2017100671, the contents of which are herein incorporated by reference in their entirety, such as, but not limited to, AAV9 (SEQ ID NO: 45 of WO2017100671, herein SEQ ID NO: 1441), PHP.N (SEQ ID NO: 46 of WO2017100671, herein SEQ ID NO: 1439), PHP.S (SEQ ID NO: 47 of WO201.7100671, herein SEQ ID NO: 1440), or variants thereof. Further, any of the targeting peptides or amino acid inserts described in WO2017100671 may be inserted into any parent AAV serotype, such as, but not limited to, AAV9 (SEQ ID NO: 122 SEQ ID NO: 1441). In some embodiments, the amino acid insert is inserted between amino acids 586-592 of the parent AAV (e.g., AAV9). In another embodiment, the amino acid insert is inserted between amino acids 588-589 of the parent AAV sequence. The amino acid insert may be, but is not limited to, any of the following amino acid sequences, AQTLATPFKAQ (SEQ ID NO: 1 of WO2017100671; herein SEQ ID NO: 1442), AQSVSKPFLAQ (SEQ ID NO: 2 of WO2017100671; herein SEQ ID NO: 1443). AQFTLTTPKAQ (SEQ ID NO: 3 in the sequence listing of WO2017100671; herein SEQ ID NO: 1444), DGTLAVPFKAQ (SEQ ID NO: 4 in the sequence listing of WO2017100671; herein SEQ ID NO: 1445), ESTLAVPFKAQ (SEQ ID NO: 5 of WO2017100671; herein SEQ ID NO: 1446), GGTLAVPFKAQ (SEQ ID NO: 6 of WO2017100671; herein SEQ ID NO: 1447), AQTLATPFKAQ (SEQ ID NO: 7 and 33 of WO2017100671; herein SEQ ID NO: 1448), ATTLATPFKAQ (SEQ ID NO: 8 of WO2017100671; herein SEQ ID NO: 1449), DGTIATPFKAQ (SEQ ID NO: 9 of WO2017100671; herein SEQ ID NO: 1450), GGTLATPFKAQ (SEQ ID NO: 10 of WO2017100671; herein SEQ ID NO: 1451), SGSLAVPFKAQ (SEQ ID NO: 11 of WO2017100671; herein SEQ ID NO: 1452), AQTLAQPFKAQ (SEQ ID NO: 12 of WO2017100671; herein SEQ ID NO: 1453), AQTLQQPFKAQ (SEQ ID NO: 13 of WO201.7100671.; herein SEQ ID NO: 1454), AQTLSNPFKAQ (SEQ ID NO: 14 of WO2017100671; herein SEQ ID NO: 1455), AQTLAVPFSNP (SEQ ID NO: 15 of WO2017100671; herein SEQ ID NO: 1456), QUITAVPFKAQ (SEQ ID NO: 16 of WO2017100671; herein SEQ NO: 1457), NQTLAVPFKAQ (SEQ ID NO: 17 of WO2017100671; herein SEQ ID NO: 1458), EGSLAVPFKAQ (SEQ ID NO: 18 of WO2017100671; herein SEQ ID NO: 1459), SGNLAVPFKAQ (SEQ ID NO: 19 of WO2017100671; herein SEQ ID NO: 1460), EGTLAVPFKAQ (SEQ ID NO: 20 of WO2017100671; herein SEQ ID NO: 1461), DSTLAVPFKAQ (SEQ ID NO: 21 in Table 1 of WO2017100671; herein SEQ ID NO: 1462), AQTLATPFKAQ (SEQ ID NO: 22 of WO2017100671; herein SEQ ID NO: 1463), AQTLSTPFKAQ (SEQ ID NO: 23 of WO201.7100671.; herein SEQ ID NO: 1464), AQTLPQPFKAQ (SEQ ID NO: 24 and 32 of WO2017100671; herein SEQ ID NO: 1465), AQTLSQPFKAQ (SEQ ID NO: 25 of WO2017100671; herein SEQ ID NO: 1466), AQTLQLPFKAQ (SEQ ID NO: 26 of WO2017100671; herein SEQ ID NO: 1467), AQTLTMPFKAQ (SEQ ID NO: 27, and 34 of WO2017100671 and SEQ ID NO: 35 in the sequence listing of WO2017100671; herein SEQ ID NO: 1468), AQTLTTPFKAQ (SEQ ID NO: 28 of WO2017100671; herein SEQ ID NO: 1469), AQYTLSQGWAQ (SEQ ID NO: 29 of WO2017100671; herein SEQ ID NO: 1470), AQMNATKNVAQ (SEQ ID NO: 30 of WO2017100671; herein SEQ ID NO: 1471), AQVSGGHHSAQ (SEQ ID NO: 31 of WO2017100671; herein SEQ ID NO: 1472), AQTLTAPFKAQ (SEQ ID NO: 35 in Table 1 of WO2017100671; herein SEQ ID NO: 1473), AQTLSKPFKAQ (SEQ ID NO: 36 of WO2017100671; herein SEQ ID NO: 1474), QAVRTSL (SEQ ID NO: 37 of WO2017100671; herein SEQ ID NO: 1475), YTLSQGW (SEQ ID NO: 38 of WO2017100671; herein SEQ ID NO: 888), LAKERLS (SEQ ID NO: 39 of WO2017100671; herein SEQ ID NO: 1476), TLAVPFK (SEQ ID NO: 40 in the sequence listing of WO2017100671; herein SEQ ID NO: 873), SVSKPFL (SEQ ID NO: 41 of WO2017100671; herein SEQ ID NO: 881), FTLTTPK (SEQ ID NO: 42 of WO2017100671; herein SEQ ID NO: 882). MNSTKNV (SEQ ID NO: 43 of WO2017100671; herein SEQ ID NO:1477), VSGGHHS (SEQ ID NO: 44 of WO2017100671; herein SEQ ID NO: 1478), SAQTLAVPFKAQAQ (SEQ ID NO: 48 of WO2017100671; herein SEQ ID NO: 1479), SXXXLAVPFKAQAQ (SEQ ID NO: 49 of WO2017100671 wherein X may be any amino acid; herein SEQ NO: 1480). SAQXXXVPFKAQAQ (SEQ ID NO: 50 of WO2017100671 wherein X may be any amino acid; herein SEQ ID NO: 1481). SAQTLXXXFKAQAQ (SEQ ID NO: 51 of WO2017100671 wherein X may be any amino acid; herein SEQ ID NO: 1482), SAQTLAVXXXAQAQ (SEQ ID NO: 52 of WO2017100671 wherein X may be any amino acid; herein SEQ ID NO: 1483). SAQTLAVPFXXXAQ (SEQ NO: 53 of WO2017100671. wherein X may be any amino acid; herein SEQ ID NO: 1484), TNHQSAQ (SEQ ID NO: 65 of WO2017100671; herein SEQ ID NO: 1485), AQAQTGW (SEQ NO: 66 of WO2017100671; herein SEQ ID NO: 1486), DGTLATPFK (SEQ ID NO: 67 of WO2017100671; herein SEQ ID NO: 1487), DGTLATPFKXX (SEQ ID NO: 68 of WO2017100671 wherein X may be any amino acid; herein SEQ ID NO: 1488), LAVPFKAQ (SEQ ID NO: 80 of WO2017100671; herein SEQ ID NO: 1489), VPFKAQ (SEQ ID NO: 81 of WO2017100671; herein SEQ ID NO: 1490), FKAQ (SEQ ID NO: 82 of WO2017100671; herein SEQ ID NO: 1491), AQTLAV (SEQ ID NO: 83 of WO2017100671; herein SEQ ID NO: 1492). AQTLAVPF (SEQ ID NO: 84 of WO2017100671; herein SEQ ID NO: 1493), QAVR (SEQ ID NO: 85 of WO2017100671; herein SEQ ID NO: 1494), AVRT (SEQ ID NO: 86 of WO2017100671; herein SEQ ID NO: 1495), VRTS (SEQ ID NO: 87 of WO201.7100671.; herein SEQ ID NO: 1496), RTSL (SEQ ID NO: 88 of WO2017100671; herein SEQ ID NO: 1497), QAVRT (SEQ ID NO: 89 of WO2017100671; herein SEQ ID NO: 1498), AVRTS (SEQ NO: 90 of WO2017100671; herein SEQ ID NO: 1499), VRTSL (SEQ ID NO: 91 of WO2017100671; herein SEQ ID NO: 1500), QAVRTS (SEQ ID NO: 92 of WO2017100671; herein SEQ ID NO: 1501), or AVRTSL (SEQ ID NO: 93 of WO2017100671; herein SEQ ID NO: 1502).

[0140] Non-limiting examples of nucleotide sequences that may encode the amino acid inserts include the following, GATGGGACTTTGGCGGTGCCTTTTAAGGCACAG (SEQ ID NO: 54 of WO2017100671; herein SEQ ID NO: 1503); GATGGGACGTTGGCGGTGCCTTTTAAGGCACAG (SEQ ID NO: 55 of WO2017100671; herein SEQ ID NO: 1504), CAGGCGGTTAGGACGTCTTTG (SEQ ID NO: 56 of WO2017100671; herein SEQ ID NO: 1505), CAGGTCTTCACGGACTCAGACTATCAG (SEQ ID NO: 57 and 78 of WO2017100671; herein SEQ ID NO: 1506), CAAGTAAAACCTCTACAAATGTGGTAAAATCG (SEQ ID NO: 58 of WO2017100671; herein SEQ ID NO: 1507), ACTCATCGACCAATACTTGTACTATCTCTCTAGAAC (SEQ ID NO: 59 of WO2017100671; herein SEQ ID NO: 1508), GGAAGTATTCCTTGGTTTTGAACCCA (SEQ ID NO: 60 of WO2017100671; herein SEQ ID NO: 1509), GGTCGCGGTTCTTGTTTGTGGAT (SEQ ID NO: 61 of WO2017100671; herein SEQ ID NO: 1510), CGACCTTGAAGCGCATGAACTCCT (SEQ ID NO: 62 of WO2017100671; herein SEQ ID NO: 1511), GTATTCCTTGGTTTTGAACCCAACCGGTCTGCGCCTGTGCMNNMNNMNNMNNMNN MNNMNNTTGGGCACTCTGGTGGTTTGTC (SEQ ID NO: 63 of WO20171.00671 wherein N may be A, C, T, or G; herein SEQ ID NO: 1512), GTATTCCTTGGTTTTGAACCCAACCGGTCTGCGCMNNMNNMNNAAAAGGCACCGCC AAAGTTTG (SEQ ID NO: 69 of WO2017100671 wherein N may be A, C, T, or G; herein SEQ ID NO: 1513), GTATTCCTTGGTTTTGAACCCAACCGGTCTGCGCCTGTGCMNNMNNMNNCACCGCC AAAGTTTGGGCACT (SEQ ID NO: 70 of WO2017100671 wherein N may be A, C, T, or G; herein SEQ ID NO: 1514), GTATTCCTTGGTTTTGAACCCAACCGGTCTGCGCCTGTGCCTTAAAMNNMNNMNNC AAAGTTTGGGCACTCTGGTGG (SEQ ID NO: 71 of WO2017100671 wherein N may be A, C, T, or G; herein SEQ ID NO: 1515), GTATTCCTTGGTTTTGAACCCAACCGGTCTGCGCCTGTGCCTTAAAAGGCACMNNM NNMNNTTGGGCACTCTGGTGGTTTGTG (SEQ ID NO: 72 of WO2017100671 wherein N may be A, C, T, or G; herein SEQ ID NO: 1516), ACTTTGGCGGTGCCTTTTAAG (SEQ ID NO: 74 of WO2017100671; herein SEQ ID NO: 890), AGTGTGAGTAAGCCTTTTTTG (SEQ ID NO: 75 of WO2017100671; herein SEQ ID NO: 891), TTTACGTTGACGACGCCTAAG (SEQ ID NO: 76 of WO2017100671; herein SEQ ID NO: 892), TATACTTTGTCGCAGGGTTGG (SEQ ID NO: 77 of WO2017100671; herein SEQ ID NO: 898), or CTTGCGAAGGAGCGGCTTTCG (SEQ ID NO: 79 of WO2017100671; herein SEQ ID NO: 1517).

[0141] In some embodiments, the AAV serotype may be, or may have a sequence as described in U.S. Pat. No. 9,624,274, the contents of which are herein incorporated by reference in their entirety, such as, but not limited to, AAV1 (SEQ ID NO: 181 of U.S. Pat. No. 9,624,274), AAV6 (SEQ ID NO: 182 of U.S. Pat. No. 9,624,274), AAV2 (SEQ ID NO: 183 of U.S. Pat. No. 9,624,274), AAV3b (SEQ ID NO: 184 of U.S. Pat. No. 9,624,274), AAV7 (SEQ ID NO: 185 of U.S. Pat. No. 9,624,274), AAV8 (SEQ ID NO: 186 of U.S. Pat. No. 9,624,274), AAV10 (SEQ ID NO: 187 of U.S. Pat. No. 9,624,274), AAV4 (SEQ m NO: 188 of U.S. Pat. No. 9,624,274), AAV11 (SEQ ID NO: 189 of U.S. Pat. No. 9,624,274), bAAV (SEQ ID NO: 190 of U.S. Pat. No. 9,624,274), AAV5 (SEQ ID NO: 191 of U.S. Pat. No. 9,624,274), GPV (SEQ ID NO: 192 of U.S. Pat. No. 9,624,274; herein SEQ ID NO: 1518), B19 (SEQ ID NO: 193 of U.S. Pat. No. 9,624,274; herein SEQ ID NO: 1519), MVM (SEQ ID NO: 194 of U.S. Pat. No. 9,624,274; herein SEQ ID NO: 1520), FPV (SEQ ID NO: 195 of U.S. Pat. No. 9,624,274; herein SEQ ID NO: 1521), CPV (SEQ ID NO: 196 of U.S. Pat. No. 9,624,274, herein SEQ ID NO: 1522) or variants thereof. Further, any of the structural protein inserts described in U.S. Pat. No. 9,624,274, may be inserted into, but not limited to, 1-453 and 1-587 of any parent AAV serotype, such as, but not limited to, AAV2 (SEQ ID NO: 183 of U.S. Pat. No. 9,624,274). The amino acid insert may be, but is not limited to, any of the following amino acid sequences, VNLTWSRASG (SEQ ID NO: 50 of U.S. Pat. No. 9,624,274; herein SEQ ID NO: 1901), EFCINHRGYWVCGD (SEQ ID NO:55 of U.S. Pat. No. 9,624,274; herein SEQ ID NO: 1902), EDGQVMDVDLS (SEQ ID NO: 85 of U.S. Pat. No. 9,624,274; herein SEQ ID NO: 1903), EKQRNGTLT (SEQ ID NO: 86 of U.S. Pat. No. 9,624,274; herein SEQ ID NO: 1904), TYQCRVMPHLPRALMR (SEQ ID NO: 87 of U.S. Pat. No. 9,624,274; herein SEQ ID NO: 1905), RHSTTQPRKTKGSG (SEQ ID NO: 88 of U.S. Pat. No. 9,624,274, herein SEQ ID NO: 1906), DSNPRGVSAYLSR (SEQ ID NO: 89 of U.S. Pat. No. 9,624,274; herein SEQ ID NO: 1907), TITCLWDLAPSK (SEQ ID NO: 90 of U.S. Pat. No. 9,624,274; herein SEQ ID NO: 1908), KTKGSGFFVF (SEQ ID NO: 91 of U.S. Pat. No. 9,624,274, herein SEQ ID NO: 1909), THPHLPRALMRS (SEQ ID NO: 92 of U.S. Pat. No. 9,624,274; herein SEQ ID NO: 1910), GETYQCRVTHPHLPRALMRSTTK (SEQ ID NO: 93 of U.S. Pat. No. 9,624,274, herein SEQ ID NO: 1911), LPRALMRS (SEQ ID NO: 94 of U.S. Pat. No. 9,624,274; herein SEQ ID NO: 1912), INHRGYWV (SEQ ID NO: 95 of U.S. Pat. No. 9,624,274; herein SEQ ID NO: 1913), CDAGSVRTNAPD (SEQ ID NO: 60 of U.S. Pat. No. 9,624,274; herein SEQ ID NO: 1914), AKAVSNLTESRSESLQS (SEQ ID NO: 96 of U.S. Pat. No. 9,624,274; herein SEQ ID NO: 1915), SLTGDEFKKVLET (SEQ ID NO: 97 of U.S. Pat. No. 9,624,274; herein SEQ ID NO: 1916), REAVAYRFEED (SEQ ID NO: 98 of U.S. Pat. No. 9,624,274; herein SEQ ID NO: 1917), INPEIITLDG (SEQ ID NO: 99 of U.S. Pat. No. 9,624,274; herein SEQ m NO: 1918), DISVTGAPVITATYL (SEQ ID NO: 100 of U.S. Pat. No. 9,624,274; herein SEQ ID NO: 1919), DISVTGAPVITA (SEQ ID NO: 101 of U.S. Pat. No. 9,624,274; herein SEQ ID NO: 1920), PKTVSNLTESSSESVQS (SEQ ID NO: 102 of U.S. Pat. No. 9,624,274; herein SEQ ID NO: 1921), SLMGDEFKAVLET (SEQ ID NO: 103 of U.S. Pat. No. 9,624,274; herein SEQ ID NO: 1922), QHSVAYTFEED (SEQ ID NO: 104 of U.S. Pat. No. 9,624,274; herein SEQ ID NO: 1923), INPEIITRDG (SEQ ID NO: 105 of U.S. Pat. No. 9,624,274, herein SEQ ID NO: 1924), DISLTGDPVITASYL (SEQ ID NO: 106 of U.S. Pat. No. 9,624,274; herein SEQ ID NO: 1925), DISLTGDPVITA (SEQ ID NO: 107 of U.S. Pat. No. 9,624,274; herein SEQ ID NO: 1926), DQSIDFEIDSA (SEQ ID NO: 108 of U.S. Pat. No. 9,624,274; herein SEQ ID NO: 1927), KNVSEDLPLPTFSPTLLGDS (SEQ ID NO: 109 of U.S. Pat. No. 9,624,274; herein SEQ ID NO: 1928), KNVSEDLPLPT (SEQ ID NO: 110 of U.S. Pat. No. 9,624,274; herein SEQ ID NO: 1929), CDSGRVRTDAPD (SEQ ID NO: 111 of U.S. Pat. No. 9,624,274; herein SEQ ID NO: 1930), FPEHLLVDFLQSLS (SEQ ID NO: 112 of U.S. Pat. No. 9,624,274; herein SEQ NO: 1931), DAEFRHDSG (SEQ ID NO: 65 of U.S. Pat. No. 9,624,274; herein SEQ ID NO: 1932), HYAAAQWDFGNTMCQL (SEQ m NO: 113 of 1359,624,274; herein SEQ ID NO: 1933), YAAQWDFGNTMCQ (SEQ ID NO: 114 of U.S. Pat. No. 9,624,274; herein SEQ ID NO: 1934), RSQKEGLHYT (SEQ ID NO: 115 of U.S. Pat. No. 9,624,274; herein SEQ ID NO: 1935), SSRTPSDKPVAHWANPQAE (SEQ ID NO: 116 of U.S. Pat. No. 9,624,274; herein SEQ ID NO: 1936), SRTPSDKPVAHWANP (SEQ ID NO: 117 of 1359,624,274; herein SEQ ID NO: 1937), SSRTPSDKP (SEQ ID NO: 118 of U.S. Pat. No. 9,624,274; herein SEQ ID NO: 1938), NADGNVDYHMNSVP (SEQ ID NO: 119 of U.S. Pat. No. 9,624,274; herein SEQ ID NO: 1939), DGNVDYHMNSV (SEQ ID NO: 120 of U.S. Pat. No. 9,624,274; herein SEQ ID NO: 1940), RSFKEFLQSSLRALRQ (SEQ ID NO: 121 of U.S. Pat. No. 9,624,274; herein SEQ ID NO: 1941); FKEFLQSSLRA (SEQ ID NO: 122 of U.S. Pat. No. 9,624,274; herein SEQ ID NO: 1942), or QMWAPQWGPD (SEQ ID NO: 123 of U.S. Pat. No. 9,624,274; herein SEQ ID NO: 1943).

[0142] In some embodiments, the AAV serotype may be, or may have a sequence as described in U.S. Pat. No. 9,475,845, the contents of which are herein incorporated by reference in their entirety, such as, but not limited to, AAV capsid proteins comprising modification of one or more amino acids at amino acid positions 585 to 590 of the native AAV2 capsid protein. Further the modification may result in, but not limited to, the amino acid sequence RGNRQA (SEQ ID NO: 3 of U.S. Pat. No. 9,475,845; herein SEQ ID NO: 1944), SSSTDP (SEQ ID NO: 4 of U.S. Pat. No. 9,475,845; herein SEQ ID NO: 1945), SSNTAP (SEQ ID NO: 5 of U.S. Pat. No. 9,475,845; herein SEQ ID NO: 1946), SNSNLP (SEQ ID NO: 6 of U.S. Pat. No. 9,475,845; herein SEQ ID NO: 1947), SSTTAP (SEQ ID NO: 7 of U.S. Pat. No. 9,475,845; herein SEQ ID NO: 1948), AANTAA (SEQ ID NO: 8 of U.S. Pat. No. 9,475,845; herein SEQ ID NO: 1949), QQNTAP (SEQ ID NO: 9 of U.S. Pat. No. 9,475,845, herein SEQ ID NO: 1950), SAQAQA (SEQ ID NO: 10 of U.S. Pat. No. 9,475,845; herein SEQ ID NO: 1951), QANTGP (SEQ ID NO: 11 of U.S. Pat. No. 9,475,845; herein SEQ ID NO: 1952), NATTAP (SEQ ID NO: 12 of U.S. Pat. No. 9,475,845; herein SEQ ID NO: 1953), SSTAGP (SEQ ID NO: 13 and 20 of U.S. Pat. No. 9,475,845; herein SEQ ID NO: 1954), QQNTAA (SEQ ID NO: 14 of U.S. Pat. No. 9,475,845; herein SEQ ID NO: 1955), PSTAGP (SEQ ID NO: 15 of U.S. Pat. No. 9,475,845; herein SEQ ID NO: 1956). NQNTAP (SEQ ID NO: 16 of U.S. Pat. No. 9,475,845; herein SEQ ID NO: 1957), QAANAP (SEQ ID NO: 17 of U.S. Pat. No. 9,475,845; herein SEQ ID NO: 1958), SIVGLP (SEQ ID NO: 18 of U.S. Pat. No. 9,475,845; herein SEQ ID NO: 1959). AASTAA (SEQ ID NO: 19, and 27 of U.S. Pat. No. 9,475,845; herein SEQ ID NO: 1960), SQNTTA (SEQ ID NO: 21 of U.S. Pat. No. 9,475,845; herein SEQ NO: 1961), QQDTAP (SEQ ID NO: 22 of U.S. Pat. No. 9,475,845; herein SEQ ID NO: 1962), QTNTGP (SEQ ID NO: 23 of U.S. Pat. No. 9,475,845; herein SEQ ID NO: 1963), QTNGAP (SEQ ID NO: 24 of U.S. Pat. No. 9,475,845; herein SEQ ID NO: 1964), QQNAAP (SEQ ID NO: 25 of U.S. Pat. No. 9,475,845; herein SEQ ID NO: 1965), or AANTQA (SEQ ID NO: 26 of U.S. Pat. No. 9,475,845; herein SEQ NO: 1966). In some embodiments, the amino acid modification is a substitution at amino acid positions 262 through 265 in the native AAV2 capsid protein or the corresponding position in the capsid protein of another AAV with a targeting sequence. The targeting sequence may be, but is not limited to, any of the amino acid sequences, NGRAHA (SEQ ID NO: 38 of U.S. Pat. No. 9,475,845; herein SEQ ID NO: 1967). QPEHSST (SEQ ID NO: 39 and 50 of U.S. Pat. No. 9,475,845; herein SEQ ID NO: 1968), VNTANST (SEQ ID NO: 40 of U.S. Pat. No. 9,475,845; herein SEQ ID NO: 1969), HGPMQKS (SEQ ID NO: 41 of U.S. Pat. No. 9,475,845; herein SEQ ID NO: 1970), PHKPPILA (SEQ ID NO: 42 of U.S. Pat. No. 9,475,845; herein SEQ ID NO: 1971), IKNNEMW (SEQ ID NO: 43 of U.S. Pat. No. 9,475,845; herein SEQ ID NO: 1972), RNLDTPM (SEQ ID NO: 44 of U.S. Pat. No. 9,475,845; herein SEQ ID NO: 1973). VDSHRQS (SEQ ID NO: 45 of U.S. Pat. No. 9,475,845; herein SEQ ID NO: 1974), YDSKTKT (SEQ ID NO: 46 of U.S. Pat. No. 9,475,845; herein SEQ ID NO: 1975), SQLPHQK (SEQ ID NO: 47 of U.S. Pat. No. 9,475,845; herein SEQ NO: 1976). STMQQN17 (SEQ ID NO: 48 of U.S. Pat. No. 9,475,845; herein SEQ ID NO: 1977), TERYMTQ (SEQ ID NO: 49 of U.S. Pat. No. 9,475,845; herein SEQ ID NO: 1978), DASLSTS (SEQ ID NO: 51 of U.S. Pat. No. 9,475,845; herein SEQ ID NO: 1979), DLPNKKT (SEQ ID NO: 52 of U.S. Pat. No. 9,475,845; herein SEQ ID NO: 1980), DLTAARL (SEQ ID NO: 53 of U.S. Pat. No. 9,475,845; herein SEQ ID NO: 1981), EPHQFNY (SEQ ID NO: 54 of U.S. Pat. No. 9,475,845; herein SEQ ID NO: 1982). EPQSNHT (SEQ ID NO: 55 of U.S. Pat. No. 9,475,845; herein SEQ ID NO: 1983), MSSWPSQ (SEQ ID NO: 56 of U.S. Pat. No. 9,475,845; herein SEQ ID NO: 1984), NPKHNAT (SEQ ID NO: 57 of U.S. Pat. No. 9,475,845; herein SEQ ID NO: 1985). PDGMRTT (SEQ ID NO: 58 of U.S. Pat. No. 9,475,845; herein SEQ ID NO: 1986). PNNNKTT (SEQ ID NO: 59 of U.S. Pat. No. 9,475,845; herein SEQ ID NO: 1987), QSTTHDS (SEQ ID NO: 60 of U.S. Pat. No. 9,475,845; herein SEQ ID NO: 1988), TGSKQKQ (SEQ ID NO: 61 of U.S. Pat. No. 9,475,845; herein SEQ ID NO: 1989), SLKHQAL (SEQ ID NO: 62 of U.S. Pat. No. 9,475,845; herein SEQ ID NO: 1990), SPIDGEQ (SEQ NO: 63 of U.S. Pat. No. 9,475,845; herein SEQ ID NO: 1991), WIFPWIQL (SEQ ID NO: 64 and 112 of U.S. Pat. No. 9,475,845; herein SEQ ID NO: 1992), CDCRGDCFC (SEQ ID NO: 65 of U.S. Pat. No. 9,475,845; herein SEQ ID NO: 1993), CNGRC (SEQ ID NO: 66 of U.S. Pat. No. 9,475,845; herein SEQ ID NO: 1994), CPRECES (SEQ ID NO: 67 of U.S. Pat. No. 9,475,845; herein SEQ ID NO: 1995), CTTHWGFTLC (SEQ ID NO: 68 and 123 of U.S. Pat. No. 9,475,845; herein SEQ ID NO: 1996), CGRRAGGSC (SEQ ID NO: 69 of U.S. Pat. No. 9,475,845; herein SEQ m NO: 1997), CKGGRAKDC (SEQ ID NO: 70 of U.S. Pat. No. 9,475,845; herein SEQ ID NO: 1998), CVPELGHEC (SEQ ID NO: 71 and 115 of U.S. Pat. No. 9,475,845; herein SEQ ID NO: 1999), CRRETAWAK (SEQ ID NO: 72 of U.S. Pat. No. 9,475,845; herein SEQ ID NO: 2000), VSWFSHRYSPFAVS (SEQ ID NO: 73 of U.S. Pat. No. 9,475,845; herein SEQ ID NO: 2001), GYRDGYAGPILYN (SEQ ID NO: 74 of U.S. Pat. No. 9,475,845; herein SEQ ID NO: 2002), XXXYXXX (SEQ ID NO: 75 of U.S. Pat. No. 9,475,845, herein SEQ ID NO: 2003), YXNW (SEQ ID NO: 76 of U.S. Pat. No. 9,475,845; herein SEQ ID NO: 2004), RPLPPLP (SEQ ID NO: 77 of U.S. Pat. No. 9,475,845; herein SEQ ID NO: 2005), APPLPPR (SEQ ID NO: 78 of U.S. Pat. No. 9,475,845; herein SEQ ID NO: 2006), DVFYPYPYASGS (SEQ ID NO: 79 of U.S. Pat. No. 9,475,845; herein SEQ ID NO: 2007). MYWYPY (SEQ ID NO: 80 of U.S. Pat. No. 9,475,845; herein SEQ ID NO: 2008), DITWDQLWDLMK (SEQ ID NO: 81 of U.S. Pat. No. 9,475,845; herein SEQ ID NO: 2009), CWDDXWLC (SEQ ID NO: 82 of U.S. Pat. No. 9,475,845; herein SEQ ID NO: 2010), EWCEYLGGYLRCYA (SEQ ID NO: 83 of U.S. Pat. No. 9,475,845; herein SEQ ID NO: 2011), YXCXXGPXTWXCXP (SEQ ID NO: 84 of U.S. Pat. No. 9,475,845; herein SEQ ID NO: 2012), IEGVITRQWLAARA (SEQ ID NO: 85 of U.S. Pat. No. 9,475,845; herein SEQ ID NO: 2013), LWXXX (SEQ ID NO: 86 of U.S. Pat. No. 9,475,845; herein SEQ ID NO: 2014), XFXXYLW (SEQ ID NO: 87 of U.S. Pat. No. 9,475,845; herein SEQ ID NO: 2015). SSIISHFRWGLCD (SEQ ID NO: 88 of U.S. Pat. No. 9,475,845; herein SEQ ID NO: 2016), MSRPACPPNDKYE (SEQ ID NO: 89 of U.S. Pat. No. 9,475,845; herein SEQ ID NO: 2017), CLRSGRGC (SEQ ID NO: 90 of U.S. Pat. No. 9,475,845; herein SEQ ID NO: 2018), CHWMFSPWC (SEQ m NO: 91 of U.S. Pat. No. 9,475,845; herein SEQ ID NO: 2019), WXXF (SEQ ID NO: 92 of U.S. Pat. No. 9,475,845, herein SEQ ID NO: 2020). CSSRLDAC (SEQ ID NO: 93 of U.S. Pat. No. 9,475,845; herein SEQ ID NO: 2021), CLPVASC (SEQ ID NO: 94 of U.S. Pat. No. 9,475,845; herein SEQ ID NO: 2022), CGFECVRQCPERC (SEQ ID NO: 95 of U.S. Pat. No. 9,475,845; herein SEQ ID NO: 2023), CVALCREACGEGC (SEQ ID NO: 96 of U.S. Pat. No. 9,475,845; herein SEQ ID NO: 2024), SWCEPGWCR (SEQ ID NO: 97 of U.S. Pat. No. 9,475,845; herein SEQ ID NO: 2025), YSGKWGW (SEQ ID NO: 98 of U.S. Pat. No. 9,475,845; herein SEQ ID NO: 2026). GLSGGRS (SEQ ID NO: 99 of U.S. Pat. No. 9,475,845; herein SEQ ID NO: 2027), LMLPRAD (SEQ ID NO: 100 of U.S. Pat. No. 9,475,845; herein SEQ ID NO: 2028), CSCFRDVCC (SEQ ID NO: 101 of U.S. Pat. No. 9,475,845; herein SEQ ID NO: 2029), CRDVVSVIC (SEQ ID NO: 102 of U.S. Pat. No. 9,475,845; herein SEQ ID NO: 2030), MARSGL (SEQ ID NO: 103 of U.S. Pat. No. 9,475,845; herein SEQ ID NO: 2031), MARAKE (SEQ ID NO: 104 of U.S. Pat. No. 9,475,845; herein SEQ ID NO: 2032), MSRTMS (SEQ ID NO: 105 of U.S. Pat. No. 9,475,845, herein SEQ ID NO: 033), KCCYSL (SEQ ID NO: 106 of U.S. Pat. No. 9,475,845; herein SEQ ID NO: 2034), MYWGDSHWLQYWYE (SEQ ID NO: 107 of U.S. Pat. No. 9,475,845; herein SEQ ID NO: 2035), MQLPLAT (SEQ ID NO: 108 of U.S. Pat. No. 9,475,845; herein SEQ ID NO: 2036), EWLS (SEQ ID NO: 109 of U.S. Pat. No. 9,475,845; herein SEQ ID NO: 2037), SNEW (SEQ ID NO: 110 of U.S. Pat. No. 9,475,845, herein SEQ ID NO: 2038), TNYL (SEQ ID NO: 111 of U.S. Pat. No. 9,475,845; herein SEQ ID NO: 2039), WDLAWMFRLPVG (SEQ ID NO: 113 of U.S. Pat. No. 9,475,845; herein SEQ ID NO: 2040), CTVALPGGYVRVC (SEQ ID NO: 114 of U.S. Pat. No. 9,475,845, herein SEQ ID NO: 2041), CVAYCIEHHCWTC (SEQ ID NO: 116 of U.S. Pat. No. 9,475,845; herein SEQ m NO: 2042), CVFAHNYDYLVC (SEQ ID NO: 117 of U.S. Pat. No. 9,475,845; herein SEQ ID NO: 2043), CVFTSNYAFC (SEQ ID NO: 118 of U.S. Pat. No. 9,475,845; herein SEQ ID NO: 2044), VHSPNKK (SEQ ID NO: 119 of U.S. Pat. No. 9,475,845; herein SEQ ID NO: 2045), CRGDGWC (SEQ ID NO: 120 of U.S. Pat. No. 9,475,845; herein SEQ ID NO: 2046), XRGCDX (SEQ ID NO: 121 of U.S. Pat. No. 9,475,845; herein SEQ ID NO: 2047), PXXX (SEQ ID NO: 122 of U.S. Pat. No. 9,475,845; herein SEQ ID NO: 2048), SGKGPRQITAL (SEQ ID NO: 124 of U.S. Pat. No. 9,475,845; herein SEQ ID NO: 2049), AAAAAAAAAXXXXX (SEQ NO: 125 of U.S. Pat. No. 9,475,845; herein SEQ ID NO: 2050), VYMSPF (SEQ ID NO: 126 of U.S. Pat. No. 9,475,845, herein SEQ ID NO: 2051), ATWLPPR (SEQ ID NO: 127 of U.S. Pat. No. 9,475,845; herein SEQ ID NO: 2052), HTMYYHHYQHHL (SEQ ID NO: 128 of U.S. Pat. No. 9,475,845; herein SEQ ID NO: 2053), SEVGCRAGPLQWLCEKYFG (SEQ ID NO: 129 of U.S. Pat. No. 9,475,845; herein SEQ ID NO: 2054), CGLLPVGRPDRNVWRWLC (SEQ ID NO: 130 of U.S. Pat. No. 9,475,845; herein SEQ ID NO: 2055), CKGQCDRFKGLPWEC (SEQ ID NO: 131 of U.S. Pat. No. 9,475,845; herein SEQ ID NO: 2056), SGRSA (SEQ ID NO: 132 of U.S. Pat. No. 9,475,845; herein SEQ ID NO: 2057), WGFP (SEQ NO: 133 of U.S. Pat. No. 9,475,845; herein SEQ ID NO: 2058), AEPMPHSLNFSQYLWYT (SEQ ID NO: 134 of U.S. Pat. No. 9,475,845; herein SEQ ID NO: 2059), WAYXSP (SEQ ID NO: 135 of U.S. Pat. No. 9,475,845; herein SEQ ID NO: 2060), IELLQAR (SEQ ID NO: 136 of U.S. Pat. No. 9,475,845; herein SEQ ID NO: 2061), AYTKCSRQWRTCMTTH (SEQ ID NO: 137 of U.S. Pat. No. 9,475,845; herein SEQ m NO: 2062), PQNSKIPGPTFLDPH (SEQ ID NO: 138 of U.S. Pat. No. 9,475,845; herein SEQ ID NO: 2063), SMEPALPDWWWKMFK (SEQ ID NO: 139 of U.S. Pat. No. 9,475,845; herein SEQ ID NO: 2064), ANTPCGPYTHDCPVKR (SEQ ID NO: 140 of U.S. Pat. No. 9,475,845, herein SEQ ID NO: 2065), TACHQHVRMVRP (SEQ ID NO: 141 of U.S. Pat. No. 9,475,845, herein SEQ m NO: 2066), VPWMEPAYQRFL (SEQ ID NO: 142 of U.S. Pat. No. 9,475,845; herein SEQ ID NO: 2067), DPRATPGS (SEQ ID NO: 143 of U.S. Pat. No. 9,475,845; herein SEQ ID NO: 2068), FRPNRAQDYNTN (SEQ ID NO: 144 of U.S. Pat. No. 9,475,845, herein SEQ ID NO: 2069), CTKNSYLMC (SEQ ID NO: 145 of U.S. Pat. No. 9,475,845; herein SEQ ID NO: 2070), CXXTXXXGXGC (SEQ ID NO: 146 of U.S. Pat. No. 9,475,845; herein SEQ ID NO: 2071), CPIEDRPMC (SEQ ID NO: 147 of U.S. Pat. No. 9,475,845; herein SEQ ID NO: 2072). HEWSYLAPYPWF (SEQ ID NO: 148 of U.S. Pat. No. 9,475,845; herein SEQ ID NO: 2073), MCPKHPLGC (SEQ ID NO: 149 of U.S. Pat. No. 9,475,845; herein SEQ ID NO: 2074), RMWPSSTVNLSAGRR (SEQ ID NO: 150 of U.S. Pat. No. 9,475,845; herein SEQ ID NO: 2075), SAKTAVSQRVWLPSHRGGEP (SEQ ID NO: 151 of U.S. Pat. No. 9,475,845; herein SEQ ID NO: 2076), KSREHVNNSACPSKRITAAL (SEQ ID NO: 152 of U.S. Pat. No. 9,475,845; herein SEQ ID NO: 2077), EGFR (SEQ ID NO: 153 of U.S. Pat. No. 9,475,845; herein SEQ ID NO: 2078), AGLGVR (SEQ ID NO: 154 of U.S. Pat. No. 9,475,845, herein SEQ ID NO: 2079), GTRQGHTMRLGVSDG (SEQ m NO: 155 of U.S. Pat. No. 9,475,845; herein SEQ ID NO: 2080), IAGLATPGWSHWLAL (SEQ ID NO: 156 of U.S. Pat. No. 9,475,845; herein SEQ ID NO: 2081), SMSIARL (SEQ ID NO: 157 of U.S. Pat. No. 9,475,845, herein SEQ ID NO: 2082), HTFEPGV (SEQ ID NO: 158 of U.S. Pat. No. 9,475,845; herein SEQ ID NO: 2083), NTSLKRISNKRIRRK (SEQ ID NO: 159 of U.S. Pat. No. 9,475,845; herein SEQ ID NO: 2084), LRIKRKRRKRKKTRK (SEQ ID NO: 160 of U.S. Pat. No. 9,475,845; herein SEQ ID NO: 2085), GGG, GES, LWS, EGG, LLV, LSP, LBS, AGG, GRR, GGH and GTV.

[0143] In some embodiments, the AAV serotype may be, or may have a sequence as described in United States Publication No. US 20160369298, the contents of which are herein incorporated by reference in their entirety, such as, but not limited to, site-specific mutated capsid protein of AAV2 (SEQ ID NO: 97 of US 20160369298; herein SEQ ID NO: 2086) or variants thereof, wherein the specific site is at least one site selected from sites R447, G453, S578, N587, N587+1, 5662 of VP1 or fragment thereof.

[0144] Further, any of the mutated sequences described in US 20160369298, may be or may have, but not limited to, any of the following sequences SDSGASN (SEQ ID NO: 1 and SEQ NO: 231 of US20160369298; herein SEQ ID NO: 2087), SPSGASN (SEQ ID NO: 2 of US20160369298; herein SEQ ID NO: 2088), SHSGASN (SEQ ID NO: 3 of US20160369298; herein SEQ NO: 2089), SRSGASN (SEQ ID NO: 4 of US20160369298; herein SEQ ID NO: 2090), SKSGASN (SEQ ID NO: 5 of US20160369298; herein SEQ ID NO: 2091), SNSGASN (SEQ ID NO: 6 of US20160369298; herein SEQ ID NO: 2092), SGSGASN (SEQ ID NO: 7 of US20160369298; herein SEQ ID NO: 2093), SASGASN (SEQ ID NO: 8, 175, and 221 of US20160369298; herein SEQ ID NO: 2094), SESGTSN (SEQ ID NO: 9 of US20160369298; herein SEQ m NO: 2095), STTGGSN (SEQ ID NO: 10 of US20160369298; herein SEQ NO: 2096), SSAGSTN (SEQ ID NO: 11 of US20160369298; herein SEQ ID NO: 2097), NNDSQA (SEQ ID NO: 12 of US20160369298; herein SEQ ID NO: 2098), NNRNQA (SEQ ID NO: 13 of US20160369298; herein SEQ ID NO: 2099), NNNKQA (SEQ ID NO: 14 of US20160369298; herein SEQ ID NO: 2100), NAKRQA (SEQ ID NO: 15 of US20160369298; herein SEQ ID NO: 2101), NDEHQA (SEQ ID NO: 16 of US20160369298; herein SEQ ID NO: 2102), NTSQKA (SEQ ID NO: 17 of US20160369298; herein SEQ ID NO: 2103), YYLSRTNTPSGTDTQSRLVFSQAGA (SEQ ID NO: 18 of US20160369298; herein SEQ ID NO: 2104), YYLSRTNTDSGTEFQSGLDFSQAGA (SEQ ID NO: 19 of US20160369298; herein SEQ ID NO: 2105), YYLSRTNTESGTPTQSALEFSQAGA (SEQ ID NO: 20 of US20160369298; herein SEQ ID NO: 2106), YYLSRTNTHSGTHTQSPLHFSQAGA (SEQ ID NO: 21 of US20160369298; herein SEQ ID NO: 2107), YYLSRTNTSSGTITISHLIFSQAGA (SEQ ID NO: 22 of US20160369298; herein SEQ ID NO: 2108), YYLSRTNTRSGIMTKSSLMFSQAGA (SEQ ID NO: 23 of US20160369298; herein SEQ ID NO: 2109), YYLSRTNTKSGRKTLSNLSFSQAGA (SEQ ID NO: 24 of US20160369298; herein SEQ ID NO: 2110), YYLSRTNDGSGPVTPSKLRFSQRGA (SEQ ID NO: 25 of US20160369298; herein SEQ ID NO: 2111), YYLSRTNAASGHATHSDLKFSQPGA (SEQ ID NO: 26 of US20160369298; herein SEQ ID NO: 2112), YYLSRINGQAGSLTMSELGFSQVGA (SEQ ID NO: 27 of US20160369298; herein SEQ ID NO: 2113), YYLSRINSTGGNQTTSQLLFSQLSA (SEQ ID NO: 28 of US20160369298; herein SEQ ID NO: 2114), YFLSRTNNNTGLNTNSTLNFSQGRA (SEQ ID NO: 29 of US20160369298; herein SEQ ID NO: 2115), SKTGADNNNSEYSWTG (SEQ ID NO: 30 of US20160369298; herein SEQ ID NO: 2116), SKTDADNNNSEYSWTG (SEQ ID NO: 31 of US20160369298; herein SEQ ID NO: 2117), SKTEADNNNSEYSWTG (SEQ ID NO: 32 of US20160369298; herein SEQ ID NO: 2118). SKTPADNNNSEYSWTG (SEQ ID NO: 33 of US20160369298; herein SEQ ID NO: 2119), SKTHADNNNSEYSWTG (SEQ ID NO: 34 of US20160369298; herein SEQ ID NO: 2120), SKTQADNNNSEYSWTG (SEQ ID NO: 35 of US20160369298; herein SEQ ID NO: 2121), SKTIADNNNSEYSWTG (SEQ ID NO: 36 of US20160369298; herein SEQ ID NO: 2122), SKTMADNNNSEYSWTG (SEQ ID NO: 37 of US20160369298; herein SEQ ID NO: 2123), SKTRADNNNSEYSWTG (SEQ ID NO: 38 of US20160369298; herein SEQ ID NO: 2124), SKTNADNNNSEYSWTG (SEQ ID NO: 39 of US20160369298; herein SEQ ID NO: 2125), SKTVGRNNNSEYSWTG (SEQ ID NO: 40 of US20160369298; herein SEQ ID NO: 2126), SKTADRNNNSEYSWTG (SEQ ID NO: 41 of US20160369298; herein SEQ ID NO: 2127), SKKLSQNNNSKYSWQG (SEQ ID NO: 42 of US20160369298; herein SEQ ID NO: 2128), SKPTTGNNNSDYSWPG (SEQ ID NO: 43 of US20160369298; herein SEQ ID NO: 2129), STQKNENNNSNYSWPG (SEQ ID NO: 44 of US20160369298; herein SEQ ID NO: 2130), HKDDEGKF (SEQ ID NO: 45 of US20160369298; herein SEQ ID NO: 2131), HKDDNRKF (SEQ NO: 46 of US20160369298; herein SEQ ID NO: 2132), HKDDTNKF (SEQ ID NO: 47 of US20160369298; herein SEQ ID NO: 2133), HEDSDKNF (SEQ ID NO: 48 of US20160369298; herein SEQ ID NO: 2134), HRDGADSF (SEQ ID NO: 49 of US20160369298; herein SEQ ID NO: 2135), HGDNKSRF (SEQ ID NO: 50 of US20160369298; herein SEQ ID NO: 2136). KQGSEKTNVDFEEV (SEQ ID NO: 51 of US20160369298; herein SEQ ID NO: 2137), KQGSEKTNVDSEEV (SEQ ID NO: 52 of US20160369298; herein SEQ ID NO: 2138). KQGSEKTNVDVEEV (SEQ ID NO: 53 of US20160369298; herein SEQ ID NO: 2139), KQGSDKTNVDDAGV (SEQ ID NO: 54 of US20160369298; herein SEQ ID NO: 2140), KQGSSKTNVDPREV (SEQ ID NO: 55 of US20160369298; herein SEQ ID NO: 2141), KQGSRKTNVDHKQV (SEQ ID NO: 56 of US20160369298; herein SEQ ID NO: 2142), KQGSKGGNVDTNRV (SEQ ID NO: 57 of US20160369298; herein SEQ ID NO: 2143), KQGSGEANVDNGDV (SEQ ID NO: 58 of US20160369298; herein SEQ ID NO: 2144), KQDAAADNIDYDHV (SEQ ID NO: 59 of US20160369298; herein SEQ ID NO: 2145). KQSGTRSNAAASSV (SEQ ID NO: 60 of US20160369298; herein SEQ ID NO: 2146), KENTNTNDTELTNV (SEQ ID NO: 61 of US20160369298; herein SEQ ID NO: 2147), QRGNNVAATADVNT (SEQ NO: 62 of US20160369298; herein SEQ ID NO: 2148), QRGNNEAATADVNT (SEQ ID NO: 63 of US20160369298; herein SEQ ID NO: 2149), QRGNNPAATADVNT (SEQ ID NO: 64 of US20160369298; herein SEQ ID NO: 2150), QRGNNHAATADVNT (SEQ ID NO: 65 of US20160369298; herein SEQ ID NO: 2151), QEENNIAATPGVNT (SEQ ID NO: 66 of US20160369298; herein SEQ ID NO: 2152). QPPNNMAATHEVNT (SEQ ID NO: 67 of US20160369298; herein SEQ ID NO: 2153), QHHNNSAATTIVNT (SEQ ID NO: 68 of US20160369298; herein SEQ ID NO: 2154), QTTNNRAAFNMVET (SEQ ID NO: 69 of US20160369298; herein SEQ ID NO: 2155), QKKNNNAASKKVAT (SEQ ID NO: 70 of US20160369298; herein SEQ ID NO: 2156), QGGNNKAADDAVKT (SEQ ID NO: 71 of US20160369298; herein SEQ ID NO: 2157), QAAKGGAADDANKT (SEQ ID NO: 72 of US20160369298; herein SEQ ID NO: 2158), QDDRAAAANESVDT (SEQ m NO: 73 of US20160369298; herein SEQ ID NO: 2159). QQQHDDAAYQRVHT (SEQ ID NO: 74 of US20160369298; herein SEQ ID NO: 2160), QSSSSLAAVSTVQT (SEQ ID NO: 75 of US20160369298; herein SEQ ID NO: 2161), QNNQTTAAIRNVTT (SEQ ID NO: 76 of US20160369298; herein SEQ ID NO: 2162), NYNKKSDNVDFT (SEQ ID NO: 77 of US20160369298; herein SEQ ID NO: 2163), NYNKKSENVDFT (SEQ ID NO: 78 of US20160369298; herein SEQ ID NO: 2164), NYNKKSLNVDFT (SEQ ID NO: 79 of US20160369298; herein SEQ ID NO: 2165), NYNKKSPNVDFT (SEQ ID NO: 80 of US20160369298; herein SEQ ID NO: 2166), NYSKKSHCVDFT (SEQ ID NO: 81 of US20160369298; herein SEQ ID NO: 2167), NYRKTIYVDFT (SEQ ID NO: 82 of US20160369298; herein SEQ ID NO: 2168), NYKEKKDVHFT (SEQ ID NO: 83 of US20160369298; herein SEQ ID NO: 2169), NYGHRAIVQFT (SEQ ID NO: 84 of US20160369298; herein SEQ ID NO: 2170), NYANHQFVVCT (SEQ ID NO: 85 of US20160369298; herein SEQ ID NO: 2171), NYDDDPTGVLLT (SEQ ID NO: 86 of US20160369298; herein SEQ ID NO: 2172), NYDDPTGAILLT (SEQ ID NO: 87 of US20160369298; herein SEQ ID NO: 2173), NFEQQNSVEWT (SEQ ID NO: 88 of US20160369298; herein SEQ ID NO: 2174), SQSGASN (SEQ ID NO: 89 and SEQ ID NO: 241 of US20160369298; herein SEQ ID NO: 2175), NNGSQA (SEQ ID NO: 90 of US20160369298; herein SEQ ID NO: 2176), YYLSRTNTPSGTTTWSRLQFSQAGA (SEQ ID NO: 91 of US20160369298; herein SEQ ID NO: 2177), SKTSADNNNSEYSWTG (SEQ ID NO: 92 of US20160369298; herein SEQ ID NO: 2178), HKDDEEKF (SEQ ID NO: 93, 209. 214, 219, 224, 234, 239, and 244 of US20160369298; herein SEQ ID NO: 2179), KQGSEKTNVDIEEV (SEQ ID NO: 94 of US20160369298; herein SEQ ID NO: 2180), QRGNNQAATADVNT (SEQ ID NO: 95 of US20160369298; herein SEQ ID NO: 2181), NYNKKSVNVDFT (SEQ ID NO: 96 of US20160369298; herein SEQ ID NO: 2182), SQSGASNYNTPSGTTTQSRLQFSTSADNNNSEYSSWTGATKYH (SEQ ID NO: 106 of US20160369298; herein SEQ ID NO: 2183), SASGASNFNSEGGSLTQSSLGFSTDGENNNSDFSWTGATKYH (SEQ ID NO: 107 of US20160369298; herein SEQ ID NO: 2184), SQSGASNYNTPSGTTTQSRLQFSTDGENNNSDFSWTGATKYH (SEQ ID NO: 108 of US20160369298; herein SEQ ID NO: 2185), SASGASNYNTPSGTTTQSRLQFSTSADNNNSEFSWPGATTYH (SEQ ID NO: 109 of US20160369298; herein SEQ ID NO: 2186), SQSGASNFNSEGGSLTQSSLGFSTDGENNNSDFSWTGATKYH (SEQ ID NO: 110 of US20160369298; herein SEQ ID NO: 2187), SASGASNYNTPSGSLTQSSLGFSTDGENNNSDFSWTGATKYH (SEQ ID NO: 111 of US 20160369298; herein SEQ ID NO: 2188), SQSGASNYNTPSGTTTQSRLQFSTSADNNNSDFSWTGATKYH (SEQ ID NO: 112 of US20160369298; herein SEQ ID NO: 2189), SGAGASNFNSEGGSLTQSSLGFSTDGENNNSDFSWTGATKYH (SEQ ID NO: 113 of US20160369298; herein SEQ ID NO: 2190), SGAGASN (SEQ ID NO: 176 of US20160369298; herein SEQ NO: 2191), NSEGGSLTQSSLGFS (SEQ ID NO: 177, 185. 193 and 202 of US20160369298; herein SEQ ID NO: 2192), TDGENNNSDFS (SEQ ID NO: 178 of US20160369298; herein SEQ ID NO: 2193), SEFSWPGATT (SEQ ID NO: 179 of US20160369298; herein SEQ ID NO: 2194), TSADNNNSDFSWT (SEQ ID NO: 180 of US20160369298; herein SEQ ID NO: 2195), SQSGASNY (SEQ ID NO: 181, 187, and 198 of US20160369298; herein SEQ ID NO: 2196), NTPSGTTTQSRLQFS (SEQ ID NO: 182, 188, 191, and 199 of US20160369298; herein SEQ ID NO: 2197), TSADNNNSEYSWTGATKYH (SEQ ID NO: 183 of US20160369298; herein SEQ ID NO: 2198), SASGASNF (SEQ ID NO: 184 of US20160369298; herein SEQ ID NO: 2199), TDGENNNSDFSWTGATKYH (SEQ NO: 186, 189, 194, 197, and 203 of US20160369298; herein SEQ ID NO: 2200), SASGASNY (SEQ ID NO: 190 and SEQ ID NO: 195 of US20160369298; herein SEQ ID NO: 2201). TSADNNNSEFSWPGATTYH (SEQ ID NO: 192 of US20160369298; herein SEQ ID NO: 2202), NTPSGSLTQSSLGFS (SEQ ID NO: 196 of US20160369298; herein SEQ ID NO: 2203), TSADNNNSDFSWTGATKYH (SEQ ID NO: 200 of US20160369298; herein SEQ ID NO: 2204), SGAGASNF (SEQ ID NO: 201 of US20160369298; herein SEQ ID NO: 2205), CTCCAGVVSVVSMRSRVCVNSGCAGCTDHCVVSRNSGTCVMSACACAA (SEQ ID NO: 204 of US20160369298; herein SEQ ID NO: 2206), CTCCAGAGAGGCAACAGACAAGCAGCTACCGCAGATGTCAACACACAA (SEQ ID NO: 205 of US20160369298; herein SEQ ID NO: 2207), SAAGASN (SEQ ID NO: 206 of US20160369298; herein SEQ ID NO: 2208), YFLSRTNTESGSTTQSTLRFSQAG (SEQ ID NO: 207 of US20160369298; herein SEQ ID NO: 2209), SKTSADNNNSDFS (SEQ ID NO: 208, 228, and 253 of US20160369298; herein SEQ ID NO: 2210), KQGSEKTDVDIDKV (SEQ ID NO: 210 of US20160369298; herein SEQ ID NO: 2211), STAGASN (SEQ ID NO: 211 of US20160369298; herein SEQ ID NO: 2212), YFLSRTNTTSGIETQSTLRFSQAG (SEQ ID NO: 212 and SEQ ID NO: 247 of 0520160369298; herein SEQ ID NO: 2213), SKTDGENNNSDFS (SEQ ID NO: 213 and SEQ ID NO: 248 of US20160369298; herein SEQ ID NO: 2214), KQGAAADDVEIDGV (SEQ ID NO: 215 and SEQ ID NO: 250 of US20160369298; herein SEQ ID NO: 2215), SEAGASN (SEQ ID NO: 216 of US20160369298; herein SEQ ID NO: 2216), YYLSRTNTPSGTTTQSRLQFSQAG (SEQ ID NO: 217, 232 and 242 of US20160369298; herein SEQ ID NO: 2217), SKTSADNNNSEYS (SEQ ID NO: 218, 233, 238, and 243 of US20160369298; herein SEQ ID NO: 2218). KQGSEKTNVDIEKV (SEQ ID NO: 220, 225 and 245 of US20160369298; herein SEQ ID NO: 2219), YFLSRTNDASGSDTKSTLLFSQAG (SEQ ID NO: 222 of US20160369298; herein SEQ ID NO: 2220), STTPSENNNSEYS (SEQ ID NO: 223 of US20160369298; herein SEQ ID NO: 2221), SAAGATN (SEQ ID NO: 226 and SEQ ID NO: 251 of US20160369298; herein SEQ ID NO: 2222), YFLSRTNGEAGSATLSELRFSQAG (SEQ ID NO: 227 of US20160369:298; herein SEQ ID NO: 2223), HGDDADRF (SEQ ID NO: 229 and SEQ ID NO: 254 of US20160369298; herein SEQ ID NO: 2224), KQGAEKSDVEVDRV (SEQ ID NO: 230 and SEQ ID NO: 255 of US20160369298; herein SEQ ID NO: 2225), KQDSGGDNIDIDQV (SEQ ID NO: 235 of US20160369298; herein SEQ ID NO: 2226), SDAGASN (SEQ ID NO: 236 of US20160369298; herein SEQ ID NO: 2227), YFLSRTNTEGGHDTQSTLRFSQAG (SEQ ID NO: 237 of US20160369298; herein SEQ ID NO: 2228), KEDGGGSDVAIDEV (SEQ ID NO: 240 of US20160369298; herein SEQ ID NO: 2229), SNAGASN (SEQ ID NO: 246 of US20160369298; herein SEQ ID NO: 2230), and YFLSRTNGEAGSATLSELRFSQPG (SEQ ID NO: 252 of US20160369298; herein SEQ ID NO: 2231). Non-limiting examples of nucleotide sequences that may encode the amino acid mutated sites include the following, AGCVVMDCAGGARSCASCAAC (SEQ ID NO: 97 of US20160369298; herein SEQ ID NO: 2232), AACRACRRSMRSMAGGCA (SEQ ID NO: 98 of US20160369298; herein SEQ NO: 2233), CACRRGGACRRCRMSRRSARSTTT (SEQ ID NO: 99 of US20160369298; herein SEQ ID NO: 2234), TATTTCTTGAGCAGAACAAACRVCVVSRSCGGAMNCVHSACGMHSTCAVVSCTTVDS TTTTCTCAGSBCRGSGCG (SEQ ID NO: 100 of US20160369298, herein SEQ ID NO: 2235), TCAAMAMMAVNSRVCSRSAACAACAACAGTRASTTCTCGTGGMMAGGA (SEQ ID NO: 101 of US20160369298; herein SEQ ID NO: 2236), AAGSAARRCRSCRVSRVARVCRATRYCGMSNHCRVMVRSGTC (SEQ ID NO: 102 of US20160369298; herein SEQ ID NO: 2237), CAGVVSVVSMRSRVCVNSGCAGCTDHCVVSRNSGTCVMSACA (SEQ ID NO: 103 of US20160369298; herein SEQ ID NO: 2238), AACTWCRVSVASMVSVHSDDTGTGSWSTKSACT (SEQ ID NO: 104 of US20160369298; herein SEQ ID NO: 2239), TTGTTGAACATCACCACGTGACGCACGTTC (SEQ ID NO: 256 of US20160369298; herein SEQ ID NO: 2240). TCCCCGTGGTTCTACTACATAATGTGGCCG (SEQ ID NO: 257 of US20160369298; herein SEQ ID NO: 2241), TTCCACACTCCGTTTGGATAATGTTGAAC (SEQ ID NO: 258 of US20160369298; herein SEQ ID NO: 2242), AGGGACATCCCCAGCTCCATGCTGTGGTCG (SEQ ID NO: 259 of US20160369298; herein SEQ ID NO: 2243), AGGGACAACCCCTCCGACTCGCCCTAATCC (SEQ ID NO: 260 of US20160369298; herein SEQ ID NO: 2244), TCCTAGTAGAAGACACCCTCTCACTGCCCG (SEQ ID NO: 261 of US20160369298; herein SEQ ID NO: 2245), AGTACCATGTACACCCACTCTCCCAGTGCC (SEQ ID NO: 262 of US20160369298; herein SEQ ID NO: 2246), ATATGGACGTTCATGCTGATCACCATACCG (SEQ ID NO: 263 of US20160369298; herein SEQ ID NO: 2247), AGCAGGAGCTCCTTGGCCTCAGCGTGCGAG (SEQ ID NO: 264 of US20160369298; herein SEQ ID NO: 2248), ACAAGCAGCTTCACTATGACAACCACTGAC (SEQ ID NO: 265 of US20160369298; herein SEQ ID NO: 2249), CAGCCTAGGAACTGGCTTCCTGGACCCTGTTACCGCCAGCAGAGAGTCTCAAMAMM AVNSRVCSRSAACAACAACAGTRASTTCTCCTGGMMAGGAGCTACCAAGTACCACC TCAATGGCAGAGACTCTCTGGTGAATCCCGGACCAGCTATGGCAAGCCACRRGGAC RRCRMSRRSARSTTTTTTCCTCAGAGCGGGGTTCTCATCTTTGGGAAGSAARRCRSCR VSRVARVCRATRYCGMSNHCRVMVRSGTCATGATTACAGACGAAGAGGAGATCTGG AC (SEQ ID NO: 266 of US20160369298; herein SEQ ID NO: 2250), TGGGACAATGGCGGTCGTCTCTCAGAGTTKTKKT (SEQ ID NO: 267 of US20160369298; herein SEQ ID NO: 2251), AGAGGACCKKTCCTCGATGGTTCATGGTGGAGTTA (SEQ ID NO: 268 of US20160369298; herein SEQ ID NO: 2252), CCACTTAGGGCCTGGTCGATACCGTTCGGTG (SEQ ID NO: 269 of US20160369298; herein SEQ ID NO: 2253), and TCTCGCCCCAAGAGTAGAAACCCTTCSTTYYG (SEQ ID NO: 270 of US20160369298; herein SEQ ID NO: 2254).

[0145] In some embodiments, the AAV serotype may comprise an ocular cell targeting peptide as described in International Patent Publication WO2016134375, the contents of which are herein incorporated by reference in their entirety, such as, but not limited to SEQ ID NO: 9, and SEQ ID NO:10 of WO2016134375. Further, any of the ocular cell targeting peptides or amino acids described in WO2016134375, may be inserted into any parent AAV serotype, such as, but not limited to, AAV2 (SEQ ID NO:8 of WO2016134375; herein SEQ ID NO: 2255), or AAV9 (SEQ ID NO: 11 of WO2016134375; herein SEQ ID NO: 2256). In some embodiments, modifications, such as insertions are made in AAV2 proteins at P34-A35, T138-A139, A139-P140, G453-T454, N587-R588, and/or R588-Q589. In certain embodiments, insertions are made at D384, G385, 1560, T561, N562, E563, E564, E565, N704, and/or Y705 of AAV9. The ocular cell targeting peptide may be, but is not limited to, any of the following amino acid sequences, GSTPPPM (SEQ ID NO: 1 of 402016134375; herein SEQ ID NO: 2257), or GETRAPL (SEQ ID NO: 4 of WO2016134375; herein SEQ ID NO: 2258).

[0146] In some embodiments, the AAV serotype may be modified as described in the United States Publication US 20170145405 the contents of which are herein incorporated by reference in their entirety. AAV serotypes may include, modified AAV2(e.g., modifications at Y444F, Y500F, Y730F and/or S662V), modified AAV3 (e.g., modifications at Y705F, Y731F and/or T492V), and modified AAV6 (e.g., modifications at S663V and/or T492V),

[0147] In some embodiments, the AAV serotype may be modified as described in the International Publication WO2017083722 the contents of which are herein incorporated by reference in their entirety. AAV serotypes may include, AAV1 (Y705+731F+T492V), AAV2 (Y444+500+730F+T491V), AAV3 (Y705+731F), AAV5, AAV 5(Y436+693+719F), AAV6 (VP3 variant Y705F/Y731F/T492V), AAV8 (Y733F), AAV9, AAV9 (VP3 variant Y731 F), and AAV10 (Y733F).

[0148] In some embodiments, the AAV serotype may comprise, as described in International Patent Publication WO2017015102, the contents of which are herein incorporated by reference in their entirety, an engineered epitope comprising the amino acids SPAKFA (SEQ ID NO: 24 of WO2017015102; herein SEQ ID NO: 2259) or NKDKLN (SEQ NO:2 of WO2017015102; herein SEQ ID NO: 2260). The epitope may be inserted in the region of amino acids 665 to 670 based on the numbering of the VPI capsid of AAV8 (SEQ ID NO:3 of WO2017015102) and/or residues 664 to 668 of AAV3B (SEQ ID NO:3).

[0149] In some embodiments, the AAV serotype may be, or may have a sequence as described in International Patent Publication WO2017058892, the contents of which are herein incorporated by reference in their entirety, such as, but not limited to, AAV variants with capsid proteins that may comprise a substitution at one or more (e.g., 2, 3, 4, 5, 6, or 7) of amino acid residues 262-268, 370-379, 451-459, 472-473, 493-500, 528-534, 547-552, 588-597, 709-710, 716-722 of AAV1, in any combination, or the equivalent amino acid residues in AAV2, AAV3, AAV4, AAVS, AAV6, AAV7, AAV8, AAV9, AAV10, AAV 11, AAV12, AAVrh8, AAVrh10, AAVrh32.33, bovine AAV or avian AAV. The amino acid substitution may be, but is not limited to, any of the amino acid sequences described in WO2017058892. In some embodiments, the AAV may comprise an amino acid substitution at residues 256L, 258K, 259Q, 261S, 263A, 264S, 265T, 266G, 272H, 385S, 386Q, S472R, V473D, N500E 547S, 709A, 710N, 716D, 717N, 718N, 720L, A456T, Q457T, N458Q, K459S, T492S, K493A, S586R, S587G, S588N, T589R, and/or 722T of AAV1 (SEQ ID NO: 1 of WO2017058892) in any combination, 244N, 246Q, 248R, 249E, 2501, 251K, 252S, 253G, 254S, 255V, 256D, 263Y, 377E, 378N, 453L, 456R, 532Q, 533P, 535N, 536P, 537G, 538T, 539T, 540A, 541T, 542Y, 543L, 546N, 653V, 654P, 656S, 697Q, 698F, 704D, 705S, 706T, 707G, 708E, 709Y and/or 710R of AAV5 (SEQ ID NO:5 of WO2017058892) in any combination, 248R, 316V, 317Q, 318D, 319S, 443N, 530N, 531S, 532Q 533P, 534A, 535N, 540A, 541 T, 542Y, 543L, 545G, 546N, 697Q, 704D, 706T, 708E, 709Y and/or 710R of AAV5 (SEQ ID NO: 5 of WO2017058892) in any combination, 264S, 266G, 269N, 272H, 457Q, 588S and/or 589I of AAV6 (SEQ ID NO:6 WO2017058892) in any combination, 457T, 459N, 496G, 499N, 500N, 589Q, 590N and/or 592A of AAV8 (SEQ ID NO: 8 WO2017058892) in any combination,451I, 452N, 453G, 454S, 455G, 456Q, 457N and/or 458Q of AAV9 (SEQ ID NO: 9 WO2017058892) in any combination.

[0150] In some embodiments, the AAV may include a sequence of amino acids at positions 155, 156 and 157 of VP1 or at positions 17, 18, 19 and 20 of VP2, as described in International Publication No. WO 2017066764 the contents of which are herein incorporated by reference in their entirety. The sequences of amino acid may be, but not limited to, N-S-S, S-X-S, S-S-Y, N-X-S, N-S-Y, S-X-Y and N-X-Y, where N, X and Y are, but not limited to, independently non-serine, or non-threonine amino acids, wherein the AAV may be, but not limited to AAV1, AAV2, AAV3, AAV4, AAV5, AAV6, AAV7, AAV8, AAV9, AAV10, AAV11 and AAV12. In some embodiments, the AAV may include a deletion of at least one amino acid at positions 156, 157 or 158 of VP1 or at positions 19, 20 or 21 of VP2, wherein the AAV may be, but not limited to AAV1, AAV2, AAV3, AAV4, AAV5, AAV6, AAV7, AAV8, AAV9, AAV10, AAV11 and AAV12.

[0151] In some embodiments, the AAV serotype may be as described in Jackson et al (Frontiers in Molecular Neuroscience 9:154 (2016)), the contents of which are herein incorporated by reference in their entirety. In some embodiments, the AAV serotype is PHP.B or AAV9. In some embodiments, the AAV serotype is paired with a synapsin promoter to enhance neuronal transduction, as compared to when more ubiquitous promoters are used (i.e., CBA or CMV).

[0152] In some embodiments, peptides for inclusion in an AAV serotype may be identified by isolating human splenocytes, re-stimulating the splenocytes in vitro using individual peptides spanning the amino acid sequence of the AAV capsid protein, IFN-gamma ELISpot with the individual peptides used for the in vitro re-stimulation, bioinformatics analysis to determine the given allele restriction of 15-mers identified by IFN-gamma ELISpot, identification of candidate reactive 9-mer epitopes for a given allele, synthesis candidate 9-mers, second IFN-gamma ELISpot screening of splenocytes from subjects carrying the specific alleles to which identified AAV epitopes are predicted to bind, determine the AAV capsid-reactive CD8+ T-cell epitopes and determine the frequency of subjects reacting to a given AAV epitope,

[0153] AAV particles comprising a modulatory polynucleotide encoding the siRNA molecules may be prepared or derived from various serotypes of AAVs, including, but not limited to, AAV1, AAV2, AAV3, AAV4, AAVS, AAV6, AAV7, AAV8, AAV9, AAV9.47, AAV9(hu14), AAV10, AAV11, AAV12, AAVrh8, AAVrh10, AAV-DJ8 and AAV-DJ. In some cases, different serotypes of AAVs may be mixed together or with other types of viruses to produce chimeric AAV particles. As a non-limiting example, the AAV particle is derived from the AAV9 serotype.

### Viral Genome

[0154] In some embodiments, as shown in an AAV particle comprises a viral genome with a payload region.

[0155] In some embodiments, the viral genome may comprise the components as shown in FIG. 1. The payload region 110 is located within the viral genome 100. At the 5′ and/or the 3′ end of the viral genome 100 there may be at least one inverted terminal repeat (ITR) 120. Between the 5′ ITR 120 and the payload region 110, there may be a promoter region 130. In some embodiments, the payload region may comprise at least one modulatory polynucleotide.

[0156] In some embodiments, the viral genome 100 may comprise the components as shown in FIG. 2. The payload region 110 is located within the viral genome 100. At the 5′ and/or the 3′ end of the viral genome 100 there may be at least one inverted terminal repeat (ITR) 120. Between the 5′ ITR 120 and the payload region 110, there may be a promoter region 130. Between the promoter region 130 and the payload region 110, there may be an intron region 140. In some embodiments, the payload region may comprise at least one modulatory polynucleotide.

[0157] In some embodiments, the viral genome 100 may comprise the components as shown in FIG. 3. At the 5′ and/or the 3′ end of the viral genome 100 there may be at least one inverted terminal repeat (ITR) 120. Within the viral genome 100, there may be an enhancer region 150, a promoter region 130, an intron region 140, and a payload region 110. In some embodiments, the payload region may comprise at least one modulatory polynucleotide.

[0158] In some embodiments, the viral genome 100 may comprise the components as shown in FIG. 4. At the 5′ and/or the 3′ end of the viral genome 100 there may be at least one inverted terminal repeat (ITR) 120. Within the viral genome 100, there may be an enhancer region 150, a promoter region 130, an intron region 140, a payload region 110, and a polyadenylation signal sequence region 160. In some embodiments, the payload region may comprise at least one modulatory polynucleotide.

[0159] In some embodiments, the viral genome 100 may comprise the components as shown in FIG. 5. At the 5′ and/or the 3′ end of the viral genome 100 there may be at least one inverted terminal repeat (ITR) 120. Within the viral genome 100, there may be at least one MCS region 170, an enhancer region 150, a promoter region 130, an intron region 140, a payload region 110, and a polyadenylation signal sequence region 160. In some embodiments, the payload region may comprise at least one modulatory polynucleotide.

[0160] In some embodiments, the viral genome 100 may comprise the components as shown in FIG. 6. At the 5′ and/or the 3′ end of the viral genome 100 there may be at least one inverted terminal repeat (ITR) 120. Within the viral genome 100, there may be at least one MCS region 170, an enhancer region 150, a promoter region 130, at least one exon region 180, at least one intron region 140, a payload region 110, and a polyadenylation signal sequence region 160. In some embodiments, the payload region may comprise at least one modulatory polynucleotide.

[0161] In some embodiments, the viral genome 100 may comprise the components as shown in FIGS. 7 and 8. Within the viral genome 100, there may be at least one promoter region 130, and a payload region 110. In some embodiments, the payload region may comprise at least one modulatory polynucleotide.

[0162] In some embodiments, the viral genome 100 may comprise the components as shown in FIG. 9. Within the viral genome 100, there may be at least one promoter region 130, a payload region 110, and a polyadenylation signal sequence region 160. In some embodiments, the payload region may comprise at least one modulatory polynucleotide.

### Viral Genome Size

[0163] In some embodiments, the viral genome which comprises a payload described herein, may be single stranded or double stranded viral genome. The size of the viral genome may be small, medium, large or the maximum size. Additionally, the viral genome may comprise a promoter and a polyA tail.

[0164] In some embodiments, the viral genome which comprises a payload described herein, may be a small single stranded viral genome. A small single stranded viral genome may be 2.7 to 3.5 kb in size such as about 2.7, 2.8, 2.9, 3.0, 3.1, 3.2, 3.3, 3.4, and 3.5 kb in size. As a non-limiting example, the small single stranded viral genome may be 3.2 kb in size. Additionally, the viral genome may comprise a promoter and a polyA tail.

[0165] In some embodiments, the viral genome which comprises a payload described herein, may be a small double stranded viral genome. A small double stranded viral genome may be 1.3 to 1.7 kb in size such as about 1.3, 1.4, 1.5, 1.6, and 1.7 kb in size. As a non-limiting example, the small double stranded viral genome may be 1.6 kb in size. Additionally, the viral genome may comprise a promoter and a polyA tail.

[0166] In some embodiments, the viral genome which comprises a payload described herein, may a medium single stranded viral genome. A medium single stranded viral genome may be 3.6 to 4.3 kb in size such as about 3.6, 3.7, 3.8, 3.9, 4.0, 4.1, 4.2 and 4.3 kb in size. As a non-limiting example, the medium single stranded viral genome may be 4.0 kb in size. Additionally, the viral genome may comprise a promoter and a polyA tail.

[0167] In some embodiments, the viral genome which comprises a payload described herein, may be a medium double stranded viral genome. A medium double stranded viral genome may be 1.8 to 2.1 kb in size such as about 1.8, 1.9, 2.0, and 2.1 kb in size. As a non-limiting example, the medium double stranded viral genome may be 2.0 kb in size. Additionally, the viral genome may comprise a promoter and a polyA tail.

[0168] In some embodiments, the viral genome which comprises a payload described herein, may be a large single stranded viral genome. A large single stranded viral genome may be 4.4 to 6.0 kb in size such as about 4.4, 4.5, 4.6, 4.7, 4.8, 4.9, 5.0, 5.1, 5.2, 5.3, 5.4, 5.5, 5.6, 5.7, 5.8, 5.9 and 6.0 kb in size. As a non-limiting example, the large single stranded viral genome may be 4.7 kb in size. As another non-limiting example, the large single stranded viral genome may be 4.8 kb in size. As yet another non-limiting example, the large single stranded viral genome may be 6.0 kb in size. Additionally, the viral genome may comprise a promoter and a polyA tail.

[0169] In some embodiments, the viral genome which comprises a payload described herein, may be a large double stranded viral genome. A large double stranded viral genome may be 2.2 to 3.0 kb in size such as about 2.2, 2.3, 2.4, 2.5, 2.6, 2.7, 2.8, 2.9 and 3.0 kb in size. As a non-limiting example, the large double stranded viral genome may be 2.4 kb in size. Additionally, the viral genome may comprise a promoter and a polyA tail.

### Viral Genome Component: Inverted Terminal Repeats (ITRs)

[0170] 101701 The AAV particles of the present disclosure comprise a viral genome with at least one ITR region and a payload region. In some embodiments the viral genome has two ITRs. These two ITRs flank the payload region at the 5′ and 3′ ends. The ITRs function as origins of replication comprising recognition sites for replication. ITRs comprise sequence regions which can be complementary and symmetrically arranged. ITRs incorporated into viral genomes of the disclosure may be comprised of naturally occurring polynucleotide sequences or recombinantly derived polynucleotide sequences.

[0171] The ITRs may be derived from the same serotype as the capsid, selected from any of the serotypes listed in Table 1, or a derivative thereof. The ITR may be of a different serotype from the capsid. In some embodiments the AAV particle has more than one ITR. In a non-limiting example, the AAV particle has a viral genome comprising two ITRs. In some embodiments the ITRs are of the same serotype as one another. In another embodiment the ITRs are of different serotypes. Non-limiting examples include zero, one or both of the ITRs having the same serotype as the capsid. In some embodiments both ITRs of the viral genome of the AAV particle are AAV2 ITRs.

[0172] Independently, each ITR may be about 100 to about 150 nucleotides in length. An ITR may be about 100-105 nucleotides in length, 106-110 nucleotides in length, 111-115 nucleotides in length, 116-120 nucleotides in length, 121-125 nucleotides in length, 126-130 nucleotides in length, 131-135 nucleotides in length, 136-140 nucleotides in length, 141-145 nucleotides in length or 146-150 nucleotides in length. In some embodiments the ITRs are 140-142 nucleotides in length. Non limiting examples of ITR length are 102, 140, 141, 142, 145 nucleotides in length, and those having at least 95% identity thereto.

[0173] In some embodiments, the AAV particle comprises a nucleic acid sequence encoding an siRNA molecule which may be located near the 5′ end of the flip ITR in an expression vector. In another embodiment, the AAV particle comprises a nucleic acid sequence encoding an siRNA molecule may be located near the 3′ end of the flip ITR in an expression vector. In yet another embodiment, the AAV particle comprises a nucleic acid sequence encoding an siRNA molecule may be located near the 5′ end of the flop ITR in an expression vector. In yet another embodiment, the AAV particle comprises a nucleic acid sequence encoding an siRNA molecule may be located near the 3′ end of the flop ITR in an expression vector. In some embodiments, the AAV particle comprises a nucleic acid sequence encoding an siRNA molecule may be located between the 5′ end of the flip ITR and the 3′ end of the flop ITR in an expression vector. In some embodiments. the AAV particle comprises a nucleic acid sequence encoding an siRNA molecule may be located between (e.g., half-way between the 5′ end of the flip ITR and 3′ end of the flop ITR or the 3′ end of the flop ITR and the 5′ end of the flip ITR), the 3′ end of the flip ITR and the 5′ end of the flip ITR in an expression vector. As a non-limiting example, the AAV particle comprises a nucleic acid sequence encoding an siRNA molecule may be located within 1, 2, 3, 4, 5, 6, 7, 8, 9, 10, 11, 12, 13, 14, 15, 16, 17, 18, 19, 20, 21, 22, 23, 24, 25, 26, 27, 28, 29, 30 or more than 30 nucleotides downstream from the 5′ or 3′ end of an ITR (e.g., Flip or Flop ITR) in an expression vector. As a non-limiting example. the AAV particle comprises a nucleic acid sequence encoding an siRNA molecule may be located within 1, 2, 3, 4, 5, 6, 7, 8, 9, 10, 11, 12, 13, 14, 15, 16, 17, 18, 19, 20, 21, 22, 23, 24, 25, 26, 27, 28, 29, 30 or more than 30 nucleotides upstream from the 5′ or 3′ end of an ITR (e.g., Flip or Flop ITR) in an expression vector. As another non-limiting example, the AAV particle comprises a nucleic acid sequence encoding an siRNA molecule may be located within 1-5, 1-10, 1-15, 1-20, 1-25, 1-30, 5-10, 5-15, 5-20, 5-25, 5-30, 10-15, 10-20, 10-25, 10-30, 15-20, 15-25, 15-30, 20-25, 20-30 or 25-30 nucleotides downstream from the 5′ or 3′ end of an ITR (e.g., Flip or Flop ITR) in an expression vector. As another non-limiting example, the AAV particle comprises a nucleic acid sequence encoding an siRNA molecule may be located within 1-5, 1-10. 1-15, 1-20, 1-25, 1-30, 5-10, 5-15, 5-20, 5-25. 5-30, 10-15, 10-20, 10-25, 10-30, 15-20, 15-25, 15-30, 20-25, 20-30 or 25-30 upstream from the 5′ or 3′ end of an ITR (e.g., Flip or Flop ITR) in an expression vector. As a non-limiting example, the AAV particle comprises a nucleic acid sequence encoding an siRNA molecule may be located within the first 1%, 2%, 3%, 4%, 5%, 6%, 7%, 8%, 9%, 10%, 15%, 20%, 25% or more than 25% of the nucleotides upstream from the 5′ or 3′ end of an FIR (e.g., Flip or Flop ITR) in an expression vector. As another non-limiting example, the AAV particle comprises a nucleic acid sequence encoding an siRNA molecule may be located with the first 1-5%, 1-10%, 1-15%, 1-20%, 1-25%, 5-10%, 5-15%, 5-20%, 5-25%, 10-15%, 10-20%, 10-25%, 15-20%, 15-25%, or 20-25% downstream from the 5′ or 3′ end of an ITR (e.g., Flip or Flop ITR)) in an expression vector.

### Viral Genome Component: Promoters

[0174] In some embodiments, the payload region of the viral genome comprises at least one element to enhance the transgene target specificity and expression (See e.g., Powell et al. Viral Expression Cassette Elements to Enhance Transgene Target Specificity and Expression in Gene Therapy, 2015; the contents of which are herein incorporated by reference in its entirety). Non-limiting examples of elements to enhance the transgene target specificity and expression include promoters, endogenous miRNAs, post-transcriptional regulatory elements (PREs), polyadenylation (PolyA) signal sequences and upstream enhancers (USEs), CMV enhancers and introns.

[0175] A person skilled in the a may recognize that expression of the polypeptides of the disclosure in a target cell may require a specific promoter, including but not limited to, a promoter that is species specific, inducible, tissue-specific, or cell cycle-specific (Parr et al., Nat Med.3:1145-9 (1997); the contents of which are herein incorporated by reference in their entirety).

[0176] In some embodiments, the promoter is deemed to be efficient when it drives expression of the polypeptide(s) encoded in the payload region of the viral genome of the AAV particle.

[0177] In some embodiments, the promoter is a promoter deemed to be efficient to drive the expression of the modulatory polynucleotide.

[0178] In some embodiments, the promoter is a promoter deemed to be efficient when it drives expression in the cell being targeted.

[0179] In some embodiments, the promoter drives expression of the payload for a period of time in targeted tissues. Expression driven by a promoter may be for a period of 1 hour, 2, hours, 3 hours, 4 hours, 5 hours, 6 hours, 7 hours, 8 hours, 9 hours, 10 hours, 11 hours, 12 hours, 13 hours, 14 hours, 15 hours, 16 hours, 17 hours, 18 hours, 19 hours, 20 hours, 21 hours, 22 hours, 23 hours, 1 day, 2 days, 3 days, 4 days, 5 days, 6 days, 1 week, 8 days, 9 days, 10 days, 11 days, 12 days, 13 days, 2 weeks, 15 days, 16 days, 17 days, 18 days, 19 days, 20 days, 3 weeks, 22 days, 23 days, 24 days, 25 days, 26 days, 27 days, 28 days, 29 days, 30 days, 31 days, 1 month, 2 months, 3 months, 4 months, 5 months, 6 months, 7 months, 8 months, 9 months, 10 months, 11 months, 1 year, 13 months, 14 months, 15 months, 16 months, 17 months, 18 months, 19 months, 20 months, 21 months, 22 months, 23 months, 2 years, 3 years, 4 years, 5 years, 6 years, 7 years, 8 years, 9 years, 10 years or more than 10 years. Expression may be for 1-5 hours, 1-12 hours, 1-2 days, 1-5 days, 1-2 weeks, 1-3 weeks, 1-4 weeks, 1-2 months, 1-4 months, 1-6 months, 2-6 months. 3-6 months, 3-9 months, 4-8 months, 6-12 months, 1-2 years, 1-5 years, 2-5 years, 3-6 years, 3-8 years, 4-8 years or 5-10 years.

[0180] In some embodiments, the promoter drives expression of the payload for at least 1 month, 2 months, 3 months, 4 months, 5 months, 6 months, 7 months, 8 months, 9 months, 10 months, 11 months, 1 year, 2 years, 3 years 4 years, 5 years, 6 years, 7 years, 8 years, 9 years, 10 years, 11 years, 12 years, 13 years, 14 years, 15 years, 16 years, 17 years, 18 years, 19 years, 20 years, 21 years, 22 years, 23 years, 24 years, 25 years, 26 years, 27 years, 28 years, 29 years, 30 years, 31 years, 32 years, 33 years, 34 years, 35 years, 36 years, 37 years, 38 years, 39 years, 40 years, 41 years, 42 years, 43 years, 44 years, 45 years, 46 years. 47 years, 48 ears, 49 years, 50 years, 55 years, 60 years, 65 years, or more than 65 years.

[0181] Promoters may be naturally occurring or non-naturally occurring. examples of promoters include viral promoters, plant promoters and mammalian promoters. In some embodiments, the promoters may be human promoters. In some embodiments, the promoter may be truncated.

[0182] Promoters which drive or promote expression in most tissues include, but are not limited to, human elongation factor 1α-subunit (EF1α) cytomegalovirus (CMV) immediate-early enhancer and/or promoter, chicken β-actin (CBA) and its derivative CAG, βglucuronidase (GUSB), or ubiquitin C (UBC). Tissue-specific expression elements can be used to restrict expression to certain cell types such as, but not limited to, muscle specific promoters, B cell promoters, monocyte promoters, leukocyte promoters, macrophage promoters, pancreatic acinar cell promoters, endothelial cell promoters, lung tissue promoters, astrocyte promoters, or nervous system promoters which can be used to restrict expression to neurons, astrocytes, or oligodendrocytes.

[0183] Non-limiting examples of muscle-specific promoters include mammalian muscle creatine kinase (NICK) promoter, mammalian desmin (DES) promoter, mammalian troponin I (TNNI2) promoter, and mammalian skeletal alpha-actin (ASK, promoter (see, e.g. U.S. Patent Publication US 20110212529, the contents of which are herein incorporated by reference in their entirety).

[0184] Non-limiting examples of tissue-specific expression elements for neurons include neuron-specific enolase (NSE), platelet-derived growth factor (PDGF), platelet-derived growth factor B-chain (PDGF-β), synapsin (Syn), methyl-CpG binding protein 2 (MeCP2), Ca²⁺/calmodulin-dependent protein kinase II (CaMKII), metabotropic glutamate receptor 2 neurofilament light (NFL) or heavy (NFH), β-globin minigene nβ2, preproenkephalin (PPE), enkephalin (Enk) and excitatory amino acid transporter 2 (EAAT2) promoters. Non-limiting examples of tissue-specific expression elements for astrocytes include glial fibrillary acidic protein (GFAP) and EAAT2 promoters. A non-limiting example of a tissue-specific expression element for oligodendrocytes includes the myelin basic protein (MBP) promoter.

[0185] In some embodiments, the promoter may be less than 1 kb. The promoter may have a length of 200, 210, 220, 230, 240, 250, 260, 270, 280, 290, 300, 310, 320, 330, 340, 350, 360, 370, 380, 390, 400, 410, 420, 430, 440, 450, 460, 470, 480, 490, 500, 510, 520, 530, 540, 550, 560, 570, 580, 590, 600, 610, 620, 630, 640, 650, 660, 670, 680, 690, 700, 710, 720, 730, 740, 750, 760, 770, 780, 790, 800 or more than 800 nucleotides. The promoter may have a length between 200-300, 200-400, 200-500, 200-600, 200-700, 200-800, 300-400, 300-500, 300-600, 300-700, 300-800, 400-500, 400-600, 400-700, 400-800, 500-600, 500-700, 500-800, 600-700, 600-800 or 700-800.

[0186] In some embodiments, the promoter may be a combination of two or more components of the same or different starting or parental promoters such as, but not limited to, CMV and CBA. Each component may have a length of 200, 210, 220, 230, 240, 250, 260, 270, 280, 290, 300. 310, 320, 330, 340, 350, 360, 370. 380, 381, 382, 383, 384, 385, 386, 387, 388, 389, 390, 400, 410, 420, 430, 440, 450, 460, 470, 480, 490, 500, 510, 520, 530, 540, 550, 560, 570, 580, 590, 600, 610, 620, 630, 640, 650, 660, 670, 680, 690, 700, 710, 720, 730, 740, 750, 760, 770, 780, 790, 800 or more than 800. Each component may have a length between 200-300, 200-400, 200-500, 200-600, 200-700, 200-800, 300-400, 300-500, 300-600, 300-700, 300-800, 400-500, 400-600, 400-700, 400-800, 500-600, 500-700, 500-800, 600-700, 600-800 or 700-800. In some embodiments, the promoter is a combination of a 382 nucleotide CMV-enhancer sequence and a 260 nucleotide CBA-promoter sequence.

[0187] In some embodiments, the viral genome comprises a ubiquitous promoter. Non-limiting examples of ubiquitous promoters include CMV, CBA (including derivatives CAG, CBh, etc.), EF-1α, PGK, UBC, GUSB (hGBp), and UCOE (promoter of HNRPA2B1-CBX3).

[0188] Yu et al, (Molecular Pain 2011, 7:63; the contents of which are herein incorporated by reference in their entirety) evaluated the expression of eGFP under the CAG, EFIα, PGK and UBC promoters in rat DRG cells and primary DRG cells using lentiviral vectors and found that UBC showed weaker expression than the other 3 promoters and only 10-12% glial expression was seen for all promoters. Soderblom et al. (E. Neuro 2015; the contents of which are herein incorporated by reference in its entirety) evaluated the expression of eGFP in AAV8 with CMV and UBC promoters and AAV2 with the CMV promoter after injection in the motor cortex. Intranasal administration of a plasmid containing a UBC or EF1α promoter showed a sustained airway expression greater than the expression with the CMV promoter (See e.g., Gill et al., Gene Therapy 2001, Vol. 8, 1539-1546; the contents of which are herein incorporated by reference in their entirety). Husain et al. (Gene Therapy 2009; the contents of which are herein incorporated by reference in its entirety) evaluated an HβH construct with a hGUSB promoter, a HSV-1LAT promoter and an NSE promoter and found that the HβH construct showed weaker expression than NSE in mouse brain. Passini and Wolfe (J. Virol. 2001, 12382-12392, the contents of which are herein incorporated by reference in its entirety) evaluated the long-term effects of the HβH vector following an intraventricular injection in neonatal mice and found that there was sustained expression for at least 1 year, Low expression in all brain regions was found by Xu et al. (Gene Therapy 2001, 8, 1323-1332; the contents of which are herein incorporated by reference in their entirety) when NFL and NFH promoters were used as compared to the CMV-lacZ, CMV-luc, EF, GFAP, hENK, nAChR, PPE, PPE+wpre, NSE (0.3 kb), NSE (1.8 kb) and NSE (1.8 kb+wpre). Xu et al. found that the promoter activity in descending order was NSE (1.8 kb), EF, NSE (0.3 kb), GFAP, CMV, hENK, PPE, NFL and NFH. NFL is a 650-nucleotide promoter and NFH is a 920-nucleotide promoter which are both absent in the liver but NFH is abundant in the sensory proprioceptive neurons, brain and spinal cord and NFH is present in the heart. Scn8a is a 470 nucleotide promoter which expresses throughout the DRG, spinal cord and brain with particularly high expression seen in the hippocampal neurons and cerebellar Purkinje cells, cortex, thalamus and hypothalamus (See e.g., Drews et al. Identification of conserved, functional noncoding elements in the promoter region of the sodium channel gene SCN8A, Mamm Genome (2007) 18:723-731; and Raymond et al. Expression of Alternatively Spliced Sodium Channel a-subunit genes, Journal of Biological Chemistry (2004) 279(44) 46234-46241; the contents of each of which are herein incorporated by reference in their entireties).

[0189] Any of promoters taught by the aforementioned Yu, Soderblom, Gill, Husain, Passini, Xu, Drews or Raymond may be used in the present AAV particles described herein.

[0190] In some embodiments, the promoter is not cell specific.

[0191] In some embodiments, the promoter is a ubiquitin c (UBC) promoter. The UBC promoter may have a size of 300-350 nucleotides. As a non-limiting example, the UBC promoter is 332 nucleotides.

[0192] In some embodiments, the promoter is a P-glucuronidase (GUSB) promoter. The GUSB promoter may have a size of 350-400 nucleotides. As a non-limiting example, the GUSB promoter is 378 nucleotides.

[0193] In some embodiments, the promoter is a neurofilament light (NFL) promoter. The NFL promoter may have a size of 600-700 nucleotides. As a non-limiting example, the NFL promoter is 650 nucleotides. As a non-limiting example, the construct may be AAV-promoter-CMV/globin intron-modulatory polynucleotide-RBG, where the AAV may be self-complementary and the AAV may be the DJ serotype,

[0194] In some embodiments, the promoter is a neurofilament heavy (NFH) promoter. The NFH promoter may have a size of 900-950 nucleotides. As a non-limiting example, the NFH promoter is 920 nucleotides. As a non-limiting example, the construct may be AAV-promoter-CMV/globin intron-modulatory polynucleotide-RBG, where the AAV may be self-complementary and the AAV may be the DJ serotype.

[0195] In some embodiments, the promoter is a scn8a promoter. The scn8a promoter may have a size of 450-500 nucleotides. As a non-limiting example, the sen8a promoter is 470 nucleotides. As a non-limiting example, the construct may be AAV-promoter-CMV/globin intron-modulatory polynucleotide-RBG, where the AAV may be self-complementary and the AAV may be the DJ serotype.

[0196] In some embodiments, the viral genome comprises a Pol. III promoter.

[0197] In some embodiments, the viral genome comprises a P1 promoter,

[0198] In some embodiments, the viral genome comprises a FXN promoter.

[0199] In some embodiments, the promoter is a phosphoglycerate kinase 1 (PGK) promoter.

[0200] In some embodiments, the promoter is a chicken β-actin (CBA) promoter.

[0201] In some embodiments, the promoter is a CAG promoter which is a construct comprising the cytomegalovirus (CMV) enhancer fused to the chicken beta-actin (CBA) promoter.

[0202] In some embodiments, the promoter is a cytomegalovirus (CMV) promoter.

[0203] In some embodiments, the viral genome comprises a H1 promoter.

[0204] In some embodiments, the viral genome comprises a U6 promoter.

[0205] In some embodiments, the promoter is a liver or a skeletal muscle promoter. Non-limiting examples of liver promoters include human α-1-antitrypsin (hAAT) and thyroxine binding globulin (TBG). Non-limiting examples of skeletal muscle promoters include Desmin, MCK or synthetic C5-12.

[0206] In some embodiments, the promoter is an RNA pot III promoter, As a non-limiting example, the RNA pol III promoter is U6. As a non-limiting example, the RNA poi III promoter is H1.

[0207] In some embodiments, the viral genome comprises two promoters. As a non-limiting example, the promoters are an EF la promoter and a CMV promoter.

[0208] In some embodiments, the viral genome comprises an enhancer element, a promoter and/or a 5′UTR intron. The enhancer element, also referred to herein as an “enhancer,” may be, but is not limited to, a CMV enhancer, the promoter may be, but is not limited to, a CMV, CBA, UBC, GUSB, NSF., Synapsin, MeCP2, and GET promoter and the 5′UTR/intron may be, but is not limited to, SV40, and CBA-MVM. As a non-limiting example, the enhancer, promoter and/or intron used in combination may be: (1) CMV enhancer, CMV promoter, SV40 5′UTR intron; (2) CMV enhancer, CBA promoter, SV 40 5′UTR intron; (3) CMV enhancer, CBA promoter, CBA-MVM 5′UTR intron; (4) UBC promoter; (5) GUSB promoter; (6) NSE promoter; (7) Synapsin promoter; (8) MeCP2 promoter, (9) GFAP promoter, (10) H1 promoter; and (11) U6 promoter.

[0209] In some embodiments, the viral genome comprises an engineered promoter.

[0210] In another embodiment the viral genome comprises a promoter from a naturally expressed protein.

### Viral Genome Component: Untranslated Regions (UTRs)

[0211] By definition, wild type untranslated regions (DTRs) of a gene are transcribed but not translated. Generally, the 5′ UTR starts at the transcription start site and ends at the start codon and the 3′ UTR starts immediately following the stop codon and continues until the termination signal for transcription.

[0212] Features typically found in abundantly expressed genes of specific target organs may be engineered into UTRs to enhance the stability and protein production. As a non-limiting example, a 5′ UTR from mRNA normally expressed in the liver (e.g., albumin, serum amyloid A, Apolipoprotein A/B/E, transferrin, alpha fetoprotein, erythropoietin, or Factor VIII) may be used in the viral genomes of the AAV particles of the disclosure to enhance expression in hepatic cell lines or liver.

[0213] While not wishing to be bound by theory, wild-type 5′ untranslated regions (UTRs) include features which play roles in translation initiation. Kozak sequences, which are commonly known to be involved in the process by which the ribosome initiates translation of many genes, are usually included in 5′ UTRs. Kozak sequences have the consensus CCR(A/G)CCAUGG, where R is a purine (adenine or guanine) three bases upstream of the start codon (ATG), which is followed by another ‘G’.

[0214] In some embodiments, the 5′UTR in the viral genome includes a Kozak sequence.

[0215] In some embodiments, the 5′UTR in the viral genome does not include a Kozak sequence.

[0216] While not wishing to be bound by theory, wild-type 3′ UTRs are known to have stretches of Adenosines and Uridines embedded therein. These AU rich signatures are particularly prevalent in genes with high rates of turnover. Based on their sequence features and functional properties, the AU rich elements (AREs) can be separated into three classes (Chen et al, 1995, the contents of which are herein incorporated by reference in its entirety): Class I AREs, such as, but not limited to, c-Myc and MyoD, contain several dispersed copies of an AUUUA motif within U-rich regions. Class II AREs, such as, but not limited to, GM-CSF and TNF-a, possess two or more overlapping UUAUUUA(U/A)(U/A) nonamers. Class III ARES, such as, but not limited to, c-Jun and Myogenin, are less well defined. These U rich regions do not contain an AUUUA motif. Most proteins binding to the AREs are known to destabilize the messenger, whereas members of the ELAV family, most notably HuR, have been documented to increase the stability of mRNA. HuR binds to AREs of all the three classes. Engineering the HuR specific binding sites into the 3′ UTR of nucleic acid molecules will lead to HuR binding and thus, stabilization of the message in vivo.

[0217] Introduction, removal or modification of 3′ UTR AU rich elements (AREs) can be used to modulate the stability of polynucleotides. When engineering specific polynucleotides, e.g., payload regions of viral genomes, one or more copies of an ARE can be introduced to make polynucleotides less stable and thereby curtail translation and decrease production of the resultant protein. Likewise, AREs can be identified and removed or mutated to increase the intracellular stability and thus increase translation and production of the resultant protein.

[0218] In some embodiments, the 3′ UTR of the viral genome may include an oligo(dT) sequence for templated addition of a poly-A tail.

[0219] In some embodiments, the viral genome may include at least one miRNA seed, binding site or full sequence. microRNAs (or miRNA or miR) are 19-25 nucleotide noncoding RNAs that bind to the sites of nucleic acid targets and down-regulate gene expression either by reducing nucleic acid molecule stability or by inhibiting translation. A microRNA sequence comprises a “seed” region, i.e., a sequence in the region of positions 2-8 of the mature micro:RNA, which sequence has perfect Watson-Crick complementarity to the miRNA target sequence of the nucleic acid.

[0220] in some embodiments, the viral genome may be engineered to include, alter or remove at least one miRNA binding site, sequence or seed region.

[0221] Any UTR from any gene known in the art may be incorporated into the viral genome of the AAV particle. These UTRs, or portions thereof, may be placed in the same orientation as in the gene from which they were selected, or they may be altered in orientation or location. In some embodiments, the VTR. used in the viral genome of the AAV particle may be inverted, shortened, lengthened, made with one or more other 5′ UTRs or 3′ UTRs known in the art. As used herein, the term “altered” as it relates to a UTR, means that the UTR has been changed in some way in relation to a reference sequence. For example, a 3′ or 5′ UTR may be altered relative to a wild type or native UTR by the change in orientation or location as taught above or may be altered by the inclusion of additional nucleotides, deletion of nucleotides, swapping or transposition of nucleotides,

[0222] In some embodiments, the viral genome of the AAV particle comprises at least one artificial UTRs which is not a variant of a wild type UTR.

[0223] In some embodiments, the viral genome of the AAV particle comprises UTRs which have been selected from a family of transcripts whose proteins share a common function, structure, feature or property.

### Viral Genome Component: Polyadenylation Sequence

[0224] In some embodiments, the viral genome of the AAV particles of the present disclosure comprise at least one polyadenylation sequence. The viral genome of the AAV particle may comprise a polyadenylation sequence between the 3′ end of the payload coding sequence and the 5′ end of the MR.

[0225] In some embodiments, the polyadenylation sequence or “polyA sequence” may range from absent to about 500 nucleotides in length. The polyadenylation sequence may be, but is not limited to, 1, 2, 3, 4, 5, 6, 7, 8, 9, 10, 11, 12, 13, 14, 15, 16, 17, 18, 19, 20, 21, 22, 23, 24, 25, 26, 27, 28, 29, 30, 31, 32, 33, 34, 35, 36, 37, 38, 39, 40, 41, 42, 43, 44, 45, 46, 47, 48, 49, 50, 51, 52, 53, 54, 55, 56, 57, 58, 59, 60, 61, 62, 63, 64, 65, 66, 67, 68, 69, 70, 71, 72, 73, 74, 75, 76, 77, 78, 79, 80, 81, 82, 83, 84, 85, 86, 87, 88, 89, 90, 91, 92, 93, 94, 95, 96, 97, 98, 99, 100, 101, 102, 103, 104, 105, 106, 107, 108, 109, 110, 111, 112, 113, 114, 115, 116, 117, 118, 119, 120, 121, 122, 123, 124, 125, 126, 127, 128, 129, 130, 131, 132, 133, 134, 135, 136, 137, 138, 139, 140, 141, 142, 143, 144, 145, 146, 147, 148, 149, 150, 151, 152, 153, 154, 155, 156, 157, 158, 159, 160, 161, 162 163, 164, 165, 166, 167, 168, 169, 170, 171, 172, 173, 174, 175, 176, 177, 178, 179, 180, 181, 182, 183, 184, 185, 186, 187, 188, 189, 190, 191, 192, 193, 194, 195, 196, 197, 198, 199, 200, 201, 202, 203, 204, 205, 206, 207, 208, 209, 210, 211, 212, 213, 214, 215, 216, 217, 218, 219, 220, 221, 222, 223, 224, 225, 226, 227, 228, 229, 230, 231, 232, 233, 234, 235, 236, 237, 238, 239, 240, 241, 242, 243, 244, 245, 246, 247, 248, 249, 250, 251, 252, 253, 254, 255, 256, 257, 258, 259, 260, 261, 262, 263, 264, 265, 266, 267, 268, 269, 270, 271, 272, 273, 274, 275, 276, 277, 278, 279, 280, 281, 282, 283, 284, 285, 286, 287, 288, 289, 290, 291, 292, 293, 294, 295, 296, 297, 298, 299, 300, 301, 302, 303, 304, 305, 306, 307, 308, 309, 310, 311, 312, 313, 314, 315, 316, 317, 318, 319, 320, 321, 322, 323, 324, 325, 326, 327, 328, 329, 330, 331, 332, 333, 334, 335, 336, 337, 338, 339, 340, 341, 342, 343, 344, 345, 346, 347, 348, 349, 350, 351, 352, 353. 354, 355, 356, 357, 358, 359, 360. 361, 362, 363, 364, 365, 366, 367, 368, 369, 370, 371, 372, 373, 374, 375, 376, 377, 378, 379. 380, 381, 382, 383, 384, 385, 386, 387, 388, 389, 390, 391, 392, 393, 394, 395, 396, 397, 398, 399, 400, 401, 402, 403, 404, 405, 406, 407, 408, 409, 410, 411, 412, 413, 414, 415, 416, 417, 418, 419, 420, 421, 422, 423, 424, 425, 426, 427, 428, 429, 430, 431, 432, 433, 434, 435, 436, 437, 438, 439, 440, 441, 442, 443, 444, 445, 446, 447, 448, 449, 450, 451, 452, 453, 454, 455, 456, 457, 458, 459, 460, 461, 462, 463, 464, 465, 466, 467, 468, 469, 470, 471, 472, 473, 474, 475, 476, 477, 478, 479, 480, 481, 482, 483, 484, 485, 486, 487, 488, 489, 490, 491, 492, 493, 494, 495, 496, 497, 498, 499, and 500 nucleotides in length,

[0226] In some embodiments, the polyadenylation sequence is 50-100 nucleotides in length.

[0227] In some embodiments, the polyadenylation sequence is 50-150 nucleotides in length.

[0228] In some embodiments, the polyadenylation sequence is 50-160 nucleotides in length.

[0229] In some embodiments, the polyadenylation sequence is 50-200 nucleotides in length.

[0230] In some embodiments, the polyadenylation sequence is 60-100 nucleotides in length.

[0231] in some embodiments, the polyadenylation sequence is 60-150 nucleotides in length.

[0232] In some embodiments, the polyadenylation sequence is 60-160 nucleotides in length.

[0233] In some embodiments, the polyadenylation sequence is 60-200 nucleotides in length.

[0234] In some embodiments, the polyadenylation sequence is 70-100 nucleotides in length.

[0235] In some embodiments, the polyadenylation sequence is 70-150 nucleotides in length.

[0236] In some embodiments, the polyadenylation sequence is 70-160 nucleotides in length.

[0237] In some embodiments, the polyadenylation sequence is 70-200 nucleotides in length.

[0238] In some embodiments, the polyadenylation sequence is 80-100 nucleotides in length.

[0239] In some embodiments, the polyadenylation sequence is 80-150 nucleotides in length.

[0240] In some embodiments, the polyadenylation sequence is 80-160 nucleotides in length.

[0241] In some embodiments, the polyadenylation sequence is 80-200 nucleotides in length.

[0242] In some embodiments, the polyadenylation sequence is 90-100 nucleotides in length.

[0243] In some embodiments, the polyadenylation sequence is 90-150 nucleotides in length.

[0244] In some embodiments, the polyadenylation sequence is 90-160 nucleotides in length.

[0245] In some embodiments, the polyadenylation sequence is 90-200 nucleotides in length.

[0246] In some embodiments, the AAV particle comprises a nucleic acid sequence encoding an siRNA molecule may be located upstream of the polyadenylation sequence in an expression vector. Further, the AAV particle comprises a nucleic acid sequence encoding an siRNA molecule may be located downstream of a promoter such as, but not limited to, CMV, U6, CAG, CBA or a CBA promoter with a SV40 intron or a human beta-globin intron in an expression vector. As a non-limiting example, the AAV particle comprises a nucleic acid sequence encoding an siRNA molecule may be located within 1, 2, 3. 4, 5, 6, 7, 8, 9, 10, 11, 12, 13, 14, 15, 16, 17, 18, 19, 20, 21, 22, 23, 24, 25, 26, 27, 28, 29, 30 or more than 30 nucleotides downstream from the promoter and/or upstream of the polyadenylation sequence in an expression vector. As another non-limiting example, the AAV particle comprises a nucleic acid sequence encoding an siRNA molecule may be located within 1-5, 1-10, 1-15, 1-20, 1-25, 1-30, 5-10, 5-15, 5-20, 5-25, 5-30, 10-15, 10-20, 10-25, 10-30, 15-20, 15-25, 15-30, 20-25, 20-30 or 25-30 nucleotides downstream from the promoter and/or upstream of the polyadenylation sequence in an expression vector. As a non-limiting example, the AAV particle comprises a nucleic acid sequence encoding an siRNA molecule may be located within the first 1%, 2%, 3%, 4%, 5%, 6%, 7%, 8%, 9%, 10%, 15%, 20%, 25% or more than 25% of the nucleotides downstream from the promoter and/or upstream of the polyadenylation sequence in an expression vector, As another non-limiting example, the AAV particle comprises a nucleic acid sequence encoding an siRNA molecule may be located with the first 1-5%, 1-10%, 1-15%, 1-20%, 1-25%, 5-10%, 5-15%, 5-20%, 5-25%, 10-15%, 10-20%, 10-25%, 15-20%, 15-25%, or 20-25% downstream from the promoter and/or upstream of the polyadenylation sequence in an expression vector.

[0247] In some embodiments, the AAV particle comprises a rabbit globin polyadenylation (polyA) signal sequence.

[0248] In some embodiments, the AAV particle comprises a human growth hormone polyadenylation (polyA) signal sequence.

### Viral Genome Component: Introns

[0249] In some embodiments, the payload region comprises at least one element to enhance the expression such as one or more introns or portions thereof. Non-limiting examples of introns include, MVM (67-97 bps), F.IX truncated intron 1 (300 bps), β-globin SD/immunoglobulin heavy chain splice acceptor (250 bps), adenovirus splice donor/immunoglobin splice acceptor (500 bps), SV40 late splice donor/splice acceptor (19S/16S) (180 bps) and hybrid adenovirus splice donor/IgG splice acceptor (230 bps).

[0250] In some embodiments, the intron or intron portion may be 100-500 nucleotides in length. The intron may have a length of 80. 90, 100, 110, 120, 130, 140, 150, 160, 170, 171, 172, 173, 174, 175, 176, 177, 178, 179, 180, 190, 200, 210, 220, 230, 240, 250, 260, 270, 280, 290, 300, 310, 320. 330, 340, 350, 360, 370, 380, 390. 400, 410, 420, 430, 440, 450, 460. 470, 480, 490 or 500. The intron may have a length between 80-100, 80-120, 80-140, 80-160, 80-180, 80-200, 80-250, 80-300, 80-350, 80-400, 80-450, 80-500, 200-300, 200-400, 200-500, 300-400, 300-500, or 400-500.

[0251] In some embodiments, the AAV viral genome may comprise a promoter such as, but not limited to, CMV or U6. As a non-limiting example, the promoter for the AAV comprising the nucleic acid sequence for the siRNA molecules of the present disclosure is a CMV promoter. As another non-limiting example, the promoter for the AAV comprising the nucleic acid sequence for the siRNA molecules of the disclosure is a U6 promoter.

[0252] In some embodiments, the AAV viral genome may comprise a CMV promoter.

[0253] In some embodiments, the AAV viral genome may comprise a U6 promoter.

[0254] In some embodiments, the AAV viral genome may comprise a CMV and a U6 promoter.

[0255] In some embodiments, the AAV viral genome may comprise a H1 promoter.

[0256] In some embodiments, the AAV viral genome may comprise a CBA promoter.

[0257] In some embodiments, the encoded siRNA molecule may be located downstream of a promoter in an expression vector such as, but not limited to, CMV, U6. H1, CBA, CAG, or a CBA promoter with an intron such as SV40 or others known in the art. Further, the encoded siRNA molecule may also be located upstream of the polyadenylation sequence in an expression vector. As a non-limiting example, the encoded siRNA molecule may be located within 1, 2, 3, 4, 5, 6, 7. 8, 9, 10, 11, 12, 13, 14, 15, 16, 17, 18, 19, 20, 21, 22, 23, 24, 25, 26, 27, 28, 29, 30 or more than 30 nucleotides downstream from the promoter and/or upstream of the polyadenylation sequence in an expression vector. As another non-limiting example, the encoded siRNA molecule may be located within 1-5, 1-10. 1-15, 1-20, 1-25, 1-30, 5-10, 5-15, 5-20, 5-25, 5-30, 10-15, 10-20, 10-25, 10-30, 15-20, 15-25, 15-30.20-25, 20-30 or 25-30 nucleotides downstream from the promoter and/or upstream of the polyadenylation sequence in an expression vector. As a non-limiting example, the encoded siRNA molecule may be located within the first 1%, 2%, 3%, 1%, 5%, 6%, 7%, 8%, 9%, 10%, 15%, 20%, 25% or more than 25% of the nucleotides downstream from the promoter and/or upstream of the polyadenylation sequence in an expression vector. As another non-limiting example, the encoded siRNA molecule may be located with the first 1-5%, 1-10%, 1-15%, 1-20%, 1-25%, 5-10%, 5-15%, 5-20%, 5-25%), 10-15%, 10-20%, 10-25%, 15-20%, 15-25%, or 20-25€N, downstream from the promoter and/or upstream of the polyadenylation sequence in an expression vector.

[0258] Viral Genome Component: Filler Sequence

[0259] In some embodiments, the viral genome comprises one or more filler sequences.

[0260] In some embodiments, the viral genome comprises one or more filler sequences in order to have the length of the viral genome be the optimal size for packaging. As a non-limiting example, the viral genome comprises at least one filler sequence in order to have the length of the viral genome be about 2.3 kb. As a non-limiting example, the viral genome comprises at least one filler sequence in order to have the length of the viral genome be about 4.6 kb.

[0261] In some embodiments, the viral genome comprises one or more filler sequences in order to reduce the likelihood that a hairpin structure of the vector genome (e.g., a modulatory polynucleotide described herein) may be read as an inverted terminal repeat (ITR) during expression and/or packaging. As a non-limiting example, the viral genome comprises at least one filler sequence in order to have the length of the viral genome be about 2.3 kb. As a non-limiting example, the viral genome comprises at least one filler sequence in order to have the length of the viral genome be about 4.6 kb.

[0262] In some embodiments, the viral genome is a single stranded (ss) viral genome and comprises one or more filler sequences which have a length about between 0.1 kb, 3.8 kb, such as, but not limited to, 0.1 kb, 0.2 kb, 0.3 kb, 0.4 kb, 0.5 kb, 0.6 kb, 0.7 kb, 0.8 kb, 0.9 kb, 1 kb, 1.1 kb, 1.2 kb, 1.3 kb, 1.4 kb, 1.5 kb, 1.6 kb, 1.7 kb, 1.8 kb, 1.9 kb, 2 kb, 2.1 kb, 2.2 kb, 2.3 kb, 2.4 kb, 2.5 kb, 2.6 kb, 2.7 kb, 2.8 kb, 2.9 kb, 3 kb, 3.1 kb, 3.2 kb, 3.3 kb, 3.4 kb, 3.5 kb, 3.6 kb, 3.7 kb, or 3.8 kb, As a non-limiting example, the total length filler sequence in the vector genome is 3.1 kb. As a non-limiting example, the total length filler sequence in the vector genome is 2.7 kb. As a non-limiting example, the total length filler sequence in the vector genome is 0.8 kb. As a non-limiting example, the total length filler sequence in the vector genome is 0.4 kb. As a non-limiting example, the length of each filler sequence in the vector genome is 0.8 kb, As a non-limiting example, the length of each filler sequence in the vector genome is 0.4 kb.

[0263] In some embodiments, the viral genome is a self-complementary (sc) viral genome and comprises one or more filler sequences which have a length about between 0.1 kb, 1.5 kb, such as, but not limited to, 0.1 kb, 0.2 kb, 0.3 kb, 0.4 kb, 0.5 kb, 0.6 kb, 0.7 kb, 0.8 kb, 0.9 kb, I kb, 1.1 kb, 1.2 kb, 1.3 kb, 1.4 kb, or 1.5 kb. As a non-limiting example, the total length filler sequence in the vector genome is 0.8 kb. As a non-limiting example, the total length filler sequence in the vector genome is 0.4 kb. As a non-limiting example, the length of each filler sequence in the vector genome is 0.8 kb. As a non-limiting example, the length of each filler sequence in the vector genome is 0.4 kb.

[0264] In some embodiments, the viral genome comprises any portion of a filler sequence. The viral genome may comprise 1%, 2%, 3%, 4%, 5%, 6%, 7%, 8%, 9%, 10%, 15%, 20%, 25%, 30%, 35%, 40%, 45%, 50%, 55%, 60%, 65%, 70%, 75%, 80%, 85%, 90%, 95%, or 99% of a filler sequence.

[0265] In some embodiments, the viral genome is a single stranded (ss) viral genome and comprises one or more filler sequences in order to have the length of the viral genome be about 4.6 kb. As a non-limiting example, the viral genome comprises at least one filler sequence and the filler sequence is located 3′ to the 5′ ITR sequence. As a non-limiting example, the viral genome comprises at least one filler sequence and the filler sequence is located 5′ to a promoter sequence. As a non-limiting example, the viral genome comprises at least one filler sequence and the filler sequence is located 3′ to the polyadenylation signal sequence. As a non-limiting example, the viral genome comprises at least one filler sequence and the filler sequence is located 5′ to the 3′ ITR sequence. As a non-limiting example, the viral genome comprises at least one filler sequence, and the filler sequence is located between two intron sequences. As a non-limiting example, the viral genome comprises at least one filler sequence, and the filler sequence is located within an intron sequence. As a non-limiting example, the viral genome comprises two filler sequences, and the first filler sequence is located 3′ to the 5′ ITR sequence and the second filler sequence is located 3′ to the polyadenylation signal sequence. As a non-limiting example, the viral genome comprises two filler sequences, and the first filler sequence is located 5′ to a promoter sequence and the second filler sequence is located 3′ to the polyadenylation signal sequence. As a non-limiting example, the viral genome comprises two filler sequences, and the first filler sequence is located 3′ to the 5′ ITR sequence and the second filler sequence is located 5′ to the 5′ ITR sequence.

[0266] In some embodiments, the viral genome is a self-complementary (sc) viral genome and comprises one or more filler sequences in order to have the length of the viral genome be about 2.3 kb. As a non-limiting example, the viral genome comprises at least one filler sequence and the filler sequence is located 3′ to the 5′ ITR sequence. As a non-limiting example, the viral genome comprises at least one filler sequence and the filler sequence is located 5′ to a promoter sequence. As a non-limiting example, the viral genome comprises at least one filler sequence and the filler sequence is located 3′ to the polyadenylation signal sequence. As a non-limiting example, the viral genome comprises at least one filler sequence and the filler sequence is located 5′ to the 3′ ITR sequence. As a non-limiting example, the viral genome comprises at least one filler sequence, and the filler sequence is located between two intron sequences. As a non-limiting example, the viral genome comprises at least one filler sequence, and the filler sequence is located within an intron sequence. As a non-limiting example, the viral genome comprises two filler sequences, and the first filler sequence is located 3′ to the 5′ ITR sequence and the second filler sequence is located 3′ to the polyadenylation signal sequence. As a non-limiting example, the viral genome comprises two filler sequences, and the first filler sequence is located 5′ to a promoter sequence and the second filler sequence is located 3′ to the polyadenylation signal sequence. As a non-limiting example, the viral genome comprises two filler sequences, and the first filler sequence is located 3′ to the 5′ ITR sequence and the second filler sequence is located 5′ to the 5′ ITR sequence.

[0267] In some embodiments, the viral genome may comprise one or more filler sequences between one of more regions of the viral genome. In some embodiments, the filler region may be located before a region such as, but not limited to, a payload region, an inverted terminal repeat (ITR), a promoter region, an intron region, an enhancer region, a polyadenylation signal sequence region, a multiple cloning site (MCS) region, and/or an exon region. In some embodiments, the filler region may be located after a region such as, but not limited to, a payload region, an inverted terminal repeat (ITR), a promoter region, an intron region, an enhancer region, a polyadenylation signal sequence region, a multiple cloning site (MCS) region, and/or an exon region. In some embodiments, the filler region may be located before and after a region such as, but not limited to, a payload region, an inverted terminal repeat (ITR), a promoter region, an intron region, an enhancer region, a polyadenylation signal sequence region, a multiple cloning site (MCS) region, and/or an exon region.

[0268] In some embodiments, the viral genome may comprise one or more filler sequences which bifurcates at least one region of the viral genome. The bifurcated region of the viral genome may comprise 1%, 2%, 3%, 4%, 5%, 6%, 7%, 8%, 9%, 10%, 15%, 20%, 25%, 30%, 35%, 40%, 45%, 50%, 55%, 60%, 65%, 70%, 75%, 80%, 85%, 90%, 95%, or 99% of the of the region to the 5′ of the filler sequence region. As a non-limiting example, the filler sequence may bifurcate at least one region so that 10% of the region is located 5′ to the filler sequence and 90% of the region is located 3′ to the filler sequence. As a non-limiting example, the filler sequence may bifurcate at least one region so that 20% of the region is located 5′ to the filler sequence and 80% of the region is located 3′ to the filler sequence. As a non-limiting example, the filler sequence may bifurcate at least one region so that 30% of the region is located 5′ to the filler sequence and 70% of the region is located 3′ to the filler sequence. As a non-limiting example, the filler sequence may bifurcate at least one region so that 40% of the region is located 5′ to the filler sequence and 60% of the region is located 3′ to the filler sequence. As a non-limiting example, the filler sequence may bifurcate at least one region so that 50% of the region is located 5′ to the filler sequence and 50% of the region is located 3′ to the filler sequence. As a non-limiting example, the filler sequence may bifurcate at least one region so that 60% of the region is located 5′ to the filler sequence and 40% of the region is located 3′ to the filler sequence. As a non-limiting example, the filler sequence may bifurcate at least one region so that 70% of the region is located 5′ to the filler sequence and 30% of the region is located 3′ to the filler sequence. As a non-limiting example, the filler sequence may bifurcate at least one region so that 80% of the region is located 5′ to the filler sequence and 20% of the region is located 3′ to the filler sequence. As a non-limiting example, the filler sequence may bifurcate at least one region so that 90% of the region is located 5′ to the filler sequence and 10% of the region is located 3′ to the filler sequence.

[0269] In some embodiments, the viral genome comprises a filler sequence after the 5′ ITR.

[0270] In some embodiments, the viral genome comprises a filler sequence after the promoter region. In some embodiments, the viral genome comprises a filler sequence after the payload region. In some embodiments, the viral genome comprises a filler sequence after the intron region. In some embodiments, the viral genome comprises a filler sequence after the enhancer region. In some embodiments, the viral genome comprises a filler sequence after the polyadenylation signal sequence region. In some embodiments, the viral genome comprises a filler sequence after the MCS region. In some embodiments, the viral genome comprises a filler sequence after the exon region.

[0271] In some embodiments, the viral genome comprises a filler sequence before the promoter region. In some embodiments, the viral genome comprises a filler sequence before the payload region. In some embodiments, the viral genome comprises a filler sequence before the intron region. In some embodiments, the viral genome comprises a filler sequence before the enhancer region. in some embodiments, the viral genome comprises a filler sequence before the polyadenylation signal sequence region. In some embodiments, the viral genome comprises a filler sequence before the MCS region. In some embodiments, the viral genome comprises a filler sequence before the exon region.

[0272] In some embodiments, the viral genome comprises a filler sequence before the 3′ ITR.

[0273] In some embodiments, a filler sequence may be located between two regions, such as, but not limited to, the 5′ ITR and the promoter region. In some embodiments, a filler sequence may be located between two regions, such as, but not limited to, the 5′ ITR and the payload region. In some embodiments, a filler sequence may be located between two regions, such as, but not limited to, the 5′ FM and the intron region. In some embodiments, a filler sequence may be located between two regions, such as, but not limited to, the 5′ ITR and the enhancer region. In some embodiments, a filler sequence may be located between two regions, such as, but not limited to, the 5′ ITR and the polyadenylation signal sequence region. In some embodiments, a filler sequence may be located between two regions, such as, but not limited to, the 5′ ITR and the MCS region.

[0274] In some embodiments, a filler sequence may be located between two regions, such as, but not limited to, the 5′ ITR and the exon region.

[0275] In some embodiments, a filler sequence may be located between two regions, such as, but not limited to, the promoter region and the payload region. In some embodiments, a filler sequence may be located between two regions, such as, but not limited to, the promoter region and the intron region. in some embodiments, a filler sequence may be located between two regions, such as, but not limited to, the promoter region and the enhancer region. In some embodiments, a filler sequence may be located between two regions, such as, but not limited to, the promoter region and the polyadenylation signal sequence region. In some embodiments, a filler sequence may be located between two regions, such as, but not limited to, the promoter region and the MCS region. In some embodiments, a filler sequence may be located between two regions, such as, but not limited to, the promoter region and the exon region. In some embodiments, a filler sequence may be located between two regions, such as, but not limited to, the promoter region and the 3′ ITR.

[0276] In some embodiments, a filler sequence may be located between two regions, such as, but not limited to, the payload region and the intron region. in some embodiments, a filler sequence may be located between two regions, such as, but not limited to, the payload region and the enhancer region. In some embodiments, a filler sequence may be located between two regions, such as, but not limited to, the payload region and the polyadenylation signal sequence region. in some embodiments, a filler sequence may be located between two regions, such as, but not limited to, the payload region and the MCS region. In some embodiments, a filler sequence may be located between two regions, such as, but not limited to, the payload region and the exon region.

[0277] In some embodiments, a filler sequence may be located between two regions, such as, but not limited to, the payload region and the 3′ ITR.

[0278] In some embodiments, a filler sequence may be located between two regions, such as, but not limited to, the intron region and the enhancer region. In some embodiments, a filler sequence may be located between two regions, such as, but not limited to, the intron region and the polyadenylation signal sequence region. In some embodiments, a filler sequence may he located between two regions, such as, but not limited to, the intron region and the MCS region. In some embodiments, a filler sequence may be located between two regions, such as, but not limited to, the intron region and the exon region. In some embodiments, a filler sequence may be located between two regions, such as, but not limited to, the intron region and the 3′ ITR. In some embodiments, a filler sequence may be located between two regions, such as, but not limited to, the enhancer region and the polyadenylation signal sequence region. In some embodiments, a filler sequence may be located between two regions, such as, but not limited to, the enhancer region and the MCS region. In some embodiments, a filler sequence may be located between two regions, such as, but not limited to, the enhancer region and the exon region. In some embodiments, a filler sequence may be located between two regions, such as, but not limited to, the enhancer region and the 3′ ITR.

[0279] In some embodiments, a filler sequence may be located between two regions, such as, but not limited to, the polyadenylation signal sequence region and the MCS region. In some embodiments, a filler sequence may be located between two regions, such as, but not limited to, the polyadenylation signal sequence region and the exon region. In some embodiments, a filler sequence may be located between two regions, such as, but not limited to, the polyadenylation signal sequence region and the 3′ ITR.

[0280] In some embodiments, a filler sequence may be located between two regions, such as, but not limited to, the MCS region and the exon region. In some embodiments, a filler sequence may be located between two regions, such as, but not limited to, the MCS region and the 3′ ITR,

[0281] In some embodiments, a filler sequence may be located between two regions, such as, but not limited to, the exon region and the 3′ ITR.

[0282] In some embodiments, a viral genome may comprise two filler sequences, the first filler sequence may be located between the 5′ ITR and promoter region, and the second filler sequence may be located between the promoter region and payload region. In some embodiments, a viral genome may comprise two filler sequences, the first filler sequence may be located between the 5′ ITR and promoter region, and the second filler sequence may be located between the promoter region and intron region. In some embodiments, a viral genome may comprise two filler sequences, the first filler sequence may be located between the 5′ ITR and promoter region, and the second filler sequence may be located between the promoter region and enhancer region. In some embodiments, a viral genome may comprise two filler sequences, the first filler sequence may be located between the 5′ ITR and promoter region, and the second filler sequence may be located between the promoter region and polyadenylation signal sequence region. In some embodiments, a viral genome may comprise two filler sequences, the first filler sequence may be located between the 5′ ITR and promoter region, and the second filler sequence may be located between the promoter region and MCS region, In some embodiments, a viral genome may comprise two filler sequences, the first filler sequence may be located between the 5′ ITR and promoter region, and the second filler sequence may be located between the promoter region and exon region. In some embodiments, a viral genome may comprise two filler sequences, the first filler sequence may be located between the 5′ ITR and promoter region, and the second filler sequence may be located between the promoter region and 3′ ITR. In some embodiments, a viral genome may comprise two filler sequences, the first filler sequence may be located between the 5′ ITR and promoter region, and the second filler sequence may be located between the payload region and intron region. In some embodiments, a viral genome may comprise two filler sequences, the first filler sequence may be located between the 5′ ITR and promoter region, and the second filler sequence may be located between the payload region and enhancer region. In some embodiments, a viral genome may comprise two filler sequences, the first filler sequence may be located between the 5′ ITR and promoter region, and the second filler sequence may be located between the payload region and polyadenylation signal sequence region. In some embodiments, a viral genome may comprise two filler sequences, the first filler sequence may be located between the 5′ ITR and promoter region, and the second filler sequence may be located between the payload region and MCS region. In some embodiments, a viral genome may comprise two filler sequences, the first filler sequence may be located between the 5′ ITR and promoter region, and the second filler sequence may be located between the payload. region and exon region. In some embodiments, a viral genome may comprise two filler sequences, the first filler sequence may be located between the 5′ ITR and promoter region, and the second filler sequence may be located between the payload region and 3′ ITR. In some embodiments, a viral genome may comprise two filler sequences, the first filler sequence may be located between the 5′ ITR and promoter region, and the second filler sequence may be located between the intron region and enhancer region. In some embodiments, a viral genome may comprise two filler sequences, the first filler sequence may be located between the 5′ ITR and promoter region, and the second filler sequence may be located between the intron region and polyadenylation signal sequence region. In some embodiments, a viral genome may comprise two filler sequences, the first filler sequence may be located between the 5′ ITR and promoter region, and the second filler sequence may be located between the intron region and MCS region. In some embodiments, a viral genome may comprise two filler sequences, the first filler sequence may be located between the 5′ ITR and promoter region, and the second filler sequence may be located between the intron region and exon region. In some embodiments, a viral genome may comprise two filler sequences, the first filler sequence may be located between the 5′ ITR and promoter region, and the second filler sequence may be located between the intron region and 3′ ITR, In some embodiments, a viral genome may comprise two filler sequences, the first filler sequence may be located between the 5′ ITR and promoter region, and the second filler sequence may be located between the enhancer region and polyadenylation signal sequence region. In some embodiments, a viral genome may comprise two filler sequences, the first filler sequence may be located between the 5′ ITR. and promoter region, and the second filler sequence may be located between the enhancer region and MCS region. In some embodiments, a viral genome may comprise two filler sequences, the first filler sequence may be located between the 5′ ITR and promoter region, and the second filler sequence may be located between the enhancer region and exon region. In some embodiments, a viral genome may comprise two filler sequences, the first filler sequence may be located between the 5′ ITR and promoter region, and the second filler sequence may be located between the enhancer region and 3′ ITR. In some embodiments, a viral genome may comprise two filler sequences, the first filler sequence may be located between the 5′ ITR and promoter region, and the second filler sequence may be located between the polyadenylation signal sequence region and MCS region. In some embodiments, a viral genome may comprise two filler sequences, the first filler sequence may be located between the 5′ ITR and promoter region, and the second filler sequence may be located between the polyadenylation signal sequence region and exon region. In some embodiments, a viral genome may comprise two filler sequences, the first filler sequence may be located between the 5′ ITR and promoter region, and the second filler sequence may be located between the polyadenylation signal sequence region and 3′ ITR. In some embodiments, a viral genome may comprise two filler sequences, the first filler sequence may be located between the 5′ ITR and promoter region, and the second filler sequence may be located between the MCS region and exon region. In some embodiments, a viral genome may comprise two filler sequences, the first filler sequence may be located between the 5′ ITR and promoter region, and the second filler sequence may be located between the MCS region and 3′ ITR. In some embodiments, a viral genome may comprise two filler sequences, the first filler sequence may be located between the 5′ ITR and promoter region, and the second filler sequence may be located between the exon region and 3′ ITR.

[0283] In some embodiments, a viral genome may comprise two filler sequences, the first filler sequence may be located between the 5′ ITR and payload region, and the second filler sequence may be located between the promoter region and payload region. In some embodiments, a viral genome may comprise two filler sequences, the first filler sequence may be located between the 5′ ITR and payload region, and the second filler sequence may be located between the promoter region and intron region. In some embodiments, a viral genome may comprise two filler sequences, the first filler sequence may be located between the 5′ ITR and payload region, and the second filler sequence may be located between the promoter region and enhancer region. In some embodiments, a viral genome may comprise two filler sequences, the first filler sequence may be located between the 5′ ITR and payload region, and the second filler sequence may be located between the promoter region and polyadenylation signal sequence region. In some embodiments, a viral genome may comprise two filler sequences, the first filler sequence may be located between the 5′ ITR and payload region, and the second filler sequence may be located between the promoter region and MCS region, In some embodiments, a viral genome may comprise two filler sequences, the first filler sequence may be located between the 5′ ITR and payload region, and the second filler sequence may be located between the promoter region and exon region. In some embodiments, a viral genome may comprise two filler sequences, the first filler sequence may be located between the 5′ ITR and payload region, and the second filler sequence may be located between the promoter region and 3′ ITR. In some embodiments, a viral genome may comprise two filler sequences, the first filler sequence may be located between the 5′ ITR and payload region, and the second filler sequence may be located between the payload region and intron region. In some embodiments, a viral genome may comprise two filler sequences, the first filler sequence may be located between the 5′ ITR and payload region, and the second filler sequence may be located between the payload region and enhancer region. In some embodiments, a viral genome may comprise two filler sequences, the first filler sequence may be located between the 5′ ITR and payload region, and the second filler sequence may be located between the payload region and polyadenylation signal sequence region. In some embodiments, a viral genome may comprise two filler sequences, the first filler sequence may be located between the 5′ ITR and payload region, and the second filler sequence may be located between the payload region and MCS region. In some embodiments, a viral genome may comprise two filler sequences, the first filler sequence may be located between the 5′ ITR and payload region, and the second filler sequence may be located between the payload region and exon region. In some embodiments, a viral genome may comprise two filler sequences, the first filler sequence may be located between the 5′ ITR and payload region, and the second filler sequence may be located between the payload region and 3′ ITR. In some embodiments, a viral genome may comprise two filler sequences, the first filler sequence may be located between the 5′ ITR and payload region, and the second filler sequence may be located between the intron region and enhancer region. In some embodiments, a viral genome may comprise two filler sequences, the first filler sequence may be located between the 5′ ITR and payload region, and the second filler sequence may be located between the intron region and polyadenylation signal sequence region. In some embodiments, a viral genome may comprise two filler sequences, the first filler sequence may be located between the 5′ ITR and payload region, and the second filler sequence may be located between the intron region and MCS region, In some embodiments, a viral genome may comprise two filler sequences, the first filler sequence may be located between the 5′ ITR and payload region, and the second filler sequence may be located between the intron region and exon region. In some embodiments, a viral genome may comprise two filler sequences, the first filler sequence may be located between the 5′ ITR and payload region, and the second filler sequence may be located between the intron region and 3′ ITR. In some embodiments, a viral genome may comprise two filler sequences, the first filler sequence may be located between the 5′ ITR and payload region, and the second filler sequence may be located between the enhancer region and polyadenylation signal sequence region. In some embodiments, a viral genome may comprise two filler sequences, the first filler sequence may be located between the 5′ ITR and payload region, and the second filler sequence may be located between the enhancer region and MCS region. In some embodiments, a viral genome may comprise two filler sequences, the first filler sequence may be located between the 5′ ITR and payload region, and the second filler sequence may be located between the enhancer region and exon region. In some embodiments, a viral genome may comprise two filler sequences, the first filler sequence may be located between the 5′ ITR and payload region, and the second filler sequence may be located between the enhancer region and 3′ ITR. In some embodiments, a viral genome may comprise two filler sequences, the first filler sequence may be located between the 5′ ITR and payload region, and the second filler sequence may be located between the polyadenylation signal sequence region and MCS region. In some embodiments, a viral genome may comprise two filler sequences, the first filler sequence may be located between the 5′ ITR and payload region, and the second filler sequence may be located between the polyadenylation signal sequence region and exon region. In some embodiments, a viral genome may comprise two filler sequences, the first filler sequence may be located between the 5′ ITR and payload region, and the second tiller sequence may be located between the polyadenylation signal sequence region and 3′ ITR. In some embodiments, a viral genome may comprise two filler sequences, the first filler sequence may be located between the 5′ ITR and payload region, and the second filler sequence may be located between the MCS region and exon region. In some embodiments, a viral genome may comprise two filler sequences, the first filler sequence may be located between the 5′ ITR and payload region, and the second filler sequence may he located between the MCS region and 3′ ITR. In some embodiments, a viral genome may comprise two filler sequences, the first filler sequence may be located between the 5′ ITR and payload region, and the second filler sequence may be located between the exon region and 3′ ITR.

[0284] In some embodiments, a viral genome may comprise two filler sequences, the first filler sequence may be located between the 5′ ITR and intron region, and the second filler sequence may be located between the promoter region and payload region. In some embodiments, a viral genome may comprise two filler sequences, the first filler sequence may be located between the 5′ ITR and intron region, and the second filler sequence may be located between the promoter region and intron region. In some embodiments, a viral genome may comprise two filler sequences, the first filler sequence may be located between the 5′ ITR and intron region, and the second filler sequence may be located between the promoter region and enhancer region, In some embodiments, a viral genome may comprise two filler sequences, the first filler sequence may be located between the 5′ ITR and intron region, and the second filler sequence may be located between the promoter region and polyadenylation signal sequence region. In some embodiments, a viral genome may comprise two filler sequences, the first filler sequence may be located between the 5′ ITR and intron region, and the second filler sequence may be located between the promoter region and MCS region. In some embodiments, a viral genome may comprise two filler sequences, the first filler sequence may be located between the 5′ ITR and intron region, and the second filler sequence may be located between the promoter region and exon region. In some embodiments, a viral genome may comprise two filler sequences, the first filler sequence may be located between the 5′ ITR and intron region, and the second filler sequence may be located between the promoter region and 3′ ITR. In some embodiments, a viral genome may comprise two filler sequences, the first filler sequence may be located between the 5′ ITR and intron region, and the second filler sequence may be located between the payload region and intron region. In some embodiments, a viral genome may comprise two filler sequences, the first filler sequence may be located between the 5′ ITR and intron region, and the second filler sequence may be located between the payload region and enhancer region. In some embodiments, a viral genome may comprise two filler sequences, the first filler sequence may be located between the 5′ ITR and intron region, and the second filler sequence may be located between the payload region and polyadenylation signal sequence region. In some embodiments, a viral genome may comprise two filler sequences, the first filler sequence may be located between the 5′ ITR and intron region, and the second filler sequence may be located between the payload region and MCS region. In some embodiments, a viral genome may comprise two filler sequences, the first filler sequence may be located between the 5′ ITR and intron region, and the second filler sequence may be located between the payload region and exon region. In some embodiments, a viral genome may comprise two filler sequences, the first filler sequence may be located between the 5′ ITR and intron region, and the second filler sequence may be located between the payload region and 3′ ITR. In some embodiments, a viral genome may comprise two filler sequences, the first filler sequence may be located between the 5′ ITR and intron region, and the second filler sequence may be located between the intron region and enhancer region. In some embodiments, a viral genome may comprise two filler sequences, the first filler sequence may be located between the 5′ ITR and intron region, and the second filler sequence may be located between the intron region and polyadenylation signal sequence region. In some embodiments, a viral genome may comprise two filler sequences, the first filler sequence may be located between the 5′ ITR and intron region, and the second filler sequence may be located between the intron region and MCS region. In some embodiments, a viral genome may comprise two filler sequences, the first filler sequence may be located between the 5′ ITR and intron region, and the second filler sequence may be located between the intron region and exon region. In some embodiments, a viral genome may comprise two filler sequences, the first filler sequence may be located between the 5′ ITR and intron region, and the second filler sequence may be located between the intron region and 3′ ITR. In some embodiments, a viral genome may comprise two filler sequences, the first filler sequence may be located between the 5′ ITR and intron region, and the second filler sequence may be located between the enhancer region and polyadenylation signal sequence region. In some embodiments, a viral genome may comprise two filler sequences, the first filler sequence may be located between the 5′ ITR and intron region, and the second filler sequence may be located between the enhancer region and MCS region. In some embodiments, a viral genome may comprise two filler sequences, the first filler sequence may be located between the 5′ ITR and intron region, and the second filler sequence may be located between the enhancer region and exon region. In some embodiments, a viral genome may comprise two filler sequences, the first filler sequence may be located between the 5′ ITR and intron region, and the second filler sequence may be located between the enhancer region and 3′ ITR. In some embodiments, a viral genome may comprise two filler sequences, the first filler sequence may he located between the 5′ ITR and intron region, and the second filler sequence may be located between the polyadenylation signal sequence region and MCS region. In some embodiments, a viral genome may comprise two filler sequences, the first filler sequence may be located between the 5′ ITR and intron region, and the second filler sequence may be located between the polyadenylation signal sequence region and exon region. In some embodiments, a viral genome may comprise two filler sequences, the first filler sequence may be located between the 5′ ITR and intron region, and the second filler sequence may be located between the polyadenylation signal sequence region and 3′ ITR. In some embodiments, a viral genome may comprise two filler sequences, the first filler sequence may be located between the 5′ ITR and intron region, and the second filler sequence may be located between the MCS region and exon region. In some embodiments, a viral genome may comprise two filler sequences, the first filler sequence may be located between the 5′ ITR and intron region, and the second filler sequence may be located between the MCS region and 3′ ITR. In some embodiments, a viral genome may comprise two filler sequences, the first filler sequence may be located between the 5′ ITR and intron region, and the second filler sequence may be located between the exon region and 3′ ITR.

[0285] In some embodiments, a viral genome may comprise two filler sequences, the first filler sequence may be located between the 5′ ITR and enhancer region, and the second filler sequence may be located between the promoter region and payload region. In some embodiments, a viral genome may comprise two filler sequences, the first filler sequence may be located between the 5′ ITR and enhancer region, and the second filler sequence may be located between the promoter region and intron region. In some embodiments, a viral genome may comprise two filler sequences, the first filler sequence may be located between the 5′ ITR and enhancer region, and the second filler sequence may be located between the promoter region and enhancer region. In some embodiments, a viral genome may comprise two filler sequences, the first filler sequence may be located between the 5′ ITR and enhancer region, and the second filler sequence may be located between the promoter region and polyadenylation signal sequence region. In some embodiments, a viral genome may comprise two filler sequences, the first filler sequence may be located between the 5′ ITR and enhancer region, and the second filler sequence may be located between the promoter region and MCS region. In some embodiments, a viral genome may comprise two filler sequences, the first filler sequence may be located between the 5′ ITR and enhancer region, and the second filler sequence may be located between the promoter region and exon region. In some embodiments, a viral genome may comprise two filler sequences, the first filler sequence may be located between the 5′ ITR and enhancer region, and the second filler sequence may be located between the promoter region and 3′ ITR. In some embodiments, a viral genome may comprise two filler sequences, the first filler sequence may be located between the 5′ ITR and enhancer region, and the second filler sequence may be located. between the payload region and intron region. In some embodiments, a viral genome may comprise two filler sequences, the first filler sequence may be located between the 5′ ITR and enhancer region, and the second filler sequence may be located between the payload region and enhancer region. In some embodiments, a viral genome may comprise two filler sequences, the first filler sequence may be located between the 5′ ITR and enhancer region, and the second filler sequence may be located between the payload region and polyadenylation signal sequence region, In some embodiments, a viral genome may comprise two filler sequences, the first filler sequence may be located between the 5′ ITR, and enhancer region, and the second filler sequence may be located between the payload region and MCS region. In some embodiments, a viral genome may comprise two filler sequences, the first filler sequence may be located between the 5′ ITR and enhancer region, and the second filler sequence may be located between the payload region and exon region. In some embodiments, a viral genome may comprise two filler sequences, the first filler sequence may be located between the 5′ ITR and enhancer region, and the second filler sequence may be located between the payload region and 3′ ITR. In some embodiments, a viral genome may comprise two filler sequences, the first filler sequence may be located between the 5′ ITR and enhancer region, and the second filler sequence may be located between the intron region and enhancer region. In some embodiments, a viral genome may comprise two filler sequences, the first filler sequence may be located between the 5′ ITR and enhancer region, and the second filler sequence may be located between the intron region and polyadenylation signal sequence region. In some embodiments, a viral genome may comprise two filler sequences, the first filler sequence may be located between the 5′ ITR and enhancer region, and the second filler sequence may be located between the intron region and MCS region. In some embodiments, a viral genome may comprise two filler sequences, the first filler sequence may be located between the 5′ ITR and enhancer region, and the second filler sequence may be located between the intron region and exon region. In some embodiments, a viral genome may comprise two filler sequences, the first filler sequence may be located between the 5′ ITR and enhancer region, and the second filler sequence may be located between the intron region and 3′ ITR. In some embodiments, a viral genome may comprise two filler sequences, the first filler sequence may be located between the 5′ ITR and enhancer region, and the second filler sequence may be located between the enhancer region and polyadenylation signal sequence region. In some embodiments, a viral genome may comprise two filler sequences, the first filler sequence may be located between the 5′ ITR and enhancer region, and the second filler sequence may be located between the enhancer region and MCS region. In some embodiments, a viral genome may comprise two filler sequences, the first filler sequence may be located between the 5′ ITR and enhancer region, and the second filler sequence may be located between the enhancer region and exon region. In some embodiments, a viral genome may comprise two filler sequences, the first filler sequence may be located between the 5′ ITR and enhancer region, and the second filler sequence may be located between the enhancer region and 3′ ITR. In some embodiments, a viral genome may comprise two filler sequences, the first filler sequence may be located between the 5′ ITR and enhancer region, and the second filler sequence may be located between the polyadenylation signal sequence region and MCS region. In some embodiments, a viral genome may comprise two filler sequences, the first filler sequence may be located between the 5′ ITR and enhancer region, and the second filler sequence may be located between the polyadenylation signal sequence region and exon region. In some embodiments, a viral genome may comprise two filler sequences, the first filler sequence may be located between the 5′ ITR and enhancer region, and the second filler sequence may be located between the polyadenylation signal sequence region and 3′ ITR. In some embodiments, a viral genome may comprise two filler sequences, the first filler sequence may be located between the 5′ ITR and enhancer region, and the second filler sequence may be located between the MCS region and exon region. In some embodiments, a viral genome may comprise two filler sequences, the first filler sequence may be located between the 5′ ITR and enhancer region, and the second filler sequence may be located between the MCS region and 3′ ITR. In some embodiments, a viral genome may comprise two filler sequences, the first filler sequence may be located between the 5′ ITR and enhancer region, and the second filler sequence may be located between the exon region and 3′ ITR.

[0286] In some embodiments, a viral genome may comprise two filler sequences, the first filler sequence may be located between the 5′ ITR and polyadenylation signal sequence region, and the second filler sequence may be located between the promoter region and payload region. In some embodiments, a viral genome may comprise two filler sequences, the first filler sequence may be located between the 5′ ITR and polyadenylation signal sequence region, and the second filler sequence may be located between the promoter region and intron region. In some embodiments, a viral genome may comprise two filler sequences, the first filler sequence may be located between the 5′ ITR and polyadenylation signal sequence region, and the second filler sequence may be located between the promoter region and enhancer region. In some embodiments, a viral genome may comprise two filler sequences, the first filler sequence may be located between the 5′ ITR and polyadenylation signal sequence region, and the second filler sequence may be located between the promoter region and polyadenylation signal sequence region. In some embodiments, a viral genome may comprise two filler sequences, the first filler sequence may be located between the 5′ ITR and polyadenylation signal sequence region, and the second filler sequence may be located between the promoter region and MCS region. In some embodiments, a viral genome may comprise two filler sequences, the first filler sequence may be located between the 5′ ITR and polyadenylation signal sequence region, and the second filler sequence may be located between the promoter region and exon region. In some embodiments, a viral genome may comprise two filler sequences, the first filler sequence may be located between the 5′ ITR and polyadenylation signal sequence region, and the second filler sequence may be located between the promoter region and 3′ ITR. In some embodiments, a viral genome may comprise two filler sequences, the first filler sequence may be located between the 5′ ITR and polyadenylation signal sequence region, and the second filler sequence may be located between the payload region and intron region. In some embodiments, a viral genome may comprise two filler sequences, the first filler sequence may be located between the 5′ ITR and polyadenylation signal sequence region, and the second filler sequence may be located between the payload region and enhancer region. In some embodiments, a viral genome may comprise two filler sequences, the first filler sequence may be located between the 5′ ITR and polyadenylation signal sequence region, and the second filler sequence may be located between the payload region and polyadenylation signal sequence region. In some embodiments, a viral genome may comprise two filler sequences, the first filler sequence may be located between the 5′ ITR and polyadenylation signal sequence region, and the second filler sequence may be located between the payload region and MCS region. In some embodiments, a viral genome may comprise two filler sequences, the first filler sequence may be located between the 5′ ITR and polyadenylation signal sequence region, and the second filler sequence may be located between the payload region and exon region. In some embodiments, a viral genome may comprise two filler sequences, the first filler sequence may be located between the 5′ ITR and polyadenylation signal sequence region, and the second filler sequence may be located between the payload region and 3′ ITR, In some embodiments, a viral genome may comprise two filler sequences, the first filler sequence may be located between the 5′ ITR and polyadenylation signal sequence region, and the second filler sequence may be located between the intron region and enhancer region. In some embodiments, a viral genome may comprise two filler sequences, the first filler sequence may be located between the 5′ ITR and polyadenylation signal sequence region, and the second filler sequence may be located between the intron region and polyadenylation signal sequence region. In some embodiments, a viral genome may comprise two filler sequences, the first filler sequence may be located between the 5′ ITR and polyadenylation signal sequence region, and the second filler sequence may be located between the intron region and MCS region. In some embodiments, a viral genome may comprise two filler sequences, the first filler sequence may be located between the 5′ ITR and polyadenylation signal sequence region, and the second filler sequence may be located between the intron region and exon region. In some embodiments, a viral genome may comprise two filler sequences, the first filler sequence may be located between the 5′ ITR and polyadenylation signal sequence region, and the second filler sequence may be located between the intron region and 3′ ITR. In some embodiments, a viral genome may comprise two filler sequences, the first filler sequence may be located between the 5′ ITR and polyadenylation signal sequence region, and the second filler sequence may be located between the enhancer region and polyadenylation signal sequence region. In some embodiments, a viral genome may comprise two filler sequences, the first filler sequence may be located between the 5′ ITR and polyadenylation signal sequence region, and the second filler sequence may be located between the enhancer region and MCS region. In some embodiments, a viral genome may comprise two filler sequences, the first filler sequence may be located between the 5′ ITR and polyadenylation signal sequence region, and the second filler sequence may be located between the enhancer region and exon region. In some embodiments, a viral genome may comprise two filler sequences, the first filler sequence may be located between the 5′ ITR and polyadenylation signal sequence region, and the second filler sequence may be located between the enhancer region and 3′ ITR. In some embodiments, a viral genome may comprise two filler sequences, the first filler sequence may be located between the 5′ ITR and polyadenylation signal sequence region, and the second filler sequence may be located between the polyadenylation signal sequence region and MCS region. In some embodiments, a viral genome may comprise two filler sequences, the first filler sequence may be located between the 5′ ITR and polyadenylation signal sequence region, and the second filler sequence may be located between the polyadenylation signal sequence region and exon region. In some embodiments, a viral genome may comprise two filler sequences, the first filler sequence may be located between the 5′ ITR and polyadenylation signal sequence region, and the second filler sequence may be located between the polyadenylation signal sequence region and 3′ ITR. In some embodiments, a viral genome may comprise two filler sequences, the first filler sequence may be located between the 5′ ITR and polyadenylation signal sequence region, and the second filler sequence may be located between the MCS region and exon region. In some embodiments, a viral genome may comprise two filler sequences, the first filler sequence may be located between the 5′ ITR and polyadenylation signal sequence region, and the second filler sequence may be located between the MCS region and 3′ ITR. In some embodiments, a viral genome may comprise two filler sequences, the first filler sequence may be located between the 5′ ITR and polyadenylation signal sequence region, and the second filler sequence may be located between the exon region and 3′ ITR.

[0287] In some embodiments, a viral genome may comprise two filler sequences, the first filler sequence may be located between the 5′ ITR and MCS region, and the second filler sequence may be located between the promoter region and payload region. In some embodiments, a viral genome may comprise two filler sequences, the first filler sequence may be located between the 5′ ITR and MCS region, and the second filler sequence may be located between the promoter region and intron region. In some embodiments, a viral genome may comprise two filler sequences, the first filler sequence may be located between the 5′ ITR and MCS region, and the second filler sequence may be located between the promoter region and enhancer region. In some embodiments, a viral genome may comprise two filler sequences, the first filler sequence may be located between the 5′ ITR and MCS region, and the second filler sequence may be located between the promoter region and polyadenylation signal sequence region. In some embodiments, a viral genome may comprise two filler sequences, the first filler sequence may be located between the 5′ ITR, and MCS region, and the second filler sequence may be located between the promoter region and MCS region. In some embodiments, a viral genome may comprise two filler sequences, the first filler sequence may be located between the 5′ ITR and MCS region, and the second filler sequence may be located between the promoter region and exon region. In some embodiments, a viral genome may comprise two filler sequences, the first filler sequence may be located between the 5′ ITR and MCS region, and the second filler sequence may be located between the promoter region and 3′ ITR, In some embodiments, a viral genome may comprise two filler sequences, the first filler sequence may be located between the 5′ ITR and MCS region, and the second filler sequence may be located between the payload region and intron region. In some embodiments, a viral genome may comprise two filler sequences, the first filler sequence may be located between the 5′ ITR and MCS region, and the second filler sequence may be located between the payload region and enhancer region. In some embodiments, a viral genome may comprise two filler sequences, the first filler sequence may be located between the 5′ ITR and MCS region, and the second filler sequence may be located between the payload region and polyadenylation signal sequence region. In some embodiments, a viral genome may comprise two filler sequences, the first filler sequence may be located between the 5′ ITR and MCS region, and the second filler sequence may be located between the payload region and MCS region. In some embodiments, a viral genome may comprise two filler sequences, the first filler sequence may be located between the 5′ ITR and MCS region, and the second filler sequence may be located between the payload region and exon region. In some embodiments, a viral genome may comprise two filler sequences, the first filler sequence may be located between the 5′ ITR. and MCS region, and the second filler sequence may be located between the payload region and 3′ ITR. In some embodiments, a viral genome may comprise two filler sequences, the first filler sequence may be located between the 5′ ITR and MCS region, and the second filler sequence may be located between the intron region and enhancer region. In some embodiments, a viral genome may comprise two filler sequences, the first filler sequence may be located between the 5′ ITR and MCS region, and the second filler sequence may be located between the intron region and polyadenylation signal sequence region. In some embodiments, a viral genome may comprise two filler sequences, the first filler sequence may be located between the 5′ ITR and MCS region, and the second filler sequence may be located between the intron region and MCS region. In some embodiments, a viral genome may comprise two filler sequences, the first filler sequence may be located between the 5′ ITR and MCS region, and the second filler sequence may be located between the intron region and exon region. In some embodiments, a viral genome may comprise two filler sequences, the first filler sequence may be located between the 5′ ITR and MCS region, and the second filler sequence may be located between the intron region and 3′ ITR. In some embodiments, a viral genome may comprise two filler sequences, the first filler sequence may be located between the 5′ ITR and MCS region, and the second filler sequence may be located between the enhancer region and polyadenylation signal sequence region. In some embodiments, a viral genome may comprise two filler sequences, the first filler sequence may be located between the 5′ ITR and MCS region, and the second filler sequence may be located between the enhancer region and MCS region. In some embodiments, a viral genome may comprise two filler sequences, the first filler sequence may be located between the 5′ ITR and MCS region, and the second filler sequence may be located between the enhancer region and exon region. In some embodiments, a viral genome may comprise two filler sequences, the first filler sequence may be located between the 5′ ITR and MCS region, and the second filler sequence may be located between the enhancer region and 3′ ITR. In some embodiments, a viral genome may comprise two filler sequences, the first filler sequence may be located between the 5′ ITR and MCS region, and the second filler sequence may be located between the polyadenylation signal sequence region and MCS region. In some embodiments, a viral genome may comprise two filler sequences, the first filler sequence may be located between the 5′ ITR and MCS region, and the second filler sequence may be located between the polyadenylation signal sequence region and exon region. In some embodiments, a viral genome may comprise two filler sequences, the first filler sequence may be located between the 5′ ITR. and MCS region, and the second filler sequence may be located between the polyadenylation signal sequence region and 3′ ITR. In some embodiments, a viral genome may comprise two filler sequences, the first filler sequence may be located between the 5′ ITR and MCS region, and the second filler sequence may be located between the MCS region and exon region. In some embodiments, a viral genome may comprise two filler sequences, the first filler sequence may be located between the 5′ ITR and MCS region, and the second filler sequence may be located between the MCS region and 3′ ITR. In some embodiments, a viral genome may comprise two filler sequences, the first filler sequence may be located between the 5′ ITR and MCS region, and the second filler sequence may be located between the exon region and 3′ ITR.

[0288] In some embodiments, a viral genome may comprise two filler sequences, the first filler sequence may be located between the 5′ ITR and exon region, and the second filler sequence may be located between the promoter region and payload region. In some embodiments, a viral genome may comprise two filler sequences, the first filler sequence may be located between the 5′ ITR and exon region, and the second filler sequence may be located between the promoter region and intron region. In some embodiments, a viral genome may comprise two filler sequences, the first filler sequence may be located between the 5′ ITR and exon region, and the second filler sequence may be located between the promoter region and enhancer region. In some embodiments, a viral genome may comprise two filler sequences, the first filler sequence may be located between the 5′ ITR and exon region, and the second filler sequence may be located between the promoter region and polyadenylation signal sequence region. In some embodiments, a viral genome may comprise two filler sequences, the first filler sequence may be located between the 5′ ITR and exon region, and the second filler sequence may be located between the promoter region and MCS region. In some embodiments, a viral genome may comprise two filler sequences, the first filler sequence may be located between the 5′ ITR and exon region, and the second filler sequence may be located between the promoter region and exon region. In some embodiments, a viral genome may comprise two filler sequences, the first filler sequence may be located between the 5′ ITR and exon region, and the second filler sequence may be located between the promoter region and 3′ ITR. In some embodiments, a viral genome may comprise two filler sequences, the first filler sequence may be located between the 5′ ITR and exon region, and the second filler sequence may be located between the payload region and intron region. In some embodiments, a viral genome may comprise two filler sequences, the first filler sequence may be located between the 5′ ITR and exon region, and the second filler sequence may be located between the payload region and enhancer region. In some embodiments, a viral genome may comprise two filler sequences, the first filler sequence may be located between the 5′ ITR and exon region, and the second filler sequence may be located between the payload region and polyadenylation signal sequence region. In some embodiments, a viral genome may comprise two filler sequences, the first filler sequence may be located between the 5′ ITR and exon region, and the second filler sequence may be located between the payload region and MCS region. In some embodiments, a viral genome may comprise two filler sequences, the first filler sequence may be located between the 5′ ITR and exon region, and the second filler sequence may be located between the payload region and exon region. In some embodiments, a viral genome may comprise two filler sequences, the first filler sequence may be located between the 5′ ITR and exon region, and the second filler sequence may be located between the payload region and 3′ ITR. In some embodiments, a viral genome may comprise two filler sequences, the first filler sequence may be located between the 5′ ITR and exon region, and the second filler sequence may be located between the intron region and enhancer region. In some embodiments, a viral genome may comprise two filler sequences, the first filler sequence may be located between the 5′ ITR and exon region, and the second filler sequence may be located between the intron region and polyadenylation signal sequence region. In some embodiments, a viral genome may comprise two filler sequences, the first filler sequence may be located between the 5′ ITR and exon region, and the second filler sequence may be located between the intron region and MCS region, In some embodiments, a viral genome may comprise two filler sequences, the first filler sequence may be located between the 5′ ITR and exon region, and the second filler sequence may be located between the intron region and exon region. In some embodiments, a viral genome may comprise two filler sequences, the first filler sequence may be located between the 5′ ITR and exon region, and the second filler sequence may be located between the intron region and 3′ ITR. In some embodiments, a viral genome may comprise two filler sequences, the first filler sequence may be located between the 5′ ITR and exon region, and the second filler sequence may be located between the enhancer region and polyadenylation signal sequence region. In some embodiments, a viral genome may comprise two filler sequences, the first filler sequence may be located between the 5′ ITR and exon region, and the second filler sequence may be located between the enhancer region and MCS region. in some embodiments, a viral genome may comprise two filler sequences, the first filler sequence may be located between the 5′ ITR and exon region, and the second filler sequence may be located between the enhancer region and exon region. In some embodiments, a viral genome may comprise two filler sequences, the first filler sequence may be located between the 5′ ITR and exon region, and the second filler sequence may be located between the enhancer region and 3′ ITR. In some embodiments, a viral genome may comprise two filler sequences, the first filler sequence may be located between the 5′ ITR and exon region, and the second filler sequence may be located between the polyadenylation signal sequence region and MCS region. In some embodiments, a viral genome may comprise two filler sequences, the first filler sequence may be located between the 5′ ITR and exon region, and the second filler sequence may be located between the polyadenylation signal sequence region and exon region. In some embodiments, a viral genome may comprise two filler sequences, the first filler sequence may be located between the 5′ ITR and exon region, and the second filler sequence may be located between the polyadenylation signal sequence region and 3′ ITR. In some embodiments, a viral genome may comprise two filler sequences, the first filler sequence may be located between the 5′ ITR and exon region, and the second filler sequence may be located between the MCS region and exon region. In some embodiments, a viral genome may comprise two filler sequences, the first filler sequence may be located between the 5′ ITR and exon region, and the second filler sequence may be located between the MCS region and 3′ ITR. In some embodiments, a viral genome may comprise two filler sequences, the first filler sequence may be located between the 5′ ITR and exon region, and the second filler sequence may be located between the exon region and 3′ ITR.

[0289] In some embodiments, a viral genome may comprise two filler sequences, the first filler sequence may be located between the promoter region and payload region, and the second filler sequence may be located between the payload region and intron region. In some embodiments, a viral genome may comprise two filler sequences, the first filler sequence may be located between the promoter region and payload region, and the second filler sequence may be located between the payload region and enhancer region. In some embodiments, a viral genome may comprise two filler sequences, the first filler sequence may be located between the promoter region and payload region, and the second filler sequence may be located between the payload region and polyadenylation signal sequence region. In some embodiments, a viral genome may comprise two filler sequences, the first filler sequence may be located between the promoter region and payload region, and the second filler sequence may be located between the payload region and MCS region. In some embodiments, a viral genome may comprise two filler sequences, the first filler sequence may be located between the promoter region and payload region, and the second filler sequence may be located between the payload region and exon region. In some embodiments, a viral genome may comprise two filler sequences, the first filler sequence may be located between the promoter region and payload region, and the second filler sequence may be located between the payload region and 3′ ITR. In some embodiments, a viral genome may comprise two filler sequences, the first filler sequence may be located between the promoter region and payload region, and the second filler sequence may be located between the intron region and enhancer region. In some embodiments, a viral genome may comprise two filler sequences, the first filler sequence may be located between the promoter region and payload region, and the second filler sequence may be located between the intron region and polyadenylation signal sequence region. In some embodiments, a viral genome may comprise two filler sequences, the first filler sequence may be located between the promoter region and payload region, and the second filler sequence may be located between the intron region and MCS region. In some embodiments, a viral genome may comprise two filler sequences, the first filler sequence may be located between the promoter region and payload region, and the second filler sequence may be located between the intron region and exon region. In some embodiments, a viral genome may comprise two filler sequences, the first filler sequence may be located between the promoter region and payload region, and the second filler sequence may be located between the intron region and 3′ ITR. In some embodiments, a viral genome may comprise two filler sequences, the first filler sequence may be located between the promoter region and payload region, and the second filler sequence may be located between the enhancer region and polyadenylation signal sequence region. In some embodiments, a viral genome may comprise two filler sequences, the first filler sequence may be located between the promoter region and payload region, and the second filler sequence may be located between the enhancer region and MCS region. In some embodiments, a viral genome may comprise two filler sequences, the first filler sequence may be located between the promoter region and payload region, and the second filler sequence may be located between the enhancer region and exon region. In some embodiments, a viral genome may comprise two filler sequences, the first filler sequence may be located between the promoter region and payload region, and the second filler sequence may be located between the enhancer region and 3′ ITR. In some embodiments, a viral genome may comprise two filler sequences, the first filler sequence may be located between the promoter region and payload region, and the second filler sequence may be located between the polyadenylation signal sequence region and MCS region. In some embodiments, a viral genome may comprise two filler sequences, the first filler sequence may be located between the promoter region and payload region, and the second filler sequence may be located between the polyadenylation signal sequence region and exon region. In some embodiments, a viral genome may comprise two filler sequences, the first filler sequence may be located between the promoter region and payload region, and the second filler sequence may be located between the polyadenylation signal sequence region and 3′ ITR. In some embodiments, a viral genome may comprise two filler sequences, the first filler sequence may be located between the promoter region and payload region, and the second filler sequence may be located between the MCS region and exon region. In some embodiments, a viral genome may comprise two filler sequences, the first filler sequence may be located between the promoter region and payload region, and the second filler sequence may be located between the MCS region and 3′ ITR. In some embodiments, a viral genome may comprise two filler sequences, the first filler sequence may be located between the promoter region and payload region, and the second filler sequence may be located between the exon region and 3′ ITR.

[0290] In some embodiments, a viral genome may comprise two filler sequences, the first filler sequence may be located between the promoter region and intron region, and the second filler sequence may be located between the payload region and intron region. In some embodiments, a viral genome may comprise two filler sequences, the first filler sequence may be located between the promoter region and intron region, and the second filler sequence may be located between the payload region and enhancer region. In some embodiments, a viral genome may comprise two filler sequences, the first filler sequence may be located between the promoter region and intron region, and the second filler sequence may be located between the payload region and polyadenylation signal sequence region. In some embodiments, a viral genome may comprise two filler sequences, the first filler sequence may be located between the promoter region and intron region, and the second filler sequence may be located between the payload region and MCS region. In some embodiments, a viral genome may comprise two filler sequences, the first filler sequence may be located between the promoter region and intron region, and the second filler sequence may be located between the payload region and exon region. In some embodiments, a viral genome may comprise two filler sequences, the first filler sequence may be located between the promoter region and intron region, and the second filler sequence may be located between the payload region and 3′ ITR. In some embodiments, a viral genome may comprise two filler sequences, the first filler sequence may be located between the promoter region and intron region, and the second filler sequence may be located between the intron region and enhancer region. In some embodiments, a viral genome may comprise two filler sequences, the first filler sequence may be located between the promoter region and intron region, and the second filler sequence may be located between the intron region and polyadenylation signal sequence region. in some embodiments, a viral genome may comprise two filler sequences, the first filler sequence may be located between the promoter region and intron region, and the second filler sequence may be located between the intron region and MCS region. In some embodiments, a viral genome may comprise two filler sequences, the first filler sequence may be located between the promoter region and intron region, and the second filler sequence may be located between the intron region and exon region. In some embodiments, a viral genome may comprise two filler sequences, the first filler sequence may be located between the promoter region and intron region, and the second filler sequence may be located between the intron region and 3′ ITR. In some embodiments, a viral genome may comprise two filler sequences, the first filler sequence may be located between the promoter region and intron region, and the second filler sequence may be located between the enhancer region and polyadenylation signal sequence region. In some embodiments, a viral genome may comprise two filler sequences, the first filler sequence may be located between the promoter region and intron region, and the second filler sequence may be located between the enhancer region and MCS region. In some embodiments, a viral genome may comprise two filler sequences, the first filler sequence may be located between the promoter region and intron region, and the second filler sequence may be located between the enhancer region and exon region. In some embodiments, a viral genome may comprise two filler sequences, the first filler sequence may be located between the promoter region and intron region, and the second filler sequence may be located between the enhancer region and 3′ ITR. In some embodiments, a viral genome may comprise two filler sequences, the first filler sequence may be located between the promoter region and intron region, and the second filler sequence may be located between the polyadenylation signal sequence region and MCS region. In some embodiments, a viral genome may comprise two filler sequences, the first filler sequence may be located between the promoter region and intron region, and the second filler sequence may be located between the polyadenylation signal sequence region and exon region. In some embodiments, a viral genome may comprise two filler sequences, the first filler sequence may be located between the promoter region and intron region, and the second filler sequence may be located between the polyadenylation signal sequence region and 3′ ITR. In some embodiments, a viral genome may comprise two filler sequences, the first filler sequence may be located between the promoter region and intron region, and the second filler sequence may be located between the MCS region and exon region. In some embodiments, a viral genome may comprise two filler sequences, the first filler sequence may be located between the promoter region and intron region, and the second filler sequence may be located between the MCS region and 3′ ITR. In some embodiments, a viral genome may comprise two filler sequences, the first filler sequence may be located between the promoter region and intron region, and the second filler sequence may be located between the exon region and 3′ ITR.

[0291] In some embodiments, a viral genome may comprise two filler sequences, the first filler sequence may be located between the promoter region and enhancer region, and the second filler sequence may be located between the payload region and intron region. In some embodiments, a viral genome may comprise two filler sequences, the first filler sequence may be located between the promoter region and enhancer region, and the second filler sequence may be located between the payload region and enhancer region. In some embodiments, a viral genome may comprise two filler sequences, the first filler sequence may be located between the promoter region and enhancer region, and the second filler sequence may be located between the payload region and polyadenylation signal sequence region. In some embodiments, a viral genome may comprise two filler sequences, the first filler sequence may be located between the promoter region and enhancer region, and the second filler sequence may be located between the payload region and MCS region. In some embodiments, a viral genome may comprise two filler sequences, the first filler sequence may be located between the promoter region and enhancer region, and the second filler sequence may be located between the payload region and exon region. In some embodiments, a viral genome may comprise two filler sequences, the first filler sequence may be located between the promoter region and enhancer region, and the second filler sequence may be located between the payload region and 3′ ITR. In some embodiments, a viral genome may comprise two filler sequences, the first filler sequence may be located between the promoter region and enhancer region, and the second filler sequence may be located between the intron region and enhancer region. In some embodiments, a viral genome may comprise two filler sequences, the first filler sequence may be located between the promoter region and enhancer region, and the second filler sequence may be located between the intron region and polyadenylation signal sequence region. In some embodiments, a viral genome may comprise two filler sequences, the first filler sequence may be located between the promoter region and enhancer region, and the second filler sequence may be located between the intron region and MCS region. In some embodiments, a viral genome may comprise two filler sequences, the first filler sequence may be located between the promoter region and enhancer region, and the second filler sequence may be located between the intron region and exon region. In some embodiments, a viral genome may comprise two filler sequences, the first filler sequence may be located between the promoter region and enhancer region, and the second filler sequence may be located between the intron region and 3′ ITR. In some embodiments, a viral genome may comprise two filler sequences, the first filler sequence may be located between the promoter region and enhancer region, and the second filler sequence may be located between the enhancer region and polyadenylation signal sequence region. In some embodiments, a viral genome may comprise two filler sequences, the first filler sequence may be located between the promoter region and enhancer region, and the second filler sequence may be located between the enhancer region and MCS region. In some embodiments, a viral genome may comprise two filler sequences, the first filler sequence may be located between the promoter region and enhancer region, and the second filler sequence may be located between the enhancer region and exon region. In some embodiments, a viral genome may comprise two filler sequences, the first filler sequence may be located between the promoter region and enhancer region, and the second filler sequence may be located between the enhancer region and 3′ ITR. In some embodiments, a viral genome may comprise two filler sequences, the first filler sequence may be located between the promoter region and enhancer region, and the second filler sequence may be located between the polyadenylation signal sequence region and MCS region. In some embodiments, a viral genome may comprise two filler sequences, the first filler sequence may be located between the promoter region and enhancer region, and the second filler sequence may be located between the polyadenylation signal sequence region and exon region. In some embodiments, a viral genome may comprise two filler sequences, the first filler sequence may be located between the promoter region and enhancer region, and the second filler sequence may be located between the polyadenylation signal sequence region and 3′ ITR. In some embodiments, a viral genome may comprise two filler sequences, the first filler sequence may be located between the promoter region and enhancer region, and the second filler sequence may be located between the MCS region and exon region. In some embodiments, a viral genome may comprise two filler sequences, the first filler sequence may be located between the promoter region and enhancer region, and the second filler sequence may be located between the MCS region and 3′ ITR. In some embodiments, a viral genome may comprise two filler sequences, the first filler sequence may be located between the promoter region and enhancer region, and the second filler sequence may be located between the exon region and 3′ ITR.

[0292] In some embodiments, a viral genome may comprise two filler sequences, the first filler sequence may be located between the promoter region and polyadenylation signal sequence region, and the second filler sequence may be located between the payload region and intron region. In some embodiments, a viral genome may comprise two filler sequences, the first filler sequence may be located between the promoter region and polyadenylation signal sequence region, and the second filler sequence may be located between the payload region and enhancer region. In some embodiments, a viral genome may comprise two filler sequences, the first filler sequence may be located between the promoter region and polyadenylation signal sequence region, and the second filler sequence may be located between the payload region and polyadenylation signal sequence region. In some embodiments, a viral genome may comprise two filler sequences, the first filler sequence may be located between the promoter region and polyadenylation signal sequence region, and the second filler sequence may be located between the payload region and MCS region. In some embodiments, a viral genome may comprise two filler sequences, the first filler sequence may be located between the promoter region and polyadenylation signal sequence region, and the second filler sequence may be located between the payload region and exon region. In some embodiments, a viral genome may comprise two filler sequences, the first filler sequence may be located between the promoter region and polyadenylation signal sequence region, and the second filler sequence may be located between the payload region and 3′ ITR. In some embodiments, a viral genome may comprise two filler sequences, the first filler sequence may be located between the promoter region and polyadenylation signal sequence region, and the second filler sequence may be located between the intron region and enhancer region. In some embodiments, a viral genome may comprise two filler sequences, the first filler sequence may be located between the promoter region and polyadenylation signal sequence region, and the second filler sequence may be located between the intron region and polyadenylation signal sequence region. In some embodiments, a viral genome may comprise two filler sequences, the first filler sequence may be located between the promoter region and polyadenylation signal sequence region, and the second filler sequence may be located between the intron region and MCS region. In some embodiments, a viral genome may comprise two filler sequences, the first filler sequence may be located between the promoter region and polyadenylation signal sequence region, and the second filler sequence may he located between the intron region and exon region. In some embodiments, a viral genome may comprise two filler sequences, the first filler sequence may be located between the promoter region and polyadenylation signal sequence region, and the second filler sequence may be located between the intron region and 3′ ITR. In some embodiments, a viral genome may comprise two filler sequences, the first filler sequence may be located between the promoter region and polyadenylation signal sequence region, and the second filler sequence may be located between the enhancer region and polyadenylation signal sequence region. In some embodiments, a viral genome may comprise two filler sequences, the first filler sequence may be located between the promoter region and polyadenylation signal sequence region, and the second filler sequence may be located between the enhancer region and MCS region, in some embodiments, a viral genome may comprise two filler sequences, the first filler sequence may be located between the promoter region and polyadenylation signal sequence region, and the second filler sequence may be located between the enhancer region and exon region. In some embodiments, a viral genome may comprise two filler sequences, the first filler sequence may be located between the promoter region and polyadenylation signal sequence region, and the second filler sequence may be located between the enhancer region and 3′ ITR. In some embodiments, a viral genome may comprise two filler sequences, the first filler sequence may be located between the promoter region and polyadenylation signal sequence region, and the second filler sequence may be located between the polyadenylation signal sequence region and MCS region. In some embodiments, a viral genome may comprise two filler sequences, the first filler sequence may be located between the promoter region and polyadenylation signal sequence region, and the second filler sequence may be located between the polyadenylation signal sequence region and exon region. In some embodiments, a viral genome may comprise two filler sequences, the first filler sequence may be located between the promoter region and polyadenylation signal sequence region, and the second filler sequence may be located between the polyadenylation signal sequence region and 3′ ITR, in some embodiments, a viral genome may comprise two filler sequences, the first filler sequence may be located between the promoter region and polyadenylation signal sequence region, and the second filler sequence may be located between the MCS region and exon region. In some embodiments, a viral genome may comprise two filler sequences, the first filler sequence may be located between the promoter region and polyadenylation signal sequence region, and the second filler sequence may be located between the MCS region and 3′ ITR. In some embodiments, a viral genome may comprise two filler sequences, the first filler sequence may be located between the promoter region and polyadenylation signal sequence region, and the second filler sequence may he located between the exon region and 3′ ITR.

[0293] In some embodiments, a viral genome may comprise two filler sequences, the first filler sequence may be located between the promoter region and exon region, and the second filler sequence may be located between the payload region and intron region. In some embodiments, a viral genome may comprise two filler sequences, the first filler sequence may be located between the promoter region and exon region, and the second filler sequence may be located between the payload region and enhancer region. In some embodiments, a viral genome may comprise two filler sequences, the first filler sequence may be located between the promoter region and exon region, and the second filler sequence may be located between the payload region and polyadenylation signal sequence region. In some embodiments, a viral genome may comprise two filler sequences, the first filler sequence may be located between the promoter region and exon region, and the second filler sequence may be located between the payload region and MCS region. In some embodiments, a viral genome may comprise two filler sequences, the first filler sequence may be located between the promoter region and exon region, and the second filler sequence may be located between the payload region and exon region. In some embodiments, a viral genome may comprise two filler sequences, the first filler sequence may be located between the promoter region and exon region, and the second filler sequence may be located between the payload region and 3′ ITR. In some embodiments, a viral genome may comprise two filler sequences, the first filler sequence may be located between the promoter region and exon region, and the second filler sequence may be located between the intron region and enhancer region. In some embodiments, a viral genome may comprise two filler sequences, the first filler sequence may be located between the promoter region and exon region, and the second filler sequence may be located between the intron region and polyadenylation signal sequence region. In some embodiments, a viral genome may comprise two filler sequences, the first filler sequence may be located between the promoter region and exon region, and the second filler sequence may be located between the intron region and MCS region. In some embodiments, a viral genome may comprise two filler sequences, the first filler sequence may be located between the promoter region and exon region, and the second filler sequence may be located between the intron region and exon region. In some embodiments, a viral genome may comprise two filler sequences, the first filler sequence may be located between the promoter region and exon region, and the second filler sequence may be located between the intron region and 3′ ITR. In some embodiments, a viral genome may comprise two filler sequences, the first filler sequence may be located between the promoter region and exon region, and the second filler sequence may be located between the enhancer region and polyadenylation signal sequence region. In some embodiments, a viral genome may comprise two filler sequences, the first filler sequence may be located between the promoter region and exon region, and the second filler sequence may be located between the enhancer region and MCS region. In some embodiments, a viral genome may comprise two filler sequences, the first filler sequence may be located between the promoter region and exon region, and the second filler sequence may be located between the enhancer region and exon region. In some embodiments, a viral genome may comprise two filler sequences, the first filler sequence may be located between the promoter region and exon region, and the second filler sequence may be located between the enhancer region and 3′ ITR. In some embodiments, a viral genome may comprise two filler sequences, the first filler sequence may be located between the promoter region and exon region, and the second filler sequence may be located between the polyadenylation signal sequence region and MCS region. In some embodiments, a viral genome may comprise two filler sequences, the first filler sequence may be located between the promoter region and exon region, and the second filler sequence may be located between the polyadenylation signal sequence region and exon region. In some embodiments, a viral genome may comprise two filler sequences, the first fill sequence may be located between the promoter region and exon region, and the second filler sequence may be located between the polyadenylation signal sequence region and 3′ ITR. In some embodiments, a viral genome may comprise two filler sequences, the first filler sequence may be located between the promoter region and exon region, and the second filler sequence may be located between the MCS region and exon region. In some embodiments, a viral genome may comprise two filler sequences, the first filler sequence may be located between the promoter region and exon region, and the second filler sequence may be located between the MCS region and 3′ ITR, In some embodiments, a viral genome may comprise two filler sequences, the first filler sequence may be located between the promoter region and exon region, and the second filler sequence may be located between the exon region and 3′ ITR.

[0294] In some embodiments, a viral genome may comprise two filler sequences, the first filler sequence may be located between the promoter region and MCS region, and the second filler sequence may be located between the payload region and intron region. In some embodiments, a viral genome may comprise two filler sequences, the first filler sequence may be located between the promoter region and MCS region, and the second filler sequence may be located between the payload region and enhancer region. In some embodiments, a viral genome may comprise two filler sequences, the first filler sequence may be located between the promoter region and MCS region, and the second filler sequence may be located between the payload region and polyadenylation signal sequence region. In some embodiments, a viral genome may comprise two filler sequences, the first filler sequence may be located between the promoter region and MCS region, and the second filler sequence may be located between the payload region and MCS region. In some embodiments, a viral genome may comprise two filler sequences, the first filler sequence may be located between the promoter region and MCS region, and the second filler sequence may be located between the payload region and exon region. In some embodiments, a viral genome may comprise two filler sequences, the first filler sequence may be located between the promoter region and MCS region, and the second filler sequence may be located between the payload region and 3′ ITR. In some embodiments, a viral genome may comprise two filler sequences, the first filler sequence may be located between the promoter region and MCS region, and the second filler sequence may be located between the intron region and enhancer region. in some embodiments, a viral genome may comprise two filler sequences, the first filler sequence may be located between the promoter region and MCS region, and the second filler sequence may be located between the intron region and polyadenylation signal sequence region. In some embodiments, a viral genome may comprise two filler sequences, the first filler sequence may be located between the promoter region and MCS region, and the second filler sequence may be located between the intron region and MCS region. In some embodiments, a viral genome may comprise two filler sequences, the first filler sequence may be located between the promoter region and MCS region, and the second filler sequence may be located between the intron region and exon region. In some embodiments, a viral genome may comprise two filler sequences, the first filler sequence may be located between the promoter region and MCS region, and the second filler sequence may be located between the intron region and 3′ ITR. In some embodiments, a viral genome may comprise two filler sequences, the first filler sequence may be located between the promoter region and MCS region, and the second filler sequence may be located between the enhancer region and polyadenylation signal sequence region. In some embodiments, a viral genome may comprise two filler sequences, the first filler sequence may be located between the promoter region and MCS region, and the second filler sequence may be located between the enhancer region and MCS region. In some embodiments, a viral genome may comprise two filler sequences, the first filler sequence may be located between the promoter region and MCS region, and the second filler sequence may be located between the enhancer region and exon region. In some embodiments, a viral genome may comprise two filler sequences, the first filler sequence may be located between the promoter region and MCS region, and the second filler sequence may be located between the enhancer region and 3′ ITR, In some embodiments, a viral genome may comprise two filler sequences, the first filler sequence may be located between the promoter region and MCS region, and the second filler sequence may be located between the polyadenylation signal sequence region and MCS region. In some embodiments, a viral genome may comprise two filler sequences, the first filler sequence may be located between the promoter region and MCS region, and the second filler sequence may be located between the polyadenylation signal sequence region and exon region. In some embodiments, a viral genome may comprise two filler sequences, the first filler sequence may be located between the promoter region and MCS region, and the second filler sequence may be located between the polyadenylation signal sequence region and 3′ ITR, In some embodiments, a viral genome may comprise two filler sequences, the first filler sequence may be located between the promoter region and MCS region, and the second filler sequence may be located between the MCS region and exon region. In some embodiments, a viral genome may comprise two filler sequences, the first filler sequence may be located between the promoter region and MCS region, and the second filler sequence may be located between the MCS region and 3′ ITR. In some embodiments, a viral genome may comprise two filler sequences, the first filler sequence may be located between the promoter region and MCS region, and the second filler sequence may be located between the exon region and 3′ ITR.

[0295] In some embodiments, a viral genome may comprise two filler sequences, the first filler sequence may be located between the promoter region and 3′ ITR, and the second filler sequence may be located between the payload region and intron region. In some embodiments, a viral genome may comprise two filler sequences, the first filler sequence may be located between the promoter region and 3′ ITR, and the second filler sequence may be located between the payload region and enhancer region. In some embodiments, a viral genome may comprise two filler sequences, the first filler sequence may be located between the promoter region and 3′ ITR, and the second filler sequence may be located between the payload region and polyadenylation signal sequence region. In some embodiments, a viral genome may comprise two filler sequences, the first filler sequence may be located between the promoter region and 3′ ITR, and the second filler sequence may be located between the payload region and MCS region. In some embodiments, a viral genome may comprise two filler sequences, the first filler sequence may he located between the promoter region and 3′ ITR, and the second filler sequence may be located between the payload region and exon region. In some embodiments, a viral genome may comprise two filler sequences, the first filler sequence may be located between the promoter region and 3′ ITR, and the second filler sequence may be located between the payload region and 3′ ITR. In some embodiments, a viral genome may comprise two filler sequences, the first filler sequence may be located between the promoter region and 3′ ITR, and the second filler sequence may be located between the intron region and enhancer region. In some embodiments, a viral genome may comprise two filler sequences, the first filler sequence may be located between the promoter region and 3′ ITR, and the second filler sequence may be located between the intron region and polyadenylation signal sequence region. In some embodiments, a viral genome may comprise two filler sequences, the first filler sequence may be located between the promoter region and 3′ ITR, and the second filler sequence may be located between the intron region and MCS region. In some embodiments, a viral genome may comprise two filler sequences, the first filler sequence may be located between the promoter region and 3′ ITR, and the second filler sequence may be located between the intron region and exon region. In some embodiments, a viral genome may comprise two filler sequences, the first filler sequence may be located between the promoter region and 3′ ITR, and the second filler sequence may be located between the intron region and 3′ ITR In some embodiments, a viral genome may comprise two filler sequences, the first filler sequence may be located between the promoter region and 3′ ITR, and the second filler sequence may be located between the enhancer region and polyadenylation signal sequence region. In some embodiments, a viral genome may comprise two filler sequences, the first filler sequence may be located between the promoter region and 3′ ITR, and the second filler sequence may be located between the enhancer region and MCS region. In some embodiments, a viral genome may comprise two filler sequences, the first filler sequence may be located between the promoter region and 3′ ITR, and the second filler sequence may be located between the enhancer region and exon region. In some embodiments, a viral genome may comprise two filler sequences, the first filler sequence may be located between the promoter region and 3′ ITR, and the second filler sequence may be located between the enhancer region and 3′ ITR. In some embodiments, a viral genome may comprise two filler sequences, the first filler sequence may be located between the promoter region and 3′ ITR, and the second filler sequence may be located between the polyadenylation signal sequence region and MCS region. In some embodiments, a viral genome may comprise two filler sequences, the first filler sequence may be located between the promoter region and 3′ ITR, and the second filler sequence may be located between the polyadenylation signal sequence region and exon region. In some embodiments, a viral genome may comprise two filler sequences, the first filler sequence may be located between the promoter region and 3′ ITR, and the second filler sequence may be located between the polyadenylation signal sequence region and 3′ ITR. In some embodiments, a viral genome may comprise two filler sequences, the first filler sequence may be located between the promoter region and 3′ ITR, and the second filler sequence may be located between the MCS region and exon region. In some embodiments, a viral genome may comprise two filler sequences, the first filler sequence may be located between the promoter region and 3′ ITR, and the second filler sequence may be located between the MCS region and 3′ ITR. In some embodiments, a viral genome may comprise two filler sequences, the first filler sequence may be located between the promoter region and 3′ ITR, and the second filler sequence may be located between the exon region and 3′ ITR.

[0296] In some embodiments, a viral genome may comprise two filler sequences, the first filler sequence may be located between the payload region and intron region, and the second filler sequence may be located between the intron region and enhancer region. In some embodiments, a viral genome may comprise two filler sequences, the first filler sequence may be located between the payload region and intron region, and the second filler sequence may be located between the intron region and polyadenylation signal sequence region. In some embodiments, a viral genome may comprise two filler sequences, the first filler sequence may be located between the payload region and intron region, and the second filler sequence may be located between the intron region and MCS region. In some embodiments, a viral genome may comprise two filler sequences, the first filler sequence may be located between the payload region and intron region, and the second filler sequence may be located between the intron region and exon region. In some embodiments, a viral genome may comprise two filler sequences, the first filler sequence may be located between the payload region and intron region, and the second filler sequence may be located between the intron region and 3′ ITR. In some embodiments, a viral genome may comprise two filler sequences, the first filler sequence may he located between the payload region and intron region, and the second filler sequence may be located between the enhancer region and polyadenylation signal sequence region. In some embodiments, a viral genome may comprise two filler sequences, the first filler sequence may be located between the payload region and intron region, and the second filler sequence may be located between the enhancer region and MCS region. In some embodiments, a viral genome may comprise two filler sequences, the first filler sequence may be located between the payload region and intron region, and the second filler sequence may be located between the enhancer region and exon region. In some embodiments, a viral genome may comprise two filler sequences, the first filler sequence may be located between the payload region and intron region, and the second filler sequence may be located between the enhancer region and 3′ ITR. In some embodiments, a viral genome may comprise two filler sequences, the first filler sequence may be located between the payload region and intron region, and the second filler sequence may be located between the polyadenylation signal sequence region and MCS region. In some embodiments, a viral genome may comprise two filler sequences, the first filler sequence may be located between the payload region and intron region, and the second filler sequence may be located between the polyadenylation signal sequence region and exon region. In some embodiments, a viral genome may comprise two filler sequences, the first filler sequence may be located between the payload region and intron region, and the second filler sequence may be located between the polyadenylation signal sequence region and 3′ ITR. In some embodiments, a viral genome may comprise two filler sequences, the first filler sequence may be located between the payload region and intron region, and the second filler sequence may be located between the MCS region and exon region. In some embodiments, a viral genome may comprise two filler sequences, the first filler sequence may be located between the payload region and intron region, and the second filler sequence may be located between the MCS region and 3′ ITR. In some embodiments, a viral genome may comprise two filler sequences, the first filler sequence may be located between the payload region and intron region, and the second filler sequence may be located between the exon region and 3′ ITR.

[0297] In some embodiments, a viral genome may comprise two filler sequences, the first filler sequence may be located between the payload region and enhancer region, and the second filler sequence may be located between the intron region and enhancer region. In some embodiments, a viral genome may comprise two filler sequences, the first filler sequence may be located between the payload region and enhancer region, and the second filler sequence may be located between the intron region and polyadenylation signal sequence region. In some embodiments, a viral genome may comprise two filler sequences, the first filler sequence may he located between the payload region and enhancer region, and the second filler sequence may be located between the intron region and MCS region. In some embodiments, a viral genome may comprise two filler sequences, the first filler sequence may be located between the payload region and enhancer region, and the second filler sequence may be located between the intron region and exon region. In some embodiments, a viral genome may comprise two filler sequences, the first filler sequence may be located between the payload region and enhancer region, and the second filler sequence may be located between the intron region and 3′ ITR. In some embodiments, a viral genome may comprise two filler sequences, the first filler sequence may be located between the payload region and enhancer region, and the second filler sequence may be located between the enhancer region and polyadenylation signal sequence region. In some embodiments, a viral genome may comprise two filler sequences, the first filler sequence may be located between the payload region and enhancer region, and the second filler sequence may be located between the enhancer region and MCS region. In some embodiments, a viral genome may comprise two filler sequences, the first filler sequence may be located between the payload region and enhancer region, and the second filler sequence may be located between the enhancer region and exon region. In some embodiments, a viral genome may comprise two filler sequences, the first filler sequence may be located between the payload region and enhancer region, and the second filler sequence may be located between the enhancer region and 3′ ITR. In some embodiments, a viral genome may comprise two filler sequences, the first filler sequence may be located between the payload region and enhancer region, and the second filler sequence may be located between the polyadenylation signal sequence region and MCS region. In some embodiments, a viral genome may comprise two filler sequences, the first filler sequence may be located between the payload region and enhancer region, and the second filler sequence may be located between the polyadenylation signal sequence region and exon region. In some embodiments, a viral genome may comprise two filler sequences, the first filler sequence may be located between the payload region and enhancer region, and the second filler sequence may be located between the polyadenylation signal sequence region and 3′ ITR, In some embodiments, a viral genome may comprise two filler sequences, the first filler sequence may be located between the payload region and enhancer region, and the second filler sequence may be located between the MCS region and exon region. In some embodiments, a viral genome may comprise two filler sequences, the first filler sequence may be located between the payload region and enhancer region, and the second filler sequence may be located between the MCS region and 3′ ITR. In some embodiments, a viral genome may comprise two filler sequences, the first filler sequence may be located between the payload region and enhancer region, and the second filler sequence may be located between the exon region and 3′ ITR.

[0298] In some embodiments, a viral genome may comprise two filler sequences, the first filler sequence may be located between the payload region and polyadenylation signal sequence region, and the second filler sequence may be located between the intron region and enhancer region. In some embodiments, a viral genome may comprise two filler sequences, the first filler sequence may be located between the payload region and polyadenylation signal sequence region, and the second filler sequence may be located between the intron region and polyadenylation signal sequence region. In some embodiments, a viral genome may comprise two filler sequences, the first filler sequence may be located between the payload region and polyadenylation signal sequence region, and the second filler sequence may be located between the intron region and MCS region. In some embodiments, a viral genome may comprise two filler sequences, the first filler sequence may be located between the payload region and polyadenylation signal sequence region, and the second filler sequence may be located between the intron region and exon region. In some embodiments, a viral genome may comprise two filler sequences, the first filler sequence may be located between the payload region and polyadenylation signal sequence region, and the second filler sequence may be located between the intron region and 3′ ITR, In some embodiments, a viral genome may comprise two filler sequences, the first filler sequence may be located between the payload region and polyadenylation signal sequence region, and the second filler sequence may be located between the enhancer region and polyadenylation signal sequence region. In some embodiments, a viral genome may comprise two filler sequences, the first filler sequence may be located between the payload region and polyadenylation signal sequence region, and the second filler sequence may be located between the enhancer region and MCS region. In some embodiments, a viral genome may comprise two filler sequences, the first filler sequence may be located between the payload region and polyadenylation signal sequence region, and the second filler sequence may be located between the enhancer region and exon region. In some embodiments, a viral genome may comprise two filler sequences, the first filler sequence may be located between the payload region and polyadenylation signal sequence region, and the second filler sequence may be located between the enhancer region and 3′ ITR. In some embodiments, a viral genome may comprise two filler sequences, the first filler sequence may be located between the payload region and polyadenylation signal sequence region, and the second filler sequence may be located between the polyadenylation signal sequence region and MCS region. In some embodiments, a viral genome may comprise two filler sequences, the first filler sequence may be located between the payload region and polyadenylation signal sequence region, and the second filler sequence may be located between the polyadenylation signal sequence region and exon region. In some embodiments, a viral genome may comprise two filler sequences, the first filler sequence may be located between the payload region and polyadenylation signal sequence region, and the second filler sequence may be located between the polyadenylation signal sequence region and 3′ ITR. In some embodiments, a viral genome may comprise two filler sequences, the first filler sequence may be located between the payload region and polyadenylation signal sequence region, and the second filler sequence may be located between the MCS region and exon region. In some embodiments, a viral genome may comprise two filler sequences, the first filler sequence may be located between the payload region and polyadenylation signal sequence region, and the second filler sequence may be located between the MCS region and 3′ ITR. In some embodiments, a viral genome may comprise two filler sequences, the first filler sequence may be located between the payload region and polyadenylation signal sequence region, and the second filler sequence may be located between the exon region and 3′ ITR.

[0299] In some embodiments, a viral genome may comprise two filler sequences, the first filler sequence may be located between the payload region and MCS region, and the second filler sequence may be located between the intron region and enhancer region, In some embodiments, a viral genome may comprise two filler sequences, the first filler sequence may be located between the payload region and MCS region, and the second filler sequence may be located between the intron region and polyadenylation signal sequence region. In some embodiments, a viral genome may comprise two filler sequences, the first filler sequence may be located between the payload region and MCS region, and the second filler sequence may be located between the intron region and MCS region. In some embodiments, a viral genome may comprise two filler sequences, the first filler sequence may be located between the payload region and MCS region, and the second filler sequence may be located between the intron region and exon region. In some embodiments, a viral genome may comprise two filler sequences, the first filler sequence may be located between the payload region and MCS region, and the second filler sequence may be located between the intron region and 3′ ITR. In some embodiments, a viral genome may comprise two filler sequences, the first filler sequence may be located between the payload region and MCS region, and the second filler sequence may be located between the enhancer region and polyadenylation signal sequence region. In some embodiments, a viral genome may comprise two filler sequences, the first filler sequence may be located between the payload region and MCS region, and the second filler sequence may be located between the enhancer region and MCS region. In some embodiments, a viral genome may comprise two filler sequences, the first filler sequence may be located between the payload region and MCS region, and the second filler sequence may be located between the enhancer region and exon region. In some embodiments, a viral genome may comprise two filler sequences, the first filler sequence may be located between the payload region and MCS region, and the second filler sequence may be located between the enhancer region and 3′ ITR. In some embodiments, a viral genome may comprise two filler sequences, the first filler sequence may be located between the payload region and MCS region, and the second filler sequence may be located between the polyadenylation signal sequence region and MCS region. In some embodiments, a viral genome may comprise two filler sequences, the first filler sequence may be located between the payload region and MCS region, and the second filler sequence may be located between the polyadenylation signal sequence region and exon region. In some embodiments, a viral genome may comprise two filler sequences, the first filler sequence may be located between the payload region and MCS region, and the second filler sequence may be located between the polyadenylation signal sequence region and 3′ ITR. In some embodiments, a viral genome may comprise two filler sequences, the first filler sequence may be located between the payload region and MCS region, and the second filler sequence may be located between the MCS region and exon region. In some embodiments, a viral genome may comprise two filler sequences, the first filler sequence may be located between the payload region and MCS region, and the second filler sequence may be located between the MCS region and 3′ ITR. In some embodiments, a viral genome may comprise two filler sequences, the first filler sequence may be located between the payload region and MCS region, and the second filler sequence may be located between the exon region and 3′ ITR.

[0300] In some embodiments, a viral genome may comprise two filler sequences, the first filler sequence may be located between the payload region and exon region, and the second filler sequence may be located between the intron region and enhancer region. In some embodiments, a viral genome may comprise two filler sequences, the first filler sequence may be located between the payload region and exon region, and the second filler sequence may be located between the intron region and polyadenylation signal sequence region. In some embodiments, a viral genome may comprise two filler sequences, the first filler sequence may be located between the payload region and exon region, and the second filler sequence may be located between the intron region and MCS region. In some embodiments, a viral genome may comprise two filler sequences, the first filler sequence may be located between the payload region and exon region, and the second filler sequence may be located between the intron region and exon region, in some embodiments, a viral genome may comprise two filler sequences, the first filler sequence may be located between the payload region and exon region, and the second filler sequence may be located between the intron region and 3′ ITR. In some embodiments, a viral genome may comprise two filler sequences, the first filler sequence may be located between the payload region and exon region, and the second filler sequence may be located between the enhancer region and polyadenylation signal sequence region. In some embodiments, a viral genome may comprise two filler sequences, the first filler sequence may be located between the payload region and exon region, and the second filler sequence may be located between the enhancer region and MCS region. In some embodiments, a viral genome may comprise two filler sequences, the first filler sequence may be located between the payload region and exon region, and the second filler sequence may be located between the enhancer region and exon region. In some embodiments, a viral genome may comprise two filler sequences, the first filler sequence may be located between the payload region and exon region, and the second filler sequence may be located between the enhancer region and 3′ ITR. In some embodiments, a viral genome may comprise two filler sequences, the first filler sequence may be located between the payload region and exon region, and the second filler sequence may be located between the polyadenylation signal sequence region and MCS region. In some embodiments, a viral genome may comprise two filler sequences, the first filler sequence may be located between the payload region and exon region, and the second filler sequence may be located between the polyadenylation signal sequence region and exon region. In some embodiments, a viral genome may comprise two filler sequences, the first filler sequence may be located between the payload region and exon region, and the second filler sequence may be located between the polyadenylation signal sequence region and 3′ ITR. In some embodiments, a viral genome may comprise two filler sequences, the first filler sequence may be located between the payload region and exon region, and the second filler sequence may be located between the MCS region and exon region. in some embodiments, a viral genome may comprise two filler sequences, the first filler sequence may be located between the payload region and exon region, and the second filler sequence may be located between the MCS region and 3′ ITR. In some embodiments, a viral genome may comprise two filler sequences, the first filler sequence may be located between the payload region and exon region, and the second filler sequence may be located between the exon region and 3′ ITR,

[0301] In some embodiments, a viral genome may comprise two filler sequences, the first filler sequence may be located between the payload region and 3′ ITR region, and the second filler sequence may be located between the intron region and enhancer region. In some embodiments, a viral genome may comprise two filler sequences, the first filler sequence may he located between the payload region and 3′ ITR region, and the second filler sequence may be located between the intron region and polyadenylation signal sequence region. In some embodiments, a viral genome may comprise two filler sequences, the first filler sequence may be located between the payload region and 3′ ITR region, and the second filler sequence may be located between the intron region and MCS region. In some embodiments, a viral genome may comprise two filler sequences, the first filler sequence may be located between the payload region and 3′ ITR region, and the second filler sequence may be located between the intron region and exon region. In some embodiments, a viral genome may comprise two filler sequences, the first filler sequence may be located between the payload region and 3′ ITR region, and the second filler sequence may be located between the intron region and 3′ ITR. In some embodiments, a viral genome may comprise two filler sequences, the first filler sequence may be located between the payload region and 3′ ITR region, and the second filler sequence may be located between the enhancer region and polyadenylation signal sequence region. In some embodiments, a viral genome may comprise two filler sequences, the first filler sequence may be located between the payload region and 3′ ITR region, and the second filler sequence may be located between the enhancer region and MCS region. In some embodiments, a viral genome may comprise two filler sequences, the first filler sequence may be located between the payload region and 3′ ITR region, and the second filler sequence may be located between the enhancer region and exon region. In some embodiments, a viral genome may comprise two filler sequences, the first filler sequence may be located between the payload region and 3′ ITR region, and the second filler sequence may be located between the enhancer region and 3′ ITR. In some embodiments, a viral genome may comprise two filler sequences, the first filler sequence may be located between the payload region and 3′ ITR region, and the second filler sequence may be located between the polyadenylation signal sequence region and MCS region. In some embodiments, a viral genome may comprise two filler sequences, the first filler sequence may be located between the payload region and 3′ ITR region, and the second filler sequence may be located between the polyadenylation signal sequence region and exon region. In some embodiments, a viral genome may comprise two filler sequences, the first filler sequence may be located between the payload region and 3′ ITR region, and the second filler sequence may be located between the polyadenylation siiznal sequence region and 3′ ITR. In some embodiments, a viral genome may comprise two filler sequences, the first filler sequence may be located between the payload region and 3′ ITR region, and the second filler sequence may be located between the MCS region and exon region. In some embodiments, a viral genome may comprise two filler sequences, the first filler sequence may be located between the payload region and 3′ ITR region, and the second filler sequence may be located between the MCS region and 3′ ITR. In some embodiments, a viral genome may comprise two filler sequences, the first filler sequence may be located between the payload region and 3′ ITR region, and the second filler sequence may be located between the exon region and 3′ ITR.

[0302] In some embodiments, a viral genome may comprise two filler sequences, the first filler sequence may be located between the intron region and enhancer region, and the second filler sequence may be located between the enhancer region and polyadenylation signal sequence region. In some embodiments, a viral genome may comprise two filler sequences, the first filler sequence may be located between the intron region and enhancer region, and the second filler sequence may be located between the enhancer region and MCS region. In some embodiments, a viral genome may comprise two filler sequences, the first filler sequence may be located between the intron region and enhancer region, and the second filler sequence may be located between the enhancer region and exon region. In some embodiments, a viral genome may comprise two filler sequences, the first filler sequence may be located between the intron region and enhancer region, and the second filler sequence may be located between the enhancer region and 3′ ITR. In some embodiments, a viral genome may comprise two filler sequences, the first filler sequence may be located between the intron region and enhancer region, and the second filler sequence may be located between the polyadenylation signal sequence region and MCS region. In some embodiments, a viral genome may comprise two filler sequences, the first filler sequence may be located between the intron region and enhancer region, and the second filler sequence may be located between the polyadenylation signal sequence region and exon region. In some embodiments, a viral genome may comprise two filler sequences, the first filler sequence may be located between the intron region and enhancer region, and the second filler sequence may be located between the polyadenylation signal sequence region and 3′ ITR. In some embodiments, a viral genome may comprise two filler sequences, the first filler sequence may be located between the intron region and enhancer region, and the second filler sequence may be located between the MCS region and exon region. In some embodiments, a viral genome may comprise two filler sequences, the first filler sequence may be located between the intron region and enhancer region, and the second filler sequence may be located between the MCS region and 3′ ITR. In some embodiments, a viral genome may comprise two filler sequences, the first filler sequence may be located between the intron region and enhancer region, and the second filler sequence may be located between the exon region and 3′ ITR.

[0303] In some embodiments, a viral genome may comprise two filler sequences, the first filler sequence may be located between the intron region and polyadenylation signal sequence region, and the second filler sequence may be located between the enhancer region and polyadenylation signal sequence region. In some embodiments, a viral genome may comprise two filler sequences, the first filler sequence may be located between the intron region and polyadenylation signal sequence region, and the second filler sequence may be located between the enhancer region and MCS region. In some embodiments, a viral genome may comprise two filler sequences, the first filler sequence may be located between the intron region and polyadenylation signal sequence region, and the second filler sequence may be located between the enhancer region and exon region. In some embodiments, a viral genome may comprise two filler sequences, the first filler sequence may be located between the intron region and polyadenylation signal sequence region, and the second filler sequence may be located between the enhancer region and 3′ ITR, In some embodiments, a viral genome may comprise two filler sequences, the first filler sequence may be located between the intron region and polyadenylation signal sequence region, and the second filler sequence may be located between the polyadenylation signal sequence region and MCS region. In some embodiments, a viral genome may comprise two filler sequences, the first filler sequence may be located between the intron region and polyadenylation signal sequence region, and the second filler sequence may be located between the polyadenylation signal sequence region and exon region. In some embodiments, a viral genome may comprise two filler sequences, the first filler sequence may be located between the intron region and polyadenylation signal sequence region, and the second filler sequence may be located between the polyadenylation signal sequence region and 3′ ITR. In some embodiments, a viral genome may comprise two filler sequences, the first filler sequence may be located between the intron region and polyadenylation signal sequence region, and the second filler sequence may be located between the MCS region and exon region. In some embodiments, a viral genome may comprise two filler sequences, the first filler sequence may be located between the intron region and polyadenylation signal sequence region, and the second filler sequence may be located between the MCS region and 3′ ITR. In some embodiments, a viral genome may comprise two filler sequences, the first filler sequence may he located between the intron region and polyadenylation signal sequence region, and the second filler sequence may be located between the exon region and 3′ ITR.

[0304] In some embodiments, a viral genome may comprise two filler sequences, the first filler sequence may be located between the intron region and MCS region, and the second filler sequence may be located between the enhancer region and polyadenylation signal sequence region. In some embodiments, a viral genome may comprise two filler sequences, the first filler sequence may be located between the intron region and MCS region, and the second filler sequence may be located between the enhancer region and MCS region. In some embodiments, a viral genome may comprise two filler sequences, the first filler sequence may be located between the intron region and MCS region, and the second filler sequence may be located between the enhancer region and exon region. In some embodiments, a viral genome may comprise two filler sequences, the first filler sequence may be located between the intron region and MCS region, and the second filler sequence may be located between the enhancer region and 3′ ITR. In some embodiments, a viral genome may comprise two filler sequences, the first filler sequence may be located between the intron region and MCS region, and the second filler sequence may be located between the polyadenylation signal sequence region and MCS region. In some embodiments, a viral genome may comprise two filler sequences, the first filler sequence may be located between the intron region and MCS region, and the second filler sequence may be located between the polyadenylation signal sequence region and exon region. In some embodiments, a viral genome may comprise two filler sequences, the first filler sequence may be located between the intron region and MCS region, and the second filler sequence may be located between the polyadenylation signal sequence region and 3′ ITR, In some embodiments, a viral genome may comprise two filler sequences, the first filler sequence may be located between the intron region and MCS region, and the second filler sequence may he located between the MCS region and exon region. In some embodiments, a viral genome may comprise two filler sequences, the first filler sequence may be located between the intron region and MCS region, and the second filler sequence may be located between the MCS region and 3′ ITR, In some embodiments, a viral genome may comprise two filler sequences, the first filler sequence may be located between the intron region and MCS region, and the second filler sequence may be located between the exon region and 3′ ITR.

[0305] In some embodiments, a viral genome may comprise two filler sequences, the first filler sequence may be located between the intron region and exon region, and the second filler sequence may be located between the enhancer region and polyadenylation signal sequence region. In some embodiments, a viral genome may comprise two filler sequences, the first filler sequence may be located between the intron region and exon region, and the second filler sequence may be located between the enhancer region and MCS region. In some embodiments, a viral genome may comprise two filler sequences, the first filler sequence may be located between the intron region and exon region, and the second filler sequence may be located between the enhancer region and exon region. In some embodiments, a viral genome may comprise two filler sequences, the first filler sequence may be located between the intron region and exon region, and the second filler sequence may be located between the enhancer region and 3′ ITR. In some embodiments, a viral genome may comprise two filler sequences, the first filler sequence may be located between the intron region and exon region, and the second filler sequence may be located between the polyadenylation signal sequence region and MCS region. In some embodiments, a viral genome may comprise two filler sequences, the first filler sequence may be located between the intron region and exon region, and the second filler sequence may be located between the polyadenylation signal sequence region and exon region. In some embodiments, a viral genome may comprise two filler sequences, the first filler sequence may be located between the intron region and exon region, and the second filler sequence may be located between the polyadenylation signal sequence region and 3′ ITR. In some embodiments, a viral genome may comprise two filler sequences, the first filler sequence may be located between the intron region and exon region, and the second filler sequence may be located between the MCS region and exon region. In some embodiments, a viral genome may comprise two filler sequences, the first filler sequence may be located between the intron region and exon region, and the second filler sequence may be located between the MCS region and 3′ ITR, In some embodiments, a viral genome may comprise two filler sequences, the first filler sequence may be located between the intron region and exon region, and the second filler sequence may be located between the exon region and 3′ ITR.

[0306] In some embodiments, a viral genome may comprise two filler sequences, the first filler sequence may be located between the intron region and 3′ ITR, and the second filler sequence may be located between the enhancer region and polyadenylation signal sequence region. In some embodiments, a viral genome may comprise two filler sequences, the first filler sequence may be located between the intron region and 3′ ITR, and the second filler sequence may be located between the enhancer region and MCS region. In some embodiments, a viral genome may comprise two filler sequences, the first filler sequence may be located between the intron region and 3′ IFR, and the second filler sequence may be located between the enhancer region and exon region. In some embodiments, a viral genome may comprise two filler sequences, the first filler sequence may be located between the intron region and 3′ ITR, and the second filler sequence may be located between the enhancer region and 3′ ITR. In some embodiments, a viral genome may comprise two filler sequences, the first filler sequence may be located between the intron region and 3′ ITR, and the second filler sequence may be located between the polyadenylation signal sequence region and MCS region, In some embodiments, a viral genome may comprise two filler sequences, the first filler sequence may be located between the intron region and 3′ ITR, and the second filler sequence may be located between the polyadenylation signal sequence region and exon region. In some embodiments, a viral genome may comprise two filler sequences, the first filler sequence may be located between the intron region and 3′ ITR, and the second filler sequence may be located between the polyadenylation signal sequence region and 3′ ITR. In some embodiments, a viral genome may comprise two filler sequences, the first filler sequence may be located between the intron region and 3′ ITR, and the second filler sequence may be located between the MCS region and exon region. In some embodiments, a viral genome may comprise two filler sequences, the first filler sequence may be located between the intron region and 3′ ITR, and the second filler sequence may he located between the MCS region and 3′ ITR. In some embodiments, a viral genome may comprise two filler sequences, the first filler sequence may be located between the intron region and 3′ ITR, and the second filler sequence may be located between the exon region and 3′ ITR.

[0307] In some embodiments, a viral genome may comprise two filler sequences, the first filler sequence may be located between the enhancer region and polyadenylation signal sequence region, and the second filler sequence may be located between the polyadenylation signal sequence region and MCS region. In some embodiments, a viral genome may comprise two filler sequences, the first filler sequence may be located between the enhancer region and polyadenylation signal sequence region, and the second filler sequence may be located between the polyadenylation signal sequence region and exon region. In some embodiments, a viral genome may comprise two filler sequences, the first filler sequence may be located between the enhancer region and polyadenylation signal sequence region, and the second filler sequence may be located between the polyadenylation signal sequence region and 3′ ITR. In some embodiments, a viral genome may comprise two filler sequences, the first filler sequence may be located between the enhancer region and polyadenylation signal sequence region, and the second filler sequence may be located between the MCS region and exon region. In some embodiments, a viral genome may comprise two filler sequences, the first filler sequence may be located between the enhancer region and polyadenylation signal sequence region, and the second filler sequence may be located between the MCS region and 3′ ITR. In some embodiments, a viral genome may comprise two filler sequences, the first filler sequence may be located between the enhancer region and polyadenylation signal sequence region, and the second filler sequence may be located between the exon region and 3′ ITR.

[0308] In some embodiments, a viral genome may comprise two filler sequences, the first filler sequence may be located between the enhancer region and MCS region, and the second filler sequence may be located between the polyadenylation signal sequence region and MCS region. In some embodiments, a viral genome may comprise two filler sequences, the first filler sequence may be located between the enhancer region and MCS region, and the second filler sequence may be located between the polyadenylation signal sequence region and exon region. In some embodiments, a viral genome may comprise two filler sequences, the first filler sequence may be located between the enhancer region and MCS region, and the second filler sequence may be located between the polyadenylation signal sequence region and 3′ ITR. In some embodiments, a viral genome may comprise two filler sequences, the first filler sequence may be located between the enhancer region and MCS region, and the second filler sequence may be located between the MCS region and exon region. In some embodiments, a viral genome may comprise two filler sequences, the first filler sequence may be located between the enhancer region and MCS region, and the second filler sequence may be located between the MCS region and 3′ ITR, in some embodiments, a viral genome may comprise two filler sequences, the first filler sequence may be located between the enhancer region and MCS region, and the second filler sequence may be located between the exon region and 3′ ITR.

[0309] In some embodiments, a viral genome may comprise two filler sequences, the first filler sequence may be located between the enhancer region and exon region, and the second filler sequence may be located between the polyadenylation signal sequence region and MCS region. In some embodiments, a viral genome may comprise two filler sequences, the first filler sequence may be located between the enhancer region and exon region, and the second filler sequence may be located between the polyadenylation signal sequence region and exon region. In some embodiments, a viral genome may comprise two filler sequences, the first filler sequence may be located between the enhancer region and exon region, and the second filler sequence may be located between the polyadenylation signal sequence region and 3′ ITR, In some embodiments, a viral genome may comprise two filler sequences, the first filler sequence may be located between the enhancer region and exon region, and the second filler sequence may be located between the MCS region and exon region. In some embodiments, a viral genome may comprise two filler sequences, the first filler sequence may be located between the enhancer region and exon region, and the second filler sequence may be located between the MCS region and 3′ ITR. In some embodiments, a viral genome may comprise two filler sequences, the first filler sequence may be located between the enhancer region and exon region, and the second filler sequence may be located between the exon region and 3′ ITR.

[0310] In some embodiments, a viral genome may comprise two filler sequences, the first filler sequence may be located between the enhancer region and 3′ ITR, and the second filler sequence may be located between the polyadenylation signal sequence region and MCS region. In some embodiments, a viral genome may comprise two filler sequences, the first filler sequence may be located between the enhancer region and 3′ ITR, and the second filler sequence may be located between the polyadenylation signal sequence region and exon region. In some embodiments, a viral genome may comprise two filler sequences, the first filler sequence may be located between the enhancer region and 3′ ITR, and the second filler sequence may be located between the polyadenylation signal sequence region and 3′ ITR, In some embodiments, a viral genome may comprise two filler sequences, the first filler sequence may be located between the enhancer region and 3′ ITR, and the second filler sequence may be located between the MCS region and exon region. In some embodiments, a viral genome may comprise two filler sequences, the first filler sequence may be located between the enhancer region and 3′ ITR, and the second filler sequence may be located between the MCS region and 3′ ITR. In some embodiments, a viral genome may comprise two filler sequences, the first filler sequence may be located between the enhancer region and 3′ ITR, and the second filler sequence may be located between the exon region and 3′ ITR.

[0311] In some embodiments, a viral genome may comprise two filler sequences, the first filler sequence may be located between the polyadenylation signal sequence region and MCS region, and the second filler sequence may be located between the MCS region and exon region. In some embodiments, a viral genome may comprise two filler sequences, the first filler sequence may be located between the polyadenylation signal sequence region and MCS region, and the second filler sequence may be located between the MCS region and 3′ ITR. In some embodiments, a viral genome may comprise two filler sequences, the first filler sequence may be located between the polyadenylation signal sequence region and MCS region, and the second filler sequence may be located between the exon region and 3′ ITR.

[0312] In some embodiments, a viral genome may comprise two filler sequences, the first filler sequence may be located between the polyadenylation signal sequence region and exon region, and the second filler sequence may be located between the MCS region and exon region. In some embodiments, a viral genome may comprise two filler sequences, the first filler sequence may be located between the polyadenylation signal sequence region and exon region, and the second filler sequence may be located between the MCS region and 3′ ITR. In some embodiments, a viral genome may comprise two filler sequences, the first filler sequence may be located between the polyadenylation signal sequence region and exon region, and the second filler sequence may be located between the exon region and 3′ ITR.

[0313] In some embodiments, a viral genome may comprise two filler sequences, the first filler sequence may be located between the polyadenylation signal sequence region and 3′ ITR, and the second filler sequence may be located between the MCS region and exon region. In some embodiments, a viral genome may comprise two filler sequences, the first filler sequence may be located between the polyadenylation signal sequence region and and the second filler sequence may be located between the MCS region and 3′ ITR. In some embodiments, a viral genome may comprise two filler sequences, the first filler sequence may be located between the polyadenylation signal sequence region and 3′ ITR, and the second filler sequence may be located between the exon region and 3′ ITR.

[0314] In some embodiments, a viral genome may comprise two filler sequences, the first filler sequence may be located between the MCS region and exon region, and the second filler sequence may be located between the exon region and 3′ ITR.

### Payloads of the Disclosure

[0315] The AAV particles of the present disclosure comprise at least one payload region. As used herein, “payload” or “payload region” refers to one or more polynucleotides or polynucleotide regions encoded by or within a viral genome or an expression product of such polynucleotide or polynucleotide region, e.g., a transgene, a polynucleotide encoding a polypeptide or multi-polypeptide or a modulatory nucleic acid or regulatory nucleic acid. Payloads of the present disclosure typically encode modulatory polynucleotides or fragments or variants thereof.

[0316] The payload region may be constructed in such a way as to reflect a region similar to or mirroring the natural organization of an mRNA.

[0317] The payload region may comprise a combination of coding and non-coding nucleic acid sequences.

[0318] In some embodiments, the AAV payload region may encode a coding or non-coding RNA.

[0319] In some embodiments, the AAV particle comprises a viral genome with a payload region comprising nucleic acid sequences encoding a siRNA, miRNA or other RNAi agent. In such an embodiment, a viral genome encoding more than one polypeptide may be replicated and packaged into a viral particle. A target cell transduced with a viral particle may express the encoded siRNA, miRNA or other RNAi agent inside a single cell.

### Modulatory Polynucleotides

[0320] In some embodiments, modulatory polynucleotides, e.g., RNA or DNA molecules, may be used to treat neurodegenerative disease, in particular, Huntington's Disease (HD). As used herein, a “modulatory polynucleotide” is any nucleic acid sequence(s) which functions to modulate (either increase or decrease) the level or amount of a target gene, e.g., mRNA or protein levels.

[0321] In some embodiments, the modulatory polynucleotides may comprise at least one nucleic acid sequence encoding at least one siRNA molecule. The nucleic acids may, independently if there is more than one, encode 1, 2, 3, 4, 5, 6, 7, 8, 9, or more than 9 siRNA molecules.

[0322] In some embodiments, the molecular scaffold may be located downstream of a CMV promoter, fragment or variant thereof.

[0323] In some embodiments, the molecular scaffold may be located downstream of a CBA promoter, fragment or variant thereof.

[0324] In some embodiments, the molecular scaffold may be a natural pri-miRNA scaffold located downstream of a CMV promoter. As a non-limiting example, the natural pri-miRNA scaffold is derived from the human miR155 scaffold.

[0325] In some embodiments, the molecular scaffold may be a natural pri-miRNA scaffold located downstream of a CBA promoter.

[0326] In some embodiments, the selection of a molecular scaffold and modulatory polynucleotide is determined by a method of comparing modulatory polynucleotides in pri-miRNA (see e.g., the method described by Miniarikova et al. Design, Characterization, and Lead Selection of Therapeutic miRNAs Targeting Huntingtin for Development of Gene Therapy for Huntington's Disease. Molecular Therapy-Nucleic Acids (2016) 5, e297 and International Publication No. WO2016102664; the contents of each of which are herein incorporated by reference in their entireties). The modulatory polynucleotide may, but it not limited to, targeting exon 1, CAG repeats, SNP rs362331 in exon 50 and/or SNP rs362307 in exon 67. To evaluate the activities of the modulatory polynucleotides, the molecular scaffold used which may be used is a human pri-miRNA scaffold (e.g., miR155 scaffold) and the promoter may be CMV. The activity may be determined in vitro using HEK293T cells and a reporter (e.g., Luciferase). For exon 1 targeting, the modulatory polynucleotide is determined to be efficient at HTT knockdown if the knockdown is 80% or greater. For CAG targeting, the modulatory polynucleotide is determined to be efficient at HTT knockdown if the knockdown is at least 60%, For SNP targeting, the modulatory polynucleotide is determined to be efficient at HTT knockdown if the knockdown is at least 60%. For allele selectivity for CAG repeats or SNP targeting the modulatory polynucleotides may comprise at least 1 substitution in order to improve allele selectivity. As a non-limiting example, substitution may be a G or C replaced with a T or corresponding U and A or T/U replaced by a C.

[0327] In order to evaluate the optimal molecular scaffold for the modulatory polynucleotide, the modulatory polynucleotide is used in pri-miRNA scaffolds with a CAG promoter. The constructs are co-transfected with a reporter (e.g., luciferase reporter) at 50 ng. Constructs with greater than 80% knockdown at 50 ng co-transfection are considered efficient. In one aspect, the constructs with strong guide-strand activity are preferred. The molecular scaffolds can be processed in HEK293T cells by NGS to determine guide-passenger ratios, and processing variability.

[0328] To evaluate the molecular scaffolds and modulatory polynucleotides in vivo the molecular scaffolds comprising the modulatory polynucleotides are packaged in AAV (e.g., the serotype may be AAV5 (see e.g., the method and constructs described in WO2015060722, the contents of which are herein incorporated by reference in their entirety)) and administered to an in vivo model (e.g., Hu128/21 HD mouse) and the guide-passenger ratios, 5′ and 3′ end processing, reversal of guide and passenger strands, and knockdown can be determined in different areas of the model.

[0329] In some embodiments, the selection of a molecular scaffold and modulatory polynucleotide is determined by a method of comparing modulatory polynucleotides in natural pri-miRNA and synthetic pri-miRNA. The modulatory polynucleotide may, but it not limited to, targeting an exon other than exon 1. To evaluate the activities of the modulatory polynucleotides, the molecular scaffold is used with a CBA promoter. In one aspect, the activity may be determined in vitro using HEK293T cells, HeLa cell and a reporter (e.g., Luciferase) and knockdown efficient modulatory polynucleotides showed HTT knockdown of at least 80% in the cell tested. Additionally, the modulatory polynucleotides which are considered most efficient showed low to no significant passenger strand (p-strand) activity. In another aspect, the endogenous HTT knockdown efficacy is evaluated by transfection in vitro using, HEK293T cells, HeLa cell and a reporter. Efficient modulatory polynucleotides show greater than 50% endogenous HTT knockdown. In yet another aspect, the endogenous HTT knockdown efficacy is evaluated in different cell types (e.g., HEK293, HeLa, primary astrocytes, U251 astrocytes, SH-SY5Y neuron cells, FRhK-4 rhesus macaque (Macaca mulatta) kidney cells, and fibroblasts from HD patients) by infection (e.g., AAV2). Efficient modulatory polynucleotides show greater than 60% endogenous HTT knockdown.

[0330] To evaluate the molecular scaffolds and modulatory polynucleotides in vivo the molecular scaffolds comprising the modulatory polynucleotides are packaged in AAV and administered to an in vivo model (e.g., YAC128 HD mouse) and the guide-passenger ratios, 5′ and 3′ end processing, ratio of guide to passenger strands, and knockdown can be determined in different areas of the model (e.g., tissue regions). The molecular scaffolds can be processed from in vivo samples by NGS to determine guide-passenger ratios, and processing variability.

[0331] In some embodiments, the modulatory polynucleotide is designed using at least one of the following properties: loop variant, seed mismatch/bulge/wobble variant, stem mismatch, loop variant and vassal stem mismatch variant, seed mismatch and basal stem mismatch variant, stein mismatch and basal stem mismatch variant, seed wobble and basal stem wobble variant, or a stem sequence variant.

siRNA Molecules

[0332] The present disclosure relates to RNA interference (RNAi.) induced inhibition of gene expression for treating neurodegenerative disorders. Provided herein are siRNA duplexes or encoded dsRNA that target the HTT gene (referred to herein collectively as “siRNA molecules”). Such siRNA duplexes or encoded dsRNA can reduce or silence HTT gene expression in cells, for example, medium spiny neurons, cortical neurons and/or astrocytes, thereby, ameliorating symptoms of Huntington's Disease (HD).

[0333] RNAi (also known as post-transcriptional gene silencing (PTGS), quelling, or co-suppression) is a post-transcriptional gene silencing process in which RNA molecules, in a sequence specific manner, inhibit gene expression, typically by causing the destruction of specific mRNA molecules. The active components of RNAi are short/small double stranded RNAs (dsRNAs), called small interfering RNAs (siRNAs), that typically contain 15-30 nucleotides (e.g., 19 to 25, 19 to 24 or 19-21 nucleotides) and 2 nucleotide 3′ overhangs and that match the nucleic acid sequence of the target gene. These short RNA species may be naturally produced in vivo by Dicer-mediated cleavage of larger dsRNAs and they are functional in mammalian cells.

[0334] Naturally expressed small RNA molecules, known as microRNAs (miRNAs), elicit gene silencing by regulating the expression of mRNAs. The miRNAs containing RNA Induced Silencing Complex (RISC) targets mRNAs presenting a perfect sequence complementarity with nucleotides 2-7 in the 5′ region of the miRNA which is called the seed region, and other base pairs with its 3′ region. miRNA mediated down regulation of gene expression may be caused by cleavage of the target mRNAs, translational inhibition of the target mRNAs, or mRNA decay. miRNA targeting sequences are usually located in the 3′ ITR of the target mRNAs. A single miRNA may target more than 100 transcripts from various genes, and one mRNA may be targeted by different miRNAs.

[0335] siRNA duplexes or dsRNA targeting a specific mRNA may be designed and synthesized in vitro and introduced into cells for activating RNAi processes. Elbashir et al. demonstrated that 21-nucleotide siRNA duplexes (termed small interfering RNAs) were capable of effecting potent and specific gene knockdown without inducing immune response in mammalian cells (Elbashir SM et al., Nature, 2001, 411, 494-498). Since this initial report, post-transcriptional gene silencing by siRNAs quickly emerged as a powerful tool for genetic analysis in mammalian cells and has the potential to produce novel therapeutics.

[0336] RNAi molecules which were designed to target against a nucleic acid sequence that encodes poly-glutamine repeat proteins which cause poly-glutamine expansion diseases such as Huntington's Disease, are described in U.S. Pat. Nos. 9,169,483 and 9,181,544 and International Patent Publication No. WO2015179525, the content of each of which is herein incorporated by reference in their entirety. U.S. Pat. Nos. 9,169,483 and 9,181,544 and International Patent Publication No. WO2015179525 each provide isolated RNA duplexes comprising a first strand of RNA (e.g., 15 contiguous nucleotides) and second strand of RNA (e.g., complementary to at least 12 contiguous nucleotides of the first strand) where the RNA duplex is about 15 to 30 base pairs in length. The first strand of RNA and second strand of RNA may be operably linked by an RNA loop (˜4 to 50 nucleotides) to form a hairpin structure which may be inserted into an expression cassette. Non-limiting examples of loop portions include SEQ ID NO: 9-14 of U.S. Pat. No. 9,169,483, the content of which is herein incorporated by reference in its entirety. Non-limiting examples of strands of RNA which may be used, either full sequence or part of the sequence, to form RNA duplexes include SEQ ID NO: 1-8 of U.S. Pat. No. 9,169,483 and SEQ ID NO: 1-11, 33-59, 208-210, 213-215 and 218-221 of U.S. Pat. No. 9,181,544, the contents of each of which is herein incorporated by reference in its entirety. Non-limiting examples of RNAi molecules include SEQ ID NOs: 1-8 of U.S. Pat. No. 9,169,483, SEQ ID NOs: 1-11, 33-59, 208-210, 213-215 and 218-221 of U.S. Pat. No. 9,181,544 and SEQ ID NOs: 1, 6, 7, and 35-38 of international Patent Publication No. WO2015179525, the contents of each of which is herein incorporated by reference in their entirety.

[0337] In vitro synthetized siRNA molecules may be introduced into cells in order to activate RNAi. An exogenous siRNA duplex, when it is introduced into cells, similar to the endogenous dsRNAs, can be assembled to form the RNA Induced Silencing Complex (RISC), a multiunit complex that interacts with RNA sequences that are complementary to one of the two strands of the siRNA duplex (i.e., the antisense strand). During the process, the sense strand (or passenger strand) of the siRNA is lost from the complex, while the antisense strand (or guide strand) of the siRNA is matched with its complementary RNA. In particular, the targets of siRNA containing RISC complexes are mRNAs presenting a perfect sequence complementarity. Then, siRNA mediated gene silencing occurs by cleaving, releasing and degrading the target.

[0338] The siRNA duplex comprised of a sense strand homologous to the target mRNA and an antisense strand that is complementary to the target mRNA offers much more advantage in terms of efficiency for target RNA destruction compared to the use of the single strand (ss)-siRNAs (e.g. antisense strand RNA or antisense oligonucleotides). In many cases, it requires higher concentration of the ss-siRNA to achieve the effective gene silencing potency of the corresponding duplex.

[0339] Any of the foregoing molecules may be encoded by a viral genome.

Design and Sequences of siRNA Duplexes Targeting HTT Gene

[0340] The present disclosure provides small interfering RNA (siRNA) duplexes (and modulatory polynucleotides encoding them) that target HTT mRNA to interfere with HTT gene expression and/or HTT protein production.

[0341] The encoded siRNA duplex of the present disclosure contains an antisense strand and a sense strand hybridized together forming a duplex structure, wherein the antisense strand is complementary to the nucleic acid sequence of the targeted HTT gene, and wherein the sense strand is homologous to the nucleic acid sequence of the targeted HTT gene. In some aspects, the 5′ end of the antisense strand has a 5′ phosphate group and the 3′ end of the sense strand contains a 3′hydroxyl group. In. other aspects, there are none, one or 2 nucleotide overhangs at the 3′end of each strand.

[0342] Some guidelines for designing siRNAs have been proposed in the art. These guidelines generally recommend generating a 19-nucleotide duplexed region, symmetric 2-3 nucleotide 3′overhangs, 5′-phosphate and 3′-hydroxyl groups targeting a region in the gene to be silenced. Other rules that may govern siRNA sequence preference include, but are not limited to, A/U at the 5′ end of the antisense strand; (ii) G/C at the 5′ end of the sense strand; (iii) at least five A/U residues in the 5′ terminal one-third of the antisense strand; and (iv) the absence of any GC stretch of more than 9 nucleotides in length. In accordance with such consideration, together with the specific sequence of a target gene, highly effective siRNA molecules essential for suppressing mammalian target gene expression may be readily designed.

[0343] According to the present disclosure, siRNA molecules (e.g., siRNA duplexes or encoded dsRNA) that target the HTT gene are designed. Such siRNA molecules can specifically, suppress HTT gene expression and protein production. In some aspects, the siRNA molecules are designed and used to selectively “knock out” HTT gene variants in cells, i.e., mutated HTT transcripts that are identified in patients with HD disease. In some aspects, the siRNA molecules are designed and used to selectively “knock down” HTT gene variants in cells. In other aspects, the siRNA molecules are able to inhibit or suppress both the wild type and mutated HTT gene.

[0344] In some embodiments, an siRNA molecule of the present disclosure comprises a sense strand and a complementary antisense strand in which both strands are hybridized together to form a duplex structure. The antisense strand has sufficient complementarity to the HTT mRNA sequence to direct target-specific RNAi, i.e., the siRNA molecule has a sequence sufficient to trigger the destruction of the target mRNA by the RNAi machinery or process.

[0345] In some embodiments, an siRNA molecule of the present disclosure comprises a sense strand and a complementary antisense strand in which both strands are hybridized together to form a duplex structure and where the start site of the hybridization to the HTT mRNA is between nucleotide 100 and 7000 on the HTT mRNA sequence. As a non-limiting example, the start site may be between nucleotide 100-150, 150-200, 200-250, 250-300, 300-350, 350-400, 400-450, 450-500, 500-550, 550-600, 600-650, 650-700, 700-70, 750-800, 800-850, 850-900, 900-950, 950-1000, 1000-1050, 1050-1100, 1100-1150, 1150-1200, 1200-1250, 1250-1300, 1300-1350, 1350-1400, 1400-1450, 1450-1500, 1500-1550, 1550-1600, 1600-1650, 1650-1700, 1700-1750, 1750-1800, 1800-1850, 1850-1900, 1900-1950, 1950-2000, 2000-2050, 2050-2100, 2100-2150, 2150-2200, 2200-2250, 2250-2300, 2300-2350, 2350-2400, 2400-2450, 2450-2500, 2500-2550, 2550-2600, 2600-2650, 2650-2700, 2700-2750, 2750-2800, 2800-2850, 2850-2900, 2900-2950, 2950-3000, 3000-3050, 3050-3100, 3100-3150, 3150-3200, 3200-3250, 3250-3300, 3300-3350, 3350-3400, 3400-3450, 3450-3500, 3500-3550, 3550-3600, 3600-3650, 3650-3700, 3700-3750, 3750-3800, 3800-3850, 3850-3900, 3900-3950, 3950-4000, 4000-4050, 4050-4100, 4100-4150, 4150-4200, 4200-4250, 4250-4300, 4300-4350, 4350-4400, 4400-4450, 4450-4500, 4500-4550, 4550-4600, 4600-4650, 4650-4700, 4700-4750, 4750-4800, 4800-4850, 4850-4900, 4900-4950, 4950-5000, 5000-5050, 5050-5100, 5100-5150, 5150-5200, 5200-5250, 5250-5300, 5300-5350, 5350-5400, 5400-5450, 5450-5500, 5500-5550, 5550-5600, 5600-5650, 5650-5700, 5700-5750, 5750-5800, 5800-5850, 5850-5900, 5900-5950, 5950-6000, 6000-6050, 6050-6100, 6100-6150, 6150-6200, 6200-6250, 6250-6300, 6300-6350, 6350-6400, 6400-6450, 6450-6500, 6500-6550, 6550-6600, 6600-6650, 6650-6700, 6700-6750, 6750-6800, 6800-6850, 6850-6900, 6900-6950, 6950-7000, 7000-7050, 7050-7100, 7100-7150, 7150-7200, 7200-7250, 7250-7300, 7300-7350, 7350-7400, 7400-7450, 7450-7500, 7500-7550, 7550-7600, 7600-7650, 7650-7700, 7700-7750, 7750-7800, 7800-7850, 7850-7900, 7900-7950, 7950-8000, 8000-8050, 8050-8100, 8100-8150, 8150-8200, 8200-8250, 8250-8300, 8300-8350, 8350-8400, 8400-8450, 8450-8500, 8500-8550, 8550-8600, 8600-8650, 8650-8700, 8700-8750, 8750-8800, 8800-8850, 8850-8900, 8900-8950, 8950-9000, 9000-9050, 9050-9100, 9100-9150, 9150-9200, 9200-9250, 9250-9300, 9300-9350, 9350-9400, 9400-9450, 9450-9500, 9500-9550, 9550-9600, 9600-9650, 9650-9700, 9700-9750, 9750-9800, 9800-9850, 9850-9900, 9900-9950, 9950-10000, 10000-10050, 10050-10100, 10100-10150, 10150-10200, 10200-10250, 10250-10300, 10300-10350, 10350-10400, 10400-10450, 10450-10500, 10500-10550, 10550-10600, 10600-10650, 10650-10700, 10700-10750, 10750-10800, 10800-10850, 10850-10900, 10900-10950, 10950-11000, 11050-11100, 11100-11150, 11150-11200, 11200-11250, 11250-11300, 11300-11350, 11350-11400, 11400-11450, 11450-11500, 11500-11550, 11550-11600, 11600-11650, 11650-11700, 11700-11750, 11750-11800, 11800-11850, 11850-11900, 11900-11950, 11950-12000, 12000-12050, 12050-12100, 12100-12150, 12150-12200, 12200-12250, 12250-12300, 12300-12350, 12350-12400, 12400-12450, 12450-12500, 12500-12550, 12550-12600, 12600-12650, 12650-12700, 12700-12750, 12750-12800, 12800-12850, 12850-12900, 12900-12950, 12950-13000, 13050-13100, 13100-13150, 13150-13200, 13200-13250, 13250-13300, 13300-13350, 13350-13400, 13400-13450, and 13450-13500 on the HTT mRNA sequence. As yet another non-limiting example, the start site may be nucleotide 315, 316, 317, 318, 319, 320, 321, 322, 323, 324, 325, 326, 327, 328, 329, 330, 331, 332. 333, 334, 335, 336, 337, 338, 339. 340, 341, 342, 343, 344, 345, 346, 347, 348, 349, 350, 595, 596, 597, 598, 599, 600, 601, 602, 603, 604, 605, 606, 607, 608, 609, 610, 611, 612, 613, 614, 615, 616, 617, 618, 619, 620, 621, 622, 623, 624, 625, 715, 716, 717, 718, 719, 720, 721, 722, 723, 724, 725, 875, 876, 877, 878, 879, 880, 881, 882, 883, 884, 885, 886, 887, 888, 889. 890, 891, 892, 893, 894, 895, 896, 897, 898. 899, 900, 1375, 1376, 1377, 1378, 1379, 1380, 1381, 1382, 1383, 1384, 1385, 1386, 1387, 1388, 1389, 1390, 1391, 1392, 1393, 1394, 1395, 1396, 1397, 1398, 1399. 1400, 1401, 1402, 1403, 1404, 1405, 1406, 1407, 1408, 1409, 1410, 1411, 1412, 1413, 1414, 1415, 1416, 1417, 1418, 1419, 1420, 1421, 1422, 1423, 1424, 1425, 1426, 1427, 1428, 1429, 1430, 1431, 1432, 1433, 1434, 1435, 1436, 1437, 1438, 1439, 1440, 1441, 1442, 1443, 1444, 1445, 1446, 1447, 1448, 1449, 1450, 1660, 1661, 1662, 1663, 1664, 1665, 1666, 1667, 1668, 1669, 1670, 1671, 1672, 1673, 1674, 1675, 2050, 2051, 2052, 2053, 2054, 2055, 2056, 2057, 2058, 2059, 2060, 2061, 2062, 2063, 2064, 2065, 2066, 2067, 2068, 2069, 2070, 2071, 2072, 2073, 2074, 2075, 2076, 2077, 2078, 2079, 2080, 2081, 2082, 2083, 2084, 2085, 2086, 2087, 2088, 2089, 2090, 2091, 2092, 2093, 2094, 2095, 2096, 2097, 2098, 2099, 2100, 2580, 2581, 2582, 2583, 2584, 2585, 2586, 2587, 2588. 2589, 2590, 2591, 2592, 2593, 2594, 2595, 2596, 2597, 2598, 2599, 2600, 2601, 2602, 2603, 2604, 2605, 4525, 4526, 4527, 4528, 4529, 4530, 4531, 4532, 4533, 4534, 4535, 4536, 4537, 4538, 4539, 4540, 4541, 4542, 4543, 4544, 4545, 4546, 4547, 4548, 4549, 4550, 4575, 4576, 4577, 4578, 4579, 4580, 4581, 4582, 4583, 4584, 4585, 4586, 4587, 4588, 4589, 4590, 4591, 4592, 4593, 4594, 4595, 4596, 4597, 4598, 4599, 4600, 4850, 4851, 4852, 4853, 4854, 4855, 4856, 4857, 4858, 4859, 4860, 4861, 4862, 4863, 4864, 4865, 4866, 4867, 4868, 4869, 4870, 4871, 4872, 4873, 4874, 4875, 4876, 4877, 4878, 4879, 4880, 4881, 4882, 4883, 4884, 4885, 4886, 4887, 4888, 4889, 4890, 4891, 4892, 4893, 4894, 4895, 4896, 4897, 4898, 4899, 4900, 5460, 5461, 5462, 5463, 5464, 5465, 5466, 5467, 5468, 5469, 5470, 5471, 5472, 5473, 5474, 5475, 5476, 5477, 5478, 5479, 5480, 6175, 6176, 6177, 6178, 6179, 6180, 6181, 6182, 6183, 6184, 6185, 6186, 6187, 6188, 6189, 6190, 6191, 6192, 6193, 6194, 6195, 6196, 6197, 6198, 6199, 6200, 6315, 6316, 6317, 6318, 6319, 6320, 6321, 6322, 6323, 6324, 6325, 6326, 6327, 6328, 6329, 6330, 6331, 6332, 6333, 6334, 6335, 6336, 6337, 6338, 6339, 6340, 6341, 6342, 6343, 6344, 6345, 6600, 6601, 6602, 6603, 6604, 6605, 6606, 6607, 6608, 6609, 6610, 6611, 6612, 6613, 6614, 6615, 6725, 6726, 6727, 6728, 6729, 6730, 6731, 6732, 6733, 6734, 6735, 6736, 6737, 6738, 6739, 6740, 6741, 6742, 6743, 6744, 6745, 6746, 6747, 6748, 6749, 6750, 6751, 6752, 6753, 6754, 6755, 6756, 6757, 6758, 6759, 6760, 6761, 6762, 6763, 6764, 6765, 6766, 6767, 6768, 6769, 6770, 6771, 6772, 6773, 6774, 6775, 7655, 7656, 7657, 7658, 7659, 7660, 7661, 7662, 7663, 7664, 7665, 7666, 7667, 7668, 7669, 7670, 7671, 7672, 8510, 8511, 8512, 8513, 8514, 8515, 8516, 8715, 8716, 8717, 8718, 8719, 8720, 8721, 8722, 8723, 8724, 8725, 8726, 8727, 8728, 8729, 8730, 8731, 8732, 8733, 8734, 8735, 8736, 8737, 8738, 8739, 8740, 8741, 8742, 8743, 8744, 8745, 9250, 9251, 9252, 9253, 9254, 9255, 9256, 9257, 9258, 9259, 9260, 9261, 9262, 9263, 9264, 9265, 9266, 9267, 9268, 9269, 9270, 9480, 9481, 9482, 9483, 9484, 9485, 9486, 9487, 9488, 9489, 9490, 9491, 9492, 9493, 9494, 9495, 9496, 9497, 9498, 9499, 9500, 9575, 9576, 9577, 9578, 9579, 9580, 9581, 9582, 9583, 9584, 9585, 9586, 9587, 9588, 9589, 9590, 10525, 10526, 10527, 10528, 10529, 10530, 10531, 10532, 10533, 10534, 10535, 10536, 10537, 10538, 10539, 10540, 11545, 11546, 11547, 11548, 11549, 11550, 11551, 11552, 11553, 11554, 11555, 11556, 11557, 11558, 11559, 11560, 11875, 11876, 11877, 11878, 11879, 11880, 11881, 11882, 11883, 11884, 11885, 11886, 11887, 11888, 11889, 11890, 11891, 11892, 11893, 11894, 11895, 11896, 11897, 11898, 11899, 11900, 11915, 11916, 11917, 11918, 11919, 11920, 11921, 11922, 11923, 11924, 11925, 11926, 11927, 11928, 11929, 11930, 11931, 11932, 11933, 11934, 11935, 11936, 11937, 11938, 11939, 11940, 13375, 13376, 13377, 13378, 13379, 13380, 13381, 13382, 13383, 13384, 13385, 13386, 13387, 13388, 13389 and 13390 on the HTT mRNA sequence.

[0346] In some embodiments, the antisense strand and target mRNA sequences have 100% complementarity. The antisense strand may be complementary to any part of the target mRNA sequence.

[0347] In other embodiments, the antisense strand and target mRNA sequences comprise at least one mismatch. As a non-limiting example, the antisense strand and the target mRNA sequence have at least 30%, 40%, 50%, 60%, 70%, 80%, 81%, 82%, 83%, 84%, 85%, 86%, 87%, 88%, 89%, 90%, 91%, 92%, 93%, 94%, 95%, 96%, 97%, 98%, or 99% or at least 20-30%, 20-40%, 20-50%, 20-60%, 20-70%, 20-80%, 20-90%, 20-95%, 20-99%, 30-40%, 30-50%, 30-60%, 30-70%, 30-80%, 30-90%, 30-95%, 30-99%, 40-50%, 40-60%, 40-70%, 40-80%, 40-90%, 40-95%, 40-99%, 50-60%, 50-70%, 50-80%, 50-90%, 50-95%, 50-99%, 60-70%, 60-80%, 60-90%, 60- 95%, 60-99%, 70-80%, 70-90%, 70-95%, 70-99%, 80-90%, 80-95%, 80-99%, 90-95%, 90-99% or 95-99% complementarity.

[0348] In some embodiments, an siRNA or dsRNA includes at least two sequences that are complementary to each other.

[0349] According to the present disclosure, the encoded siRNA molecule has a length from about 10-50 or more nucleotides, i.e., each strand comprising 10-50 nucleotides (or nucleotide analogs). Preferably, the siRNA molecule has a length from about 15-30, e.g., 15, 16, 17, 18, 19, 20, 21, 22, 23, 24, 25, 26, 27, 28, 29, or 30 nucleotides in each strand, wherein one of the strands is sufficiently complementarily to a target region. In some embodiments, each strand of the siRNA molecule has a length from about 19 to 25, 19 to 24 or 19 to 21 nucleotides. In some embodiments, at least one strand of the siRNA molecule is 19 nucleotides in length. In some embodiments, at least one strand of the siRNA molecule is 20 nucleotides in length. In some embodiments, at least one strand of the siRNA molecule is 21 nucleotides in length. In some embodiments, at least one strand of the siRNA molecule is 22 nucleotides in length. In some embodiments, at least one strand of the siRNA molecule is 23 nucleotides in length. In some embodiments, at least one strand of the siRNA molecule is 24 nucleotides in length. In some embodiments, at least one strand of the siRNA molecule is 25 nucleotides in length.

[0350] In some embodiments, the encoded siRNA molecules of the present disclosure can be synthetic RNA duplexes comprising about 19 nucleotides to about 25 nucleotides, and two overhanging nucleotides at the 3′-end. In some aspects, the siRNA molecules may be unmodified RNA molecules. In other aspects, the siRNA molecules may contain at least one modified nucleotide, such as base, sugar or backbone modifications.

[0351] In some embodiments, the encoded siRNA molecules of the present disclosure may comprise a nucleotide sequence such as, but not limited to, the antisense (guide) sequences in Table 2 or a fragment or variant thereof. As a non-limiting example, the antisense sequence used in the siRNA molecule of the present disclosure is at least 30%, 40%, 50%, 60%, 70%, 80%, 81%, 82%, 83%, 84%, 85%, 86%, 87%, 88%, 89%, 90%, 91%, 92%, 93%, 94%, 95%, 96%, 97%, 98% or 99% or at least 20-30%, 20-40%, 20-50%, 20-60%, 20-70%, 20-80%, 20-90%, 20-95%, 20-99%, 30-40%, 30-50%, 30-60%, 30-70%, 30-80%, 30-90%, 30-95%, 30-99%, 40-50%, 40-60%, 40-70%, 40-80%, 40-90%, 40-95%, 40-99%, 50-60%, 50-70%, 50-80%, 50-90%, 50-95%, 50- 99%, 60-70%, 60-80%, 60-90%, 60-95%, 60-99%, 70-80%, 70-90%, 70-95%, 70-99%, 80-90%, 80-95%, 80-99%, 90-95%, 90-99% or 95-99% of a nucleotide sequence in Table 2, As another non-limiting example, the antisense sequence used in the siRNA molecule of the present disclosure comprises at least 3, 4, 5, 6, 7, 8, 9, 10, 11, 12, 13, 14, 15, 16, 17, 18, 19, 20, 21 or more than 21 consecutive nucleotides of a nucleotide sequence in Table 2. As yet another non-limiting example, the antisense sequence used in the siRNA molecule of the present disclosure comprises nucleotides 1 to 22, 1 to 21, 1 to 20, 1 to 19, 1 to 18, 1 to 17, 1 to 16, 1 to 15, 1to 14, 1 to 13, 1 to 12, 1 to 11, 1 to 10, 1 to 9, 1 to 8, 2 to 22, 2 to 21, 2 to 20, 2 to 19, 2 to 18, 2 to 17, 2 to 16, 2 to 15, 2 to 14, 2 to 13, 2 to 12, 2 to 11, 2 to 10, 2 to 9, 2 to 8, 3 to 22, 3 to 21, 3 to 20, 3 to 19, 3 to 18, 3 to 17, 3 to 16, 3 to 15, 3 to 14, 3 to 13, 3 to 12, 3 to 11, 3 to 10, 3 to 9, 3 to 8, 4 to 22, 4 to 21, 4 to 20, 4 to 19, 4 to 18, 4 to 17, 4 to 16, 4 to 15, 4 to 14, 4 to 13, 4 to 12, 4 to 11, 4 to 10, 4 to 9, 4 to 8, 5 to 22, 5 to 21, 5 to 20, 5 to 19, 5 to 18, 5 to 17, 5 to 16, 5 to 15, 5 to 14, 5 to 13, 5 to 12, 5 to 11, 5 to 10, 5 to 9, 5 to 8, 6 to 22, 6 to 21, 6 to 20, 6 to 19, 6 to 18, 6 to 17, 6 to 16, 6 to 15, 6 to 14, 6 to 13, 6 to 12, 6 to 11, 6 to 10, 7 to 22, 7 to 21, 7 to 20, 7 to 19, 7 to 18, 7 to 17, 7 to 16, 7 to 15, 7 to 14, 7 to 13, 7 to 12, 8 to 22, 8 to 21, 8 to 20, 8 to 19, 8 to 18, 8 to 17, 8 to 16, 8 to 15, 8 to 14, 8 to 13, 8 to 12, 9 to 22, 9 to 21, 9 to 20, 9 to 19, 9 to 18, 9 to 17, to 16, 9 to 15, 9 to 14, 10 to 22, 10 to 21, 10 to 20, 10 to 19, 10 to 18, 10 to 17, 10 to 16, 10 to 15, 10 to 14, 11 to 22, 11 to 21, 11 to 20, 11 to 19, 11 to 18, 11 to 17, 11 to 16, 11 to 15, 11 to 14, 12 to 22, 12 to 21, 12 to 20, 12 to 19, 12 to 18, 12 to 17, 12 to 16, 13 to 22, 13 to 21, 13 to 20, 13 to 19, 13 to 18, 13 to 17, 13 to 16, 14 to 22, 14 to 21, 14 to 20, 14 to 19, 14 to 18, 14 to 17, 15 to 22, 15 to 21, 15 to 20, 15 to 19, 15 to 18, 16 to 22, 16 to 21, 16 to 20, 17 to 22, 17 to 21, or 18 to 22 of the sequences in Table 2.

TABLE 2
Antisense Sequences

| Antisense | | SEQ |
|---|---|---|
| ID | Sequence | ID NO |
| A-2000 | UUAACGUCAGUUCAUAAACUU | 914 |
| A-2000dt | UUAACGUCAGUUCAUAAACdTdT | 915 |
| A-2001 | UGUCGGUACCGUCUAACACUU | 916 |
| A-2001dt | UGUCGGUACCGUCUAACACdTdT | 917 |
| A-2002 | UAAGCAUGGAGCUAGCAGGUU | 918 |
| A-2002dt | UAAGCAUGGAGCUAGCAGGdTdT | 919 |
| A-2003 | UACAACGAGACUGAAUUGCUU | 920 |
| A-2003dt | UACAACGAGACUGAAUUGCdTdT | 921 |
| A-2004 | UUCAGUUCAUAAACCUGGAUU | 922 |
| A-2004dt | UUCAGUUCAUAAACCUGGAdTdT | 923 |
| A-2005 | UAACGUCAGUUCAUAAACCUU | 924 |
| A-2005dt | UAACGUCAGUUCAUAAACCdTdT | 925 |
| A-2006 | UCCGGUCACAACAUUGUGGUU | 926 |
| A-2006dt | UCCGGUCACAACAUUGAGGdTdT | 927 |
| A-2007 | UUGCACGGUUCUUUGUGACUU | 928 |
| A-2007dt | UUGCACGGUUCUUUGUCAGdTdT | 929 |
| A-2008 | UUUUAUAACAAGAGGUUCAUU | 930 |
| A-2008dt | UUUUAUAACAAGAGGUUCAdTdT | 931 |
| A-2009 | UCCAAAUACUGGUUGUCGGUU | 932 |
| A-2009dt | UCCAAAUACUGGUUGUCGGdTdT | 933 |
| A-2010 | UAUUUUAGGAAUUCCAAUGUU | 934 |
| A-2010dt | UAUUUUAGGAAUUCCAAUGdTdT | 935 |
| A-2011 | UUUAGGAAUUCCAAUGAUCUU | 936 |
| A-2011dt | UUUAGGAAUUCCAAUGAUCdTdT | 937 |
| A-2012dt | UUAAUCUCUUUACUGAUAUdTdT | 938 |
| A-2013dt | GAUUUUAGGAAUUCCAAUGdTdT | 939 |
| A-2014 | UAAGCAUGGAGCUAGCAGGCUU | 940 |
| A-2015 | UAAGCAUGGAGCUAGCAGGGU | 941 |
| A-2016 | AAGGACUUGAGGGACUCGAAGU | 942 |
| A-2017 | AAGGACUUGAGGGACUCGAAG | 943 |
| A-2018 | AAGGACUUGAGGGACUCGA | 944 |
| A-2019 | AGGACUUGAGGGACUCGAAGU | 945 |
| A-2020 | GAGGACUUGAGGGACUCGAAGU | 946 |
| A-2021 | AAGGACUUGAGGGACUCGAAGU | 947 |
| A-2022 | AAGGACUUGAGGGACUCGAAGUU | 948 |
| A-2023 | AAGGACUUGAGGGACUCGAAG | 949 |
| A-2024 | AAGGACUUGAGGGACUCGA | 950 |
| A-2025 | AAGGACUUGAGGGACUCGAAGG | 951 |
| A-2026 | AAGGACUUGAGGGACUCGAAU | 952 |
| A-2027 | AAGGACUUGAGGGACUCGAAGA | 953 |
| A-2028 | AAGGACUUGAGGGACUCGAAGG | 954 |
| A-2029 | AAGGACUUGAGGGACUCGAAGGU | 955 |
| A-2030 | AAGGACUUGAGGGACUCGAAGGA | 956 |
| A-2031 | AAGGACUUGAGGGACUCGAAG | 957 |
| A-2032 | AAGGACUUGAGGGACUCGAAGU | 958 |
| A-2033 | AAGGACUUGAGGGACUCGA | 959 |
| A-2034 | AAGGACUUGAGGGACUCGAAGGA | 960 |
| A-2035 | AAGGACUUGAGGGACUCGAAGG | 961 |
| A-2036 | AAGGACUUGAGGGACUCGAAGGAU | 962 |
| A-2037 | AAGGACUUGAGGGACUCGAAGGAUU | 963 |
| A-2038 | AAGGACUUGAGGGACUCGAAG | 964 |
| A-2039 | AAGGACUUGAGGGACUCGAAGGAA | 965 |
| A-2040 | GAUGAAGUGCACACAUUGGAUGA | 966 |
| A-2041 | GAUGAACUGCACACAUUGGAUG | 967 |
| A-2042 | GAUGAAUUGCACACAGUAGAUGA | 968 |
| A-2043 | AAGGACUUGAGGGACUCGAAGGUU | 969 |
| A-2044 | AAGGACUUGAGGGACUCGAAGGUUU | 970 |
| A-2045 | AAGGACUUGAGGGACUCGAAGGU | 971 |
| A-2046 | AAGGACUUGAGGGACUCGAAGGUUUU | 972 |
| A-2047 | AAGGACUUGAGGGACUCGAAGGUUUUU | 973 |
| A-2048 | AAGGACUUGAGGGACUCGAAGG | 974 |
| A-2049 | UAAGGACUUGAGGGACUCGAAG | 975 |
| A-2050 | AAGGACUUGAGGGACUCGAAG | 976 |
| A-2051 | AAGGACUUGAGGGACUCGAAGU | 977 |
| A-2052 | AAGGACUUGAGGGACUCGAAGACGAGUCCC | 978 |
| A-2053 | AAGGACUUGAGGGACUCGAAGACGAGUCCCA | 979 |
| A-2054 | AAGGACUUGAGGGACUCGAAGACGAGUCCCU | 980 |
| A-2055 | GAUGAAGUGCACACAUUGGAUAC | 981 |
| A-2056 | GAUGAAGUGCACACAUUGGAUACA | 982 |
| A-2057 | GAUGAAGUGCACACAUUGGAUACAAUGUGU | 983 |
| A-2058 | GAUGAAGUGCACACAUUGGAU | 984 |
| A-2059 | GAUGAAGUGCACACAUUGGAUA | 985 |
| A-2060 | GAUGAAUUGCACACAGUAGAUAU | 986 |
| A-2061 | GAUGAAUUGCACACAGUAGAUAUAC | 987 |
| A-2062 | GAUGAAUUGCACACAGUAGAUAUACUGUGU | 988 |
| A-2063 | GAUGAAUUGCACACAGUAGAUAUA | 989 |
| A-2064 | AUGAAUUGCACACAGUAGAUAUAC | 990 |
| A-2065 | GAUGAAUUGCACACAGUAGAUA | 991 |
| A-2066 | GAUGAAUUGCACACAGUAGAUAUACUGUGU | 992 |
| A-2067 | UACAACGAGACUGAAUUGCU | 993 |
| A-2068 | ACAACGAGACUGAAUUGCUU | 994 |
| A-2069 | UCCGGUCACAACAUUGUGGUUC | 995 |
| A-2070 | UCCGGUCACAACAUUGUGGU | 996 |
| A-2071 | UCCGGUCACAACAUUGUG | 997 |
| A-2072 | CCGGUCACAACAUUGUGGUU | 998 |
| A-2073 | UUUUAUAACAAGAGGUUCAU | 999 |
| A-2074 | UUUAUAACAAGAGGUUCAUU | 1000 |
| A-2075 | UAAGCAUGGAGCUAGCAGGU | 1001 |
| A-2076 | AAGCAUGGAGCUAGCAGGUU | 1002 |
| A-2077 | CCAAAUACUGGUUGUCGGUU | 1003 |
| A-2078 | UACAACGAGACUGAAUUGCUUU | 1004 |
| A-2079 | UAACGUCAGUUCAUAAACCUUU | 1005 |
| A-2080 | GUCCGGUCACAACAUUGUGGUU | 1006 |
| A-2081 | UCCGGUCACAACAUUGUGGUUUG | 1007 |
| A-2082 | UCCGGUCACAACAUUGUGGUUU | 1008 |
| A-2083 | UCCGGUCACAACAUUGUGG | 1009 |
| A-2084 | UAAGCAUGGAGCUAGCAGGUUU | 1010 |
| A-2085 | AAGCAUGGAGCUAGCAGGUUU | 1011 |
| A-2086 | UCCAAAUACUGGUUGUCGGUUU | 1012 |
| A-2087 | CCAAAUACUGGUUGUCGGUUU | 1013 |

[0352] In some embodiments, the encoded siRNA molecules of the present disclosure may comprise a nucleotide sequence such as, but not limited to, the sense (passenger) sequences in Table 3 or a fragment or variant thereof. As a non-limiting example, the sense sequence used in the siRNA molecule of the present disclosure is at least 30%, 40%, 50%, 60%, 70%, 80%, 81%, 82%, 83%, 84%, 85%, 86%, 87%, 88%, 89%, 90%, 91%, 92%, 93%, 94%, 95%, 96%, 97%, 98% or 99% or at least 20-30%, 20-40%, 20-50%, 20-60%, 20-70%, 20-80%, 20-90%, 20-95%, 20-99%, 30-40%, 30-50%, 30-60%, 30-70%, 30-80%, 30-90%, 30-95%, 30-99%, 40-50%, 40-60%, 40-70%, 40-80%, 40-90%, 40-95%, 40-99%, 50-60%, 50-70%, 50-80%, 50-90%, 50-95%, 50-99%, 60-70%, 60-80%, 60-90%, 60-95%, 60-99%, 70-80%, 70-90%, 70-95%, 70-99%, 80-90%, 80-95%, 80-99%, 90-95%, 90-99% or 95-99% of a nucleotide sequence in Table 3. As another non-limiting example, the sense sequence used in the siRNA molecule of the present disclosure comprises at least 3, 4, 5, 6, 7, 8, 9, 10, 11, 12, 13, 14, 15, 16, 17, 18, 19, 20, 21 or more than 21 consecutive nucleotides of a nucleotide sequence in Table 3. As yet another non-limiting example, the sense sequence used in the siRNA molecule of the present disclosure comprises nucleotides 1 to 22, 1 to 21, 1 to 20, 1 to 19, 1 to 18, 1to 17, 1to 16, 1 to 15, 1 to 14, 1 to 13, 1 to 12, 1 to 11, 1 to 10, 1 to 9, 1 to 8, 2 to 22, 2 to 21, 2 to 20, 2 to 19, 2 to 18, 2 to 17, 2 to 16, 2 to 15, 2 to 14, 2 to 13, 2 to 12, 2 to 11, 2 to 10, 2 to 9, 2 to 8, 3 to 22, 3 to 21, 3 to 20, 3 to 19, 3 to 18, 3 to 17, 3 to 16, 3 to 15, 3 to 14, 3 to 13, 3 to 12, 3 to 11, 3 to 10, 3 to 9, 3 to 8, 4 to 22, 4 to 21, 4 to 20, 4 to 19, 4 to 18, 4 to 17, 4 to 16, 4 to 15, 4 to 14, 4 to 13, 4 to 12, 4 to 11, 4 to 10, 4 to 9, 4 to 8, 5 to 22, 5 to 21, 5 to 20, 5 to 19, 5 to 18, 5 to 17, 5 to 16, 5 to 15, 5 to 14, 5 to 13, 5 to 12, 5 to 11, 5 to 10, 5 to 9, 5 to 8, 6 to 22, 6 to 21, 6 to 20, 6 to 19, 6 to 18, 6 to 17, 6 to 16, 6 to 15, 6 to 14, 6 to 13, 6 to 12, 6 to 11, 6 to 10, 7 to 22, 7 to 21, 7 to 20, 7 to 19, 7 to 18, 7 to 17, 7 to 16, 7 to 15, 7 to 14, 7 to 13, 7 to 12, 8 to 22, 8 to 21, 8 to 20, 8 to 19, 8 to 18, 8 to 17, 8 to 16, 8 to 15, 8 to 14, 8 to 13, 8 to 12, 9 to 22, 9 to 21, 9 to 20, 9 to 19, 9 to 18, 9 to 17, 9 to 16, 9 to 15, 9 to 14, 10 to 22, 10 to 21, 10 to 20, 10 to 19, 10 to 18, 10 to 17, 10 to 16, 10 to 15, 10 to 14, 11 to 22, 11 to 21, 11 to 20, 11 to 19, 11 to 18, 11 to 17, 11 to 16, 11 to 15, 11 to 14, 12 to 22, 12 to 21, 12 to 20, 12 to 19, 12 to 18, 12 to 17, 12 to 16, 13 to 22, 13 to 21, 13 to 20, 13 to 19, 13 to 18, 13 to 17, 13 to 16, 14 to 22, 14 to 21, 14 to 20, 14 to 19, 14 to 18, 14 to 17, 15 to 22, 15 to 21, 15 to 20, 15 to 19, 15 to 18, 16 to 22, 16 to 21, 16 to 20, 17 to 22, 17 to 21, or 18 to 22 of the sequences in Table 3.

TABLE 3
Sense Sequences

| | | SEQ |
|---|---|---|
| Sense ID | Sequence | ID NO |
| S-1000 | GUUUAUGAACUGAUCUUACCC | 1014 |
| S-1001 | GUGUUAGACGGUACUGAUCCC | 1015 |
| S-1002 | CCUGCUAGCUCCAUGCUUCCC | 1016 |
| S-1003 | GUUUAUGAACUGAUCUUAGCC | 1017 |
| S-1004 | GUGUUAGACGGUACUGAUGCC | 1018 |
| S-1005 | CCUGCUAGCUCCAUGCUUGCC | 1019 |
| S-1006 | GUUUAUGAAGUGAUCUUAACC | 1020 |
| S-1007 | GUGUUAGACCGUACUGAUACC | 1021 |
| S-1008 | CCUGCUAGCACCAUGCUUACC | 1022 |
| S-1009 | GUUUAUGAACUGAUCUUAACC | 1023 |
| S-1010 | GUGUUAGACGGUACUGAUACC | 1024 |
| S-1011 | CCUGCUAGCUCCAUGCUUACC | 1025 |
| S-1011dt | CCUGCUAGCUCCAUGCUUAdTdT | 1026 |
| S-1012 | GUUUAUGAACUGAUCUUGCCC | 1027 |
| S-1013 | GUUUAUGAACUGAUCUUGGCC | 1028 |
| S-1014 | GUUUAUGAACUGAUCUUGACC | 1029 |
| S-1015 | GCAAUUCAGUCUCGUUGUCCC | 1030 |
| S-1016 | UCCAGGUUUAUGAACUGACCC | 1031 |
| S-1017 | GGUUUAUGAACUGACGUUCCC | 1032 |
| S-1018 | CCACAAUGUUGUGACUGGCCC | 1033 |
| S-1019 | GUCACAAAGAACCGUGUACCC | 1034 |
| S-1020 | UGAACCUCUUGUUAUAAACCC | 1035 |
| S-1021 | CCGACAACCAGUAUUUGGCCC | 1036 |
| S-1022 | GCAAUUCAGUCUCGUUGUGCC | 1037 |
| S-1023 | UCCAGGUUUAUGAACUGAGCC | 1038 |
| S-1024 | GGUUUAUGAACUGACGUUGCC | 1039 |
| S-1025 | CCACAAUGUUGUGACUGGGCC | 1040 |
| S-1026 | GUCACAAAGAACCGUGUAGCC | 1041 |
| S-1027 | UGAACCUCUUGUUAUAAAGCC | 1042 |
| S-1028 | CCGACAACCAGUAUUUGGGCC | 1043 |
| S-1029 | GCAAUUCAGUCUCGUUGUACC | 1044 |
| S-1029dt | GCAAUUCAGUCUCGUUGUAdTdT | 1045 |
| S-1030 | UCCAGGUUUAUGAACUGAACC | 1046 |
| S-1030dt | UCCAGGUUUAUGAACUGAAdTdT | 1047 |
| S-1031 | GGUUUAUGAACUGACGUUACC | 1048 |
| S-1032 | CCACAAUGUUGUGACUGGACC | 1049 |
| S-1033 | GUCACAAAGAACCGUGUAACC | 1050 |
| S-1034 | UGAACCUCUUGUUAUAAAACC | 1051 |
| S-1034dt | UGAACCUCUUGUUAUAAAAdTdT | 1052 |
| S-1035 | CCGACAACCAGUAUUUGGACC | 1053 |
| S-1035dt | CCGACAACCAGUAUUUGGAdTdT | 1054 |
| S-1036 | GCAAUUCAGACUCGUUGUACC | 1055 |
| S-1037 | UCCAGGUUUUUGAACUGAACC | 1056 |
| S-1038 | GGUUUAUGAUCUGACGUUACC | 1057 |
| S-1039 | CCACAAUGUAGUGACUGGACC | 1058 |
| S-1040 | GUCACAAAGUACCGUGUAACC | 1059 |
| S-1041 | UGAACCUCUAGUUAUAAAACC | 1060 |
| S-1042 | CCGACAACCUGUAUUUGGACC | 1061 |
| S-1043 | CAUUGGAAUUCCUAAAAUUCC | 1062 |
| S-1044 | GAUCAUUGGAAUUCCUAAUCC | 1063 |
| S-1045 | CAUUGGAAUUCCUAAAAUGCC | 1064 |
| S-1046 | GAUCAUUGGAAUUCCUAAGCC | 1065 |
| S-1047 | CAUUGGAAUUCCUAAAAUACC | 1066 |
| S-1047dt | CAUUGGAAUUCCUAAAAUAdTdT | 1067 |
| S-1048 | GAUCAUUGGAAUUCCUAAACC | 1068 |
| S-1048dt | GAUCAUUGGAAUUCCUAAAdTdT | 1069 |
| S-1049 | CAUUGGAAUACCUAAAAUACC | 1070 |
| S-1050 | GAUCAUUGGUAUUCCUAAACC | 1071 |
| S-1051dt | GUUUAUGAACUGACGUUAAdTdT | 1072 |
| S-1052dt | GUGUUAGACGGUACCGACAdTdT | 1073 |
| S-1053dt | AUAUCAGUAAAGAGAUUAAdTdT | 1074 |
| S-1054dt | GGUUUAUGAACUGACGUUAdTdT | 1075 |
| S-1055dt | CCACAAUGUUGUGACCGGAdTdT | 1076 |
| S-1056dt | GACACAAAGAACCGUGCAAdTdT | 1077 |
| S-1057dt | CAUUGGAAUUCCUAAAAUCdTdT | 1078 |
| S-1058 | CCUGCUAGCUCCAUGCUUGCU | 1079 |
| S-1059 | CCUGCUAGCUCCAUGCUUGAU | 1080 |
| S-1060 | CCUGCUAGCUCCAUGCUUAUU | 1081 |
| S-1061 | CCUGCUAGCUCCAUGCUUGUU | 1082 |
| S-1062 | UUCGAGUCCCUCAAGUAGCU | 1083 |
| S-1063 | UUCGAGUCCCUCAAGUAGCUUU | 1084 |
| S-1064 | UCGAGUCCCUCAAGUCCAUUCU | 1085 |
| S-1065 | UUCCAGUCCAUCAAGUCAAUU | 1086 |
| S-1066 | UUCCGAGUCUAAAAGUCCUUGG | 1087 |
| S-1067 | UUCCGAGUCUAAAAGUCCUUGGC | 1088 |
| S-1068 | CUUCCGAGUCUAAAAGUCCUUGG | 1089 |
| S-1069 | UUCCGAGUCUAAAAGUCCUUGGU | 1090 |
| S-1070 | UUCCGAGUCUAAAAGUCCUUGGCU | 1091 |
| S-1071 | UCCAAUGUGAAACUUCAUCGGCU | 1092 |
| S-1072 | UCCAAUGUGAAACUUCAUCGGC | 1093 |
| S-1073 | AUCCAAUGUGAAACUUCAUCGU | 1094 |
| S-1074 | AUCCAAUGUGAAACUUCAUCGGU | 1095 |
| S-1075 | UCCAAUGUGAAACUUCAUCGGU | 1096 |
| S-1076 | UCCAUGUGAAACUUCAUCGGCUU | 1097 |
| S-1077 | AUCUACUGUGAAAAUUCAUCGG | 1098 |
| S-1078 | UCUACUGUGAAAAUUCAUCGG | 1099 |
| S-1079 | UCUACUGUGAAAAUUCAUCGGC | 1100 |
| S-1080 | AUCUACUGUGAAAAUUCAUCGGU | 1101 |
| S-1081 | UCUACUGUGAAAAUUCAUCGGU | 1102 |
| S-1082 | UCUACUGUGAAAAUUCAUCGGCU | 1103 |
| S-1083 | CCUUCGGUCCUCAAGUCCUUCA | 1104 |
| S-1084 | UUCGAGUCCAUCAAAUCCUAUAGU | 1105 |
| S-1085 | UACAAUGUGUGCACUUCAUAU | 1106 |
| S-1086 | UAUACUGUGUGCAAUUCAUUUCU | 1107 |
| S-1087 | GCAAUUCAGUCUCGUUGUCC | 1108 |
| S-1088 | GCAAUUCAGUCUCGUUGUC | 1109 |
| S-1089 | CAAUUCAGUCUCGUUGUCCC | 1110 |
| S-1090 | CAAUUCAGUCUCGUUGUCC | 1111 |
| S-1091 | GCAAUUCAGUCUCGUUGUGC | 1112 |
| S-1092 | CAAUUCAGUCUCGUUGUGCC | 1113 |
| S-1093 | CCACAAUGUUGUGACUGGGCCU | 1114 |
| S-1094 | CCACAAUGUUGUGACUGGGC | 1115 |
| S-1095 | CACAAUGUUGUGACUGGGCC | 1116 |
| S-1096 | UGAACCUCUUGUUAUAAAGCCU | 1117 |
| S-1097 | UGAACCUCUUGUUAUAAAGC | 1118 |
| S-1098 | GAACCUCUUGUUAUAAAGCC | 1119 |
| S-1099 | CCUGCUAGCUCCAUGCUUGCCU | 1120 |
| S-1100 | CCUGCUAGCUCCAUGCUUGC | 1121 |
| S-1101 | CCUGCUAGCUCCAUGCUUG | 1122 |
| S-1102 | CUGCUAGCUCCAUGCUUGCC | 1123 |
| S-1103 | CCGACAACCAGUAUUUGGGCCU | 1124 |
| S-1104 | CCGACAACCAGUAUUUGGGC | 1125 |
| S-1105 | CCGACAACCAGUAUUUGGG | 1126 |
| S-1106 | CGACAACCAGUAUUUGGGCC | 1127 |
| S-1107 | CGACAACCAGUAUUUGGGC | 1128 |
| S-1108 | GCAAUUCAGUCUCGUUGUACCU | 1129 |
| S-1109 | GCAAUUCAGUCUCGUUGUAC | 1130 |
| S-1110 | GCAAUUCAGUCUCGUUGUA | 1131 |
| S-1111 | CAAUUCAGUCUCGUUGUACC | 1132 |
| S-1112 | GCAAUUCAGACUCGUUGUACCU | 1133 |
| S-1113 | GCAAUUCAGACUCGUUGUAC | 1134 |
| S-1114 | GCAAUUCAGACUCGUUGUA | 1135 |
| S-1115 | CAAUUCAGACUCGUUGUACC | 1136 |
| S-1116 | AGCAAUUCAGUCUCGUUGUACC | 1137 |
| S-1117 | AGCAAUUCAGUCUCGUUGUAC | 1138 |
| S-1118 | AGGUUUAUGAACUGACGUUAC | 1139 |
| S-1119 | AGGUUUAUGAACUGACGUUACC | 1140 |
| S-1120 | ACCACAAUGUUGUGACUGGAC | 1141 |
| S-1121 | ACCACAAUGUUGUGACUGGACC | 1142 |
| S-1122 | CCACAAUGUUGUGACUGGACCGU | 1143 |
| S-1123 | CCACAAUGUUGUGACUGGACCG | 1144 |
| S-1124 | CCACAAUGUUGUGACUGGAC | 1145 |
| S-1125 | CACAAUGUUGUGACUGGACC | 1146 |
| S-1126 | ACCUGCUAGCUCCAUGCUUCCC | 1147 |
| S-1127 | ACCUGCUAGCUCCAUGCUUCC | 1148 |
| S-1128 | ACCUGCUAGCUCCAUGCUUC | 1149 |
| S-1129 | CCUGCUAGCUCCAUGCUUCC | 1150 |
| S-1130 | CCUGCUAGCUCCAUGCUUC | 1151 |
| S-1131 | CUGCUAGCUCCAUGCUUCCC | 1152 |
| S-1132 | CUGCUAGCUCCAUGCUUCC | 1153 |
| S-1133 | ACCGACAACCAGUAUUUGGACC | 1154 |
| S-1134 | ACCGACAACCAGUAUUUGGAC | 1155 |
| S-1135 | CCGACAACCAGUAUUUGGACCGU | 1156 |
| S-1136 | CCGACAACCAGUAUUUGGACCGU | 1157 |
| S-1137 | CCGACAACCAGUAUUUGGAC | 1158 |
| S-1138 | CGACAACCAGUAUUUGGACC | 1159 |
| S-1139 | CCUGCUAGCACCGUGCUUACC | 1160 |

[0353] In some embodiments, the siRNA molecules of the present disclosure may comprise an antisense sequence from Table 2 and a sense sequence from Table 3, or a fragment or variant thereof. As a non-limiting example, the antisense sequence and the sense sequence have at least 30%, 40%, 50%, 60%, 70%, 80%, 81%, 82%, 83%, 84%, 85%, 86%, 87%, 88%, 89%, 90%, 91%, 92%, 93%, 94%, 95%, 96%, 97%, 98% or 99% or at least 20-30%, 20-40%, 20-50%, 20-60%, 20-70%, 20-80%, 20-90%, 20-95%, 20-99%, 30-40%, 30-50%, 30-60%, 30-70%, 30-80%, 30-90%, 30-95%, 30-99%, 40-50%, 40-60%, 40-70%, 40-80%, 40-90%, 40-95%, 40-99%, 50-60%, 50- 70%, 50-80%, 50-90%, 50-95%, 50-99%, 60-70%, 60-80%, 60-90%, 60-95%, 60-99%, 70-80%, 70-90%, 70-95%, 70-99%, 80-90%, 80-95%, 80-99%, 90-95%, 90-99% or 95-99% complementarity.

[0354] In some embodiments, the siRNA molecules of the present disclosure may comprise the sense and antisense siRNA duplex as described in Tables 4-6. As a non-limiting example, these siRNA duplexes may be tested for in vitro inhibitory activity on endogenous HTT gene expression. The start site for the sense and antisense sequence is compared to HTT gene sequence known as NM_002111.7 (SEQ ID NO: 1425) from NCBI.

TABLE 4
Sense and antisense strand sequences of HTT dsRNA

| | | | Sense | | | | Antisense | |
|---|---|---|---|---|---|---|---|---|
| siRNA | | | Strand | SS | | | Strand | AS |
| Duplex | | Start | Sequence | SEQ | | Start | Sequence | SEQ |
| ID | SS ID | SS | (5′-3′) | ID | AS ID | AS | (5′-3′) | ID |
| D-3566 | S-1058 | 6751 | CCUGCUAGCUC | 1079 | A-2002 | 6751 | UAAGCAUGGAG | 918 |
| | | | CAUGCUUGCU | | | | CUAGCAGGUU | |
| D-3567 | S-1058 | 6751 | CCUGCUAGCUC | 1079 | A-2014 | 6748 | UAAGCAUGGAG | 940 |
| | | | CAUGCUUGCU | | | | CUAGCAGGCUU | |
| D-3568 | S-1059 | 6751 | CCUGCUAGCUC | 1080 | A-2002 | 6751 | UAAGCAUGGAG | 918 |
| | | | CAUGCUUGAU | | | | CUAGCAGGUU | |
| D-3569 | S-1060 | 6751 | CCUGCUAGCUC | 1081 | A-2015 | 6751 | UAAGCAUGGAG | 941 |
| | | | CAUGCUUAUU | | | | CUAGCAGGGU | |
| D-3570 | S-1061 | 6751 | CCUGCUAGCUC | 1082 | A-2002 | 6751 | UAAGCAUGGAG | 918 |
| | | | CAUGCUUGUU | | | | CUAGCAGGUU | |
| D-3500 | S-1016 | 1386 | UCCAGGUUUAU | 1031 | A-2004 | 1386 | UUCAGUUCAUA | 922 |
| | | | GAACUGACCC | | | | AACCUGGAUU | |
| D-3501 | S-1023 | 1386 | UCCAGGUUUAU | 1038 | A-2004 | 1386 | UUCAGUUCAUA | 922 |
| | | | GAACUGAGCC | | | | AACCUGGAUU | |
| D-3502 | S-1030 | 1386 | UCCAGGUUUAU | 1046 | A-2004 | 1386 | UUCAGUUCAUA | 922 |
| | | | GAACUGAACC | | | | AACCUGGAUU | |
| D-3503 | S-1037 | 1386 | UCCAGGUUUUU | 1056 | A-2004 | 1386 | UUCAGUUCAUA | 922 |
| | | | GAACUGAACC | | | | AACCUGGAUU | |
| D-3504 | S-1030 | 1386 | UCCAGGUUUAU | 1046 | A-2001 | 2066 | UGUCGGUACCG | 916 |
| | | | GAACUGAACC | | | | UCUAACACUU | |
| D-3505 | S-1017 | 1390 | GGUUUAUGAAC | 1032 | A-2005 | 1389 | UAACGUCAGUU | 924 |
| | | | UGACGUUCCC | | | | CAUAAACCUU | |
| D-3506 | S-1024 | 1390 | GGUUUAUGAAC | 1039 | A-2005 | 1389 | UAACGUCAGUU | 924 |
| | | | UGACGUUGCC | | | | CAUAAACCUU | |
| D-3507 | S-1031 | 1390 | GGUUUAUGAAC | 1048 | A-2005 | 1389 | UAACGUCAGUU | 924 |
| | | | UGACGUUACC | | | | CAUAAACCUU | |
| D-3508 | S-1038 | 1390 | GGUUUAUGAUC | 1057 | A-2005 | 1389 | UAACGUCAGUU | 924 |
| | | | UGACGUUACC | | | | CAUAAACCUU | |
| D-3509 | S-1000 | 1391 | GUUUAUGAACU | 1014 | A-2000 | 1391 | UUAACGUCAGU | 914 |
| | | | GAUCUUACCC | | | | UCAUAAACUU | |
| D-3510 | S-1003 | 1391 | GUUUAUGAACU | 1017 | A-2000 | 1391 | UUAACGUCAGU | 914 |
| | | | GAUCUUAGCC | | | | UCAUAAACUU | |
| D-3511 | S-1006 | 1391 | GUUUAUGAAGU | 1020 | A-2000 | 1391 | UUAACGUCAGU | 914 |
| | | | GAUCUUAACC | | | | UCAUAAACUU | |
| D-3512 | S-1009 | 1391 | GUUUAUGAACU | 1023 | A-2000 | 1391 | UUAACGUCAGU | 914 |
| | | | GAUCUUAACC | | | | UCAUAAACUU | |
| D-3513 | S-1012 | 1391 | GUUUAUGAACU | 1027 | A-2000 | 1391 | UUAACGUCAGU | 914 |
| | | | GAUCUUGCCC | | | | UCAUAAACUU | |
| D-3514 | S-1013 | 1391 | GUUUAUGAACU | 1028 | A-2000 | 1391 | UUAACGUCAGU | 914 |
| | | | GAUCUUGGCC | | | | UCAUAAACUU | |
| D-3515 | S-1014 | 1391 | GUUUAUGAACU | 1029 | A-2000 | 1391 | UUAACGUCAGU | 914 |
| | | | GAUCUUGACC | | | | UCAUAAACUU | |
| D-3516 | S-1018 | 1429 | CCACAAUGUUG | 1033 | A-2006 | 1428 | UCCGGUCACAA | 926 |
| | | | UGACUGGCCC | | | | CAUUGUGGUU | |
| D-3517 | S-1025 | 1429 | CCACAAUGUUG | 1040 | A-2006 | 1428 | UCCGGUCACAA | 926 |
| | | | UGACUGGGCC | | | | CAUUGUGGUU | |
| D-3518 | S-1032 | 1429 | CCACAAUGUUG | 1049 | A-2006 | 1428 | UCCGGUCACAA | 926 |
| | | | UGACUGGACC | | | | CAUUGUGGUU | |
| D-3519 | S-1039 | 1429 | CCACAAUGUAG | 1058 | A-2006 | 1428 | UCCGGUCACAA | 926 |
| | | | UGACUGGACC | | | | CAUUGUGGUU | |
| D-3520 | S-1001 | 2066 | GUGUUAGACGG | 1015 | A-2001 | 2066 | UGUCGGUACCG | 916 |
| | | | UACUGAUCCC | | | | UCUAACACUU | |
| D-3521 | S-1004 | 2066 | GUGUUAGACGG | 1018 | A-2001 | 2066 | UGUCGGUACCG | 916 |
| | | | UACUGAUGCC | | | | UCUAACACUU | |
| D-3522 | S-1007 | 2066 | GUGUUAGACCG | 1021 | A-2001 | 2066 | UGUCGGUACCG | 916 |
| | | | UACUGAUACC | | | | UCUAACACUU | |
| D-3523 | S-1010 | 2066 | GUGUUAGACGG | 1024 | A-2001 | 2066 | UGUCGGUACCG | 916 |
| | | | UACUGAUACC | | | | UCUAACACUU | |
| D-3524 | S-1021 | 2079 | CCGACAACCAG | 1036 | A-2009 | 2078 | UCCAAAUACUG | 932 |
| | | | UAUUUGGCCC | | | | GUUGUCGGUU | |
| D-3525 | S-1028 | 2079 | CCGACAACCAG | 1043 | A-2009 | 2078 | UCCAAAUACUG | 932 |
| | | | UAUUUGGGCC | | | | GUUGUCGGUU | |
| D-3526 | S-1035 | 2079 | CCGACAACCAG | 1053 | A-2009 | 2078 | UCCAAAUACUG | 932 |
| | | | UAUUUGGACC | | | | GUUGUCGGUU | |
| D-3527 | S-1042 | 2079 | CCGACAACCUG | 1061 | A-2009 | 2078 | UCCAAAUACUG | 932 |
| | | | UAUUUGGACC | | | | GUUGUCGGUU | |
| D-3528 | S-1019 | 4544 | GUCACAAAGAA | 1034 | A-2007 | 4544 | UUGCACGGUUC | 928 |
| | | | CCGUGUACCC | | | | UUUGUGACUU | |
| D-3529 | S-1026 | 4544 | GUCACAAAGAA | 1041 | A-2007 | 4544 | UUGCACGGUUC | 928 |
| | | | CCGUGUAGCC | | | | UUUGUGACUU | |
| D-3530 | S-1033 | 4544 | GUCACAAAGAA | 1050 | A-2007 | 4544 | UUGCACGGUUC | 928 |
| | | | CCGUGUAACC | | | | UUUGUGACUU | |
| D-3531 | S-1040 | 4544 | GUCACAAAGUA | 1059 | A-2007 | 4544 | UUGCACGGUUC | 928 |
| | | | CCGUGUAACC | | | | UUUGUGACUU | |
| D-3532 | S-1020 | 4597 | UGAACCUCUUG | 1035 | A-2008 | 4597 | UUUUAUAACAA | 930 |
| | | | UUAUAAACCC | | | | GAGGUUCAUU | |
| D-3533 | S-1027 | 4597 | UGAACCUCUUG | 1042 | A-2008 | 4597 | UUUUAUAACAA | 930 |
| | | | UUAUAAAGCC | | | | GAGGUUCAUU | |
| D-3534 | S-1034 | 4597 | UGAACCUCUUG | 1051 | A-2008 | 4597 | UUUUAUAACAA | 930 |
| | | | UUAUAAAACC | | | | GAGGUUCAUU | |
| D-3535 | S-1041 | 4597 | UGAACCUCUAG | 1060 | A-2008 | 4597 | UUUUAUAACAA | 930 |
| | | | UUAUAAAACC | | | | GAGGUUCAUU | |
| D-3536 | S-1044 | 4861 | GAUCAUUGGAA | 1063 | A-2011 | 4860 | UUUAGGAAUUC | 936 |
| | | | UUCCUAAUCC | | | | CAAUGAUCUU | |
| D-3537 | S-1046 | 4861 | GAUCAUUGGAA | 1065 | A-2011 | 4860 | UUUAGGAAUUC | 936 |
| | | | UUCCUAAGCC | | | | CAAUGAUCUU | |
| D-3538 | S-1048 | 4861 | GAUCAUUGGAA | 1068 | A-2011 | 4860 | UUUAGGAAUUC | 936 |
| | | | UUCCUAAACC | | | | CAAUGAUCUU | |
| D-3539 | S-1050 | 4861 | GAUCAUUGGUA | 1071 | A-2011 | 4860 | UUUAGGAAUUC | 936 |
| | | | UUCCUAAACC | | | | CAAUGAUCUU | |
| D-3540 | S-1043 | 4864 | CAUUGGAAUUC | 1062 | A-2010 | 4864 | UAUUUUAGGAA | 934 |
| | | | CUAAAAUUCC | | | | UUCCAAUGUU | |
| D-3541 | S-1045 | 4864 | CAUUGGAAUUC | 1064 | A-2010 | 4864 | UAUUUUAGGAA | 934 |
| | | | CUAAAAUGCC | | | | UUCCAAUGUU | |
| D-3542 | S-1047 | 4864 | CAUUGGAAUUC | 1066 | A-2010 | 4864 | UAUUUUAGGAA | 934 |
| | | | CUAAAAUACC | | | | UUCCAAUGUU | |
| D-3543 | S-1049 | 4864 | CAUUGGAAUAC | 1070 | A-2010 | 4864 | UAUUUUAGGAA | 934 |
| | | | CUAAAAUACC | | | | UUCCAAUGUU | |
| D-3544 | S-1015 | 6188 | GCAAUUCAGUC | 1030 | A-2003 | 6188 | UACAACGAGAC | 920 |
| | | | UCGUUGUCCC | | | | UGAAUUGCUU | |
| D-3545 | S-1022 | 6188 | GCAAUUCAGUC | 1037 | A-2003 | 6188 | UACAACGAGAC | 920 |
| | | | UCGUUGUGCC | | | | UGAAUUGCUU | |
| D-3546 | S-1029 | 6188 | GCAAUUCAGUC | 1044 | A-2003 | 6188 | UACAACGAGAC | 920 |
| | | | UCGUUGUACC | | | | UGAAUUGCUU | |
| D-3547 | S-1036 | 6188 | GCAAUUCAGAC | 1055 | A-2003 | 6188 | UACAACGAGAC | 920 |
| | | | UCGUUGUACC | | | | UGAAUUGCUU | |
| D-3548 | S-1002 | 6751 | CCUGCUAGCUC | 1016 | A-2002 | 6751 | UAAGCAUGGAG | 918 |
| | | | CAUGCUUCCC | | | | CUAGCAGGUU | |
| D-3549 | S-1005 | 6751 | CCUGCUAGCUC | 1019 | A-2002 | 6751 | UAAGCAUGGAG | 918 |
| | | | CAUGCUUGCC | | | | CUAGCAGGUU | |
| D-3550 | S-1008 | 6751 | CCUGCUAGCAC | 1022 | A-2002 | 6751 | UAAGCAUGGAG | 918 |
| | | | CAUGCUUACC | | | | CUAGCAGGUU | |
| D-3551 | S-1011 | 6751 | CCUGCUAGCUC | 1025 | A-2002 | 6751 | UAAGCAUGGAG | 918 |
| | | | CAUGCUUACC | | | | CUAGCAGGUU | |

TABLE 5
Sense and antisense strand sequences of HTT dsRNA

| | | | Sense | | | | Antisense | |
|---|---|---|---|---|---|---|---|---|
| siRNA | | | Strand | SS | | | Strand | AS |
| Duplex | | Start | Sequence | SEQ | | Start | Sequence | SEQ |
| ID | SS ID | SS | (5′-3′) | ID | AS ID | AS | (5′-3′) | ID |
| D-3552 | S-1051dt | 1391 | GUUUAUGAACUG | 1072 | A- | 1391 | UUAACGUCAGU | 915 |
| | | | ACGUUAAdTdT | | 2000dt | | UCAUAAACdTdT | |
| D-3553 | S-1052dt | 2066 | GUGUUAGACGGU | 1073 | A- | 2066 | UGUCGGUACCG | 917 |
| | | | ACCGACAdTdT | | 2001dt | | UCUAACACdTdT | |
| D-3554 | S-1011dt | 6751 | CCUGCUAGCUCC | 1026 | A- | 6751 | UAAGCAUGGAG | 919 |
| | | | AUGCUUAdTdT | | 2002dt | | CUAGCAGGdTdT | |
| D-3555 | S-1053dt | 10322 | AUAUCAGUAAAG | 1074 | A- | 10322 | UUAAUCUCUUU | 938 |
| | | | AGAUUAAdTdT | | 2012dt | | ACUGAUAUdTdT | |
| D-3556 | S-1030dt | 1386 | UCCAGGUUUAUG | 1047 | A- | 1386 | UUCAGUUCAUA | 923 |
| | | | AACUGAAdTdT | | 2004dt | | AACCUGGAdTdT | |
| D-3557 | S-1054dt | 1390 | GGUUUAUGAACU | 1075 | A- | 1390 | UAACGUCAGUU | 925 |
| | | | GACGUUAdTdT | | 2005dt | | CAUAAACCdTdT | |
| D-3558 | S-1055dt | 1429 | CCACAAUGUUGU | 1076 | A- | 1429 | UCCGGUCACAA | 927 |
| | | | GACCGGAdTdT | | 2006dt | | CAUUGUGGdTdT | |
| D-3559 | S-1035dt | 2079 | CCGACAACCAGU | 1054 | A- | 2079 | UCCAAAUACUG | 933 |
| | | | AUUUGGAdTdT | | 2009dt | | GUUGUCGGdTdT | |
| D-3560 | S-1056dt | 4544 | GUCACAAAGAAC | 1077 | A- | 4544 | UUGCACGGUUC | 929 |
| | | | CGUGCAAdTdT | | 2007dt | | UUUGUGACdTdT | |
| D-3561 | S-1034dt | 4597 | UGAACCUCUUGU | 1052 | A- | 4597 | UUUUAUAACAA | 931 |
| | | | UAUAAAAdTdT | | 2008dt | | GAGGUUCAdTdT | |
| D-3562 | S-1029dt | 6188 | GCAAUUCAGUCU | 1045 | A- | 6188 | UACAACGAGAC | 921 |
| | | | CGUUGUAdTdT | | 2003dt | | UGAAUUGCdTdT | |
| D-3563 | S-1047dt | 4864 | CAUUGGAAUUCC | 1067 | A- | 4864 | UAUUUUAGGAA | 935 |
| | | | UAAAAUAdTdT | | 2010dt | | UUCCAAUGdTdT | |
| D-3564 | S-1048dt | 4861 | GAUCAUUGGAAU | 1069 | A- | 4861 | UUUAGGAAUUC | 937 |
| | | | UCCUAAAdTdT | | 2011dt | | CAAUGAUCdTdT | |
| D-3565 | S-1057dt | 4864 | CAUUGGAAUUCC | 1078 | A- | 4864 | GAUUUUAGGAA | 939 |
| | | | UAAAAUCdTdT | | 2013dt | | UUCCAAUGdTdT | |

TABLE 6
Antisense and Sense strand sequences of HTT dsRNA

| | | | Antisense | | | | Sense | |
|---|---|---|---|---|---|---|---|---|
| siRNA | | | Strand | AS | | | Strand | SS |
| Duplex | | Start | Sequence | SEQ | | Start | Sequence | SEQ |
| ID | AS ID | AS | (5′-3′) | ID | SS ID | SS | (5′-3′) | ID |
| D-3569 | S-1060 | 6751 | CCUGCUAGCUC | 1081 | A-2015 | 6751 | UAAGCAUGGAG | 941 |
| | | | CAUGCUUAUU | | | | CUAGCAGGGU | |
| D-3570 | S-1061 | 6751 | CCUGCUAGCUC | 1082 | A-2002 | 6751 | UAAGCAUGGAG | 918 |
| | | | CAUGCUUGUU | | | | CUAGCAGGUU | |

[0355] In other embodiments, the siRNA molecules of the present disclosure can be encoded in plasmid vectors, AAV particles, viral genome or other nucleic acid expression vectors for delivery to a cell.

[0356] DNA expression plasmids can be used to stably express the siRNA duplexes or dsRNA of the present disclosure in cells and achieve long-term inhibition of the target gene expression. in one aspect, the sense and antisense strands of a siRNA duplex are typically linked by a short spacer sequence leading to the expression of a stem-loop structure termed short hairpin RNA (shRNA). The hairpin is recognized and cleaved by Dicer, thus generating mature siRNA molecules.

[0357] According to the present disclosure, AAV particles comprising the nucleic acids encoding the siRNA molecules targeting HTT mRNA are produced, the AAV serotypes may be any of the serotypes listed in Table 1. Non-limiting examples of the AAV serotypes include, AAV1, AAV2, AAV3, AAV4, AAV5, AAV6, AAV7, AAV8, AAV9, AAV9.47, AAV9(hu14), AAV10, AAV11, AAV12, AAVrh8, AAVrh10, AAV-DJ8, AAV-DJ, AAV-PHP.A, and/or AAV-PHP.B, and variants thereof.

[0358] In some embodiments, the siRNA duplexes or encoded dsRNA of the present disclosure suppress (or degrade) target mRNA (e.g., HTT), Accordingly, the siRNA duplexes or encoded dsRNA can be used to substantially inhibit HTT gene expression in a cell, for example a neuron. In some aspects, the inhibition of HTT gene expression refers to an inhibition by at least about 20%, preferably by at least about 30%, 40%, 50%, 60%, 70%, 80%, 85%, 90%, 95% and 100%, or at least 20-30%, 20-40%, 20-50%, 20-60%, 20-70%, 20-80%, 20-90%, 20-95%, 20-100%, 30-40%, 30-50%, 30-60%, 30-70%, 30-80%, 30-90%, 30-95(N), 30-100%, 40-50%, 40-60%, 40-70%, 40-80%, 40-90%, 40-95%, 40-100%, 50-60%, 50-70%, 50-80%, 50-90%, 50-95%, 50-100%, 60-70%, 60-80%, 60-90%, 60-95%, 60-100%, 70-80%, 70-90%, 70-95%, 70-100%, 80-90%, 80-95%, 80-100%, 90-95%, 90-100% or 95-100%. Accordingly, the protein product of the targeted gene may be inhibited by at least about 20%, preferably by at least about 30%, 40%, 50%, 60%, 70%, 80%, 85%, 90%, 95% and 100%, or at least 20-30%, 20-40%, 20-50%, 20-60%, 20-70%, 20-80%, 20-90%, 20-95%, 20-100%, 30-40%, 30-50%, 30-60%, 30-70%, 30-80%, 30-90%, 30-95%, 30-100%, 40-50%, 40-60%, 40-70%, 40-80%, 40-90%, 40-95%, 40-100%, 50-60%, 50-70%, 50-80%, 50-90%, 50-95%, 50-100%, 60-70%, 60-80%, 60-90%, 60-95%, 60-100%, 70-80%, 70-90%, 70-95%, 70-100%, 80-90%, 80-95%, 80-100%, 90-95%, 90-100% or 95-100%.

[0359] According to the present disclosure, the siRNA molecules are designed and tested for their ability in reducing HTT mRNA levels in cultured cells. Non-limiting examples of cultured cells include HEK293, HeLa, primary astrocytes, U251 astrocytes, SH-SY5Y neuron cells, FRhK-4 rhesus macaque (Macaca mulatta) kidney cells, and fibroblasts from HD patients. Such siRNA molecules may form a duplex such as, but not limited to, include those listed in Table 4, Table 5 or Table 6. As a non-limiting example, the siRNA duplexes may be siRNA duplex IDs: D-3500 to D-3570.

[0360] In some embodiments, the siRNA molecules comprise a miRNA seed match for the target (e.g.,) located in the guide strand. In another embodiment, the siRNA molecules comprise a miRNA seed match for the target (e.g., HTT) located in the passenger strand. In yet another embodiment, the siRNA duplexes or encoded &RNA targeting HTT gene do not comprise a seed match for the target e.g., HTT) located in the guide or passenger strand.

[0361] In some embodiments, the siRNA duplexes or encoded dsRNA targeting HTT gene may have almost no significant full-length off target effects for the guide strand. In another embodiment, the siRNA. duplexes or encoded dsRNA targeting HTT gene may have almost no significant full-length off target effects for the passenger strand. The siRNA duplexes or encoded dsRNA targeting HTT gene may have less than 1%, 2%, 3%, 4 0, 5%, 6%, 7%, 8%, 9%, 10%, 11%, 12%, 13%, 14%, 15%, 20%, 25%, 30%, 35%, 40%, 45%, 50%, 1-5%, 2-6%, 3-7%, 4-8%, 5-9%, 5-10%, 6-10%, 5-15%, 5-20%, 5-25%, 5-30%, 10-20%, 10-30%, 10-40%, 10-50%, 15-30%, 15-40%, 15-45%, 20-40%, 20-50%, 25-50%, 30-40%, 30-50%, 35-50%, 40-50%, 45-50% full- length off target effects for the passenger strand. In yet another embodiment, the siRNA duplexes or encoded dsRNA targeting HTT gene may have almost no significant full-length off target effects for the guide strand or the passenger strand. The siRNA duplexes or encoded dsRNA targeting HTT gene may have less than 1%, 2%, 3%, 4%, 5%, 6%, 7%, 8%, 9%, 10%, 11%, 12%, 13%, 14%, 15%, 20%, 25%, 30%, 35%, 40%, 45%, 50%, 1-5%, 2-6%, 3-7%, 4-8%, 5-9%, 5-10%, 6-10%, 5-15%, 5-20%, 5-25%, 5-30%, 10-20%, 10-30%, 10-40%, 10-50%, 15-30%, 15-40%, 15-45%, 20-40%, 20-50%, 25-50%, 30-40%, 30-50%, 35-50%, 40-50%, 45-50% full-length off target effects for the guide or passenger strand.

[0362] In some embodiments, the siRNA duplexes or encoded dsRNA targeting HTT gene may have high activity in vitro. In another embodiment, the siRNA molecules may have low activity in vitro. In yet another embodiment, the siRNA duplexes or dsRNA targeting the HTT gene may have high guide strand activity and low passenger strand activity in vitro.

[0363] In some embodiments, the siRNA molecules have a high guide strand activity and low passenger strand activity in vitro. The target knock-down (KD) by the guide strand may be at least 30%, 40%, 50%, 60%, 65%, 70%, 75%, 80%, 85%, 90%, 95%, 99%, 99.5% or 100%. The target knock-down by the guide strand may be 30-40%, 35-40%, 40-50%, 45-50%, 50-55%, 50-60%, 60-65%, 60-70%, 60-75%, 60-80%, 60-85%, 60-90%, 60-95%, 60-99%, 60-99.5%, 60-100%, 65-70%, 65-75%, 65-80%, 65-85%, 65-90%, 65-95%, 65-99%, 65-99.5%, 65-100%, 70-75%, 70-80%, 70-85%, 70-90%, 70-95%, 70-99%, 70-99.5%, 70-100%, 75-80%, 75-85%, 75-90%, 75-95%, 75-99%, 75-99.5 0 0, 75-100%, 80-85%, 80-90%, 80-95%, 80-99%, 80-99.5%, 80-100%, 85-90%, 85-95%, 85-99%, 85-99.5%, 85-100%, 90-95%, 90-99%, 90-99.5%, 90-100%, 95-99%, 95-99.5%, 95-100%, 99-99.5 99-100% or 99.5-100%. As a non-limiting example, the target knock-down (KD) by the guide strand is greater than 70%. As a non-limiting example, the target knock-down (KD) by the guide strand is greater than 60%.

[0364] In some embodiments, the siRNA duplex is designed so there is no miRNA seed match for the sense or antisense sequence to non-Htt sequence.

[0365] In some embodiments, the IC₅₀ of the guide strand for the nearest off target is greater than 100 multiplied by the IC₅₀ of the guide strand for the on-target gene, Htt. As a non-limiting example, if the IC₅₀ of the guide strand for the nearest off target is greater than 100 multiplied by the IC₅₀ of the guide strand for the target then the siRNA molecule is said to have high guide strand selectivity for inhibiting Htt in vitro.

[0366] In some embodiments, the 5′ processing of the guide strand has a correct start (n) at the 5′ end at least 75%, 80%, 85%, 90%, 95%, 99% or 100% of the time in vitro or in vivo. As a non-limiting example, the 5′ processing of the guide strand is precise and has a correct start (n) at the 5′ end at least 99% of the time in vitro. As a non-limiting example, the 5′ processing of the guide strand is precise and has a correct start (n) at the 5′ end at least 99° of the time in vivo. As a non-limiting example, the 5′ processing of the guide strand is precise and has a correct start (n) at the 5′ end at least 90% of the time in vitro. As a non-limiting example, the 5′ processing of the guide strand is precise and has a correct start (n) at the 5′ end at least 90% of the time in vivo. As a non-limiting example, the 5′ processing of the guide strand is precise and has a correct start (n) at the 5′ end at least 85% of the time in vitro. As a non-limiting example, the 5′ processing of the guide strand is precise and has a correct start (n) at the 5′ end at least 85% of the time in vivo.

[0367] In some embodiments, the guide to passenger (G:P) (also referred to as the antisense to sense) strand ratio expressed is 1:10, 1:9, 1:8, 1:7, 1:6, 1:5, 1:4, 1:3, 1:2, 1;1, 2:10, 2:9, 2:8, 2:7, 2:6, 2:5, 2:4, 2:3, 2:2, 2:1, 3:10, 3:9, 3:8, 3:7, 3:6, 3:5, 3:4, 3:3, 3:2, 3:1, 4:10, 4:9, 4:8, 4:7, 4:6, 4:5, 4:4, 4:3, 4:2, 4:1, 5:10, 5:9, 5:8, 5:7, 5:6, 5:5, 5:4, 5:3, 5:2, 5:1, 6:10, 6:9, 6:8, 6:7, 6:6, 6:5, 6:4, 6:3, 6:2, 6:1, 7:10, 7:9, 7:8, 7:7, 7:6, 7:5, 7:4, 7:3, 7:2, 7:1, 8:10, 8:9, 8:8, 8:7, 8:6, 8:5, 8:4, 8:3, 8:2, 8:1, 9:10, 9:9, 9:8, 9:7, 9:6, 9:5, 9:4, 9:3, 9:2, 9:1, 10:10, 10:9, 10:8, 10:7, 10:6, 10:5, 10:4, 10:3, 10:2, 10:1, 1:99, 5:95, 10:90, 15:85, 20:80, 25:75, 30:70, 35:65, 40:60, 45:55, 50:50, 55:45, 60:40, 65:35, 70:30, 75:25, 80:20, 85:15, 90:10, 95:5, or 99:1 in vitro or in vivo. The guide to passenger ratio refers to the ratio of the guide strands to the passenger strands after intracellular processing of the pri-microRNA. For example, a 80:20 guide-to-passenger ratio would have 8 guide strands to every 2 passenger strands processed from the precursor. As a non-limiting example, the guide-to-passenger strand ratio is 8:2 in vitro. As a non-limiting example, the guide-to-passenger strand ratio is 8:2 in vivo. As a non-limiting example, the guide-to-passenger strand ratio is 9:1 in vitro. As a non-limiting example, the guide-to-passenger strand ratio is 9:1 in vivo.

[0368] In some embodiments, the guide to passenger (G:P) (also referred to as the antisense to sense) strand ratio expressed is greater than 1.

[0369] In some embodiments, the guide to passenger (G:P) (also referred to as the antisense to sense) strand ratio expressed is greater than 2.

[0370] In some embodiments, the guide to passenger (G:P) (also referred to as the antisense to sense) strand ratio expressed is greater than 5.

[0371] In some embodiments, the guide to passenger (G:P) (also referred to as the antisense to sense) strand ratio expressed is greater than 10.

[0372] In some embodiments, the guide to passenger (G:P) (also referred to as the antisense to sense) strand ratio expressed is greater than 20.

[0373] In some embodiments, the guide to passenger (G:P) (also referred to as the antisense to sense) strand ratio expressed is greater than 50.

[0374] In some embodiments, the guide to passenger (G:P) (also referred to as the antisense to sense) strand ratio expressed is at least 3:1.

[0375] In some embodiments, the guide to passenger (G:P) (also referred to as the antisense to sense) strand ratio expressed is at least 5:1.

[0376] In some embodiments, the guide to passenger (G:P) (also referred to as the antisense to sense) strand ratio expressed is at least 10:1.

[0377] in some embodiments, the guide to passenger (G:P) (also referred to as the antisense to sense) strand ratio expressed is at least 20:1.

[0378] In some embodiments, the guide to passenger (G:P) (also referred to as the antisense to sense) strand ratio expressed is at least 50:1.

[0379] In some embodiments, the passenger to guide (P:G) (also referred to as the sense to antisense) strand ratio expressed is 1:10, 1:9, 1:8, 1:7, 1:6, 1:5, 1:4, 1:3, 1:2, 1;1, 2:10, 2:9, 2:8, 2:7, 2:6, 2:5, 2:4, 2:3, 2:2, 2:1, 3:10, 3:9, 3:8, 3:7, 3:6, 3:5, 3:4, 3:3, 3:2, 3:1, 4:10, 4:9, 4:8, 4:7, 4:6, 4:5, 4:4, 4:3, 4:2, 4:1, 5:10, 5:9, 5:8, 5:7, 5:6, 5:5, 5:4, 5:3, 5:2, 5:1, 6:10, 6:9, 6:8, 6:7, 6:6, 6:5, 6:4, 6:3, 6:2, 6:1, 7:10, 7:9, 7:8, 7:7, 7:6, 7:5, 7:4, 7:3, 7:2, 7:1, 8:10, 8:9, 8:8, 8:7, 8:6, 8:5, 8:4, 8:3, 8:2, 8:1, 9:10, 9:9, 9:8, 9:7, 9:6, 9:5, 9:4, 9:3, 9:2, 9:1, 10:10, 10:9, 10:8, 10:7, 10:6, 10:5, 10:4, 10:3, 10:2, 10:1, 1:99, 5:95, 10:90, 15:85, 20:80, 25:75, 30:70, 35:65, 40:60, 45:55, 50:50, 55:45, 60:40, 65:35, 70:30, 75:25, 80:20, 85:15, 90:10, 95:5, or 99:1 in vitro or in vivo. The passenger to guide ratio refers to the ratio of the passenger strands to the guide strands after the intracellular processing of the pri-microRNA. For example, a 80:20 of passenger-to-guide ratio would have 8 passenger strands to every 2 guide strands processed from the precursor. As a non-limiting example, the passenger-to-guide strand ratio is 80:20 in vitro. As a non-limiting example, the passenger-to-guide strand ratio is 80:20 in vivo. As a non-limiting example, the passenger-to-guide strand ratio is 8:2 in vitro. As a non-limiting example, the passenger-to-guide strand ratio is 8:2 in vivo. As a non-limiting example, the passenger-to-guide strand ratio is 9:1 in vitro. As a non-limiting example, the passenger-to-guide strand ratio is 9:1 in vivo.

[0380] In some embodiments, the passenger to guide (P:G) (also referred to as the sense to antisense) strand ratio expressed is greater than 1.

[0381] In some embodiments, the passenger to guide (P:G) (also referred to as the sense to antisense) strand ratio expressed is greater than 2.

[0382] In some embodiments, the passenger to guide (P:G) (also referred to as the sense to antisense) strand ratio expressed is greater than 5.

[0383] In some embodiments, the passenger to guide (P:G) (also referred to as the sense to antisense) strand ratio expressed is greater than 10.

[0384] In some embodiments, the passenger to guide (P:G) (also referred to as the sense to antisense) strand ratio expressed is greater than 20.

[0385] In some embodiments, the passenger to guide (P:G) (also referred to as the sense to antisense) strand ratio expressed is greater than 50.

[0386] In some embodiments, the passenger to guide (P:G) (also referred to as the sense to antisense) strand ratio expressed is at least 3:1.

[0387] In some embodiments, the passenger to guide (P:G) (also referred to as the sense to antisense) strand ratio expressed is at least 5:1,

[0388] In some embodiments, the passenger to guide (P:G) (also referred to as the sense to antisense) strand ratio expressed is at least 10:1.

[0389] In some embodiments, the passenger to guide (P:G) (also referred to as the sense to antisense) strand ratio expressed is at least 20:1.

[0390] In some embodiments, the passenger to guide (P:G) (also referred to as the sense to antisense) strand ratio expressed is at least 50:1.

[0391] In some embodiments, a passenger-guide strand duplex is considered effective when the pri- or pre-microRNAs demonstrate, but methods known in the art and described herein, greater than 2-fold guide to passenger strand ratio when processing is measured. As a non-limiting examples, the pri- or pre-microRNAs demonstrate great than 2-fold, 3-fold, 4-fold, 5-fold, 6-fold, 7-fold, 8-fold, 9-fold, 10-fold, 11-fold, 12-fold, 13-fold, 14-fold, 15-fold, or 2 to 5-fold, 2 to 10-fold, 2 to 15-fold, 3 to 5-fold, 3 to 10-fold, 3 to 15-fold, 4 to 5-fold, 4 to 10-fold, 4 to 15-fold, 5 to 10-fold, 5 to 15-fold, 6 to 10-fold, 6 to 15-fold, 7 to 10-fold, 7 to 15-fold, 8 to 10-fold, 8 to 15-fold, 9 to 10-fold, 9 to 15-fold, 10 to 15-fold, 11 to 15-fold, 12 to 15-fold, 13 to 15-fold, or 14 to 15-fold guide to passenger strand ratio when processing is measured.

[0392] In some embodiments, the vector genome encoding the dsRNA comprises a sequence which is at least 60%, 65%, 70%, 75%, 80%, 85%, 90%, 95%, 99% or more than 99% of the full length of the construct. As a non-limiting example, the vector genome comprises a sequence which is at least 80% of the full-length sequence of the construct.

[0393] In some embodiments, the siRNA molecules may be used to silence wild type and/or mutant HTT by targeting at least one exon on the htt sequence. The exon may be exon 1, exon 2, exon 3, exon 4, exon 5, exon 6, exon 7, exon 8, exon 9, exon 10, exon 11, exon 12, exon 13, exon 14, exon 15, exon 16, exon 17, exon 18, exon 19, exon 20, exon 21, exon 22, exon 23, exon 24, exon 25, exon 26, exon 27, exon 28, exon 29, exon 30, exon 31, exon 32, exon 33, exon 34, exon 35, exon 36, exon 37, exon 38, exon 39, exon 40, exon 41, exon 42, exon 43, exon 44, exon 45, exon 46, exon 47, exon 48, exon 49, exon 50, exon 51, exon 52, exon 53, exon 54, exon 55, exon 56, exon 57, exon 58, exon 59, exon 60, exon 61, exon 62, exon 63, exon 64, exon 65, exon 66, and/or exon 67. As a non-limiting example, the siRNA molecules may be used to silence wild type and/or mutant HTT by targeting exon 1. As another non-limiting example, the siRNA molecules may be used to silence wild type and/or mutant HTT by targeting an exon other than exon 1. As another non-limiting example, the siRNA molecules may be used to silence wild type and/or mutant WIT by targeting exon 50. As another non-limiting example, the siRNA molecules may be used to silence wild type and/or mutant HTT by targeting exon 67.

### Molecular Scaffold

[0394] In some embodiments, the siRNA molecules may be encoded in a modulatory polynucleotide which also comprises a molecular scaffold. As used herein a “molecular scaffold” is a framework or starting molecule that forms the sequence or structural basis against which to design or make a subsequent molecule.

[0395] In some embodiments, the molecular scaffold comprises at least one 5′ flanking region. As a non-limiting example, the 5′ flanking region may comprise a 5′ flanking sequence which may be of any length and may be derived in whole or in part from wild type microRNA sequence or be a completely artificial sequence.

[0396] In some embodiments, the molecular scaffold comprises at least one 3′ flanking region. As a non-limiting example, the 3′ flanking region may comprise a 3′ flanking sequence which may be of any length and may be derived in whole or in part from wild type microRNA sequence or be a completely artificial sequence.

[0397] In some embodiments, one or both of the and 3′ flanking sequences are absent.

[0398] In some embodiments the 5′ and 3′ flanking sequences are the same length.

[0399] In some embodiments the 5′ flanking sequence is from 1-10 nucleotides in length, from 5-15 nucleotides in length, from 10-30 nucleotides in length, from 20-50 nucleotides in length, greater than 40 nucleotides in length, greater than 50 nucleotides in length, greater than 100 nucleotides in length or greater than 200 nucleotides in length.

[0400] In some embodiments, the 5′ flanking sequence may be 1, 2, 3, 4, 5, 6, 7, 8, 9, 10, 11, 12, 13, 14, 15, 16, 17, 18, 19, 20, 21, 22, 23, 24, 25, 26, 27, 28, 29, 30, 31, 32, 33, 34, 35, 36, 37, 38, 39, 40, 41, 42, 43, 44, 45, 46, 47, 48, 49, 50, 51, 52, 53, 54, 55, 56, 57, 58, 59, 60, 61, 62, 63, 64, 65, 66, 67, 68, 69, 70, 71, 72, 73, 74, 75, 76, 77, 78, 79, 80, 81, 82, 83, 84, 85, 86, 87, 88, 89, 90, 91, 92, 93, 94, 95, 96, 97, 98, 99, 100, 101, 102, 103, 104, 105, 106, 107, 108, 109, 110, 111, 112, 113, 114, 115, 116, 117, 118, 119, 120, 121, 122, 123, 124, 125, 126, 127, 128, 129, 130, 131, 132, 133, 134, 135, 136, 137, 138, 139, 140, 141, 142, 143, 144, 145, 146, 147, 148, 149, 150, 151, 152, 153, 154, 155, 156, 157, 158, 159, 160, 161, 162, 163, 164, 165, 166, 167, 168, 169, 170, 171, 172, 173, 174, 175, 176, 177, 178, 179, 180, 181, 182, 183, 184, 185, 186, 187, 188, 189, 190, 191, 192, 193, 194, 195, 196, 197, 198, 199, 200, 201, 202, 203, 204, 205, 206, 207, 208, 209, 210, 211, 212, 213, 214, 215, 216, 217, 218, 219, 220, 221, 222, 223, 224, 225, 226, 227, 228, 229, 230, 231, 232, 233, 234, 235, 236, 237, 238, 239, 240, 241, 242, 243, 244, 245, 246, 247, 248, 249, 250, 251, 252, 253, 254, 255, 256, 257, 258, 259, 260, 261, 262, 263, 264, 265, 266, 267, 268, 269, 270, 271, 272, 273, 274, 275, 276, 277, 278, 279, 280, 281, 282, 283, 284, 285, 286, 287, 288, 289, 290, 291, 292, 293, 294, 295, 296, 297, 298, 299, 300, 301, 302, 303, 304, 305, 306, 307, 308, 309, 310, 311, 312, 313, 314, 315, 316, 317, 318, 319, 320, 321, 322, 323, 324, 325, 326, 327, 328, 329, 330, 331, 332, 333, 334, 335, 336, 337, 338, 339, 340, 341, 342, 343, 344, 345, 346, 347, 348, 349, 350, 351, 352, 353, 354, 355, 356, 357, 358, 359, 360, 361, 362, 363, 364, 365, 366, 367, 368, 369, 370, 371, 372, 373, 374, 375, 376, 377, 378, 379, 380, 381, 382, 383, 384, 385, 386, 387, 388, 389, 390, 391, 392, 393, 394, 395, 396, 397, 398, 399, 400, 401, 402, 403, 404, 405, 406, 407, 408, 409, 410, 411, 412, 413, 414, 415, 416, 417, 418, 419, 420, 421, 422, 423, 424, 425, 426, 427, 428, 429, 430, 431, 432, 433, 434, 435, 436, 437, 438, 439, 440, 441, 442, 443, 444, 445, 446, 447, 448, 449, 450, 451, 452, 453, 454, 455, 456, 457, 458, 459, 460, 461, 462, 463, 464, 465, 466, 467, 468, 469, 470, 471, 472, 473, 474, 475, 476, 477, 478, 479, 480, 481, 482, 483, 484, 485, 486, 487, 488, 489, 490, 491, 492, 493, 494, 495, 496, 497, 498, 499, or 500 nucleotides in length.

[0401] In some embodiments the 3′ flanking sequence is from 1-10 nucleotides in length, from 5-15 nucleotides in length, from 10-30 nucleotides in length, from 20-50 nucleotides in length, greater than 40 nucleotides in length, greater than 50 nucleotides in length, greater than 100 nucleotides in length or greater than 200 nucleotides in length.

[0402] In some embodiments, the 3′ flanking sequence may be 1, 2, 3, 4, 5, 6, 7, 8, 9, 10, 11, 12, 13, 14, 15, 16, 17, 18, 19, 20, 21, 22, 23, 24, 25, 26, 27, 28, 29, 30, 31, 32, 33, 34, 35, 36, 37, 38, 39, 40, 41, 42, 43, 44, 45, 46, 47, 48, 49, 50, 51, 52, 53, 54, 55, 56, 57, 58, 59, 60, 61, 62, 63, 64, 65, 66, 67, 68, 69, 70, 71, 72, 73, 74, 75, 76, 77, 78, 79, 80, 81, 82, 83, 84, 85, 86, 87, 88, 89, 90, 91, 92, 93, 94, 95, 96, 97, 98, 99, 100, 101, 102, 103, 104, 105, 106, 107, 108, 109, 110, 111, 112, 113, 114, 115, 116, 117, 118, 119, 120, 121, 122, 123, 124, 125, 126, 127, 128, 129, 130, 131, 132, 133, 134, 135, 136, 137, 138, 139, 140, 141, 142, 143, 144, 145, 146, 147, 148, 149, 150, 151, 152, 153, 154, 155, 156, 157, 158, 159, 160, 161, 162, 163, 164, 165, 166, 167, 168, 169, 170, 171, 172, 173, 174, 175, 176, 177, 178, 179, 180, 181, 182, 183, 184, 185, 186, 187, 188, 189, 190, 191, 192, 193, 194, 195, 196, 197, 198, 199, 200, 201, 202, 203, 204, 205, 206, 207, 208, 209, 210, 211, 212, 213, 214, 215, 216, 217, 218, 219, 220, 221, 222, 223, 224, 225, 226, 227, 228, 229, 230, 231, 232, 233, 234, 235, 236, 237, 238, 239, 240, 241, 242, 243, 244, 245, 246, 247, 248, 249, 250, 251, 252, 253, 254, 255, 256, 257, 258, 259, 260, 261, 262, 263, 264, 265, 266, 267, 268, 269, 270, 271, 272, 273, 274, 275, 276, 277, 278, 279, 280, 281, 282, 283, 284, 285, 286, 287, 288, 289, 290, 291, 292, 293, 294, 295, 296, 297, 298, 299, 300, 301, 302, 303, 304, 305, 306, 307, 308, 309, 310, 311, 312, 313, 314, 315, 316, 317, 318, 319, 320, 321, 322, 323, 324, 325, 326, 327, 328, 329, 330, 331, 332, 333, 334, 335, 336, 337, 338, 339, 340, 341, 342, 343, 344, 345, 346, 347, 348, 349, 350, 351, 352, 353, 354, 355, 356, 357, 358, 359, 360, 361, 362, 363, 364, 365, 366, 367, 368, 369, 370, 371, 372, 373, 374, 375, 376, 377, 378, 379, 380, 381, 382, 383, 384, 385, 386, 387, 388, 389, 390, 391, 392, 393, 394, 395, 396, 397, 398, 399, 400, 401, 402, 403, 404, 405, 406, 407, 408, 409, 410, 411, 412, 413, 414, 415, 416, 417, 418, 419, 420, 421, 422, 423, 424, 425, 426, 427, 428, 429, 430, 431, 432, 433, 434, 435, 436, 437, 438, 439, 440, 441, 442, 443, 444, 445, 446, 447, 448, 449, 450, 451, 452, 453, 454, 455, 456, 457, 458, 459, 460, 461, 462, 463, 464, 465, 466, 467, 468, 469, 470, 471, 472, 473, 474, 475, 476, 477, 478, 479, 480, 481, 482, 483, 484, 485, 486, 487, 488, 489, 490, 491, 492, 493, 494, 495, 496, 497, 498, 499, or 500 nucleotides in length.

[0403] In some embodiments, the molecular scaffold comprises at least one loop motif region. As a non-limiting example, the loop motif region may comprise a sequence which may be of any length.

[0404] In some embodiments, the molecular scaffold comprises a 5′ flanking region, a loop motif region and/or a 3′ flanking region.

[0405] In some embodiments, at least one siRNA, miRNA or other RNAi agent described herein, may be encoded by a modulatory polynucleotide which may also comprise at least one molecular scaffold. The molecular scaffold may comprise a 5′ flanking sequence which may be of any length and may be derived in whole or in part from wild type microRNA sequence or be completely artificial. The 3′ flanking sequence may mirror the 5′ flanking sequence and/or a 3′ flanking sequence in size and origin. Either flanking sequence may be absent. The 3′ flanking sequence may optionally contain one or more CNNC motifs, where “N” represents any nucleotide.

[0406] Forming the stem of a stem loop structure is a minimum of the modulatory polynucleotide encoding at least one siRNA, miRNA or other RNAi agent described herein. In some embodiments, the siRNA, miRNA or other RNAi agent described herein comprises at least one nucleic acid sequence which is in part complementary or will hybridize to a target sequence. In some embodiments the payload is an siRNA molecule or fragment of an siRNA molecule,

[0407] In some embodiments, the 5′ arm of the stem loop structure of the modulatory polynucleotide comprises a nucleic acid sequence encoding a sense sequence. Non-limiting examples of sense sequences, or fragments or variants thereof, which may be encoded by the modulatory polynucleotide are described in Table 3.

[0408] In some embodiments, the 3′ arm of the stem loop of the modulatory polynucleotide comprises a nucleic acid sequence encoding an antisense sequence. The antisense sequence, in some instances, comprises a “G” nucleotide at the 5′ most end. Non-limiting examples of antisense sequences, or fragments or variants thereof, which may be encoded by the modulatory polynucleotide are described in Table 2.

[0409] In other embodiments, the sense sequence may reside on the 3′ arm while the antisense sequence resides on the 5′ arm of the stem of the stem loop structure of the modulatory polynucleotide. Non-limiting examples of sense and antisense sequences which may be encoded by the modulatory polynucleotide are described in Tables 2 and 3.

[0410] In some embodiments, the sense and antisense sequences may be completely complementary across a substantial portion of their length. In other embodiments the sense sequence and antisense sequence may be at least 70, 80, 90, 95 or 99% complementarity across independently at least 50, 60, 70, 80, 85, 90, 95, or 99% of the length of the strands.

[0411] Neither the identity of the sense sequence nor the homology of the antisense sequence need to be 100% complementarity to the target sequence.

[0412] In some embodiments, separating the sense and antisense sequence of the stem loop structure of the modulatory polynucleotide is a loop sequence (also known as a loop motif, linker or linker motif). The loop sequence may be of any length, between 4-30 nucleotides, between 4-20 nucleotides, between 4-15 nucleotides, between 5-15 nucleotides, between 6-12 nucleotides, 6 nucleotides, 7 nucleotides, 8 nucleotides, 9 nucleotides, 10 nucleotides, 11 nucleotides, 12 nucleotides. 13 nucleotides, 14 nucleotides, and/or 15 nucleotides.

[0413] In some embodiments, the loop sequence comprises a nucleic acid sequence encoding at least one UGUG motif. In some embodiments, the nucleic acid sequence encoding the UGUG motif is located at the 5′ terminus of the loop sequence.

[0414] In some embodiments, spacer regions may be present in the modulatory polynucleotide to separate one or more modules (e.g., 5′ flanking region, loop motif region, 3′ flanking region, sense sequence, antisense sequence) from one another. There may be one or more such spacer regions present.

[0415] In some embodiments, a spacer region of between 8-20, i.e., 8, 9, 10, 11, 12, 13, 14, 15, 16, 17, 18, 19, or 20 nucleotides may be present between the sense sequence and a flanking region sequence.

[0416] In some embodiments, the length of the spacer region is 13 nucleotides and is located between the 5′ terminus of the sense sequence and the 3′ terminus of the flanking sequence. In some embodiments, a spacer is of sufficient length to form approximately one helical turn of the sequence.

[0417] In some embodiments, a spacer region of between 8-20, i.e., 8, 9, 10, 11, 12, 13, 14, 15, 16, 17, 18, 19, or 20 nucleotides may be present between the antisense sequence and a flanking sequence.

[0418] In some embodiments, the spacer sequence is between 10-13, i.e., 10, 11, 12 or 13 nucleotides and is located between the 3′ terminus of the antisense sequence and the 5′ terminus of a flanking sequence. In some embodiments, a spacer is of sufficient length to form approximately one helical turn of the sequence.

[0419] In some embodiments, the molecular scaffold of the modulatory polynucleotide comprises in the 5′ to 3′ direction, a 5′ flanking sequence, a 5′ arm, a loop motif, a 3′ arm and a 3′ flanking sequence, As a non-limiting example, the 5′ arm may comprise a nucleic acid sequence encoding a sense sequence and the 3′ arm comprises a nucleic acid sequence encoding the antisense sequence. In another non-limiting example, the 5′ arm comprises a nucleic acid sequence encoding the antisense sequence and the 3′ arm comprises a nucleic acid sequence encoding the sense sequence.

[0420] In some embodiments, the 5′ arm, sense and/or antisense sequence, loop motif and/or 3′ arm sequence may be altered (e.g., substituting 1 or more nucleotides, adding nucleotides and/or deleting nucleotides). The alteration may cause a beneficial change in the function of the construct (e.g., increase knock-down of the target sequence, reduce degradation of the construct, reduce off target effect, increase efficiency of the payload, and reduce degradation of the payload).

[0421] In some embodiments, the molecular scaffold of the modulatory polynucleotides is aligned in order to have the rate of excision of the guide strand (also referred to herein as the antisense strand) be greater than the rate of excision of the passenger strand (also referred to herein as the sense strand). The rate of excision of the guide or passenger strand may he, independently, 1%, 2%, 3%, 4%, 5%, 10%, 15%, 20%, 25%, 30%, 35%, 40%, 45%, 50%, 55%, 60%, 65%, 70%, 75%, 80%, 85%, 90%, 95%, 99% or more than 99%. As a non-limiting example, the rate of excision of the guide strand is at least 80%. As another non-limiting example, the rate of excision of the guide strand is at least 90%.

[0422] In some embodiments, the rate of excision of the guide strand is greater than the rate of excision of the passenger strand. In one aspect, the rate of excision of the guide strand may be at least 1%, 2%, 3%, 4%, 5%, 10%, 15%, 20%, 25%, 30%, 35%, 40%, 45%, 50%, 55%, 60%, 65%, 70%, 75%, 80%, 85%, 90%, 95%, 99% or more than 99% greater than the passenger strand.

[0423] In some embodiments, the efficiency of excision of the guide strand is at least 60%, 65%, 70%, 75%, 80%, 85%, 90%, 95%, 99% or more than 99%. As a non-limiting example, the efficiency of the excision of the guide strand is greater than 80%.

[0424] In some embodiments, the efficiency of the excision of the guide strand is greater than the excision of the passenger strand from the molecular scaffold. The excision of the guide strand may be 2, 3, 4, 5, 6, 7, 8, 9, 10 or more than 10 times more efficient than the excision of the passenger strand from the molecular scaffold.

[0425] In some embodiments, the molecular scaffold comprises a dual function targeting modulatory polynucleotide. As used herein, a “dual-function targeting” modulatory polynucleotide is a polynucleotide where both the guide and passenger strands knock down the same target or the guide and passenger strands knock down different targets.

[0426] In some embodiments, the molecular scaffold of the modulatory polynucleotides described herein may comprise a 5′ flanking region, a loop motif region and a 3′ flanking region. Non-limiting examples of the sequences for the 5′ flanking region, loop motif region (may also be referred to as a linker region) and the 3′ flanking region which may be used, or fragments thereof used, in the modulatory polynucleotides described herein are shown in Tables 7-9.

TABLE 7
5′ Flanking Regions for Molecular Scaffold

| 5′ | | 5′ |
|---|---|---|
| Flanking | | Flanking |
| Region | 5′ Flanking | Region |
| Name | Region Sequence | SEQ ID |
| 5F3 | GTGCTGGGCGGGGGGCGGCGGGCCCTCCCGC | 1163 |
| | AGAACACCATGCGCTCCACGGAA | |
| 5F1 | GTGCTGGGCGGGGGGCGGCGGGCCCTCCCGC | 1161 |
| | AGAACACCATGCGCTCTTCGGAA | |
| 5F2 | GAAGCAAAGAAGGGGCAGAGGGAGCCCGTGA | 1162 |
| | GCTGAGTGGGCCAGGGACTGGGAGAAGGAGT | |
| | GAGGAGGCAGGGCCGGCATGCCTCTGCTGCT | |
| | GGCCAGA | |
| 5F4 | GGGCCCTCCCGCAGAACACCATGCGCTCCAC | 1164 |
| | GGAA | |
| 5F5 | CTCCCGCAGAACACCATGCGCTCCACGGAA | 1165 |
| 5F6 | GTGCTGGGCGGGGGGCGGCGGGCCCTCCCGC | 1166 |
| | AGAACACCATGCGCTCCACGGAAG | |
| 5F7 | GTGCTGGGCGGGGGGCGGCGGGCCCTCCCGC | 1167 |
| | AGAACACCATGCGCTCCTCGGAA | |

TABLE 8
Loop Motif Regions for Molecular Scaffold

| Loop | | Loop |
|---|---|---|
| Motif | | Motif |
| Region | Loop Motif | Region |
| Name | Region Sequence | SEQ ID |
| L5 | GTGGCCACTGAGAAG | 1172 |
| L1 | TGTGACCTGG | 1168 |
| L2 | TGTGATTTGG | 1169 |
| L3 | GTCTGCACCTGTCACTAG | 1170 |
| L4 | GTGACCCAAG | 1171 |
| L6 | GTGACCCAAT | 1173 |
| L7 | GTGACCCAAC | 1174 |
| L8 | GTGGCCACTGAGAAA | 1175 |

TABLE 9
3′ Flanking Regions for Molecular Scaffold

| 3′ | | 3′ |
|---|---|---|
| Flanking | | Flanking |
| Region | | Region |
| Name | 3′ Flanking Region Sequence | SEQ ID |
| 3F1 | CTGAGGAGCGCCTTGACAGCAGCCATG | 1178 |
| | GGAGGGCCGCCCCCTACCTCAGTGA | |
| 3F2 | CTGTGGAGCGCCTTGACAGCAGCCATG | 1179 |
| | GGAGGGCCGCCCCCTACCTCAGTGA | |
| 3F3 | TGGCCGTGTAGTGCTACCCAGCGCTGG | 1180 |
| | CTGCCTCCTCAGCATTGCAATTCCTCT | |
| | TCCCATCTGGGCACCAGTCAGCTACCC | |
| | TGGTGGGAATCTGGGTAGCC | |
| 3F4 | CTGAGGAGCGCCTTGACAGCAGCCATG | 1181 |
| | GGAGGGCC | |
| 3F5 | CTGCGGAGCGCCTTGACAGCAGCCATG | 1182 |
| | GGAGGGCCGCCCCCTACCTCAGTGA | |

[0427] In some embodiments, the molecular scaffold may comprise at least one 5′ flanking region, fragment or variant thereof listed in Table 7, As a non-limiting example, the 5′ flanking region may be 5F1, 5F2, 5F3, 5F4, 5F5, 5F6, or 5F7.

[0428] In some embodiments, the molecular scaffold may comprise at least one 5F1 flanking region.

[0429] In some embodiments, the molecular scaffold may comprise at least one 5F2 flanking region.

[0430] In some embodiments, the molecular scaffold may comprise at least one 5F3 flanking region.

[0431] In some embodiments, the molecular scaffold may comprise at least one 5F4 flanking region.

[0432] In some embodiments, the molecular scaffold may comprise at least one 5F5 flanking region.

[0433] In some embodiments, the molecular scaffold may comprise at least one 5F6 flanking region.

[0434] In some embodiments, the molecular scaffold may comprise at least one 5F7 flanking region,

[0435] In some embodiments, the molecular scaffold may comprise at least one loop motif region, fragment or variant thereof listed in Table 8. As a non-limiting example, the loop motif region may be L1, L2, L3, L4, L5, L6, L7, or L8.

[0436] In some embodiments, the molecular scaffold may comprise at least one L1 loop motif region.

[0437] In some embodiments, the molecular scaffold may comprise at least one L2 loop motif region.

[0438] In some embodiments, the molecular scaffold may comprise at least one L3 loop motif region.

[0439] In some embodiments, the molecular scaffold may comprise at least one L4 loop motif region.

[0440] In some embodiments, the molecular scaffold may comprise at least one L5 loop motif region.

[0441] In some embodiments, the molecular scaffold may comprise at least one L6 loop motif region.

[0442] In some embodiments, the molecular scaffold may comprise at least one L7 loop motif region.

[0443] In some embodiments, the molecular scaffold may comprise at least one L8 loop motif region.

[0444] In some embodiments, the molecular scaffold may comprise at least one 3′ flanking region, fragment or variant thereof listed in Table 9. As a non-limiting example, the 3′ flanking region may be 3F1, 3F2, 3F3, 3F4, or 3F5.

[0445] In some embodiments, the molecular scaffold may comprise at least one 3F1 flanking region.

[0446] In some embodiments, the molecular scaffold may comprise at least one 3F2 flanking region.

[0447] In some embodiments, the molecular scaffold may comprise at least one 3F3 flanking region.

[0448] in some embodiments, the molecular scaffold may comprise at least one 3F4 flanking region.

[0449] In some embodiments, the molecular scaffold may comprise at least one 3F5 flanking region.

[0450] In some embodiments, the molecular scaffold may comprise at least one 5′ flanking region, fragment or variant thereof, and at least one loop motif region, fragment or variant thereof, as described in Tables 7 and 8. As a non-limiting example, the 5′ flanking region and the loop motif region may be 5F1 and L1, 5F1 and L2, 5F1 and L3, 5F1 and L4, 5F1 and L5, 5F1 and L6, 5F1 and L7, 5F1 and L8, 5F2 and L1, 5F2 and L2, 5F2 and L3, 5F2 and L4, 5F2 and L5, 5F2 and L6, 5F2 and L7, 5F2 and L8, 5F3 and L1, 5F3 and L2, 5F3 and L3, 5F3 and L4, 5F3 and L5, 5F3 and L6, 5F3 and L7, 5F3 and L8, 5F4 and L1, 5F4 and L2, 5F4 and L3, 5F4 and L4, 5F4 and L5, 5F4 and L6, 5F4 and L7, 5F4 and L8, 5F5 and L1, 5F5 and L2, 5F5 and L3, 5F5 and L4, 5F5 and L5, 5F5 and L6, 5F5 and L7, 5F5 and L8, 5F6 and L1, 5F6 and L2, 5F6 and L3, 5F6 and L4, 5F6 and L5, 5F6 and L6, 5F6 and L7, 5F6 and L8, 5F7 and L1, 5F7 and L2, 5F7 and L3, 5F7 and L4, 5F7 and L5, 5F7 and L6, 5F7 and L7, and 5F7 and L8.

[0451] In some embodiments, the molecular scaffold may comprise at least one 5F2 flanking region and at least one L1 loop motif region.

[0452] In some embodiments, the molecular scaffold may comprise at least one 5F1 flanking region and at least one L4 loop motif region.

[0453] In some embodiments, the molecular scaffold may comprise at least one 5F7 flanking region and at least one L8 loop motif region,

[0454] In some embodiments, the molecular scaffold may comprise at least one 5F3 flanking region and at least one L4 loop motif region.

[0455] In some embodiments, the molecular scaffold may comprise at least one 5F3 flanking region and at least one L5 loop motif region.

[0456] In some embodiments, the molecular scaffold may comprise at least one 5F4 flanking region and at least one L4 loop motif region.

[0457] In some embodiments, the molecular scaffold may comprise at least one 5F3 flanking region and at least one L7 loop motif region,

[0458] In some embodiments, the molecular scaffold may comprise at least one 5F5 flanking region and at least one L4 loop motif region.

[0459] In some embodiments, the molecular scaffold may comprise at least one 5F6 flanking region and at least one L4 loop motif region.

[0460] In some embodiments, the molecular scaffold may comprise at least one 5F3 flanking region and at least one L6 loop motif region.

[0461] In some embodiments, the molecular scaffold may comprise at least one 5F7 flanking region and at least one L4 loop motif region.

[0462] In some embodiments, the molecular scaffold may comprise at least one 5F2 flanking region and at least one L2 loop motif region.

[0463] In some embodiments, the molecular scaffold may comprise at least one 5F1 flanking region and at least one L1 loop motif region.

[0464] In some embodiments, the molecular scaffold may comprise at least one 5F1 flanking region and at least one L2 loop motif region,

[0465] In some embodiments, the molecular scaffold may comprise at least one 3′ flanking region, fragment or variant thereof, and at least one motif region, fragment or variant thereof, as described in Tables 8 and 9. As a non-limiting example, the 3′ flanking region and the loop motif region may be 3F1 and L1, 3F1 and L2, 3F1 and L3, 3F1 and L4, 3F1 and L5, 3F1 and L6, 3F1 and L7, 3F1 and L8, 3F2 and L1, 3F2 and L2, 3F2 and L3, 3F2 and L4, 3F2 and L5, 3F2 and L6, 3F2 and L7, 3F2 and L8, 3F3 and L1, 3F3 and L2, 3F3 and L3, 3F3 and L4, 3F3 and L5, 3F3 and L6, 3F3 and L7, 3F3 and L8, 3F4 and L1, 3F4 and L2, 3F4 and L3, 3F4 and L4, 3F4 and L5, 3F4 and L6, 3F4 and L7, 3F4 and L8, 3F5 and L1, 3F5 and L2, 3F5 and L3, 3F5 and L4, 3F5 and L5, 3F5 and L6, 3F5 and L7, and 3F5 and L8.

[0466] In some embodiments, the molecular scaffold may comprise at least one L1 loop motif region and at least one 3F2 flanking region.

[0467] In some embodiments, the molecular scaffold may comprise at least one L4 loop motif region and at least one 3F1 flanking region.

[0468] In some embodiments, the molecular scaffold may comprise at least one L8 loop motif region and at least one 3F5 flanking region.

[0469] In some embodiments, the molecular scaffold may comprise at least one L5 loop motif region and at least 3F1 flanking region.

[0470] In some embodiments, the molecular scaffold may comprise at east one L4 loop motif region and at least one 3F4 flanking, region.

[0471] In some embodiments, the molecular scaffold may comprise at least one L7 loop motif region and at least one 3F1 flanking region.

[0472] In some embodiments, the molecular scaffold may comprise at least one L6 loop motif region and at least one 3F1 flanking region.

[0473] In some embodiments, the molecular scaffold may comprise at least one L4 loop motif region and at least one 3E5 flanking region.

[0474] In some embodiments, the molecular scaffold may comprise at least one L2 loop motif region and at least one 3F2 flanking region.

[0475] In some embodiments, the molecular scaffold may comprise at least one L1 loop motif region and at least one 3F3 flanking region.

[0476] In some embodiments, the molecular scaffold may comprise at least one L5 loop motif region and at least one 3F4 flanking region.

[0477] In some embodiments, the molecular scaffold may comprise at least one L1 loop motif region and at least one 3F1 flanking region.

[0478] In some embodiments, the molecular scaffold may comprise at least one L2 loop motif region and at least one 3F1 flanking region.

[0479] In some embodiments, the molecular scaffold may comprise at least one 5′ flanking region, fragment or variant thereof, and at least one 3′ flanking region, fragment or variant thereof, as described in Tables 7 and 9. As a non-limiting example, the flanking regions may he 5F1 and 3F1, 5F1 and 3F2, 5F1 and 3F3, 5F1 and 3F4, 5F1 and 5F5, 5F2 and 3F1, 5F2 and 3F2, 5F2 and 3F3, 5F2 and 3F4, 5F2 and 3F5, 5F3 and 3F1, 5F3 and 3F2, 5F3 and 3F3, 5F3 and 3F4, 5F3 and 3F5, 5F4 and 3F1, 5F4 and 3F2, 5F4 and 3F3, 5F4 and 3F4, 5F4 and 3F5, 5F5 and 3F1, 5F5 and 3F2, 5F5 and 3F3, 5F5 and 3F4, 5F5 and 3F5, 5F6 and 3F1, 5F6 and 3F2, 5F6 and 3F3, 5F6 and 3F4, 5F6 and 3F5, 5F7 and 3F1, 5F7 and 3F2, 5F7 and 3F3, 5F7 and 3F4, and 5F7 and 3F5.

[0480] In some embodiments, the molecular scaffold may comprise at least one 5F2 5′ flanking region and at least one 3F2 3′ flanking region.

[0481] In some embodiments, the molecular scaffold may comprise at least one 5F1 5′ flanking region and at least one 3F1 3′ flanking region.

[0482] In some embodiments, the molecular scaffold may comprise at least one 5F7 5′ flanking region and at least one 3F5 3′ flanking region.

[0483] In some embodiments, the molecular scaffold may comprise at east one 5F3 5′ flanking region and at least one 3F1 3′ flanking region.

[0484] In some embodiments, the molecular scaffold may comprise at least one 5F4 5′ flanking region and at least one 3F4 3′ flanking region.

[0485] In some embodiments, the molecular scaffold may comprise at least one 5F5 5′ flanking region and at least one 3F4 3′ flanking region,

[0486] In some embodiments, the molecular scaffold may comprise at least one 5F6 5′ flanking region and at least one 3F1 3′ flanking region.

[0487] In some embodiments, the molecular scaffold may comprise at least one 5F2 5′ flanking region and at least one 3F3 3′ flanking region.

[0488] In some embodiments, the molecular scaffold may comprise at least one 5F3 5′ flanking region and at least one 3F4 3′ flanking region.

[0489] In some embodiments, the molecular scaffold may comprise at least one 5F1 5′ flanking region and at least one 3F2 3′ flanking region.

[0490] In some embodiments, the molecular scaffold may comprise at least one 5′ flanking region, fragment or variant thereof, at least one loop motif region, fragment or variant thereof, and at least one 3′ flanking region as described in Tables 7-9. As a non-limiting example, the flanking and loop motif regions may be 5F1, L1 and 3F1; 5F1, L1 and 3F2; 5F1, L1 and 3F3; 5F1, L1 and 3F4; 5F1, L1 and 3F5; 5F2, L1 and 3F1; 5F2, L1 and 3F2; 5F2, L1 and 3F3; 5F2, L1 and 3F4; 5F2, L1 and 3F5; 5F3, L1 and 3F3; 5F3, L1 and 3F2; 5F3, L1 and 3F3; 5F3, L1 and 3F4; 5F3, L1 and 3F5; 5F4, L1 and 3F4; 5F4, L1 and 3F2; 5F4, L1 and 3F3; 5F4, L1 and 3F4; 5F4, L1 and 3F5; 5F5, L1 and 3F1; 5F5, L1 and 3F2; 5F5, L1 and 3F3; 5F5, L1 and 3F4; 5F5, L1 and 3F5; 5F6, L1 and 3F1; 5F6, L1 and 3F2; 5F6, L1 and 5F5; 5F6, L1 and 3F4; 5F6, L1 and 3F5; 5F7, L1 and 3F1; 5F7, L1 and 3F2; 5F7, L1 and 3F3; 5F7, L1 and 3F4; 5F7, L1 and 3F5; 5F1, L2 and 3F1; 5F1, L2 and 3F2; 5F1, L2 and 3F3; 5F1, L2 and 3F4; 5F1, L2 and 3F5; 5F2, L2 and 3F1; 5F2, L2 and 3F2; 5F2, L2 and 3F3; 5F2, L2 and 3F4; 5F2, L2 and 3F5; 5F3, L2 and 3F1; 5F3, L2 and 3F2; 5F3, L2 and 3F3; 5F3, L2 and 3F4; 5F3, L2 and 3F5; 5F4, L2 and 3F1; 5F4, L2 and 3F2; 5F4, L2 and 3F3; 5F4, L2 and 3F4; 5F4, L2 and 3F5; 5F5, L2 and 3F1; 5F5, L2 and 3F2; 5F5, L2 and 3F3; 5F5, L2 and 3F4; 5F5, L2 and 5F5; 5F6, L2 and 3F1; 5F6, L2 and 3F2; 5F6, L2 and 3F3; 5F6, L2 and 3F4; 5F6, L2 and 3F5; 5F7, L2 and 3F1; 5F7, L2 and 3F2; 5F7, L2 and 3F3; 5F7, L2 and 3F4; 5F7, L2 and 3F5; 5F1, L3 and 3F1; 5F1, L3 and 3F2; 5F1, L3 and 3F3; 5F1, L3 and 3F4; 5F1, L3 and 3F5; 5F2, L3 and 3F1; 5F2, L3 and 3F2; 5F2, L3 and 3F3; 5F2, L3 and 3F4; 5F2, L5 and 3F5; 5F3, L5 and 3F1; 5F3, L3 and 3F2; 5F3, L3 and 3F3; 5F3, L3 and 3F4; 5F3, L3 and 3F5; 5F4, L3 and 3F1; 5F4, L3 and 3F2; 5F4, L3 and 3F3; 5F4, L3 and 3F4; 5F4, L3 and 3F5; 5F5, L3 and 3F1; 5F5, L3 and 3F2; 5F5, L3 and 3F3; 5F5, L3 and 3F4; 5F5, L3 and 3F5; 5F6, L3 and 3F1; 5F6, L3 and 3F2; 5F6, L3 and 3F3; 5F6, L3 and 3F4; 5F6, L3 and 3F5; 5F7, L3 and 3F1; 5F7, L3 and 3F2; 5F7, L3 and 3F3; 5F7, L3 and 3F4; 5F7, L3 and 3F5; 5F1, L4 and 3F1; 5F1, L4 and 3F2; 5F1, L4 and 3F3; 5F1, L4 and 3F4; 5F1, L4 and 3F5; 5F2, L4 and 3F1; 5F2, L4 and 3F2; 5F2, L4 and 3F3; 5F2, L4 and 3F4; 5F2, L4 and 3F5; 5F3, L4 and 3F1; 5F, L4 and 3F2; 5F3, L4 and 3F3; 5F3, L4 and 3F4; 5F3, L4 and 3F5; 5F4, L4 and 3F1; 5F4, L4 and 3F2; 5F4, L4 and 3F3; 5F4, L4 and 3F4; 5F4, L4 and 3F5; 5F5, L4 and 3F1; 5F5, L4 and 3F2; 5F5, L4 and 3F3; 5F5, L4 and 3F4; 5F5, L4 and 3F5; 5F6, L4 and 3F1; 5F6, L4 and 3F2; 5F6, L4 and 3F3; 5F6, L4 and 3F4; 5F6, L4 and 3F5; 5F7, L4 and 3F1; 5F7, L4 and 3F2; 5F7, L4 and 3F3; 5F7, L4 and 3F4; 5F7, L4 and 3F5; 5F1, L5 and 5F1; 5F1, L5 and 3F2; 5F1, L5 and 3F3; 5F1, L5 and 3F4; 5F1, L5 and 3F5; 5F2, L5 and 3F1; 5F2, L5 and 3F2; 5F2, L5 and 3F3; 5F2, L5 and 3F4; 5F2, L5 and 3F5; 5F3, L5 and 3F1; 5F3, L5 and 3F2; 5F3, L5 and 3F3; 5F3, L5 and 3F4; 5F3, L5 and 3F5; 5F4, L5 and 3F1; 5F4, L5 and 3F2; 5F4, L5 and 3F3; 5F4, L5 and 3F4; 5F4, L5 and 3F5; 5F5, L5 and 3F1; 5F5, L5 and 3F2; 5F5, L5 and 3F3; 5F5, L5 and 3F4; 5F5, L5 and 3F5; 5F6, L5 and 3F1; 5F6, L5 and 3F2; 5F6, L5 and 3F3; 5F6, L5 and 3F4; 5F6, L5 and 3F5; 5F7, L5 and 3F1; 5F7, L5 and 3F2; 5F7, L5 and 3F3; 5F7, L5 and 3F4; 5F7, L5 and 3F5; 5F1, L6 and 5F1; 5F1, L6 and 3F2; 5F1, L6 and 3F3; 5F1, L6 and 3F4; 5F1, L6 and 3F5; 5F2, L6 and 3F1; 5F2, L6 and 3F2; 5F2, L6 and 3F3; 5F2, L6 and 3F4; 5F2, L6 and 3F5; 5F3, L6 and 3F1; 5F3, L6 and 3F2; 5F3, L6 and 3F3; 5F3, L6 and 3F4; 5F3, L6 and 3F5; 5F4, L6 and 3F1; 5F4, L6 and 3F2; 5F4, L6 and 3F3; 5F4, L6 and 3F4; 5F4, L6 and 3F5; 5F5, L6 and 3F1; 5F5, L6 and 3F2; 5F5, L6 and 3F3; 5F5, L6 and 3F4; 5F5, L6 and 3F5; 5F6, L6 and 3F1; 5F6, L6 and 3F2; 5F6, L6 and 3F3; 5F6, L6 and 3F4; 5F6, L6 and 3F5; 5F7, L6 and 3F1; 5F7, L6 and 3F2; 5F7, L6 and 3F3; 5F7, L6 and 3F4; 5F7, L6 and 3F5; 5F1, L7 and 3F1; 5F1, L7 and 3F2; 5F1, L7 and 3F3; 5F1, L7 and 3F4; 5F1, L7 and 3F5; 5F2, L7 and 3F1; 5F2, L7 and 3F2; 5F2, L7 and 3F3; 5F2, L7 and 3F4; 5F2, L7 and 3F5; 5F3, L7 and 3F1; 5F3, L7 and 3F2; 5F3, L7 and 3F3; 5F, L7 and 3F4; 5F3, L7 and 3F5; 5F4, L7 and 3F1; 5F4, L7 and 3F2; 5F4, L7 and 3F3; 5F4, L7 and 3F4; 5F4, L7 and 3F5; 5F5, L7 and 3F1; 5175, L7 and 3F2; 5F5, L7 and 3F3; 5F5, L7 and 3F4; 5F5, L7 and 3F5; 5F6, L7 and 3F1; 5F6, L7 and 3F2; 5F6, L7 and 3F3; 5F6, L7 and 3F4; 5F6, L7 and 3F5; 5F7, L7 and 3F1; 5F7, L7 and 3F2; 5F7, L7 and 3F3: 5F7, L7 and 3F4; 5F7, L7 and 3F5; 5F I, L8 and 3F1; 5F1, L8 and 3F2; 5F1, L8 and 3F3; 5F1, L8 and 3F4; 5F1, L8 and 3F5; 5F2, L8 and 3F1; 5F2, L8 and 3F2; 5F2, L8 and 3F3; 5F2, L8 and 3F4; 5F2, L8 and 3F5; 5F3, L8 and 3F1; 5F3, L8 and 3F2; 5F3, L8 and 3F3; 5F3, L8 and 3F4; 5F, L8 and 3F5; 5F4, L8 and 3F1; 5F4, L8 and 3F2; 5F4, L8 and 3F3; 5F4, L8 and 3F4; 5F4, L8 and 3F5; 5F5, L8 and 3F1; 5F5, L8 and 3F2; 5F5, L8 and 3F3; 5F5, L8 and 3F4; 5F5, L8 and 3F5; 5F6, L8 and 3F1; 5F6, L8 and 3F2; 5F6, L8 and 3F3; 5F6, L8 and 3F4; 5F6, L8 and 3F5; 5F7, L8 and 3F1; 5F7, L8 and 3F2; 5F7, L8 and 3F3; 5F7, L8 and 3F4; and 5F7, L8 and 3F5.

[0491] In some embodiments, the molecular scaffold may comprise at least one 5F2 5′ flanking region, at least one L1 loop motif region, and at least one 3F2 3′ flanking region.

[0492] In some embodiments, the molecular scaffold may comprise at least one 5F1 5′ flanking region, at least one L4 loop motif region, and at least one 3F1 3′ flanking region,

[0493] In some embodiments, the molecular scaffold may comprise at least one 5F7 5′ flanking region, at least one L8 loop motif region, and at least one 3F5 3′ flanking region.

[0494] In some embodiments, the molecular scaffold may comprise at least one 5F3 5′ flanking region, at least one L4 loop motif region, and at least one 3F1 3′ flanking region.

[0495] In some embodiments, the molecular scaffold may comprise at least one 5F3 5′ flanking region, at least one L5 loop motif region, and at least one 3F1 3′ flanking region.

[0496] In some embodiments, the molecular scaffold may comprise at least one 5F4 5′ flanking region, at least one L4 loop motif region, and at least one 3F4 3′ flanking region.

[0497] In some embodiments, the molecular scaffold may comprise at least one 5F3 5′ flanking region, at least one L7 loop motif region, and at least one 3F1 3′ flanking region.

[0498] In some embodiments, the molecular scaffold may comprise at least one 5F5 5′ flanking region, at least one L4 loop motif region, and at least one 3F4 3′ flanking region.

[0499] In some embodiments, the molecular scaffold may comprise at least one 5F6 5′ flanking region, at least one L4 loop motif region, and at least one 3F1 3′ flanking region.

[0500] in some embodiments, the molecular scaffold may comprise at least one 5F3 5′ flanking region, at least one L6 loop motif region, and at least one 3F1 3′ flanking region.

[0501] In some embodiments, the molecular scaffold may comprise at least one 5F7 5′ flanking region, at least one L4 loop motif region, and at least one 3F5 3′ flanking region.

[0502] In some embodiments, the molecular scaffold may comprise at least one 5F2 5′ flanking region, at least one L2 loop motif region, and at least one 3F2 3′ flanking region.

[0503] In some embodiments, the molecular scaffold may comprise at least one 5F2 5′ flanking region, at least one L1 loop motif region, and at least one 3F3 3′ flanking region.

[0504] In some embodiments, the molecular scaffold may comprise at least one 5F3 5′ flanking region, at least one L5 loop motif region, and at least one 3F4 3′ flanking region.

[0505] In some embodiments, the molecular scaffold may comprise at least one 5F1 5′ flanking region, at least one L1 loop motif region, and at least one 3F1 3′ flanking region,

[0506] In some embodiments, the molecular scaffold may comprise at least one 5F1 5′ flanking region, at least one L2 loop motif region, and at least one 3F1 3′ flanking region.

[0507] in some embodiments, the molecular scaffold may comprise at least one 5F1 5′ flanking region, at least one L1 loop motif region, and at least one 3F2 3′ flanking region.

[0508] In some embodiments, the molecular scaffold may comprise at least one 5F2 5′ flanking region, at least one L3 loop motif region, and at least one 3F3 3′ flanking region.

[0509] In some embodiments, the molecular scaffold may be a natural pri-miRNA scaffold. As a non-limiting example, the molecular scaffold may be a scaffold derived from the human miR155 scaffold.

[0510] in some embodiments, the molecular scaffold may comprise one or more linkers known in the art. The linkers may separate regions or one molecular scaffold from another. As a non-limiting example, the molecular scaffold may be polycistronic.

Modulatory Polynucleotide Comprising Molecular Scaffold and siRNA Molecule

[0511] In some embodiments, the modulatory polynucleotide may comprise 5′ and 3′ flanking regions, loop motif region, and nucleic acid sequences encoding sense sequence and antisense sequence as described in Tables 10 and 11. In Tables 10 and 11, the DNA sequence identifier for the passenger and guide strands are described as well as the 5′ and 3′ Flanking Regions and the Loop region (also referred to as the linker region). In Tables 10 and 11, the “miR” component of the name of the sequence does not necessarily correspond to the sequence numbering of miRNA genes (e.g., VOYHTmiR-102 is the name of the sequence and does not necessarily mean that miR-102 is part of the sequence).

TABLE 10
Modulatory Polynucleotide Sequence Region (5′ to 3′)

| Modulatory | 5′ Flanking to | | | | | |
|---|---|---|---|---|---|---|
| Polynucleotide | 3′ Flanking | 5′ Flanking | Passenger | Loop | Guide | 3′ Flanking |
| Construct Name | SEQ ID NO | SEQ ID NO | SEQ ID NO | SEQ ID NO | SEQ ID NO | SEQ ID NO |
| VOYHTmiR-102.214 | 1183 | 1161 | 1296 | 1168 | 1337 | 1178 |
| VOYHTmiR-104.214 | 1184 | 1161 | 1303 | 1168 | 1337 | 1178 |
| VOYHTmiR-109.214 | 1185 | 1161 | 1310 | 1169 | 1337 | 1178 |
| VOYHTmiR-114.214 | 1186 | 1161 | 1317 | 1168 | 1337 | 1179 |
| VOYHTmiR-116.214 | 1187 | 1161 | 1310 | 1168 | 1337 | 1179 |
| VOYHTmiR-127.214 | 1188 | 1162 | 1310 | 1170 | 1334 | 1180 |
| VOYHTmiR-102.218 | 1189 | 1161 | 1297 | 1168 | 1338 | 1178 |
| VOYHTmiR-104.218 | 1190 | 1161 | 1304 | 1168 | 1338 | 1178 |
| VOYHTmiR-109.218 | 1191 | 1161 | 1311 | 1169 | 1338 | 1178 |
| VOYHTmiR-114.218 | 1192 | 1161 | 1318 | 1168 | 1338 | 1179 |
| VOYHTmiR-116.218 | 1193 | 1161 | 1311 | 1168 | 1338 | 1179 |
| VOYHTmiR-127.218 | 1194 | 1162 | 1311 | 1170 | 1338 | 1180 |
| VOYHTmiR-102.219.o | 1195 | 1161 | 1280 | 1168 | 1333 | 1178 |
| VOYHTmiR-104.219.o | 1196 | 1161 | 1283 | 1168 | 1333 | 1178 |
| VOYHTmiR-109.219.o | 1197 | 1161 | 1280 | 1169 | 1333 | 1178 |
| VOYHTmiR-114.219 | 1198 | 1161 | 1286 | 1168 | 1333 | 1179 |
| VOYHTmiR-116.219.o | 1199 | 1161 | 1289 | 1168 | 1333 | 1179 |
| VOYHTmiR-127.219.o | 1200 | 1162 | 1280 | 1170 | 1333 | 1180 |
| VOYHTmiR-102.219.n | 1201 | 1161 | 1292 | 1168 | 1333 | 1178 |
| VOYHTmiR-104.219.n | 1202 | 1161 | 1293 | 1168 | 1333 | 1178 |
| VOYHTmiR-109.219.n | 1203 | 1161 | 1292 | 1169 | 1333 | 1178 |
| VOYHTmiR-116.219.n | 1204 | 1161 | 1294 | 1168 | 1333 | 1179 |
| VOYHTmiR-127.219.n | 1205 | 1162 | 1292 | 1170 | 1333 | 1180 |
| VOYHTmiR-102.257 | 1206 | 1161 | 1298 | 1168 | 1339 | 1178 |
| VOYHTmiR-104.257 | 1207 | 1161 | 1305 | 1168 | 1339 | 1178 |
| VOYHTmiR-109.257 | 1208 | 1161 | 1312 | 1169 | 1339 | 1178 |
| VOYHTmiR-114.257 | 1209 | 1161 | 1319 | 1168 | 1339 | 1179 |
| VOYHTmiR-116.257 | 1210 | 1161 | 1312 | 1168 | 1339 | 1179 |
| VOYHTmiR-127.257 | 1211 | 1162 | 1312 | 1170 | 1339 | 1180 |
| VOYHTmiR-102.894 | 1212 | 1161 | 1281 | 1168 | 1334 | 1178 |
| VOYHTmiR-104.894 | 1213 | 1161 | 1284 | 1168 | 1334 | 1178 |
| VOYHTmiR-109.894 | 1214 | 1161 | 1281 | 1169 | 1334 | 1178 |
| VOYHTmiR-114.894 | 1215 | 1161 | 1287 | 1168 | 1334 | 1179 |
| VOYHTmiR-116.894 | 1216 | 1161 | 1290 | 1168 | 1334 | 1179 |
| VOYHTmiR-127.894 | 1217 | 1162 | 1281 | 1170 | 1334 | 1180 |
| VOYHTmiR-102.907 | 1218 | 1161 | 1301 | 1168 | 1342 | 1178 |
| VOYHTmiR-104.907 | 1219 | 1161 | 1308 | 1168 | 1342 | 1178 |
| VOYHTmiR-109.907 | 1220 | 1161 | 1315 | 1169 | 1342 | 1178 |
| VOYHTmiR-114.907 | 1221 | 1161 | 1322 | 1168 | 1342 | 1179 |
| VOYHTmiR-116.907 | 1222 | 1161 | 1315 | 1168 | 1342 | 1179 |
| VOYHTmiR-127.907 | 1223 | 1162 | 1315 | 1170 | 1342 | 1180 |
| VOYHTmiR-102.372 | 1224 | 1161 | 1299 | 1168 | 1340 | 1178 |
| VOYHTmiR-104.372 | 1225 | 1161 | 1306 | 1168 | 1340 | 1178 |
| VOYHTmiR-109.372 | 1226 | 1161 | 1313 | 1169 | 1340 | 1178 |
| VOYHTmiR-114.372 | 1227 | 1161 | 1320 | 1168 | 1340 | 1179 |
| VOYHTmiR-116.372 | 1228 | 1161 | 1313 | 1168 | 1340 | 1179 |
| VOYHTmiR-127.372 | 1229 | 1162 | 1313 | 1170 | 1340 | 1180 |
| VOYHTmiR-102.425 | 1230 | 1161 | 1300 | 1168 | 1341 | 1178 |
| VOYHTmiR-104.425 | 1231 | 1161 | 1307 | 1168 | 1341 | 1178 |
| VOYHTmiR-109.425 | 1232 | 1161 | 1314 | 1169 | 1341 | 1178 |
| VOYHTmiR-114.425 | 1233 | 1161 | 1321 | 1168 | 1341 | 1179 |
| VOYHTmiR-116.425 | 1234 | 1161 | 1314 | 1168 | 1341 | 1179 |
| VOYHTmiR-127.425 | 1235 | 1162 | 1314 | 1170 | 1341 | 1180 |
| VOYHTmiR-102.032 | 1236 | 1161 | 1324 | 1168 | 1344 | 1178 |
| VOYHTmiR-104.032 | 1237 | 1161 | 1326 | 1168 | 1344 | 1178 |
| VOYHTmiR-109.032 | 1238 | 1161 | 1328 | 1169 | 1344 | 1178 |
| VOYHTmiR-114.032 | 1239 | 1161 | 1330 | 1168 | 1344 | 1179 |
| VOYHTmiR-116.032 | 1240 | 1161 | 1328 | 1168 | 1344 | 1179 |
| VOYHTmiR-127.032 | 1241 | 1162 | 1328 | 1170 | 1344 | 1180 |
| VOYHTmiR-102.020 | 1242 | 1161 | 1323 | 1168 | 1343 | 1178 |
| VOYHTmiR-104.020 | 1243 | 1161 | 1325 | 1168 | 1343 | 1178 |
| VOYHTmiR-109.020 | 1244 | 1161 | 1327 | 1169 | 1343 | 1178 |
| VOYHTmiR-114.020 | 1245 | 1161 | 1329 | 1168 | 1343 | 1179 |
| VOYHTmiR-116.020 | 1246 | 1161 | 1327 | 1168 | 1343 | 1179 |
| VOYHTmiR-127.020 | 1247 | 1162 | 1327 | 1170 | 1343 | 1180 |
| VOYHTmiR-102.016 | 1248 | 1161 | 1295 | 1168 | 1336 | 1178 |
| VOYHTmiR-104.016 | 1249 | 1161 | 1302 | 1168 | 1336 | 1178 |
| VOYHTmiR-109.016 | 1250 | 1161 | 1309 | 1169 | 1336 | 1178 |
| VOYHTmiR-114.016 | 1251 | 1161 | 1316 | 1168 | 1336 | 1179 |
| VOYHTmiR-116.016 | 1252 | 1161 | 1309 | 1168 | 1336 | 1179 |
| VOYHTmiR-127.016 | 1253 | 1162 | 1309 | 1170 | 1336 | 1180 |
| VOYHTmiR-102.579 | 1254 | 1161 | 1282 | 1168 | 1335 | 1178 |
| VOYHTmiR-104.579 | 1255 | 1161 | 1285 | 1168 | 1335 | 1178 |
| VOYHTmiR-109.579 | 1256 | 1161 | 1282 | 1169 | 1335 | 1178 |
| VOYHTmiR-114.579 | 1257 | 1161 | 1288 | 1168 | 1335 | 1179 |
| VOYHTmiR-116.579 | 1258 | 1161 | 1291 | 1168 | 1335 | 1179 |
| VOYHTmiR-127.579 | 1259 | 1162 | 1282 | 1170 | 1335 | 1180 |
| VOYHTmiR-104.579.1 | 1260 | 1161 | 1331 | 1171 | 1335 | 1178 |
| VOYHTmiR-104.579.2 | 1261 | 1163 | 1331 | 1171 | 1335 | 1178 |
| VOYHTmiR-104.579.3 | 1262 | 1163 | 1331 | 1172 | 1335 | 1178 |
| VOYHTmiR-104.579.4 | 1263 | 1164 | 1331 | 1171 | 1335 | 1181 |
| VOYHTmiR-104.579.6 | 1264 | 1165 | 1331 | 1171 | 1335 | 1181 |
| VOYHTmiR-104.579.7 | 1265 | 1166 | 1331 | 1171 | 1345 | 1178 |
| VOYHTmiR-104.579.8 | 1266 | 1163 | 1332 | 1173 | 1335 | 1178 |
| VOYHTmiR-104.579.9 | 1267 | 1167 | 1331 | 1171 | 1335 | 1182 |
| VOYHTmiR-102.020 | 1268 | 1161 | 1323 | 1168 | 1343 | 1178 |
| VOYHTmiR-102.032 | 1269 | 1161 | 1324 | 1168 | 1344 | 1178 |
| VOYHTmiR-104.020 | 1270 | 1161 | 1325 | 1168 | 1343 | 1178 |
| VOYHTmiR-104.032 | 1271 | 1161 | 1326 | 1168 | 1344 | 1178 |
| VOYHTmiR-109.020 | 1272 | 1161 | 1327 | 1169 | 1343 | 1178 |
| VOYHTmiR-109.032 | 1273 | 1161 | 1328 | 1169 | 1344 | 1178 |
| VOYHTmiR-114.020 | 1274 | 1161 | 1329 | 1168 | 1343 | 1179 |
| VOYHTmiR-114.032 | 1275 | 1161 | 1330 | 1168 | 1344 | 1179 |
| VOYHTmiR-116.020 | 1276 | 1161 | 1327 | 1168 | 1343 | 1179 |
| VOYHTmiR-116.032 | 1277 | 1161 | 1328 | 1168 | 1344 | 1179 |
| VOYHTmiR-127.020 | 1278 | 1162 | 1327 | 1170 | 1343 | 1180 |
| VOYHTmiR-127.032 | 1279 | 1162 | 1328 | 1170 | 1344 | 1180 |

TABLE 11
Modulatory Polynucleotide Sequence Region (5′ to 3′)

| | 5′ Flanking to | | | | | |
|---|---|---|---|---|---|---|
| | 3′ Flanking | 5′ Flanking | Guide | Loop | Passenger | 3′ Flanking |
| Name | SEQ ID NO | SEQ ID NO | SEQ ID NO | SEQ ID NO | SEQ ID NO | SEQ ID NO |
| VOYHTmiR-104.579.5 | 1346 | 1163 | 1350 | 1174 | 1348 | 1178 |
| VOYHTmiR-104.579.10 | 1347 | 1167 | 1351 | 1175 | 1349 | 1182 |

### AAV Particles Comprising Modulator Polynucleotides

[0512] In some embodiments, the AAV particle comprises a viral genome with a payload region comprising a modulatory polynucleotide sequence. In such an embodiment, a viral genome encoding more than one polypeptide may be replicated and packaged into a viral particle. A target cell transduced with a viral particle comprising a modulatory polynucleotide may express the encoded sense and/or antisense sequences in a single cell.

[0513] In some embodiments, the AAV particles are useful in the field of medicine for the treatment, prophylaxis, palliation or amelioration of neurological diseases and/or disorders.

[0514] Non-limiting examples of ITR to ITR sequences of AAV particles comprising a viral genome with a payload region comprising a modulatory polynucleotide sequence are described in Table 12.

TABLE 12
ITR to ITR Sequences of AAV Particles
comprising Modulatory Polynucleotides

| ITR to ITR | ITR to ITR | Modulatory Polynucleotide |
|---|---|---|
| Construct Name | SEQ ID NO | SEQ ID NO |
| VOYHT1 | 1352 | 1262 |
| VOYHT2 | 1353 | 1262 |
| VOYHT3 | 1354 | 1250 |
| VOYHT4 | 1355 | 1347 |
| VOYHT5 | 1356 | 1262 |
| VOYHT6 | 1357 | 1262 |
| VOYHT7 | 1358 | 1250 |
| VOYHT8 | 1359 | 1347 |
| VOYHT9 | 1360 | 1262 |
| VOYHT10 | 1361 | 1262 |
| VOYHT11 | 1362 | 1250 |
| VOYHT12 | 1363 | 1347 |
| VOYHT13 | 1364 | 1262 |
| VOYHT14 | 1365 | 1249 |
| VOYHT15 | 1366 | 1259 |
| VOYHT16 | 1367 | 1249 |
| VOYHT17 | 1368 | 1262 |
| VOYHT18 | 1369 | 1262 |
| VOYHT19 | 1370 | 1262 |
| VOYHT20 | 1371 | 1262 |
| VOYHT21 | 1372 | 1262 |
| VOYHT22 | 1373 | 1262 |
| VOYHT23 | 1374 | 1262 |
| VOYHT24 | 1375 | 1262 |
| VOYHT25 | 1376 | 1249 |
| VOYHT26 | 1377 | 1262 |
| VOYHT27 | 1378 | 1259 |
| VOYHT28 | 1379 | 1249 |
| VOYHT35 | 1388 | 1255 |
| VOYHT36 | 1426 | 1248 |
| VOYHT37 | 1427 | 1231 |
| VOYHT38 | 1428 | 1219 |
| VOYHT39 | 1429 | 1207 |
| VOYHT40 | 1430 | 1250 |
| VOYHT41 | 1431 | 1251 |
| VOYHT42 | 1432 | 1252 |
| VOYHT43 | 1433 | 1253 |
| VOYHT44 | 1434 | 1194 |
| VOYHT45 | 1435 | 1223 |
| VOYHT46 | 1436 | 1211 |
| VOYHT47 | 1437 | 1262 |
| VOYHT48 | 1438 | 1347 |

[0515] In some embodiments, the AAV particle comprises a viral genome which comprises a sequence which has a percent identity to any of SEQ ID NOs: 1352-1379, 1388, and 1426-1438. The viral genome may have 1%, 2%, 3%, 4%, 5%, 6%, 7%, 8%, 9%, 10%, 15%, 20%, 25%, 30%, 35%, 40%, 45%, 50%, 55%, 60%, 65%, 70%, 75%, 80%, 85%, 90%, 95%, 99% or 100% identity to any of SEQ NOs: 1352-1379, 1388, and 1426-1438. The viral genome may have 1-10%, 10-20%, 30-40%, 50-60%, 50-70%, 50-80%, 50-90%, 50-99%, 50-100%, 60-70%, 60-80%, 60-90%, 60-99%, 60-100%, 70-80%, 70-90%, 70-99%, 70-100%, 80-85%, 80-90%, 80-95%, 80-99%, 80-100%, 90-95%, 90-99%, or 90-100% to any of SEQ ID NOs: 1352-1379, 1388, and 1426-1438. As a non-limiting example, the viral genome comprises a sequence which as 80% identity to any of SEQ ID NO: 1352-1379, 1388, and 1426-1438. As another non-limiting example, the viral genome comprises a sequence which as 85% identity to any of SEQ ID NO: 1352-1379, 1388, and 1426-1438. As another non-limiting example, the viral genome comprises a sequence which as 90% identity to any of SEQ ID NO: 1352-1379, 1388, and 1426-1438. As another non-limiting example, the viral genome comprises a sequence which as 95% identity to any of SEQ ID NO: 1352-1379, 1388, and 1426-1438. As another non-limiting example, the viral genome comprises a sequence which as 99% identity to any of SEQ ID NO: 1352-1379, 1388, and 1426-1438.

[0516] In some embodiments, the AAV particle comprises a viral genome which comprises a sequence corresponding to SEQ ID NOs: 1352, or variants having at least 95% identity thereof. The AAV particle may comprise an AAV1 serotype.

[0517] In some embodiments, the AAV particles comprising modulatory polynucleotide sequence which comprises a nucleic acid sequence encoding at least one siRNA molecule may he introduced into mammalian cells.

[0518] Where the AAV particle payload region comprises a modulatory polynucleotide, the modulatory polynucleotide may comprise sense and/or antisense sequences to knock down a target gene. The AAV viral genomes encoding modulatory polynucleotides described herein may be useful in the fields of human disease, viruses, infections veterinary applications and a variety of in vivo and in vitro settings.

[0519] In some embodiments, the AAV particle genome may comprise at least one inverted terminal repeat (ITR) region, The ITR region(s) may, independently, have a length such as, but not limited to, 75, 76, 77, 78, 79, 80, 81, 82, 83, 84, 85, 86, 87, 88, 89, 90, 91, 92, 93, 94, 95, 96, 97, 98, 99, 100, 101, 102, 103, 104, 105, 106, 107, 108, 109, 110, 111, 112, 113, 114, 115, 116, 117, 118, 119, 120, 121, 122, 123, 124, 125, 126, 127, 128, 129, 130, 131, 132, 133, 134, 135, 136, 137, 138, 139, 140, 141, 142, 143, 144, 145, 146, 147, 148, 149, 150, 151, 152, 153, 154, 155, 156, 157, 158, 159, 160, 161, 162, 163, 164, 165, 166, 167, 168, 169, 170, 171, 172, 173, 174, and 175 nucleotides. The length of the ITR region for the viral genome may be 75-80, 75-85, 75-100, 80-85, 80-90, 80-105, 85-90, 85-95, 85-110, 90-95, 90-100, 90-115, 95-100, 95-105, 95-120, 100-105, 100-110, 100-125, 105-110, 105-115, 105-130, 110-115, 110-120, 110-135, 115-120, 115-125, 115-140, 120-125, 120-130, 120-145, 125-130, 125-135, 125-150, 130-135, 130-140, 130-155, 135-140, 135-145, 135-160, 140-145, 140-150, 140-165, 145-150, 145-155, 145-170, 150-155, 150-160, 150-175, 155-160, 155-165, 160-165, 160-170, 165-170, 165-175, and 170-175 nucleotides. As a non-limiting example, the viral genome comprises an ITR that is about 105 nucleotides in length. As a non-limiting example, the viral genome comprises an ITR that is about 141 nucleotides in length. As a non-limiting example, the viral genome comprises an ITR that is about 130 nucleotides in length.

[0520] In some embodiments, the AAV particle viral genome may comprise two inverted terminal repeat (ITR) regions. Each of the ITR regions may independently have a length such as, but not limited to, 75, 76, 77, 78, 79, 80, 81, 82, 83, 84, 85, 86, 87, 88, 89, 90, 91, 92, 93, 94, 95, 96, 97, 98, 99, 100, 101, 102, 103, 104, 105, 106, 107, 108, 109, 110, 111, 112, 113, 114, 115, 116, 117, 118, 119, 120, 121, 122, 123, 124, 125, 126, 127, 128, 129, 130, 131, 132, 133, 134, 135, 136, 137, 138, 139, 140, 141, 142, 143, 144, 145, 146, 147, 148, 149, 150, 151, 152, 153, 154, 155, 156, 157, 158, 159, 160, 161, 162, 163, 164, 165, 166, 167, 168, 169, 170, 171, 172, 173, 174, and 175 nucleotides. The length of the ITR regions for the viral genome may be 75-80, 75-85, 75-100, 80-85, 80-90, 80-105, 85-90, 85-95, 85-110, 90-95, 90-100, 90-115, 95-100, 95-105, 95-120, 100-105, 100-110, 100-125, 105-110, 105-115, 105-130, 110-115, 110-120, 110-135, 115-120, 115-125, 115-140, 120-125, 120-130, 120-145, 125-130, 125-135, 125-150, 130-135, 130-140, 130-155, 135-140, 135-145, 135-160, 140-145, 140-150, 140-165, 145-150, 145-155, 145-170, 150-155, 150-160, 150-175, 155-160, 155-165, 160-165, 160-170, 165-170, 165-175, and 170-175 nucleotides. As a non-limiting example, the viral genome comprises an ITR that is about 105 nucleotides in length and 141 nucleotides in length. As a non-limiting example, the viral genome comprises an ITR that is about 105 nucleotides in length and 130 nucleotides in length. As a non-limiting example, the viral genome comprises an IIR that is about 130 nucleotides in length and 141 nucleotides in length.

[0521] In some embodiments, the AAV particle viral genome may comprise at least one sequence region as described in Tables 13-20. The regions may be located before or after any of the other sequence regions described herein.

[0522] In some embodiments, the AAV particle viral genome comprises at least one inverted terminal repeat (ITR) sequence region. Non-limiting examples of ITR sequence regions are described in Table 13.

TABLE 13
Inverted Terminal Repeat (ITR) Sequence Regions

| Sequence Region Name | SEQ ID NO |
|---|---|
| ITR1 | 1380 |
| ITR2 | 1381 |
| ITR3 | 1382 |
| ITR4 | 1383 |

[0523] In some embodiments, the AAV particle viral genome comprises two ITR sequence regions. In some embodiments, the ITR sequence regions are the ITRI sequence region and the ITR3 sequence region. In some embodiments, the ITR sequence regions are the ITRI sequence region and the ITR4 sequence region. In some embodiments, the ITR sequence regions are the ITR2 sequence region and the ITR3 sequence region. In some embodiments, the ITR sequence regions are the ITR2 sequence region and the ITR4 sequence region.

[0524] In some embodiments, the AAV particle viral genome may comprise at least one multiple cloning site (MCS) sequence region. The MCS region(s) may, independently, have a length such as, but not limited to, 2, 3, 4, 5, 6, 7, 8, 9, 10, 11, 12, 13, 14, 15, 16, 17, 18, 19, 20, 21, 22, 23, 24, 25, 26, 27, 28, 29, 30, 31, 32, 33, 34, 35, 36, 37, 38, 39, 40, 41, 42, 43, 44, 45, 46, 47, 48, 49, 50, 51, 52, 53, 54, 55, 56, 57, 58, 59, 60, 61, 62, 63, 64, 65, 66, 67, 68, 69, 70, 71, 72, 73, 74, 75, 76, 77, 78, 79, 80, 81, 82, 83, 84, 85, 86, 87, 88, 89, 90, 91, 92, 93, 94, 95, 96, 97, 98, 99, 100, 101, 102, 103, 104, 105, 106, 107, 108, 109, 110, 111, 112, 113, 114, 115, 116, 117, 118, 119, 120, 121, 122, 123, 124, 125, 126, 127, 128, 129, 130, 131, 132, 133, 134, 135, 136, 137, 138, 139, 140, 141, 142, 143, 144, 145, 146, 147, 148, 149, and 150 nucleotides. The length of the MCS region for the viral genome may be 2-10, 5-10, 5-15, 10-20, 10-30, 10-40, 15-20, 15-25, 20-30, 20-40, 20-50, 25-30, 25-35, 30-40, 30-50, 30-60, 35-40, 35-45, 40-50, 40-60, 40-70, 45-50, 45-55, 50-60, 50-70, 50-80, 55-60, 55-65, 60-70, 60-80, 60-90, 65-70, 65-75, 70-80, 70-90, 70-100, 75-80, 75-85, 80-90, 80-100, 80-110, 85-90, 85-95, 90-100, 90-110, 90-120, 95-100, 95-105, 100-110, 100-120, 100-130, 105-110, 105-115, 110-120, 110-130, 110-140, 115-120, 115-125, 120-130, 120-140, 120-150, 125-130, 125-135, 130-140, 130-150, 135-140, 135-145, 140-150, and 145-150 nucleotides. As a non-limiting example, the viral genome comprises a MCS region that is about 5 nucleotides in length. As a non-limiting example, the viral genome comprises a MCS region that is about 10 nucleotides in length. As a non-limiting example, the viral genome comprises a MCS region that is about 14 nucleotides in length. As a non-limiting example, the viral genome comprises a MCS region that is about 18 nucleotides in length. As a non-limiting example, the viral genome comprises a MCS region that is about 73 nucleotides in length. As a non-limiting example, the viral genome comprises a MCS region that is about 121 nucleotides in length.

[0525] In some embodiments, the AAV particle viral genome comprises at least one multiple cloning site (MCS) sequence regions. Non-limiting examples of MCS sequence regions are described in Table 14.

TABLE 14
Multiple Cloning Site (MCS) Sequence Regions

| | SEQ ID NO or |
|---|---|
| Sequence Region Name | Sequence |
| MCS1 | 1384 |
| MCS2 | 1385 |
| MCS3 | 1386 |
| MCS4 | 1387 |
| MCS5 | TCGAG |
| MCS6 | 1389 |

[0526] In some embodiments, the AAV particle viral genome comprises one MCS sequence region. In some embodiments, the MCS sequence region is the MCS1 sequence region. In some embodiments, the MCS sequence region is the MCS2 sequence region. In some embodiments, the MCS sequence region is the MCS3 sequence region. In some embodiments, the MCS sequence region is the MCS4 sequence region. In some embodiments, the MCS sequence region is the MCS5 sequence region. In some embodiments, the MCS sequence region is the MCS6 sequence region.

[0527] In some embodiments, the AAV particle viral genome comprises two MCS sequence regions. In some embodiments, the two MCS sequence regions are the MCS1 sequence region and the MCS2 sequence region. In some embodiments, the two MCS sequence regions are the MCSI sequence region and the MCS3 sequence region. In some embodiments, the two MCS sequence regions are the MCS1 sequence region and the MCS4 sequence region. In some embodiments, the two MCS sequence regions are the MCS1 sequence region and the MCS5 sequence region. In some embodiments, the two MCS sequence regions are the MCS1 sequence region and the MCS6 sequence region. In some embodiments, the two MCS sequence regions are the MCS2 sequence region and the MCS3 sequence region. In some embodiments, the two MCS sequence regions are the MCS2 sequence region and the MCS4 sequence region. In some embodiments, the two MCS sequence regions are the MCS2 sequence region and the MCS5 sequence region. In some embodiments, the two MCS sequence regions are the MCS2 sequence region and the MCS6 sequence region. In some embodiments, the two MCS sequence regions are the MCS3 sequence region and the MCS4 sequence region. In some embodiments, the two MCS sequence regions are the MCS3 sequence region and the MCS5 sequence region. In some embodiments, the two MCS sequence regions are the MCS3 sequence region and the MCS6 sequence region. In some embodiments, the two MCS sequence regions are the MCS4 sequence region and the MCS5 sequence region. In some embodiments, the two MCS sequence regions are the MCS4 sequence region and the MCS6 sequence region. In some embodiments, the two MCS sequence regions are the MCS5 sequence region and the MCS6 sequence region.

[0528] In some embodiments, the AAV particle viral genome comprises two or more MCS sequence regions.

[0529] In some embodiments, the AAV particle viral genome comprises three MCS sequence regions. In some embodiments, the three MCS sequence regions are the MCS1 sequence region, the MCS2 sequence region, and the MCS3 sequence region. In some embodiments, the three MCS sequence regions are the MCS1 sequence region, the MCS2 sequence region, and the MCS4 sequence region. In some embodiments, the three MCS sequence regions are the MCS1 sequence region, the MCS2 sequence region, and the MCS5 sequence region. In some embodiments, the three MCS sequence regions are the MCSI sequence region, the MCS2 sequence region, and the MCS6 sequence region. In some embodiments, the three MCS sequence regions are the MCS 1 sequence region, the MCS3 sequence region, and the MCS4 sequence region. In some embodiments, the three MCS sequence regions are the MCS1 sequence region, the MCS3 sequence region, and the MCS5 sequence region. In some embodiments, the three MCS sequence regions are the MCS1 sequence region, the MCS3 sequence region, and the MCS6 sequence region. In some embodiments, the three MCS sequence regions are the MCS1 sequence region, the MCS4 sequence region, and the MCS5 sequence region. In some embodiments, the three MCS sequence regions are the MCS sequence region, the MCS4 sequence region, and the MCS6 sequence region. In some embodiments, the three MCS sequence regions are the MCS1 sequence region, the MCS5 sequence region, and the MCS6 sequence region. In some embodiments, the three MCS sequence regions are the MCS2 sequence region, the MCS3 sequence region, and the MCS4 sequence region. In some embodiments, the three MCS sequence regions are the MCS2 sequence region, the MCS3 sequence region, and the MCS5 sequence region. In some embodiments, the three MCS sequence regions are the MCS2 sequence region, the MCS3 sequence region, and the MCS6 sequence region. in some embodiments, the three MCS sequence regions are the MCS2 sequence region, the MCS4 sequence region, and the MCS5 sequence region. In some embodiments, the three MCS sequence regions are the MCS2 sequence region, the MCS4 sequence region, and the MCS6 sequence region. In some embodiments, the three MCS sequence regions are the MCS2 sequence region, the MCSS sequence region, and the MCS6 sequence region. In some embodiments, the three MCS sequence regions are the MCS3 sequence region, the MCS4 sequence region, and the MCS5 sequence region. In some embodiments, the three MCS sequence regions are the MCS3 sequence region, the MCS4 sequence region, and the MCS6 sequence region. In some embodiments, the three MCS sequence regions are the MCS3 sequence region, the MCS5 sequence region, and the MCS6 sequence region. In some embodiments, the three MCS sequence regions are the MCS4 sequence region, the MCSS sequence region, and the MCS6 sequence region.

[0530] In some embodiments, the AAV particle viral genome may comprise at least one filler sequence region. The filler region(s) may, independently, have a length such as, but not limited to, 50, 51, 52, 53, 54, 55, 56, 57, 58, 59, 60, 61, 62, 63, 64, 65, 66, 67, 68, 69, 70, 71, 72, 73, 74, 75, 76, 77, 78, 79, 80, 81, 82, 83, 84, 85, 86, 87, 88, 89, 90, 91, 92, 93, 94, 95, 96, 97, 98, 99, 100, 101, 102, 103, 104, 105, 106, 107, 108, 109, 110, 111, 112, 113, 114, 115, 116, 117, 118, 119, 120, 121, 122, 123, 124, 125, 126, 127, 128, 129, 130, 131, 132, 133, 134, 135, 136, 137, 138, 139, 140, 141, 142, 143, 144, 145, 146, 147, 148, 149, 150, 151, 152, 153, 154, 155, 156, 157, 158, 159, 160, 161, 162, 163, 164, 165, 166, 167, 168, 169, 170, 171, 172, 173, 174, 175, 176, 177, 178, 179, 180, 181, 182, 183, 184, 185, 186, 187, 188, 189, 190, 191, 192, 193, 194, 195, 196, 197, 198, 199, 200, 201, 202, 203, 204, 205, 206, 207, 208, 209, 210, 211, 212, 213, 214, 215, 216, 217, 218, 219, 220, 221, 222, 223, 224, 225, 226, 227, 228, 229, 230, 231, 232, 233, 234, 235, 236, 237, 238, 239, 240, 241, 242, 243, 244, 245, 246, 247, 248, 249, 250, 251, 252, 253, 254, 255, 256, 257, 258, 259, 260, 261, 262, 263, 264, 265, 266, 267, 268, 269, 270, 271, 272, 273, 274, 275, 276, 277, 278, 279, 280, 281, 282, 283, 284, 285, 286, 287, 288, 289, 290, 291, 292, 293, 294, 295, 296, 297, 298, 299, 300, 301, 302, 303, 304, 305, 306, 307, 308, 309, 310, 311, 312, 313, 314, 315, 316, 317, 318, 319, 320, 321, 322, 323, 324, 325, 326, 327, 328, 329, 330, 331, 332, 333, 334, 335, 336, 337, 338, 339, 340, 341, 342, 343, 344, 345, 346, 347, 348, 349, 350, 351, 352, 353, 354, 355, 356, 357, 358, 359, 360, 361, 362, 363, 364, 365, 366, 367, 368, 369, 370, 371, 372, 373, 374, 375, 376, 377, 378, 379, 380, 381, 382, 383, 384, 385, 386, 387, 388, 389, 390, 391, 392, 393, 394, 395, 396, 397, 398, 399, 400, 401, 402, 403, 404, 405, 406, 407, 408, 409, 410, 411, 412, 413, 414, 415, 416, 417, 418, 419, 420, 421, 422, 423, 424, 425, 426, 427, 428, 429, 430, 431, 432, 433, 434, 435, 436, 437, 438, 439, 440, 441, 442, 443, 444, 445, 446, 447, 448, 449, 450, 451, 452, 453, 454, 455, 456, 457, 458, 459, 460, 461, 462, 463, 464, 465, 466, 467, 468, 469, 470, 471, 472, 473, 474, 475, 476, 477, 478, 479, 480, 481, 482, 483, 484, 485, 486, 487, 488, 489, 490, 491, 492, 493, 494, 495, 496, 497, 498, 499, 500, 501, 502, 503, 504, 505, 506, 507, 508, 509, 510, 511, 512, 513, 514, 515, 516, 517, 518, 519, 520, 521, 522, 523, 524, 525, 526, 527, 528, 529, 530, 531, 532, 533, 534, 535, 536, 537, 538, 539, 540, 541, 542, 543, 544, 545, 546, 547, 548, 549, 550, 551, 552, 553, 554, 555, 556, 557, 558, 559, 560, 561, 562, 563, 564, 565, 566, 567, 568, 569, 570, 571, 572, 573, 574, 575, 576, 577, 578, 579, 580, 581, 582, 583, 584, 585, 586, 587, 588, 589, 590, 591, 592, 593, 594, 595, 596, 597, 598, 599, 600, 601, 602, 603, 604, 605, 606, 607, 608, 609, 610, 611, 612, 613, 614, 615, 616, 617, 618, 619, 620, 621, 622, 623, 624, 625, 626, 627, 628, 629, 630, 631, 632, 633, 634, 635, 636, 637, 638, 639, 640, 641, 642, 643, 644, 645, 646, 647, 648, 649, 650, 651, 652, 653, 654, 655, 656, 657, 658, 659, 660, 661, 662, 663, 664, 665, 666, 667, 668, 669, 670, 671, 672, 673, 674, 675, 676, 677, 678, 679, 680, 681, 682, 683, 684, 685, 686, 687, 688, 689, 690, 691, 692, 693, 694, 695, 696, 697, 698, 699, 700, 701, 702, 703, 704, 705, 706, 707, 708, 709, 710, 711, 712, 713, 714, 715, 716, 717, 718, 719, 720, 721, 722, 723, 724, 725, 726, 727, 728, 729, 730, 731, 732, 733, 734, 735, 736, 737, 738, 739, 740, 741, 742, 743, 744, 745, 746, 747, 748, 749, 750, 751, 752, 753, 754, 755, 756, 757, 758, 759, 760, 761, 762, 763, 764, 765, 766, 767, 768, 769, 770, 771, 772, 773, 774, 775, 776, 777, 778, 779, 780, 781, 782, 783, 784, 785, 786, 787, 788, 789, 790, 791, 792, 793, 794, 795, 796, 797, 798, 799, 800, 801, 802, 803, 804, 805, 806, 807, 808, 809, 810, 811, 812, 813, 814, 815, 816, 817, 818, 819, 820, 821, 822, 823, 824, 825, 826, 827, 828, 829, 830, 831, 832, 833, 834, 835, 836, 837, 838, 839, 840, 841, 842, 843, 844, 845, 846, 847, 848, 849, 850, 851, 852, 853, 854, 855, 856, 857, 858, 859, 860, 861, 862, 863, 864, 865, 866, 867, 868, 869, 870, 871, 872, 873, 874, 875, 876, 877, 878, 879, 880, 881, 882, 883, 884, 885, 886, 887, 888, 889, 890, 891, 892, 893, 894, 895, 896, 897, 898, 899, 900, 901, 902, 903, 904, 905, 906, 907, 908, 909, 910, 911, 912, 913, 914, 915, 916, 917, 918, 919, 920, 921, 922, 923, 924, 925, 926, 927, 928, 929, 930, 931, 932, 933, 934, 935, 936, 937, 938, 939, 940, 941, 942, 943, 944, 945, 946, 947, 948, 949, 950, 951, 952, 953, 954, 955, 956, 957, 958, 959, 960, 961, 962, 963, 964, 965, 966, 967, 968, 969, 970, 971, 972, 973, 974, 975, 976, 977, 978, 979, 980, 981, 982, 983, 984, 985, 986, 987, 988, 989, 990, 991, 992, 993, 994, 995, 996, 997, 998, 999, 1000, 1001, 1002, 1003, 1004, 1005, 1006, 1007, 1008, 1009 1010, 1011, 1012, 1013, 1014, 1015, 1016, 1017, 1018, 1019, 1020, 1021, 1022, 1023, 1024, 1025, 1026, 1027, 1028, 1029, 1030, 1031, 1032, 1033, 1034, 1035, 1036, 1037, 1038, 1039, 1040, 1041, 1042, 1043, 1044, 1045, 1046, 1047, 1048, 1049, 1050, 1051, 1052, 1053, 1054, 1055, 1056, 1057, 1058, 1059, 1060, 1061, 1062, 1063, 1064, 1065, 1066, 1067, 1068, 1069, 1070, 1071, 1072, 1073, 1074, 1075, 1076, 1077, 1078, 1079, 1080, 1081, 1082, 1083, 1084, 1085, 1086, 1087, 1088, 1089, 1090, 1091, 1092, 1093, 1094, 1095, 1096, 1097, 1098, 1099, 1100, 1101, 1102, 1103, 1104, 1105, 1106, 1107, 1108, 1109, 1110, 1111, 1112, 1113, 1114, 1115, 1116, 1117, 1118, 1119, 1120, 1121, 1122, 1123, 1124, 1125, 1126, 1127, 1128, 1129, 1130, 1131, 1132, 1133, 1134, 1135, 1136, 1137, 1138, 1139, 1140, 1141, 1142, 1143, 1144, 1145, 1146, 1147, 1148, 1149, 1150, 1151, 1152, 1153, 1154, 1155, 1156, 1157, 1158, 1159, 1160, 1161, 1162, 1163, 1164, 1165, 1166, 1167, 1168, 1169, 1170, 1171, 1172, 1173, 1174, 1175, 1176, 1177, 1178, 1179, 1180, 1181, 1182, 1183, 1184, 1185, 1186, 1187, 1188, 1189, 1190, 1191, 1192, 1193, 1194, 1195, 1196, 1197, 1198, 1199, 1200, 1201, 1202, 1203, 1204, 1205, 1206, 1207, 1208, 1209, 1210, 1211, 1212, 1213, 1214, 1215, 1216, 1217, 1218, 1219, 1220, 1221, 1222, 1223, 1224, 1225, 1226, 1227, 1228, 1229, 1230, 1231, 1232, 1233, 1234, 1235, 1236, 1237, 1238, 1239, 1240, 1241, 1242, 1243, 1244, 1245, 1246, 1247, 1248, 1249, 1250, 1251, 1252, 1253, 1254, 1255, 1256, 1257, 1258, 1259, 1260, 1261, 1262, 1263, 1264, 1265, 1266, 1267, 1268, 1269, 1270, 1271, 1272, 1273, 1274, 1275, 1276, 1277, 1278, 1279, 1280, 1281, 1282, 1283, 1284, 1285, 1286, 1287, 1288, 1289, 1290, 1291, 1292, 1293, 1294, 1295, 1296, 1297, 1298, 1299, 1300, 1301, 1302, 1303, 1304, 1305, 1306, 1307, 1308, 1309, 1310, 1311, 1312, 1313, 1314, 1315, 1316, 1317, 1318, 1319, 1320, 1321, 1322, 1323, 1324, 1325, 1326, 1327, 1328, 1329, 1330, 1331, 1332, 1333, 1334, 1335, 1336, 1337, 1338, 1339, 1340, 1341, 1342, 1343, 1344, 1345, 1346, 1347, 1348, 1349, 1350, 1351, 1352, 1353, 1354, 1355, 1356, 1357, 1358, 1359, 1360, 1361, 1362, 1363, 1364, 1365, 1366, 1367, 1368, 1369, 1370, 1371, 1372, 1373, 1374, 1375, 1376, 1377, 1378, 1379, 1380, 1381, 1382, 1383, 1384, 1385, 1386, 1387, 1388, 1389, 1390, 1391, 1392, 1393, 1394, 1395, 1396, 1397, 1398, 1399, 1400, 1401, 1402, 1403, 1404, 1405, 1406, 1407, 1408, 1409, 1410, 1411, 1412, 1413, 1414, 1415, 1416, 1417, 1418, 1419, 1420, 1421, 1422, 1423, 1424, 1425, 1426, 1427, 1428, 1429, 1430, 1431, 1432, 1433, 1434, 1435, 1436, 1437, 1438, 1439, 1440, 1441, 1442, 1443, 1444, 1445, 1446, 1447, 1448, 1449, 1450, 1451, 1452, 1453, 1454, 1455, 1456, 1457, 1458, 1459, 1460, 1461, 1462, 1463, 1464, 1465, 1466, 1467, 1468, 1469, 1470, 1471, 1472, 1473, 1474, 1475, 1476, 1477, 1478, 1479, 1480, 1481, 1482, 1483, 1484, 1485, 1486, 1487, 1488, 1489, 1490, 1491, 1492, 1493, 1494, 1495, 1496, 1497, 1498, 1499, 1500, 1501, 1502, 1503, 1504, 1505, 1506, 1507, 1508, 1509, 1510, 1511, 1512, 1513, 1514, 1515, 1516, 1517, 1518, 1519, 1520, 1521, 1522, 1523, 1524, 1525, 1526, 1527, 1528, 1529, 1530, 1531, 1532, 1533, 1534, 1535, 1536, 1537, 1538, 1539, 1540, 1541, 1542, 1543, 1544, 1545, 1546, 1547, 1548, 1549, 1550, 1551, 1552, 1553, 1554, 1555, 1556, 1557, 1558, 1559, 1560, 1561, 1562, 1563, 1564, 1565, 1566, 1567, 1568, 1569, 1570, 1571, 1572, 1573, 1574, 1575, 1576, 1577, 1578, 1579, 1580, 1581, 1582, 1583, 1584, 1585, 1586, 1587, 1588, 1589, 1590, 1591, 1592, 1593, 1594, 1595, 1596, 1597, 1598, 1599, 1600, 1601, 1602, 1603, 1604, 1605, 1606, 1607, 1608, 1609, 1610, 1611, 1612, 1613, 1614, 1615, 1616, 1617, 1618, 1619, 1620, 1621, 1622, 1623, 1624, 1625, 1626, 1627, 1628, 1629, 1630, 1631, 1632, 1633, 1634, 1635, 1636, 1637, 1638, 1639, 1640, 1641, 1642, 1643, 1644, 1645, 1646, 1647, 1648, 1649, 1650, 1651, 1652, 1653, 1654, 1655, 1656, 1657, 1658, 1659, 1660, 1661, 1662, 1663, 1664, 1665, 1666, 1667, 1668, 1669, 1670, 1671, 1672, 1673, 1674, 1675, 1676, 1677, 1678, 1679, 1680, 1681, 1682, 1683, 1684, 1685, 1686, 1687, 1688, 1689, 1690, 1691, 1692, 1693, 1694, 1695, 1696, 1697, 1698, 1699, 1700, 1701, 1702, 1703, 1704, 1705, 1706, 1707, 1708, 1709, 1710, 1711, 1712, 1713, 1714, 1715, 1716, 1717, 1718, 1719, 1720, 1721, 1722, 1723, 1724, 1725, 1726, 1727, 1728, 1729, 1730, 1731, 1732, 1733, 1734, 1735, 1736, 1737, 1738, 1739, 1740, 1741, 1742, 1743, 1744, 1745, 1746, 1747, 1748, 1749, 1750, 1751, 1752, 1753, 1754, 1755, 1756, 1757, 1758, 1759, 1760, 1761, 1762, 1763, 1764, 1765, 1766, 1767, 1768, 1769, 1770, 1771, 1772, 1773, 1774, 1775, 1776, 1777, 1778, 1779, 1780, 1781, 1782, 1783, 1784, 1785, 1786, 1787, 1788, 1789, 1790, 1791, 1792, 1793, 1794, 1795, 1796, 1797, 1798, 1799, 1800, 1801, 1802, 1803, 1804, 1805, 1806, 1807, 1808, 1809, 1810, 1811, 1812, 1813, 1814, 1815, 1816, 1817, 1818, 1819, 1820, 1821, 1822, 1823, 1824, 1825, 1826, 1827, 1828, 1829, 1830, 1831, 1832, 1833, 1834, 1835, 1836, 1837, 1838, 1839, 1840, 1841, 1842, 1843, 1844, 1845, 1846, 1847, 1848, 1849, 1850, 1851, 1852, 1853, 1854, 1855, 1856, 1857, 1858, 1859, 1860, 1861, 1862, 1863, 1864, 1865, 1866, 1867, 1868, 1869, 1870, 1871, 1872, 1873, 1874, 1875, 1876, 1877, 1878, 1879, 1880, 1881, 1882, 1883, 1884, 1885, 1886, 1887, 1888, 1889, 1890, 1891, 1892, 1893, 1894, 1895, 1896, 1897, 1898, 1899, 1900, 1901, 1902, 1903, 1904, 1905, 1906, 1907, 1908, 1909, 1910, 1911, 1912, 1913, 1914, 1915, 1916, 1917, 1918, 1919, 1920, 1921, 1922, 1923, 1924, 1925, 1926, 1927, 1928, 1929, 1930, 1931, 1932, 1933, 1934, 1935, 1936, 1937, 1938, 1939, 1940, 1941, 1942, 1943, 1944, 1945, 1946, 1947, 1948, 1949, 1950, 1951, 1952, 1953, 1954, 1955, 1956, 1957, 1958, 1959, 1960, 1961, 1962, 1963, 1964, 1965, 1966, 1967, 1968, 1969, 1970, 1971, 1972, 1973, 1974, 1975, 1976, 1977, 1978, 1979, 1980, 1981, 1982, 1983, 1984, 1985, 1986, 1987, 1988, 1989, 1990, 1991, 1992, 1993, 1994, 1995, 1996, 1997, 1998, 1999, 2000, 2001, 2002, 2003, 2004, 2005, 2006, 2007, 2008, 2009, 2010, 2011, 2012, 2013, 2014, 2015, 2016, 2017, 2018, 2019, 2020, 2021, 2022, 2023, 2024, 2025, 2026, 2027, 2028, 2029, 2030, 2031, 2032, 2033, 2034, 2035, 2036, 2037, 2038, 2039, 2040, 2041, 2042, 2043, 2044, 2045, 2046, 2047, 2048, 2049, 2050, 2051, 2052, 2053, 2054, 2055, 2056, 2057, 2058, 2059, 2060, 2061, 2062, 2063, 2064, 2065, 2066, 2067, 2068, 2069, 2070, 2071, 2072, 2073, 2074, 2075, 2076, 2077, 2078, 2079, 2080, 2081, 2082, 2083, 2084, 2085, 2086, 2087, 2088, 2089, 2090, 2091, 2092, 2093, 2094, 2095, 2096, 2097, 2098, 2099, 2100, 2101, 2102, 2103, 2104, 2105, 2106, 2107, 2108, 2109, 2110, 2111, 2112, 2113, 2114, 2115, 2116, 2117, 2118, 2119, 2120, 2121, 2122, 2123, 2124, 2125, 2126, 2127, 2128, 2129, 2130, 2131, 2132, 2133, 2134, 2135, 2136, 2137, 2138, 2139, 2140, 2141, 2142, 2143, 2144, 2145, 2146, 2147, 2148, 2149, 2150, 2151, 2152, 2153, 2154, 2155, 2156, 2157, 2158, 2159, 2160, 2161, 2162, 2163, 2164, 2165, 2166, 2167, 2168, 2169, 2170, 2171, 2172, 2173, 2174, 2175, 2176, 2177, 2178, 2179, 2180, 2181, 2182, 2183, 2184, 2185, 2186, 2187, 2188, 2189, 2190, 2191, 2192, 2193, 2194, 2195, 2196, 2197, 2198, 2199, 2200, 2201, 2202, 2203, 2204, 2205, 2206, 2207, 2208, 2209, 2210, 2211, 2212, 2213, 2214, 2215, 2216, 2217, 2218, 2219, 2220, 2221, 2222, 2223, 2224, 2225, 2226, 2227, 2228, 2229, 2230, 2231, 2232, 2233, 2234, 2235, 2236, 2237, 2238, 2239, 2240, 2241, 2242, 2243, 2244, 2245, 2246, 2247, 2248, 2249, 2250, 2251, 2252, 2253, 2254, 2255, 2256, 2257, 2258, 2259, 2260, 2261, 2262, 2263, 2264, 2265, 2266, 2267, 2268, 2269, 2270, 2271, 2272, 2273, 2274, 2275, 2276, 2277, 2278, 2279, 2280, 2281, 2282, 2283, 2284, 2285, 2286, 2287, 2288, 2289, 2290, 2291, 2292, 2293, 2294, 2295, 2296, 2297, 2298, 2299, 2300, 2301, 2302, 2303, 2304, 2305, 2306, 2307, 2308, 2309, 2310, 2311, 2312, 2313, 2314, 2315, 2316, 2317, 2318, 2319, 2320, 2321, 2322, 2323, 2324, 2325, 2326, 2327, 2328, 2329, 2330, 2331, 2332, 2333, 2334, 2335, 2336, 2337, 2338, 2339, 2340, 2341, 2342, 2343, 2344, 2345, 2346, 2347, 2348, 2349, 2350, 2351, 2352, 2353, 2354, 2355, 2356, 2357, 2358, 2359, 2360, 2361, 2362, 2363, 2364, 2365, 2366, 2367, 2368, 2369, 2370, 2371, 2372, 2373, 2374, 2375, 2376, 2377, 2378, 2379, 2380, 2381, 2382, 2383, 2384, 2385, 2386, 2387, 2388, 2389, 2390, 2391, 2392, 2393, 2394, 2395, 2396, 2397, 2398, 2399, 2400, 2401, 2402, 2403, 2404, 2405, 2406, 2407, 2408, 2409, 2410, 2411, 2412, 2413, 2414, 2415, 2416, 2417, 2418, 2419, 2420, 2421, 2422, 2423, 2424, 2425, 2426, 2427, 2428, 2429, 2430, 2431, 2432, 2433, 2434, 2435, 2436, 2437, 2438, 2439, 2440, 2441, 2442, 2443, 2444, 2445, 2446, 2447, 2448, 2449, 2450, 2451, 2452, 2453, 2454, 2455, 2456, 2457, 2458, 2459, 2460, 2461, 2462, 2463, 2464, 2465, 2466, 2467, 2468, 2469, 2470, 2471, 2472, 2473, 2474, 2475, 2476, 2477, 2478, 2479, 2480, 2481, 2482, 2483, 2484, 2485, 2486, 2487, 2488, 2489, 2490, 2491, 2492, 2493, 2494, 2495, 2496, 2497, 2498, 2499, 2500, 2501, 2502, 2503, 2504, 2505, 2506, 2507, 2508, 2509, 2510, 2511, 2512, 2513, 2514, 2515, 2516, 2517, 2518, 2519, 2520, 2521, 2522, 2523, 2524, 2525, 2526, 2527, 2528, 2529, 2530, 2531, 2532, 2533, 2534, 2535, 2536, 2537, 2538, 2539, 2540, 2541, 2542, 2543, 2544, 2545, 2546, 2547, 2548, 2549, 2550, 2551, 2552, 2553, 2554, 2555, 2556, 2557, 2558, 2559, 2560, 2561, 2562, 2563, 2564, 2565, 2566, 2567, 2568, 2569, 2570, 2571, 2572, 2573, 2574, 2575, 2576, 2577, 2578, 2579, 2580, 2581, 2582, 2583, 2584, 2585, 2586, 2587, 2588, 2589, 2590, 2591, 2592, 2593, 2594, 2595, 2596, 2597, 2598, 2599, 2600, 2601, 2602, 2603, 2604, 2605, 2606, 2607, 2608, 2609, 2610, 2611, 2612, 2613, 2614, 2615, 2616, 2617, 2618, 2619, 2620, 2621, 2622, 2623, 2624, 2625, 2626, 2627, 2628, 2629, 2630, 2631, 2632, 2633, 2634, 2635, 2636, 2637, 2638, 2639, 2640, 2641, 2642, 2643, 2644, 2645, 2646, 2647, 2648, 2649, 2650, 2651, 2652, 2653, 2654, 2655, 2656, 2657, 2658, 2659, 2660, 2661, 2662, 2663, 2664, 2665, 2666, 2667, 2668, 2669, 2670, 2671, 2672, 2673, 2674, 2675, 2676, 2677, 2678, 2679, 2680, 2681, 2682, 2683, 2684, 2685, 2686, 2687, 2688, 2689, 2690, 2691, 2692, 2693, 2694, 2695, 2696, 2697, 2698, 2699, 2700, 2701, 2702, 2703, 2704, 2705, 2706, 2707, 2708, 2709, 2710, 2711, 2712, 2713, 2714, 2715, 2716, 2717, 2718, 2719, 2720, 2721, 2722, 2723, 2724, 2725, 2726, 2727, 2728, 2729, 2730, 2731, 2732, 2733, 2734, 2735, 2736, 2737, 2738, 2739, 2740, 2741, 2742, 2743, 2744, 2745, 2746, 2747, 2748, 2749, 2750, 2751, 2752, 2753, 2754, 2755, 2756, 2757, 2758, 2759, 2760, 2761, 2762, 2763, 2764, 2765, 2766, 2767, 2768, 2769, 2770, 2771, 2772, 2773, 2774, 2775, 2776, 2777, 2778, 2779, 2780, 2781, 2782, 2783, 2784, 2785, 2786, 2787, 2788, 2789, 2790, 2791, 2792, 2793, 2794, 2795, 2796, 2797, 2798, 2799, 2800, 2801, 2802, 2803, 2804, 2805, 2806, 2807, 2808, 2809, 2810, 2811, 2812, 2813, 2814, 2815, 2816, 2817, 2818, 2819, 2820, 2821, 2822, 2823, 2824, 2825, 2826, 2827, 2828, 2829, 2830, 2831, 2832, 2833, 2834, 2835, 2836, 2837, 2838, 2839, 2840, 2841, 2842, 2843, 2844, 2845, 2846, 2847, 2848, 2849, 2850, 2851, 2852, 2853, 2854, 2855, 2856, 2857, 2858, 2859, 2860, 2861, 2862, 2863, 2864, 2865, 2866, 2867, 2868, 2869, 2870, 2871, 2872, 2873, 2874, 2875, 2876, 2877, 2878, 2879, 2880, 2881, 2882, 2883, 2884, 2885, 2886, 2887, 2888, 2889, 2890, 2891, 2892, 2893, 2894, 2895, 2896, 2897, 2898, 2899, 2900, 2901, 2902, 2903, 2904, 2905, 2906, 2907, 2908, 2909, 2910, 2911, 2912, 2913, 2914, 2915, 2916, 2917, 2918, 2919, 2920, 2921, 2922, 2923, 2924, 2925, 2926, 2927, 2928, 2929, 2930, 2931, 2932, 2933, 2934, 2935, 2936, 2937, 2938, 2939, 2940, 2941, 2942, 2943, 2944, 2945, 2946, 2947, 2948, 2949, 2950, 2951, 2952, 2953, 2954, 2955, 2956, 2957, 2958, 2959, 2960, 2961, 2962, 2963, 2964, 2965, 2966, 2967, 2968, 2969, 2970, 2971, 2972, 2973, 2974, 2975, 2976, 2977, 2978, 2979, 2980, 2981, 2982, 2983, 2984, 2985, 2986, 2987, 2988, 2989, 2990, 2991, 2992, 2993, 2994, 2995, 2996, 2997, 2998, 2999, 3000, 3001, 3002, 3003, 3004, 3005, 3006, 3007, 3008, 3009, 3010, 3011, 3012, 3013, 3014, 3015, 3016, 3017, 3018, 3019, 3020, 3021, 3022, 3023, 3024, 3025, 3026, 3027, 3028, 3029, 3030, 3031, 3032, 3033, 3034, 3035, 3036, 3037, 3038, 3039, 3040, 3041, 3042, 3043, 3044, 3045, 3046, 3047, 3048, 3049, 3050, 3051, 3052, 3053, 3054, 3055, 3056, 3057, 3058, 3059, 3060, 3061, 3062, 3063, 3064, 3065, 3066, 3067, 3068, 3069, 3070, 3071, 3072, 3073, 3074, 3075, 3076, 3077, 3078, 3079, 3080, 3081, 3082, 3083, 3084, 3085, 3086, 3087, 3088, 3089, 3090, 3091, 3092, 3093, 3094, 3095, 3096, 3097, 3098, 3099, 3100, 3101, 3102, 3103, 3104, 3105, 3106, 3107, 3108, 3109, 3110, 3111, 3112, 3113, 3114, 3115, 3116, 3117, 3118, 3119, 3120, 3121, 3122, 3123, 3124, 3125, 3126, 3127, 3128, 3129, 3130, 3131, 3132, 3133, 3134, 3135, 3136, 3137, 3138, 3139, 3140, 3141, 3142, 3143, 3144, 3145, 3146, 3147, 3148, 3149, 3150, 3151, 3152, 3153, 3154, 3155, 3156, 3157, 3158, 3159, 3160, 3161, 3162, 3163, 3164, 3165, 3166, 3167, 3168, 3169, 3170, 3171, 3172, 3173, 3174, 3175, 3176, 3177, 3178, 3179, 3180, 3181, 3182, 3183, 3184, 3185, 3186, 3187, 3188, 3189, 3190, 3191, 3192, 3193, 3194, 3195, 3196, 3197, 3198, 3199, 3200, 3201, 3202, 3203, 3204, 3205, 3206, 3207, 3208, 3209, 3210, 3211, 3212, 3213, 3214, 3215, 3216, 3217, 3218, 3219, 3220, 3221, 3222, 3223, 3224, 3225, 3226, 3227, 3228, 3229, 3230, 3231, 3232, 3233, 3234, 3235, 3236, 3237, 3238, 3239, 3240, 3241, 3242, 3243, 3244, 3245, 3246, 3247, 3248, 3249, and 3250 nucleotides. The length of any filler region for the viral genome may be 50-100, 100-150, 150-200, 200-250, 250-300, 300-350, 350-400, 400-450, 450-500, 500-550, 550-600, 600-650, 650-700, 700-750, 750-800, 800-850, 850-900, 900-950, 950-1000, 1000-1050, 1050-1100, 1100-1150, 1150-1200, 1200-1250, 1250-1300, 1300-1350, 1350-1400, 1400-1450, 1450-1500, 1500-1550, 1550-1600, 1600-1650, 1650-1700, 1700-1750, 1750-1800, 1800-1850, 1850-1900, 1900-1950, 1950-2000, 2000-2050, 2050-2100, 2100-2150, 2150-2200, 2200-2250, 2250-2300, 2300-2350, 2350-2400, 2400-2450, 2450-2500, 2500-2550, 2550-2600, 2600-2650, 2650-2700, 2700-2750, 2750-2800, 2800-2850, 2850-2900, 2900-2950, 2950-3000, 3000-3050, 3050-3100, 3100-3150, 3150-3200, and 3200-3250 nucleotides, As a non-limiting example, the viral genome comprises a filler region that is about 55 nucleotides in length. As a non-limiting example, the viral genome comprises a filler region that is about 56 nucleotides in length. As a non-limiting example, the viral genome comprises a filler region that is about 97 nucleotides in length. As a non-limiting example, the viral genome comprises a filler region that is about 103 nucleotides in length. As a non-limiting example, the viral genome comprises a filler region that is about 105 nucleotides in length. As a non-limiting example, the viral genome comprises a filler region that is about 357 nucleotides in length. As a non-limiting example, the viral genome comprises a filler region that is about 363 nucleotides in length. As a non-limiting example, the viral genome comprises a filler region that is about 712 nucleotides in length. As a non-limiting example, the viral genome comprises a filler region that is about 714 nucleotides in length. As a non-limiting, example, the viral genome comprises a filler region that is about 1203 nucleotides in length. As a non-limiting example, the viral genome comprises a filler region that is about 1209 nucleotides in length. As a non-limiting example, the viral genome comprises a filler region that is about 1512 nucleotides in length. As a non-limiting example, the viral genome comprises a filler region that is about 1519 nucleotides in length. As a non-limiting example, the viral genome comprises a filler region that is about 2395 nucleotides in length. As a non-limiting example, the viral genome comprises a filler region that is about 2403 nucleotides in length. As a non-limiting example, the viral genome comprises a filler region that is about 2405 nucleotides in length. As a non-limiting example, the viral genome comprises a filler region that is about 3013 nucleotides in length. As a non-limiting example, the viral genome comprises a filler region that is about 3021 nucleotides in length.

[0531] In some embodiments, the AAV particle viral genome may comprise at least one enhancer sequence region. The enhancer sequence region(s) may, independently, have a length such as, but not limited to, 300, 301, 302, 303, 304, 305, 306, 307, 308, 309, 310, 311, 312, 313, 314, 315, 316, 317, 318, 319, 320, 321, 322, 323, 324, 325, 326, 327, 328, 329, 330, 331, 332, 333, 334, 335, 336, 337, 338, 339, 340, 341, 342, 343, 344, 345, 346, 347, 348, 349, 350, 351, 352, 353, 354, 355, 356, 357, 358, 359, 360, 361, 362, 363, 364, 365, 366, 367, 368, 369, 370, 371, 372, 373, 374, 375, 376, 377, 378, 379, 380, 381, 382, 383, 384, 385, 386, 387, 388, 389, 390, 391, 392, 393, 394, 395, 396, 397, 398, 399, and 400 nucleotides. The length of the enhancer region for the viral genome may be 300-310, 300-325, 305-315, 310-320, 315-325, 320-330, 325-335, 325-350, 330-340, 335-345, 340-350, 345-355, 350-360, 350-375, 355-365, 360-370, 365-375, 370-380, 375-385, 375-400, 380-390, 385-395, and 390-400 nucleotides. As a non-limiting example, the viral genome comprises an enhancer region that is about 303 nucleotides in length. As a non-limiting example, the viral genome comprises an enhancer region that is about 382 nucleotides in length.

[0532] In some embodiments, the AAV particle viral genome comprises at least one enhancer sequence region. Non-limiting examples of enhancer sequence regions are described in Table 15.

TABLE 15
Enhancer Sequence Regions

| Sequence Region Name | SEQ ID NO |
|---|---|
| Enhancer1 | 1408 |
| Enhancer2 | 1409 |

[0533] In some embodiments, the AAV particle viral genome comprises one enhancer sequence region. In some embodiments, the enhancer sequence region is the Enhancer1 sequence region. In some embodiments, the enhancer sequence region is the Enhancer1 sequence region.

[0534] In some embodiments, the AAV particle viral genome comprises two enhancer sequence regions. In some embodiments, the enhancer sequence regions are the Enhancer1 sequence region and the Enhancer 2 sequence region.

[0535] In some embodiments, the AAV particle viral genome may comprise at least one promoter sequence region. The promoter sequence region(s) may, independently, have a length such as, but not limited to, 4, 5, 6, 7, 8, 9, 10, 11, 12, 13, 14, 15, 16, 17, 18, 19, 20, 21, 22, 23, 24, 25, 26, 27, 28, 29, 30, 31, 32, 33, 34, 35, 36, 37, 38, 39, 40, 41, 42, 43, 44, 45, 46, 47, 48, 49, 50, 51, 52, 53, 54, 55, 56, 57, 58, 59, 60, 61, 62, 63, 64, 65, 66, 67, 68, 69, 70, 71, 72, 73, 74, 75, 76, 77, 78, 79, 80, 81, 82, 83, 84, 85, 86, 87, 88, 89, 90, 91, 92, 93, 94, 95, 96, 97, 98, 99, 100, 101, 102, 103, 104, 105, 106, 107, 108, 109, 110, 111, 112, 113, 114, 115, 116, 117, 118, 119, 120, 121, 122, 123, 124, 125, 126, 127, 128, 129, 130, 131, 132, 133, 134, 135, 136, 137, 138, 139, 140, 141, 142, 143, 144, 145, 146, 147, 148, 149, 150, 151, 152, 153, 154, 155, 156, 157, 158, 159, 160, 161, 162, 163, 164, 165, 166, 167, 168, 169, 170, 171, 172, 173, 174, 175, 176, 177, 178, 179, 180, 181, 182, 183, 184, 185, 186, 187, 188, 189, 190, 191, 192, 193, 194, 195, 196, 197, 198, 199, 200, 201, 202, 203, 204, 205, 206, 207, 208, 209, 210, 211, 212, 213, 214, 215, 216, 217, 218, 219, 220, 221, 222, 223, 224, 225, 226, 227, 228, 229, 230, 231, 232, 233, 234, 235, 236, 237, 238, 239, 240, 241, 242, 243, 244, 245, 246, 247, 248, 249, 250, 251, 252, 253, 254, 255, 256, 257, 258, 259, 260, 261, 262, 263, 264, 265, 266, 267, 268, 269, 270, 271, 272, 273, 274, 275, 276, 277, 278, 279, 280, 281, 282, 283, 284, 285, 286, 287, 288, 289, 290, 291, 292, 293, 294, 295, 296, 297, 298, 299, 300, 301, 302, 303, 304, 305, 306, 307, 308, 309, 310, 311, 312, 313, 314, 315, 316, 317, 318, 319, 320, 321, 322, 323, 324, 325, 326, 327, 328, 329, 330, 331, 332, 333, 334, 335, 336, 337, 338, 339, 340, 341, 342, 343, 344, 345, 346, 347, 348, 349, 350, 351, 352, 353, 354, 355, 356, 357, 358, 359, 360, 361, 362, 363, 364, 365, 366, 367, 368, 369, 370, 371, 372, 373, 374, 375, 376, 377, 378, 379, 380, 381, 382, 383, 384, 385, 386, 387, 388, 389, 390, 391, 392, 393, 394, 395, 396, 397, 398, 399, 400, 401, 402, 403, 404, 405, 406, 407, 408, 409, 410, 411, 412, 413, 414, 415, 416, 417, 418, 419, 420, 421, 422, 423, 424, 425, 426, 427, 428, 429, 430, 431, 432, 433, 434, 435, 436, 437, 438, 439, 440, 441, 442, 443, 444, 445, 446, 447, 448, 449, 450, 451, 452, 453, 454, 455, 456, 457, 458, 459, 460, 461, 462, 463, 464, 465, 466, 467, 468, 469, 470, 471, 472, 473, 474, 475, 476, 477, 478, 479, 480, 481, 482, 483, 484, 485, 486, 487, 488, 489, 490, 491, 492, 493, 494, 495, 496, 497, 498, 499, 500, 501, 502, 503, 504, 505, 506, 507, 508, 509, 510, 511, 512, 513, 514, 515, 516, 517, 518, 519, 520, 521, 522, 523, 524, 525, 526, 527, 528, 529, 530, 531, 532, 533, 534, 535, 536, 537, 538, 539, 540, 541, 542, 543, 544, 545, 546, 547, 548, 549, 550, 551, 552, 553, 554, 555, 556, 557, 558, 559, 560, 561, 562, 563, 564, 565, 566, 567, 568, 569, 570, 571, 572, 573, 574, 575, 576, 577, 578, 579, 580, 581, 582, 583, 584, 585, 586, 587, 588, 589, 590, 591, 592, 593, 594, 595, 596, 597, 598, 599, and 600 nucleotides. The length of the promoter region for the viral genome may be 4-10, 10-20, 10-50, 20-30, 30-40, 40-50, 50-60, 50-100, 60-70, 70-80, 80-90, 90-100, 100-110, 100-150, 110-120, 120-130, 130-140, 140-150, 150-160, 150-200, 160-170, 170-180, 180-190, 190-200, 200-210, 200-250, 210-220, 220-230, 230-240, 240-250, 250-260, 250-300, 260-270, 270-280, 280-290, 290-300, 300-310, 300-350, 310-320, 320-330, 330-340, 340-350, 350-360, 350-400, 360-370, 370-380, 380-390, 390-400, 400-410, 400-450, 410-420, 420-430, 430-440, 440-450, 450-460, 450-500, 460-470, 470-480, 480-490, 490-500, 500-510, 500-550, 510-520, 520-530, 530-540, 540-550, 550-560, 550-600, 560-570, 570-580, 580-590, and 590-600 nucleotides. As a non-limiting example, the viral genome comprises a promoter region that is about 4 nucleotides in length. As a non-limiting example, the viral genome comprises a promoter region that is about 17 nucleotides in length. As a non-limiting example, the viral genome comprises a promoter region that is about 204 nucleotides in length. As a non-limiting example, the viral genome comprises a promoter region that is about 219 nucleotides in length. As a non-limiting example, the viral genome comprises a promoter region that is about 260 nucleotides in length. As a non-limiting example, the viral genome comprises a promoter region that is about 303 nucleotides in length. As a non-limiting example, the viral genome comprises a promoter region that is about 382 nucleotides in length. As a non-limiting example, the viral genome comprises a promoter region that is about 588 nucleotides in length.

[0536] In some embodiments, the AAV particle viral genome comprises at least one promoter sequence region. Non-limiting examples of promoter sequence regions are described in Table 16.

TABLE 16
Promoter Sequence Regions

| | SEQ ID NO or |
|---|---|
| Sequence Region Name | Sequence |
| Promoter1 | 1410 |
| Promoter2 | 1411 |
| Promoter3 | GTTG |
| Promoter4 | 1412 |
| Promoter5 | 1413 |
| Promoter6 | 1414 |

[0537] In some embodiments, the AAV particle viral genome comprises one promoter sequence region. In some embodiments, the promoter sequence region is Promoted. In some embodiments, the promoter sequence region is Promoter2. in some embodiments, the promoter sequence region is Promoter3. In some embodiments, the promoter sequence region is Promoter4. In some embodiments, the promoter sequence region is Promoter5. In some embodiments, the promoter sequence region is Promoter6.

[0538] In some embodiments, the AAV particle viral genome comprises two promoter sequence regions. In some embodiments, the promoter sequence region is Promoter1 sequence region, and the Promoter2 sequence region. In some embodiments, the promoter sequence region is Promoter1 sequence region, and the Promoter3 sequence region. In some embodiments, the promoter sequence region is Promoter1 sequence region, and the Promoter4 sequence region. In some embodiments, the promoter sequence region is Promoter1 sequence region, and the Promoter5 sequence region. In some embodiments, the promoter sequence region is Promoter1 sequence region, and the Promoter6 sequence region. In some embodiments, the promoter sequence region is Promoter2 sequence region, and the Promoter3 sequence region. In some embodiments, the promoter sequence region is Promoter2 sequence region, and the Promoter4 sequence region. In some embodiments, the promoter sequence region is Promoter2 sequence region, and the Promoter5 sequence region. In some embodiments, the promoter sequence region is Promoter2 sequence region, and the Promoter6 sequence region. In some embodiments, the promoter sequence region is Promoter3 sequence region, and the Promoter4 sequence region. In some embodiments, the promoter sequence region is Promoter3 sequence region, and the Promoter5 sequence region. In some embodiments, the promoter sequence region is Promoter3 sequence region, and the Promoter6 sequence region. In some embodiments, the promoter sequence region is Promoter4 sequence region, and the Promoter5 sequence region. In some embodiments, the promoter sequence region is Promoter4 sequence region, and the Promoter6 sequence region. In some embodiments, the promoter sequence region is Promoter5 sequence region, and the Promoter6 sequence region.

[0539] In some embodiments, the AAV particle viral genome may comprise at least one exon sequence region. The exon region(s) may, independently, have a length such as, but not limited to, 2, 3, 4, 5, 6, 7, 8, 9, 10, 11, 12, 13, 14, 15, 16, 17, 18, 19, 20, 21, 22, 23, 24, 25, 26, 27, 28, 29, 30, 31, 32, 33, 34, 35, 36, 37, 38, 39, 40, 41, 42, 43, 44, 45, 46, 47, 48, 49, 50, 51, 52, 53, 54, 55, 56, 57, 58, 59, 60, 61, 62, 63, 64, 65, 66, 67, 68, 69, 70, 71, 72, 73, 74, 75, 76, 77, 78, 79, 80, 81, 82, 83, 84, 85, 86, 87, 88, 89, 90, 91, 92, 93, 94, 95, 96, 97, 98, 99, 100, 101, 102, 103, 104, 105, 106, 107, 108, 109, 110, 111, 112, 113, 114, 115, 116, 117, 118, 119, 120, 121, 122, 123, 124, 125, 126, 127, 128, 129, 130, 131, 132, 133, 134, 135, 136, 137, 138, 139, 140, 141, 142, 143, 144, 145, 146, 147, 148, 149, and 150 nucleotides. The length of the exon region for the viral genome may be 2-10, 5-10, 5-15, 10-20, 10-30, 10-40, 15-20, 15-25, 20-30, 20-40, 20-50, 25-30, 25-35, 30-40, 30-50, 30-60, 35-40, 35-45, 40-50, 40-60, 40-70, 45-50, 45-55, 50-60, 50-70, 50-80, 55-60, 55-65, 60-70, 60-80, 60-90, 65-70, 65-75, 70-80, 70-90, 70-100, 75-80, 75-85, 80-90, 80-100, 80-110, 85-90, 85-95, 90-100, 90-110, 90-120, 95-100, 95-105, 100-110, 100-120, 100-130, 105-110, 105-115, 110-120, 110-130, 110-140, 11--120, 115-125, 120-130, 120-140, 120-150, 125-130, 125-135, 130-140, 130-150, 135-140, 135-145, 140-150, and 145-150 nucleotides. As a non-limiting example, the viral genome comprises an exon region that is about 53 nucleotides in length. As a non-limiting example, the viral genome comprises an exon region that is about 134 nucleotides in length.

[0540] In some embodiments, the AAV particle viral genome comprises at least one Exon sequence region. Non-limiting examples of Exon sequence regions are described in Table 17.

TABLE 17
Exon Sequence Regions

| Sequence Region Name | SEQ ID NO |
|---|---|
| Exon1 | 1415 |
| Exon2 | 1416 |

[0541] In some embodiments, the AAV particle viral genome comprises one Exon sequence region. In some embodiments, the Exon sequence regions is the Exon1 sequence region. In some embodiments, the Exon sequence regions is the Exon2 sequence region,

[0542] In some embodiments, the AAV particle viral genome comprises two Exon sequence regions. In some embodiments, the Exon sequence regions are the Exon1 sequence region and the Exon 2 sequence region.

[0543] In some embodiments, the AAV particle viral genome may comprise at least one intron sequence region. The intron region(s) may, independently, have a length such as, but not limited to, 25, 26, 27, 28, 29, 30, 31, 32, 33, 34, 35, 36, 37, 38, 39, 40, 41, 42, 43, 44, 45, 46, 47, 48, 49, 50, 51, 52, 53, 54, 55, 56, 57, 58, 59, 60, 61, 62, 63, 64, 65, 66, 67, 68, 69, 70, 71, 72, 73, 74, 75, 76, 77, 78, 79, 80, 81, 82, 83, 84, 85, 86, 87, 88, 89, 90, 91, 92, 93, 94, 95, 96, 97, 98, 99, 100, 101, 102, 103, 104, 105, 106, 107, 108, 109, 110, 111, 112, 113, 114, 115, 116, 117, 118, 119, 120, 121, 122, 123, 124, 125, 126, 127, 128, 129, 130, 131, 132, 133, 134, 135, 136, 137, 138, 139, 140, 141, 142, 143, 144, 145, 146, 147, 148, 149, 150, 151, 152, 153, 154, 155, 156, 157, 158, 159, 160, 161, 162, 163, 164, 165, 166, 167, 168, 169, 170, 171, 172, 173, 174, 175, 176, 177, 178, 179, 180, 181, 182, 183, 184, 185, 186, 187, 188, 189, 190, 191, 192, 193, 194, 195, 196, 197, 198, 199, 200, 201, 202, 203, 204, 205, 206, 207, 208, 209, 210, 211, 212, 213, 214, 215, 216, 217, 218, 219, 220, 221, 222, 223, 224, 225, 226, 227, 228, 229, 230, 231, 232, 233, 234, 235, 236, 237, 238, 239, 240, 241, 242, 243, 244, 245, 246, 247, 248, 249, 250, 251, 252, 253, 254, 255, 256, 257, 258, 259, 260, 261, 262, 263, 264, 265, 266, 267, 268, 269, 270, 271, 272, 273, 274, 275, 276, 277, 278, 279, 280, 281, 282, 283, 284, 285, 286, 287, 288, 289, 290, 291, 292, 293, 294, 295, 296, 297, 298, 299, 300, 301, 302, 303, 304, 305, 306, 307, 308, 309, 310, 311, 312, 313, 314, 315, 316, 317, 318, 319, 320, 321, 322, 323, 324, 325, 326, 327, 328, 329, 330, 331, 332, 333, 334, 335, 336, 337, 338, 339, 340, 341, 342, 343, 344, 345, 346, 347, 348, 349, and 350 nucleotides. The length of the intron region for the viral genome may be 25-35, 25-50, 35-45, 45-55, 50-75, 55-65, 65-75, 75-85, 75-100, 85-95, 95-105, 100-125, 105-115, 115-125, 125-135, 125-150, 135-145, 145-155, 150-175, 155-165, 165-175, 175-185, 175-200, 185-195, 195-205, 200-225, 205-215, 215-225, 225-235, 225-250, 235-245, 245-255, 250-275, 255-265, 265-275, 275-285, 275-300, 285-295, 295-305, 300-325, 305-315, 315-325, 325-335, 325-350, and 335-345 nucleotides. As a non-limiting example, the viral genome comprises an intron region that is about 32 nucleotides in length. As a non-limiting example, the viral genome comprises an intron region that is about 172 nucleotides in length. As a non-limiting example, the viral genome comprises an intron region that is about 201 nucleotides in length. As a non-limiting example, the viral genome comprises an intron region that is about 347 nucleotides in length.

[0544] In some embodiments, the AAV particle viral genome comprises at least one intron sequence region. Non-limiting examples of intron sequence regions are described in Table 18.

TABLE 18
Intron Sequence Regions

| Sequence Region Name | SEQ ID NO |
|---|---|
| Intron1 | 1417 |
| Intron2 | 1418 |
| Intron3 | 1419 |

[0545] In some embodiments, the AAV particle viral genome comprises one intron sequence region. In some embodiments, the intron sequence region is the Intron1 sequence region. In some embodiments, the intron sequence region is the Intron2 sequence region. In some embodiments, the intron sequence region is the Intron3 sequence region.

[0546] In some embodiments, the AAV particle viral genome comprises two intron sequence regions. In some embodiments, the intron sequence regions are the Intron1 sequence region and the Intron2 sequence region. In some embodiments, the intron sequence regions are the Intron2 sequence region and the Intron3 sequence region. In some embodiments, the intron sequence regions are the Intron1 sequence region and the Intron3 sequence region.

[0547] In some embodiments, the AAV particle viral genome comprises three intron sequence regions. In some embodiments, the intron sequence regions are the Intron1 sequence region, the Intron2 sequence region, and the Intron3 sequence region.

[0548] In some embodiments, the AAV particle viral genome may comprise at least one polyadenylation signal sequence region. The polyadenylation signal region sequence region(s) may, independently, have a length such as, but not limited to, 4, 5, 6, 7, 8, 9, 10, 11, 12, 13, 14, 15, 16, 17, 18, 19, 20, 21, 22, 23, 24, 25, 26, 27, 28, 29, 30, 31, 32, 33, 34, 35, 36, 37, 38, 39, 40, 41, 42, 43, 44, 45, 46, 47, 48, 49, 50, 51, 52, 53, 54, 55, 56, 57, 58, 59, 60, 61, 62, 63, 64, 65, 66, 67, 68, 69, 70, 71, 72, 73, 74, 75, 76, 77, 78, 79, 80, 81, 82, 83, 84, 85, 86, 87, 88, 89, 90, 91, 92, 93, 94, 95, 96, 97, 98, 99, 100, 101, 102, 103, 104, 105, 106, 107, 108, 109, 110, 111, 112, 113, 114, 115, 116, 117, 118, 119, 120, 121, 122, 123, 124, 125, 126, 127, 128, 129, 130, 131, 132, 133, 134, 135, 136, 137, 138, 139, 140, 141, 142, 143, 144, 145, 146, 147, 148, 149, 150, 151, 152, 153, 154, 155, 156, 157, 158, 159, 160, 161, 162, 163, 164, 165, 166, 167, 168, 169, 170, 171, 172, 173, 174, 175, 176, 177, 178, 179, 180, 181, 182, 183, 184, 185, 186, 187, 188, 189, 190, 191, 192, 193, 194, 195, 196, 197, 198, 199, 200, 201, 202, 203, 204, 205, 206, 207, 208, 209, 210, 211, 212, 213, 214, 215, 216, 217, 218, 219, 220, 221, 222, 223, 224, 225, 226, 227, 228, 229, 230, 231, 232, 233, 234, 235, 236, 237, 238, 239, 240, 241, 242, 243, 244, 245, 246, 247, 248, 249, 250, 251, 252, 253, 254, 255, 256, 257, 258, 259, 260, 261, 262, 263, 264, 265, 266, 267, 268, 269, 270, 271, 272, 273, 274, 275, 276, 277, 278, 279, 280, 281, 282, 283, 284, 285, 286, 287, 288, 289, 290, 291, 292, 293, 294, 295, 296, 297, 298, 299, 300, 301, 302, 303, 304, 305, 306, 307, 308, 309, 310, 311, 312, 313, 314, 315, 316, 317, 318, 319, 320, 321, 323, 323, 324, 325, 326, 327, 328, 329, 330, 331, 332, 333, 334, 335, 336, 337, 338, 339, 340, 341, 342, 343, 344, 345, 346, 347, 348, 349, 350, 351, 352, 353, 354, 355, 356, 357, 358, 359, 360, 361, 362, 363, 364, 365, 366, 367, 368, 369, 370, 371, 372, 373, 374, 375, 376, 377, 378, 379, 380, 381, 382, 383, 384, 385, 386, 387, 388, 389, 390, 391, 392, 393, 394, 395, 396, 397, 398, 399, 400, 401, 402, 403, 404, 405, 406, 407, 408, 409, 410, 411, 412, 413, 414, 415, 416, 417, 418, 419, 420, 421, 422, 423, 424, 425, 426, 427, 428, 429, 430, 431, 432, 433, 434, 435, 436, 437, 438, 439, 440, 441, 442, 443, 444, 445, 446, 447, 448, 449, 450, 451, 452, 453, 454, 455, 456, 457, 458, 459, 460, 461, 462, 463, 464, 465, 466, 467, 468, 469, 470, 471, 472, 473, 474, 475, 476, 477, 478, 479, 480, 481, 482, 483, 484, 485, 486, 487, 488, 489, 490, 491, 492, 493, 494, 495, 496, 497, 498, 499, 500, 501, 502, 503, 504, 505, 506, 507, 508, 509, 510, 511, 512, 513, 514, 515, 516, 517, 518, 519, 520, 521, 522, 523, 524, 525, 526, 527, 528, 529, 530, 531, 532, 533, 534, 535, 536, 537, 538, 539, 540, 541, 542, 543, 544, 545, 546, 547, 548, 549, 550, 551, 552, 553, 554, 555, 556, 557, 558, 559, 560, 561, 562, 563, 564, 565, 566, 567, 568, 569, 570, 571, 572, 573, 574, 575, 576, 577, 578, 579, 580, 581, 582, 583, 584, 585, 586, 587, 588, 589, 590, 591, 592, 593, 594, 595, 596, 597, 598, 599, and 600 nucleotides. The length of the polyadenylation signal sequence region for the viral genome may be 4-10, 10-20, 10-50, 20-30, 30-40, 40-50, 50-60, 50-100, 60-70, 70-80, 80-90, 90-100, 100-110, 100-150, 110-120, 120-130, 130-140, 140-150, 150-160, 150-200, 160-170, 170-180, 180-190, 190-200, 200-210, 200-250, 210-220, 220-230, 230-240, 240-250, 250-260, 250-300, 260-270, 270-280, 280-290, 290-300, 300-310, 300-350, 310-320, 320-330, 330-340, 340-350, 350-360, 350-400, 360-370, 370-380, 380-390, 390-400, 400-410, 400-450, 410-420, 420-430, 430-440, 440-450, 450-460, 450-500, 460-470, 470-480, 480-490, 490-500, 500-510, 500-550, 510-520, 520-530, 530-540, 540-550, 550-560, 550-600, 560-570, 570-580, 580-590, and 590-600 nucleotides. As a non-limiting example, the viral genome comprises a polyadenylation signal sequence region that is about 127 nucleotides in length. As a non-limiting, example, the viral genome comprises a polyadenylation signal sequence region that is about 225 nucleotides in length. As a non-limiting example, the viral genome comprises a polyadenylation signal sequence region that is about 476 nucleotides in length. As a non-limiting example, the viral genome comprises a polyadenylation signal sequence region that is about 477 nucleotides in length.

[0549] In some embodiments, the AAV particle viral genome comprises at least one polyadenylation (polyA) signal sequence region. Non-limiting examples of polyA signal sequence regions are described in Table 19.

TABLE 19
PolyA Signal Sequence Regions

| Sequence Region Name | SEQ ID NO |
|---|---|
| PolyA1 | 1420 |
| PolyA2 | 1421 |
| PolyA3 | 1422 |
| PolyA4 | 1423 |

[0550] In some embodiments, the AAV particle viral genome comprises one polyA signal sequence region. In some embodiments, the polyA signal sequence regions is the PolyA.1 sequence region. In some embodiments, the polyA signal sequence regions is the PolyA2 sequence region. In some embodiments, the polyA signal sequence regions is the PolyA3 sequence region. In some embodiments, the polyA signal sequence regions is the PolyA4 sequence region.

[0551] In some embodiments, the AAV particle viral genome comprises more than one polyA signal sequence region.

[0552] In some embodiments, the AAV particle viral genome comprises at least one inverted terminal repeat (ITR) sequence region, at least one multiple cloning site (MCS) sequence region, at least one enhancer sequence region, at least one promoter sequence region, at least one exon sequence region, at least one intron sequence region, at least one modulatory polynucleotide region, at least one polyadenylation signal sequence region, and at least one filler sequence region,

[0553] In some embodiments, the AAV particle viral genome comprises a 5′ inverted terminal repeat (ITR) sequence region and a 3′ ITR sequence region, two multiple cloning site (MCS) sequence regions, an enhancer sequence region, a promoter sequence region, an intron sequence region, a modulatory polynucleotide region, a polyadenylation signal sequence region, and a filler sequence region.

[0554] In some embodiments, the AAV particle viral genome comprises a 5′ inverted terminal repeat (ITR) sequence region and a 3′ ITR sequence region, two multiple cloning site (MCS) sequence regions, a CMV enhancer sequence region, a CBA promoter sequence region, an SV40 intron sequence region, a modulatory polynucleotide region, a rabbit globin polyadenylation signal sequence region, and a filler sequence region. Non-limiting examples of ITR to ITR sequences for use in the AAV particles of the present disclosure having all of the sequence modules above are described in Table 20. In Table 20, the sequence identifier or sequence of the sequence region (Region SEQ ID NO) and the length of the sequence region (Region length) are described as well as the name and sequence identifier of the ITR to ITR sequence (e.g., VOYHT1 (SEQ ID NO: 1352)).

TABLE 20
Sequence Regions in ITR to ITR Sequences

| | VOYHT1 (SEQ | | VOYHT2 (SEQ | | VOYHT3 (SEQ | | VOYHT4 (SEQ | |
|---|---|---|---|---|---|---|---|---|
| | ID NO: 1352) | | ID NO: 1353) | | ID NO: 1354) | | ID NO: 1355) | |
| Sequence | Region SEQ | Region | Region SEQ | Region | Region SEQ | Region | Region SEQ | Region |
| Regions | ID NO | length | ID NO | length | ID NO | length | ID NO | length |
| 5′ ITR | 1380 | 141 | 1380 | 141 | 1380 | 141 | 1380 | 141 |
| MCS | 1384 | 10 | 1384 | 10 | 1384 | 10 | 1384 | 10 |
| CMV enhancer | 1408 | 382 | 1408 | 382 | 1408 | 382 | 1408 | 382 |
| CBA Promoter | 1410 | 260 | 1410 | 260 | 1410 | 260 | 1410 | 260 |
| SV40 Intron | 1417 | 172 | 1417 | 172 | 1417 | 172 | 1417 | 172 |
| Modulatory | 1262 | 163 | 1262 | 163 | 1250 | 158 | 1347 | 163 |
| Polynucleotide | | | | | | | | |
| MCS | TCGAG | 5 | TCGAG | 5 | TCGAG | 5 | TCGAG | 5 |
| Rabbit globin | 1420 | 127 | 1420 | 127 | 1420 | 127 | 1420 | 127 |
| PolyA Signal | | | | | | | | |
| 3′ ITR | 1382 | 141 | 1382 | 141 | 1382 | 141 | 1382 | 141 |

[0555] In some embodiments, the AAV particle viral genome comprises SEQ ID NO: 1352 (VOYHT1) which comprises a 5′ inverted terminal repeat (ITR) sequence region and a 3′ ITR sequence region, two multiple cloning site (MCS) sequence regions, a CMV enhancer sequence region, a CBA promoter sequence region, an SV40 intron sequence region, a modulatory polynucleotide region, a rabbit globin polyadenylation signal sequence region, and a filler sequence region.

[0556] In some embodiments, VOYHT1 is referred to as VY-HTT01. In some embodiments, VY-HTT01 has a CAS (Chemical Abstracts Service) Registry Number of 2288462-09-2.

[0557] In some embodiments, the AAV particle viral genome comprises SEQ ID NO: 1353 (VOYHT2) which comprises a 5′ inverted terminal repeat (ITR) sequence region and a 3′ ITR sequence region, two multiple cloning site (MCS) sequence regions, a CMV enhancer sequence region, a CBA promoter sequence region, an SV40 intron sequence region, a modulatory polynucleotide region, a rabbit globin polyadenylation signal sequence region, and a filler sequence region.

[0558] In some embodiments, the AAV particle viral genome comprises SEQ ID NO: 1354 (VOYHT3) which comprises a 5′ inverted terminal repeat (ITR) sequence region and a 3′ ITR sequence region, two multiple cloning site (MCS) sequence regions, a CMV enhancer sequence region, a CBA promoter sequence region, an SV40 intron sequence region, a modulatory polynucleotide region, a rabbit globin polyadenylation signal sequence region, and a filler sequence region.

[0559] In some embodiments, the AAV particle viral genome comprises SEQ ID NO: 1355 (VOYHT4) which comprises a 5′ inverted terminal repeat (ITR) sequence region and a 3′ ITR sequence region, two multiple cloning site (MCS) sequence regions, a CMV enhancer sequence region, a CBA promoter sequence region, an SV40 intron sequence region, a modulatory polynucleotide region, a rabbit globin polyadenylation signal sequence region, and a filler sequence region.

[0560] In some embodiments, the AAV particle viral genome comprises a 5′ inverted terminal repeat (ITR) sequence region and a 3′ ITR sequence region, two multiple cloning site (MCS) sequence regions, a CMV enhancer sequence region, a CBA promoter sequence region, an SV40 intron sequence region, a modulatory polynucleotide region, a rabbit globin polyadenylation signal sequence region, and a filler sequence region. Non-limiting examples of ITR to ITR sequences for use in the AAV particles of the present disclosure having all of the sequence modules above are described in Table 21. In Table 21, the sequence identifier or sequence of the sequence region (Region SEQ m NO) and the length of the sequence region (Region length) are described as well as the name and sequence identifier of the ITR to ITR sequence (e.g., VOYHT5 (SEQ ID NO: 1356)).

TABLE 21
Sequence Regions in ITR to ITR Sequences

| | VOYHT5 (SEQ | | VOYHT6 (SEQ | | VOYHT7 (SEQ | | VOYHT8 (SEQ | |
|---|---|---|---|---|---|---|---|---|
| | ID NO: 1356) | | ID NO: 1357) | | ID NO: 1358) | | ID NO: 1359) | |
| Sequence | Region SEQ | Region | Region SEQ | Region | Region SEQ | Region | Region SEQ | Region |
| Regions | ID NO | length | ID NO | length | ID NO | length | ID NO | length |
| 5′ ITR | 1380 | 141 | 1380 | 141 | 1380 | 141 | 1380 | 141 |
| MCS | 1384 | 10 | 1384 | 10 | 1384 | 10 | 1384 | 10 |
| CMV enhancer | 1408 | 382 | 1408 | 382 | 1408 | 382 | 1408 | 382 |
| CBA Promoter | 1410 | 260 | 1410 | 260 | 1410 | 260 | 1410 | 260 |
| SV40 Intron | 1417 | 172 | 1417 | 172 | 1417 | 172 | 1417 | 172 |
| Modulatory | 1262 | 163 | 1262 | 163 | 1250 | 158 | 1347 | 163 |
| Polynucleotide | | | | | | | | |
| MCS | TCGAG | 5 | TCGAG | 5 | TCGAG | 5 | TCGAG | 5 |
| Rabbit globin | 1420 | 127 | 1420 | 127 | 1420 | 127 | 1420 | 127 |
| PolyA Signal | | | | | | | | |
| 3′ ITR | 1382 | 141 | 1382 | 141 | 1382 | 141 | 1382 | 141 |

[0561] In some embodiments, the AAV particle viral genome comprises SEQ m NO: 1356 (VOYHT5) which comprises a 5′ inverted terminal repeat (ITR) sequence region and a 3′ ITR sequence region, two multiple cloning site (MCS) sequence regions, a CMV enhancer sequence region, a CBA promoter sequence region, an SV40 intron sequence region, a modulatory polynucleotide region, a rabbit globin polyadenylation signal sequence region, and a filler sequence region.

[0562] In some embodiments, the AAV particle viral genome comprises SEQ ID NO: 1357 (VOYHT6) which comprises a 5′ inverted terminal repeat (ITR) sequence region and a 3′ ITR sequence region, two multiple cloning site (MCS) sequence regions, a CMV enhancer sequence region, a CBA promoter sequence region, an SV40 intron sequence region, a modulatory polynucleotide region, a rabbit globin polyadenylation signal sequence region, and a filler sequence region.

[0563] In some embodiments, the AAV particle viral genome comprises SEQ ID NO: 1358 (VOYHT7) which comprises a 5′ inverted terminal repeat (ITR) sequence region and a 3′ ITR sequence region, two multiple cloning site (MCS) sequence regions, a CMV enhancer sequence region, a CBA promoter sequence region, an SV40 intron sequence region, a modulatory polynucleotide region, a rabbit globin polyadenylation signal sequence region, and a filler sequence region.

[0564] In some embodiments, the AAV particle viral genome comprises SEQ ID NO: 1359 (VOYHT8) which comprises a 5′ inverted terminal repeat (ITR) sequence region and a 3′ ITR sequence region, two multiple cloning site (MCS) sequence regions, a CMV enhancer sequence region, a CBA promoter sequence region, an SV40 intron sequence region, a modulatory polynucleotide region, a rabbit globin polyadenylation signal sequence region, and a filler sequence region.

[0565] In some embodiments, the AAV particle viral genome comprises a 5′ inverted terminal repeat (ITR) sequence region and a 3′ ITR sequence region, two multiple cloning site (MCS) sequence regions, an enhancer sequence region, a promoter sequence region, an intron sequence region, a modulatory polynucleotide region, a polyadenylation signal sequence region, and two filler sequence regions.

[0566] In some embodiments, the AAV particle viral genome comprises a 5′ inverted terminal repeat (ITR) sequence region and a 3′ ITR sequence region, two multiple cloning site (MCS) sequence regions, a CMV enhancer sequence region, a CBA promoter sequence region, an SV40 intron sequence region, a modulatory polynucleotide region, a rabbit globin polyadenylation signal sequence region, and two filler sequence regions. Non-limiting examples of ITR to ITR sequences for use in the AAV particles of the present disclosure having all of the sequence modules above are described in Table 22. In Table 22, the sequence identifier or sequence of the sequence region (Region SEQ ID NO) and the length of the sequence region (Region length) are described as well as the name and sequence identifier of the ITR to ITR sequence (e.g., VOYHT9 (SEQ ID NO: 1360)).

TABLE 22
Sequence Regions in ITR to ITR Sequences

| | VOYHT9 (SEQ | | VOYHT10 (SEQ | | VOYHT11 (SEQ | | VOYHT12 (SEQ | |
|---|---|---|---|---|---|---|---|---|
| | ID NO: 1360) | | ID NO: 1361) | | ID NO: 1362) | | ID NO: 1363) | |
| Sequence | Region SEQ | Region | Region SEQ | Region | Region SEQ | Region | Region SEQ | Region |
| Regions | ID NO | length | ID NO | length | ID NO | length | ID NO | length |
| 5′ ITR | 1380 | 141 | 1380 | 141 | 1380 | 141 | 1380 | 141 |
| MCS | 1384 | 10 | 1384 | 10 | 1384 | 10 | 1384 | 10 |
| CMV enhancer | 1408 | 382 | 1408 | 382 | 1408 | 382 | 1408 | 382 |
| CBA Promoter | 1410 | 260 | 1410 | 260 | 1410 | 260 | 1410 | 260 |
| SV40 Intron | 1417 | 172 | 1417 | 172 | 1417 | 172 | 1417 | 172 |
| Modulatory | 1262 | 163 | 1262 | 163 | 1250 | 158 | 1347 | 163 |
| Polynucleotide | | | | | | | | |
| MCS | TCGAG | 5 | TCGAG | 5 | TCGAG | 5 | TCGAG | 5 |
| Rabbit globin | 1420 | 127 | 1420 | 127 | 1420 | 127 | 1420 | 127 |
| PolyA Signal | | | | | | | | |
| 3′ ITR | 1382 | 141 | 1382 | 141 | 1382 | 141 | 1382 | 141 |

[0567] In some embodiments, the AAV particle viral genome comprises SEQ ID NO: 1360 (VOYHT9) which comprises a 5′ inverted terminal repeat (ITR) sequence region and a 3′ ITR sequence region, two multiple cloning site (MCS) sequence regions, a CMV enhancer sequence region, a CBA promoter sequence region, an SV40 intron sequence region, a modulatory polynucleotide region, a rabbit globin polyadenylation signal sequence region, and two filler sequence regions.

[0568] In some embodiments, the AAV particle viral genome comprises SEQ ID NO: 1361 (VOYHT10) which comprises a 5′ inverted terminal repeat (ITR) sequence region and a 3′ ITR sequence region, two multiple cloning site (MCS) sequence regions, a CMV enhancer sequence region, a CBA promoter sequence region, an SV40 intron sequence region, a modulatory polynucleotide region, a rabbit globin polyadenylation signal sequence region, and two filler sequence regions.

[0569] In some embodiments, the AAV particle viral genome comprises SEQ ID NO: 1362 (VOYHT11 ) which comprises a 5′ inverted terminal repeat (ITR) sequence region and a 3′ ITR sequence region, two multiple cloning site (MCS) sequence regions, a CMV enhancer sequence region, a CBA promoter sequence region, an SV40 intron sequence region, a modulatory polynucleotide region, a rabbit globin polyadenylation signal sequence region, and two filler sequence regions.

[0570] In some embodiments, the AAV particle viral genome, comprises SEQ ID NO: 1363 (VOYHT12) which comprises a 5′ inverted terminal repeat (ITR) sequence region and a 3′ ITR sequence region, two multiple cloning site (MCS) sequence regions, a CMV enhancer sequence region, a CBA promoter sequence region, an SV40 intron sequence region, a modulatory polynucleotide region, a rabbit globin polyadenylation signal sequence region, and two filler sequence regions.

[0571] In some embodiments, the AAV particle viral genome comprises a 5′ inverted terminal repeat (ITR) sequence region and a 3′ ITR sequence region, two multiple cloning site (MCS) sequence regions, an enhancer sequence region, a promoter sequence region, an intron sequence region, a modulatory polynucleotide region, and a polyadenylation signal sequence region.

[0572] In some embodiments, the AAV particle viral genome comprises a 5′ inverted terminal repeat (ITR) sequence region and a 3′ ITR sequence region, two multiple cloning site (MCS) sequence regions, a CMV enhancer sequence region, a CBA promoter sequence region, an SV40 intron sequence region, a modulatory polynucleotide region, and a rabbit globin polyadenylation signal sequence region. Non-limiting examples of ITR to ITR sequences for use in the AAV particles of the present disclosure having all of the sequence modules above are described in Table 23. In Table 23, the sequence identifier or sequence of the sequence region (Region SEQ ID NO) and the length of the sequence region (Region length) are described as well as the name and sequence identifier of the ITR to ITR sequence (e.g., VOYHT13 (SEQ NO: 1364)).

TABLE 23
Sequence Regions in ITR to ITR Sequences

| | VOYHT13 (SEQ | | VOYHT14 (SEQ | |
|---|---|---|---|---|
| | ID NO: 1364) | | ID NO: 1365) | |
| Sequence | Region SEQ | Region | Region SEQ | Region |
| Regions | ID NO | length | ID NO | length |
| 5′ ITR | 1380 | 141 | 1380 | 141 |
| MCS | 1384 | 10 | 1384 | 10 |
| CMV | 1408 | 382 | 1408 | 382 |
| enhancer | | | | |
| CBA Promoter | 1410 | 260 | 1410 | 260 |
| SV40 Intron | 1417 | 172 | 1417 | 172 |
| Modulatory | 1262 | 163 | 1249 | 158 |
| Polynucleotide | | | | |
| MCS | TCGAG | 5 | TCGAG | 5 |
| Rabbit globin | 1420 | 127 | 1420 | 127 |
| PolyA Signal | | | | |
| 3′ ITR | 1382 | 141 | 1382 | 141 |

[0573] In some embodiments, the AAV particle viral genome comprises SEQ ID NO: 1364 (VOYHT13) which comprises a 5′ inverted terminal repeat (ITR)) sequence region and a 3′ ITR sequence region, two multiple cloning site (MCS) sequence regions, a CMV enhancer sequence region, a CBA promoter sequence region, an SV40 intron sequence region, a modulatory polynucleotide region, and a rabbit globin polyadenylation signal sequence region.

[0574] In some embodiments, the AAV particle viral genome comprises SEQ ID NO: 1365 (VOYHT14) which comprises a 5′ inverted terminal repeat (ITR) sequence region and a 3′ ITR sequence region, two multiple cloning site (MCS) sequence regions, a CMV enhancer sequence region, a CBA promoter sequence region, an SV40 intron sequence region, a modulatory polynucleotide region, and a rabbit globin polyadenylation signal sequence region.

[0575] In some embodiments, the AAV particle viral genome comprises a 5′ inverted terminal repeat (ITR) sequence region and a 3′ ITR sequence region, an enhancer sequence region, a promoter sequence region, an intron sequence region, a modulatory polynucleotide region, and a polyadenylation signal sequence region.

[0576] In some embodiments, the AAV particle viral genome comprises a 5′ inverted terminal repeat (ITR) sequence region and a 3′ ITR sequence region, a CMV enhancer sequence region, a CBA promoter sequence region, an SV40 intron sequence region, a modulatory polynucleotide region, and a rabbit globin polyadenylation signal sequence region. Non-limiting examples of ITR to ITR sequences for use in the AAV particles of the present disclosure having all of the sequence modules above are described in Tables 24-28. In Tables 24-28, the sequence identifier or sequence of the sequence region (Region SEQ ID NO) and the length of the sequence region (Region length) are described as well as the name and sequence identifier of the ITR to ITR sequence e.g., VOYHT15 (SEQ ID NO: 1366)).

TABLE 24
Sequence Regions in ITR to ITR Sequences

| | VOYHT15 (SEQ | | VOYHT16 (SEQ | |
|---|---|---|---|---|
| | ID NO: 1366) | | ID NO: 1367) | |
| Sequence | Region SEQ | Region | Region SEQ | Region |
| Regions | ID NO | length | ID NO | length |
| 5′ ITR | 1381 | 105 | 1381 | 105 |
| CMV enhancer | 1408 | 382 | 1408 | 382 |
| CBA Promoter | 1410 | 260 | 1410 | 260 |
| SV40 intron | 1417 | 172 | 1417 | 172 |
| Modulatory | 1259 | 260 | 1249 | 158 |
| Polynucleotide | | | | |
| Rabbit globin | 1420 | 127 | 1420 | 127 |
| PolyA Signal | | | | |
| 3′ ITR | 1383 | 130 | 1383 | 130 |

TABLE 25
Sequence Regions in ITR to ITR Sequences

| | VOYHT35 (SEQ | | VOYHT36 (SEQ | | VOYHT37 (SEQ | | VOYHT38 (SEQ | |
|---|---|---|---|---|---|---|---|---|
| | ID NO: 1388) | | ID NO. 1426) | | ID NO: 1427) | | ID NO: 1428) | |
| Sequence | RegionSEQ | Region | Region SEQ | Region | Region SEQ | Region | Region SEQ | Region |
| Regions | ID NO | length | ID NO | length | ID NO | length | ID NO | length |
| 5′ ITR | 1381 | 105 | 1381 | 105 | 1381 | 105 | 1381 | 105 |
| CMV enhancer | 1408 | 382 | 1408 | 382 | 1408 | 382 | 1408 | 382 |
| CBA Promoter | 1410 | 260 | 1410 | 260 | 1410 | 260 | 1410 | 260 |
| SV40 Intron | 1417 | 172 | 1417 | 172 | 1417 | 172 | 1417 | 172 |
| Modulatory | 1255 | 158 | 1248 | 158 | 1231 | 158 | 1219 | 158 |
| Polynucleotide | | | | | | | | |
| Rabbit globin | 1420 | 127 | 1420 | 127 | 1420 | 127 | 1420 | 127 |
| PolyA Signal | | | | | | | | |
| 3′ ITR | 1383 | 130 | 1383 | 130 | 1383 | 130 | 1383 | 130 |

TABLE 26
Sequence Regions in ITR to ITR Sequences

| | VOYHT39 (SEQ | | VOYHT40 (SEQ | | VOYHT41 (SEQ | | VOYHT42 (SEQ | |
|---|---|---|---|---|---|---|---|---|
| | ID NO: 1429) | | ID NO: 1430) | | ID NO: 1431) | | ID NO: 1432) | |
| Sequence | Region SEQ | Region | Region SEQ | Region | Region SEQ | Region | Region SEQ | Region |
| Regions | ID NO | length | ID NO | length | ID NO | length | ID NO | length |
| 5′ ITR | 1381 | 105 | 1381 | 105 | 1381 | 105 | 1381 | 105 |
| CMV enhancer | 1408 | 382 | 1408 | 382 | 1408 | 382 | 1408 | 382 |
| CBA Promoter | 1410 | 260 | 1410 | 260 | 1410 | 260 | 1410 | 260 |
| SV40 Intron | 1417 | 172 | 1417 | 172 | 1417 | 172 | 1417 | 172 |
| Modulatory | 1207 | 158 | 1250 | 158 | 1251 | 158 | 1252 | 158 |
| Polynucleotide | | | | | | | | |
| Rabbit globin | 1420 | 127 | 1420 | 127 | 1420 | 127 | 1420 | 127 |
| PolyA Signal | | | | | | | | |
| 3′ ITR | 1383 | 130 | 1383 | 130 | 1383 | 130 | 1383 | 130 |

TABLE 27
Sequence Regions in ITR to ITR Sequences

| | VOYHT43 (SEQ | | VOYHT44 (SEQ | | VOYHT45 (SEQ | | VOYHT46 (SEQ | |
|---|---|---|---|---|---|---|---|---|
| | ID NO: 1433) | | ID NO: 1434) | | ID NO: 1435) | | ID NO: 1436) | |
| Sequence | Region SEQ | Region | Region SEQ | Region | Region SEQ | Region | Region SEQ | Region |
| Regions | ID NO | length | ID NO | length | ID NO | length | ID NO | length |
| 5′ ITR | 1381 | 105 | 1381 | 105 | 1381 | 105 | 1381 | 105 |
| CMV enhancer | 1408 | 382 | 1408 | 382 | 1408 | 382 | 1408 | 382 |
| CBA Promoter | 1410 | 260 | 1410 | 260 | 1410 | 260 | 1410 | 260 |
| SV40 Intron | 1417 | 172 | 1417 | 172 | 1417 | 172 | 1417 | 172 |
| Modulatory | 1253 | 260 | 1194 | 260 | 1223 | 260 | 1211 | 260 |
| Polynucleotide | | | | | | | | |
| Rabbit globin | 1420 | 127 | 1420 | 127 | 1420 | 127 | 1420 | 127 |
| PolyA Signal | | | | | | | | |
| 3′ ITR | 1383 | 130 | 1383 | 130 | 1383 | 130 | 1383 | 130 |

TABLE 28
Sequence Regions in ITR to ITR Sequences

| | VOYHT47 (SEQ | | VOYHT48 (SEQ | |
|---|---|---|---|---|
| | ID NO: 1437) | | ID NO: 1438) | |
| Sequence | Region SEQ | Region | Region SEQ | Region |
| Regions | ID NO | length | ID NO | length |
| 5′ ITR | 1381 | 105 | 1381 | 105 |
| CMV enhancer | 1408 | 382 | 1408 | 382 |
| CBA Promoter | 1410 | 260 | 1410 | 260 |
| SV40 Intron | 1417 | 172 | 1417 | 172 |
| Modulatory | 1262 | 163 | 1347 | 163 |
| Polynucleotide | | | | |
| Rabbit globin | 1420 | 127 | 1420 | 127 |
| PolyA Signal | | | | |
| 3′ ITR | 1383 | 130 | 1383 | 130 |

[0577] In some embodiments, the AAV particle viral genome comprises SEQ ID NO: 1366 (VOYHT15) which comprises a 5′ inverted terminal repeat (ITR) sequence region and a 3′ ITR sequence region, a CMV enhancer sequence region, a CBA promoter sequence region, an SV40 intron sequence region, a modulatory polynucleotide region, and a rabbit globin polyadenylation signal sequence region.

[0578] In some embodiments, the AAV particle viral genome comprises SEQ ID NO: 1367 (VOYHT16) which comprises a 5′ inverted terminal repeat (ITR) sequence region and a 3′ ITR sequence region, a CMV enhancer sequence region, a CBA promoter sequence region, an 5V40 intron sequence region, a modulatory polynucleotide region, and a rabbit globin polyadenylation signal sequence region.

[0579] In some embodiments, the AAV particle viral genome comprises SEQ ID NO: 1388 (VOYHT35) which comprises a 5′ inverted terminal repeat (ITR) sequence region and a 3′ ITR sequence region, a CMV enhancer sequence region, a CBA promoter sequence region, an SV40 intron sequence region, a modulatory polynucleotide region, and a rabbit globin polyadenylation signal sequence region.

[0580] in some embodiments, the AAV particle viral genome comprises SEQ ID NO: 1426 (VOYHT36) which comprises a 5′ inverted terminal repeat (ITR)) sequence region and a 3′ ITR sequence region, a CMV enhancer sequence region, a CBA promoter sequence region, an SV40 intron sequence region, a modulatory polynucleotide region, and a rabbit globin polyadenylation signal sequence region.

[0581] In some embodiments, the AAV particle viral genome comprises SEQ ID NO: 1427 (VOYHT37) which comprises a 5′ inverted terminal repeat (ITR) sequence region and a 3′ ITR sequence region, a CMV enhancer sequence region, a CBA promoter sequence region, an SV40 intron sequence region, a modulatory polynucleotide, region, and a rabbit globin polyadenylation signal sequence region.

[0582] In some embodiments, the AAV particle viral genome comprises SEQ ID NO: 1428 (VOYHT38) which comprises a 5′ inverted terminal repeat (ITR) sequence region and a 3′ ITR sequence region, a CMV enhancer sequence region, a CBA promoter sequence region, an SV40 intron sequence region, a modulatory polynucleotide region, and a rabbit globin polyadenylation signal sequence region.

[0583] In some embodiments, the AAV particle viral genome comprises SEQ ID NO: 1429 (VOYHT39) which comprises a 5′ inverted terminal repeat (ITR) sequence region and a 3′ ITR sequence region, a CMV enhancer sequence region, a CBA promoter sequence region, an SV40 intron sequence region, a modulatory polynucleotide region, and a rabbit globin polyadenylation signal sequence region.

[0584] In some embodiments, the AAV particle viral genome comprises SEQ m NO: 1430 (VOYHT40) which comprises a 5′ inverted terminal repeat (ITR) sequence region and a 3′ ITR sequence region, a CMV enhancer sequence region, a CBA promoter sequence region, an SV40 intron sequence region, a modulatory polynucleotide, region, and a rabbit globin polyadenylation signal sequence region.

[0585] In some embodiments, the AAV particle viral genome comprises SEQ ID NO: 1431 (VOYHT41) which comprises a 5′ inverted terminal repeat (ITR) sequence region and a 3′ ITR sequence region, a CMV enhancer sequence region, a CBA promoter sequence region, an SV40 intron sequence region, a modulatory polynucleotide region, and a rabbit globin polyadenylation signal sequence region.

[0586] In some embodiments, the AAV particle viral genome comprises SEQ ID NO: 1432 (VOYHT42) which comprises a 5′ inverted terminal repeat (ITR) sequence region and a 3′ ITR sequence region, a CMV enhancer sequence region, a CBA promoter sequence region, an SV40 intron sequence region, a modulatory polynucleotide region, and a rabbit globin polyadenylation signal sequence region.

[0587] In some embodiments, the AAV particle viral genome comprises SEQ ID NO: 1433 (VOYHT43) which comprises a 5′ inverted terminal repeat (ITR) sequence region and a 3′ ITR sequence region, a CMV enhancer sequence region, a CBA promoter sequence region, an SV40 intron sequence region, a modulatory polynucleotide region, and a rabbit globin polyadenylation signal sequence region.

[0588] In some embodiments, the AAV particle viral genome comprises SEQ ID NO: 1434 (VOYHT44) which comprises a 5′ inverted terminal repeat (ITR) sequence region and a 3′ ITR sequence region, a CMV enhancer sequence region, a CBA promoter sequence region, an SV40 intron sequence region, a modulatory polynucleotide region, and a rabbit globin polyadenylation signal sequence region.

[0589] In some embodiments, the AAV particle viral genome comprises SEQ ID NO: 1435 (VOYHT45) which comprises a 5′ inverted terminal repeat (ITR) sequence region and a 3′ ITR sequence region, a CMV enhancer sequence region, a CBA promoter sequence region, an SV40 intron sequence region, a modulatory polynucleotide region, and a rabbit globin polyadenylation signal sequence region.

[0590] In some embodiments, the AAV particle viral genome comprises SEQ ID NO: 1436 (VOYHT46) which comprises a 5′ inverted terminal repeat (ITR) sequence region and a 3′ ITR sequence region, a CMV enhancer sequence region, a CBA promoter sequence region, an SV40 intron sequence region, a modulatory polynucleotide region, and a rabbit globin polyadenylation signal sequence region.

[0591] In some embodiments, the AAV particle viral genome comprises SEQ ID NO: 1437 (VOYHT47) which comprises a 5′ inverted terminal repeat (ITR) sequence region and a 3′ ITR sequence region, a CMV enhancer sequence region, a CBA promoter sequence region, an SV40 intron sequence region, a modulatory polynucleotide region, and a rabbit globin polyadenylation signal sequence region.

[0592] In some embodiments, the AAV particle viral genome comprises SEQ ID NO: 1438 (VOYHT48) which comprises a 5′ inverted terminal repeat (ITR) sequence region and a 3′ ITR sequence region, a CMV enhancer sequence region, a CBA promoter sequence region, an SV40 intron sequence region, a modulatory polynucleotide region, and a rabbit globin polyadenylation signal sequence region.

[0593] In some embodiments, the AAV particle viral genome comprises a 5′ inverted terminal repeat (ITR) sequence region and a 3′ ITR sequence region, a MCS sequence region, an enhancer sequence region, a promoter sequence region, two exon sequence regions, two intron sequence regions, a modulatory polynucleotide region, a polyadenylation signal sequence region, and a filler sequence region.

[0594] In some embodiments, the AAV particle viral genome comprises a 5′ inverted terminal repeat (ITR) sequence region and a 3′ ITR sequence region, a MCS sequence region, a CMV enhancer sequence region, a CMV promoter sequence region, two exon sequence regions (ie1 exon 1 and human beta globin (hbglobin) exon 3 or fragments thereof), intron sequence regions (ie1 intron 1 and hbglobin intron 2 or fragments thereof), a modulatory polynucleotide region, a human growth hormone (hGH) polyadenylation signal sequence region, and a filler sequence region. A non-limiting example of an ITR to ITR sequence for use in the AAV particles of the present disclosure having all of the sequence modules above are described in Table 29. In Table 29, the sequence identifier or sequence of the sequence region (Region SEQ ID NO) and the length of the sequence region (Region length) arc described as well as the name and sequence identifier of the ITR to ITR sequence g., VOYHT17 (SEQ ID NO: 1368)).

TABLE 29
Sequence Regions in ITR to ITR Sequences

VOYHT17 (SEQ
ID NO: 1368)

| Sequence | Region SEQ | Region |
|---|---|---|
| Regions | ID NO | length |
| 5′ ITR | 1380 | 141 |
| MCS | 1387 | 18 |
| CMV enhancer | 1409 | 303 |
| CMV Promoter | 1412 | 204 |
| Ie1 exon1 | 1415 | 134 |
| Ie1 intron1 | 1418 | 32 |
| hbglobin intron2 | 1419 | 347 |
| hbglobin exon3 | 1416 | 53 |
| Modulatory | 1262 | 163 |
| Polynucleotide | | |
| hGH PolyA Signal | 1422 | 477 |
| 3′ ITR | 1382 | 141 |

[0595] In some embodiments, the AAV particle viral genome comprises SEQ ID NO: 1368 (VOYHT17) which comprises a 5′ inverted terminal repeat (ITR) sequence region and a 3′ ITR sequence region, a MCS sequence region, a CMV enhancer sequence region, a CMV promoter sequence region, two exon sequence regions (ie1 exon 1 and human beta globin (hbglobin) exon 3 or fragments thereof), two intron sequence regions (ie1 intron 1 and hbglobin intron 2 or fragments thereof), a modulatory polynucleotide region, a human growth hormone (hGH) polyadenylation signal sequence region, and a filler sequence region.

[0596] In some embodiments, the AAV particle viral genome comprises a 5′ inverted terminal repeat (ITR) sequence region and a 3′ ITR sequence region, a MCS sequence region, a CMV enhancer sequence region, a CMV promoter sequence region, two exon sequence regions (ie1 exon 1 and human beta globin (hbglobin) exon 3 or fragments thereof), two intron sequence regions (ie1 intron 1 and hbglobin intron 2 or fragments thereof), a modulatory polynucleotide region, a human growth hormone (hGH) polyadenylation signal sequence region, and a filler sequence region. A non-limiting example of an ITR to ITR sequence for use in the AAV particles of the present disclosure having all of the sequence modules above are described in Table 30. In Table 30, the sequence identifier or sequence of the sequence region (Region SEQ ID NO) and the length of the sequence region (Region length) arc described as well as the name and sequence identifier of the ITR to ITR sequence (e.g., VOYHT19 (SEQ ID NO: 1370)).

TABLE 30
Sequence Regions in ITR to ITR Sequences

VOYHT19 (SEQ
ID NO: 1370)

| Sequence | Region SEQ | Region |
|---|---|---|
| Regions | ID NO | length |
| 5′ ITR | 1380 | 141 |
| CMV enhancer | 1409 | 303 |
| CMV Promoter | 1412 | 204 |
| Ie1 exon1 | 1415 | 134 |
| Ie1 intron1 | 1418 | 32 |
| hbglobin intron2 | 1419 | 347 |
| hbglobin exon3 | 1416 | 53 |
| Modulatory | 1262 | 163 |
| Polynucleotide | | |
| hGH PolyA Signal | 1389 | 14 |
| MCS | 1422 | 477 |
| 3′ ITR | 1382 | 141 |

[0597] In some embodiments, the AAV particle viral genome comprises SEQ ID NO: 1370 (VOYHT19) which comprises a 5′ inverted terminal repeat (ITR) sequence region and a 3′ ITR sequence region, a MCS sequence region, a CMV enhancer sequence region, a CMV promoter sequence region, two exon sequence regions (ie1 exon 1 and human beta globin (hbglobin) exon 3 or fragments thereof), two intron sequence regions (ie1 intron 1 and hbglobin exon 3 or fragments thereof), a modulatory polynucleotide region, a human growth hormone (hGH) polyadenylation signal sequence region, and a filler sequence region.

[0598] In some embodiments, the AAV particle viral genome comprises a 5′ inverted terminal repeat (ITR) sequence region and a 3′ ITR sequence region, two MCS sequence regions, an enhancer sequence region, a promoter sequence region, two exon sequence regions, two intron sequence regions, a modulatory polynucleotide region, a polyadenylation signal sequence region, and a filler sequence region.

[0599] In some embodiments, the AAV particle viral genome comprises a 5′ inverted terminal repeat (ITR) sequence region and a 3′ ITR sequence region, two MCS sequence regions, a CMV enhancer sequence region, a CMV promoter sequence region, two exon sequence regions (ie1 exon 1 and human beta globin (hbglobin) exon 3 or fragments thereof), two intron sequence regions (ie1 intron 1 and hbglobin exon 3 or fragments thereof), a modulatory polynucleotide region, a human growth hormone (hGH) polyadenylation signal sequence region, and a filler sequence region. A non-limiting example of an ITR to ITR sequence for use in the AAV particles of the present disclosure having all of the sequence modules above are described in Table 31. In Table 31, the sequence identifier or sequence of the sequence region (Region SEQ ID NO) and the length of the sequence region (Region length) are described as well as the name and sequence identifier of the ITR to ITR sequence (e.g., VOYHT18 (SEQ ID NO: 1369)).

TABLE 31
Sequence Regions in ITR to ITR Sequences

VOYHT18 (SEQ
ID NO: 1369)

| Sequence | Region SEQ | Region |
|---|---|---|
| Regions | ID NO | length |
| 5′ ITR | 1380 | 141 |
| MCS | 1387 | 18 |
| CMV enhancer | 1409 | 303 |
| CMV Promoter | 1412 | 204 |
| Ie1 exon1 | 1415 | 134 |
| Ie1 intron1 | 1418 | 32 |
| hbglobin intron2 | 1419 | 347 |
| hbglobin exon3 | 1416 | 53 |
| Modulatory | 1262 | 163 |
| Polynucleotide | | |
| MCS | 1389 | 14 |
| hGH PolyA Signal | 1422 | 477 |
| 3′ ITR | 1382 | 141 |

[0600] In some embodiments, the AAV particle viral genome comprises SEQ ID NO: 1369 (VOYHT18) which comprises a 5′ inverted terminal repeat (ITR) sequence region and a 3′ ITR sequence region, two MCS sequence regions, a CMV enhancer sequence region, a CMV promoter sequence region, two exon sequence regions (ie1 exon 1 and human beta globin (hbglobin) exon 3 or fragments thereof), two intron sequence regions (ie1 intron 1 and hbglobin exon 3 or fragments thereof), a modulatory polynucleotide region, a human growth hormone (hGH) polyadenylation signal sequence region, and a filler sequence region.

[0601] In some embodiments, the AAV particle viral genome comprises a 5′ inverted terminal repeat (ITR) sequence region and a 3′ ITR sequence region, two MCS sequence regions, a CMV enhancer sequence region, a CMV promoter sequence region, two exon sequence regions (ie1 exon 1 and human beta globin (hbglobin) exon 3 or fragments thereof), two intron sequence regions (ie1 intron 1 and hbglobin exon 3 or fragments thereof), a modulatory polynucleotide region, a human growth hormone (hGH) polyadenylation signal sequence region, and a filler sequence region. A non-limiting example of an ITR to ITR sequence for use in the AAV particles of the present disclosure having all of the sequence modules above are described in Table 32. In Table 32, the sequence identifier or sequence of the sequence region (Region SEQ ID NO) and the length of the sequence region (Region length) are described as well as the name and sequence identifier of the ITR to ITR sequence (e.g., VOYHT20 (SEQ ID NO: 1371)).

TABLE 32
Sequence Regions in ITR to ITR Sequences

VOYHT20 (SEQ
ID NO: 1371)

| Sequence | Region SEQ | Region |
|---|---|---|
| Regions | ID NO | length |
| 5′ ITR | 1380 | 141 |
| MCS | 1385 | 121 |
| CMV enhancer | 1409 | 303 |
| CMV Promoter | 1412 | 204 |
| Ie1 exon1 | 1415 | 134 |
| Ie1 intron1 | 1418 | 32 |
| hbglobin intron2 | 1419 | 347 |
| hbglobin exon3 | 1416 | 53 |
| Modulatory | 1262 | 163 |
| Polynucleotide | | |
| MCS | 1389 | 14 |
| hGH PolyA Signal | 1422 | 477 |
| 3′ ITR | 1382 | 141 |

[0602] In some embodiments, the AAV particle viral genome comprises SEQ ID NO: 1371 (VOYHT20) which comprises a 5′ inverted terminal repeat (ITR) sequence region and a 3′ ITR sequence region, two MCS sequence regions, a CMV enhancer sequence region, a CMV promoter sequence region, two exon sequence regions (ie1 exon 1 and human beta globin (hbglobin) exon 3 or fragments thereof), two intron sequence regions (ie1 intron 1 and hbglobin exon 3 or fragments thereof), a modulatory polynucleotide region, a human growth hormone (hGH) polyadenylation signal sequence region, and a filler sequence region.

[0603] In some embodiments, the AAV particle viral genome comprises a 5′ inverted terminal repeat (ITR) sequence region and a 3′ ITR sequence region, two MCS sequence regions, a CMV enhancer sequence region, a CMV promoter sequence region, two exon sequence regions (ie1 exon 1 and human beta globin (hbglobin) exon 3 or fragments thereof), two intron sequence regions (ie1 intron 1 and hbglobin exon 3 or fragments thereof), a modulatory polynucleotide region, a human growth hormone (hGH) polyadenylation signal sequence region, and a filler sequence region. Non-limiting examples of ITR to ITR sequences for use in the AAV particles of the present disclosure having all of the sequence modules above are described in Table 33. In Table 33, the sequence identifier or sequence of the sequence region (Region SEQ ID NO) and the length of the sequence region (Region length) are described as well as the name and sequence identifier of the ITR to ITR sequence (e.g., VOYHT21 (SEQ ID NO: 1372)).

TABLE 33
Sequence Regions in ITR to ITR Sequences

| | VOYHT21 (SEQ | | VOYHT22 (SEQ | |
|---|---|---|---|---|
| | ID NO: 1372) | | ID NO: 1373) | |
| Sequence | Region SEQ | Region | Region SEQ | Region |
| Regions | ID NO | length | ID NO | length |
| 5′ ITR | 1380 | 141 | 1380 | 141 |
| MCS | 1387 | 18 | 1387 | 18 |
| CMV enhancer | 1409 | 303 | 1409 | 303 |
| CMV Promoter | 1412 | 204 | 1412 | 204 |
| Ie1 exon1 | 1415 | 134 | 1415 | 134 |
| Ie1 intron1 | 1418 | 32 | 1418 | 32 |
| hbglobin intron2 | 1419 | 347 | 1419 | 347 |
| hbglobin exon3 | 1416 | 53 | 1416 | 53 |
| Modulatory | 1262 | 163 | 1262 | 163 |
| Polynucleotide | | | | |
| MCS | 1389 | 14 | 1389 | 14 |
| hGH PolyA Signal | 1422 | 477 | 1422 | 477 |
| 3′ ITR | 1382 | 141 | 1382 | 141 |

[0604] In some embodiments, the AAV particle viral genome comprises SEQ ID NO: 1372 (VOYHT21 ) which comprises a 5′ inverted terminal repeat (ITR) sequence region and a 3′ ITR sequence region, two MCS sequence regions, a CMV enhancer sequence region, a CMV promoter sequence region, two exon sequence regions (ie1 exon 1 and human beta globin (hbglobin) exon 3 or fragments thereof), two intron sequence regions (ie1 intron 1 and hbglobin exon 3 or fragments thereof), a modulatory polynucleotide region, a human growth hormone (hGH) polyadenylation signal sequence region, and a filler sequence region.

[0605] In some embodiments, the AAV particle viral genome comprises SEQ ID NO: 1373 (VOYHT22) which comprises a 5′ inverted terminal repeat (ITR) sequence region and a 3′ ITR sequence region, two MCS sequence regions, a CMV enhancer sequence region, a CMV promoter sequence region, two exon sequence regions (ie1 exon 1 and human beta globin (hbglobin) exon 3 or fragments thereof), two intron sequence regions (ie1 intron 1 and hbglobin exon 3 or fragments thereof), a modulatory polynucleotide region, a human growth hormone (hap polyadenylation signal sequence region, and a filler sequence region.

[0606] In some embodiments, the AAV particle viral genome comprises a 5′ inverted terminal repeat (ITR) sequence region and a 3′ ITR sequence region, a MCS sequence region, an enhancer sequence region, a promoter sequence region, two exon sequence regions, two intron sequence regions, a modulatory polynucleotide region, a polyadenylation signal sequence region, and two filler sequence regions.

[0607] In some embodiments, the AAV particle viral genome comprises a 5′ inverted terminal repeat (ITR) sequence region and a 3′ ITR sequence region, a MCS sequence region, a CMV enhancer sequence region, a CMV promoter sequence region, two exon sequence regions (ie1 exon 1 and human beta globin (hbglobin) exon 3 or fragments thereof), two intron sequence regions (ie1 intron 1 and hbglobin exon 3 or fragments thereof), a modulatory polynucleotide region, a human growth hormone (hGH) polyadenylation signal sequence region, and two filler sequence regions. A non-limiting example of an ITR to ITR sequence for use in the AAV particles of the present disclosure having all of the sequence modules above are described in Table 34. In Table 34, the sequence identifier or sequence of the sequence region (Region SEQ ID NO) and the length of the sequence region (Region length) are described as well as the name and sequence identifier of the ITR to ITR, sequence (e.g., VOYHT23 (SEQ ID NO: 1374)).

TABLE 34
Sequence Regions in ITR to ITR Sequences

VOYHT23 (SEQ
ID NO: 1374)

| Sequence | Region SEQ | Region |
|---|---|---|
| Regions | ID NO | length |
| 5′ ITR | 1380 | 141 |
| CMV enhancer | 1409 | 303 |
| CMV Promoter | 1412 | 204 |
| Ie1 exon1 | 1415 | 134 |
| Ie1 intron1 | 1418 | 32 |
| hbglobin intron2 | 1419 | 347 |
| hbglobin exon3 | 1416 | 53 |
| Modulatory | 1262 | 163 |
| Polynucleotide | | |
| MCS | 1389 | 14 |
| hGH PolyA Signal | 1422 | 477 |
| 3′ ITR | 1382 | 141 |

[0608] In some embodiments, the AAV particle viral genome comprises SEQ ID NO: 1374 (VOYHT23) which comprises a 5′ inverted terminal repeat (ITR) sequence region and a 3′ ITR sequence region, a MCS sequence region, a CMV enhancer sequence region, a CMV promoter sequence region, two exon sequence regions (ie1 exon 1 and human beta globin (hbglobin) exon 3 or fragments thereof), two intron sequence regions (ie1 intron 1 and hbglobin exon 3 or fragments thereof), a modulatory polynucleotide region, a human growth hormone (hGH) polyadenylation signal sequence region, and two filler sequence regions.

[0609] In some embodiments, the AAV particle viral genome comprises a 5′ inverted terminal repeat (ITR) sequence region and a 3′ ITR sequence region, two MCS sequence regions, an enhancer sequence region, a promoter sequence region, two exon sequence regions, two intron sequence regions, a modulatory polynucleotide region, a polyadenylation signal sequence region, and two filler sequence regions.

[0610] In some embodiments, the AAV particle viral genome comprises a 5′ inverted terminal repeat (ITR) sequence region and a 3′ ITR sequence region, two MCS sequence regions, a CMV enhancer sequence region, a CMV promoter sequence region, two exon sequence regions (ie1 exon 1 and human beta globin (hbglobin) exon 3 or fragments thereof), two intron sequence regions (ie1 intron 1 and hbglobin exon 3 or fragments thereof), a modulatory polynucleotide region, a human growth hormone (hGH) polyadenylation signal sequence region, and two filler sequence regions. A non-limiting example of an ITR to ITR sequence for use in the AAV particles of the present disclosure having all of the sequence modules above are described in Table 35. In Table 35, the sequence identifier or sequence of the sequence region (Region SEQ ID NO) and the length of the sequence region (Region length) are described as well as the name and sequence identifier of the ITR to ITR sequence (e.g., VOYHT24 (SEQ ID NO: 1375)).

TABLE 35
Sequence Regions in ITR to ITR Sequences

VOYHT24 (SEQ
ID NO: 1375)

| Sequence | Region SEQ | Region |
|---|---|---|
| Regions | ID NO | length |
| 5′ ITR | 1380 | 141 |
| MCS | 1386 | 73 |
| CMV enhancer | 1409 | 303 |
| CMV Promoter | 1412 | 204 |
| Ie1 exon1 | 1415 | 134 |
| Ie1 intron1 | 1418 | 32 |
| hbglobin intron2 | 1419 | 347 |
| hbglobin exon3 | 1416 | 53 |
| Modulatory | 1262 | 163 |
| Polynucleotide | | |
| MCS | 1389 | 14 |
| hGH PolyA Signal | 1423 | 476 |
| 3′ ITR | 1382 | 141 |

[0611] In some embodiments, the AAV particle viral genome comprises SEQ ID NO: 1375 (VOYHT24) which comprises a 5′ inverted terminal repeat (ITR) sequence region and a 3′ ITR sequence region, two MCS sequence regions, a CMV enhancer sequence region, a CMV promoter sequence region, two exon sequence regions (ie1 exon 1 and human beta globin (hbglobin) exon 3 or fragments thereof), two intron sequence regions (ie1 intron 1 and hbglobin exon 3 or fragments thereof), a modulatory polynucleotide region, a human growth hormone (hGH) polyadenylation signal sequence region, and two filler sequence regions.

[0612] In some embodiments, the AAV particle viral genome comprises a 5′ inverted terminal repeat (ITR) sequence region and a 3′ ITR sequence region, two MCS sequence regions, an enhancer sequence region, a promoter sequence region, two exon sequence regions, two intron sequence regions, a modulatory polynucleotide region, and a polyadenylation signal sequence region.

[0613] In some embodiments, the AAV particle viral genome comprises a 5′ inverted terminal repeat (ITR) sequence region and a 3′ ITR sequence region, two MCS sequence regions, a CMV enhancer sequence region, a CMV promoter sequence region, two exon sequence regions (ie1 exon 1 and human beta globin (hbglobin) exon 3 or fragments thereof), two intron sequence regions (ie1 intron 1 and hbglobin exon 3 or fragments thereof), a modulatory polynucleotide region, and a human growth hormone (hGH) polyadenylation signal sequence region. Non-limiting examples of an ITR to ITR sequences for use in the AAV particles of the present disclosure having all of the sequence modules above are described in Table 36. In Table 36, the sequence identifier or sequence of the sequence region (Region SEQ ID NO) and the length of the sequence region (Region length) are described as well as the name and sequence identifier of the ITR to ITR sequence (e.g., VOYHT25 (SEQ ID NO: 1376)).

TABLE 36
Sequence Regions in ITR to ITR Sequences

| | VOYHT25 (SEQ | | VOYHT26 (SEQ | |
|---|---|---|---|---|
| | ID NO: 1376) | | ID NO: 1377) | |
| Sequence | Region SEQ | Region | Region SEQ | Region |
| Regions | ID NO | length | ID NO | length |
| 5′ ITR | 1380 | 141 | 1380 | 141 |
| MCS | 1387 | 18 | 1387 | 18 |
| CMV enhancer | 1409 | 303 | 1409 | 303 |
| CMV Promoter | 1412 | 204 | 1412 | 204 |
| Ie1 exon1 | 1415 | 134 | 1415 | 134 |
| Ie1 intron1 | 1418 | 32 | 1418 | 32 |
| hbglobin intron2 | 1419 | 347 | 1419 | 347 |
| hbglobin exon3 | 1416 | 53 | 1416 | 53 |
| Modulatory | 1249 | 158 | 1262 | 163 |
| Polynucleotide | | | | |
| MCS | 1389 | 14 | 1389 | 14 |
| hGH PolyA Signal | 1422 | 477 | 1422 | 477 |
| 3′ ITR | 1382 | 141 | 1382 | 141 |

[0614] In some embodiments, the AAV particle viral genome comprises SEQ ID NO: 1376 (VOYHT25) which comprises a 5′ inverted terminal repeat (ITR) sequence region and a 3′ ITR sequence region, two MCS sequence regions, a CMV enhancer sequence region, a CMV promoter sequence region, two exon sequence regions (ie1 exon 1 and human beta globin (hbglobin) exon 3 or fragments thereof), two intron sequence regions (ie1 intron 1 and hbglobin exon 3 or fragments thereof), a modulatory polynucleotide region, and a human growth hormone (hGH) polyadenylation signal sequence region.

[0615] In some embodiments, the AAV particle viral genome comprises SEQ ID NO: 1377 (VOYHT26) which comprises a 5′ inverted terminal repeat (ITR) sequence region and a 3′ ITR sequence region, two MCS sequence regions, a CMV enhancer sequence region, a CMV promoter sequence region, two exon sequence regions (ie1 exon 1 and human beta globin (hbglobin) exon 3 or fragments thereof), two intron sequence regions (ie1 intron 1 and hbglobin exon 3 or fragments thereof), a modulatory polynucleotide region, and a human growth hormone (hGH) polyadenylation signal sequence region.

[0616] In some embodiments, the AAV particle viral genome comprises a 5′ inverted terminal repeat (ITR) sequence region and a 3′ ITR sequence region, a promoter sequence region, and a modulatory polynucleotide region.

[0617] In some embodiments, the AAV particle viral genome comprises a 5′ inverted terminal repeat (ITR) sequence region and a 3′ ITR sequence region, an HI promoter sequence region, and a modulatory polynucleotide region. Non-limiting examples of an ITR to ITR sequences for use in the AAV particles of the present disclosure having all of the sequence modules above are described in Table 37. In Table 37, the sequence identifier or sequence of the sequence region (Region SEQ ID NO) and the length of the sequence region (Region length) are described as well as the name and sequence identifier of the ITR to ITR sequence (e.g., VOYHT27 (SEQ ID NO: 1378)).

TABLE 37
Sequence Regions in ITR to ITR Sequences

| | VOYHT27 (SEQ | | VOYHT28 (SEQ | |
|---|---|---|---|---|
| | ID NO: 1378) | | ID NO: 1379) | |
| Sequence | Region SEQ | Region | Region SEQ | Region |
| Regions | ID NO | length | ID NO | length |
| 5′ ITR | 1381 | 105 | 1381 | 105 |
| H1 Promoter | 1413 | 219 | 1413 | 219 |
| Modulatory | 1259 | 260 | 1249 | 158 |
| Polynucleotide | | | | |
| 3′ ITR | 1383 | 130 | 1383 | 130 |

[0618] In some embodiments, the AAV particle viral genome comprises SEQ ID NO: 1378 (VOYHT27) which comprises a 5′ inverted terminal repeat (ITR) sequence region and a 3′ ITR sequence region, an H1 promoter sequence region, and a modulatory polynucleotide region.

[0619] In some embodiments, the AAV particle viral genome comprises SEQ ID NO: 1379 (VOYHT28) which comprises a 5′ inverted terminal repeat (ITR) sequence region and a 3′ ITR sequence region, an HI promoter sequence region, and a modulatory polynucleotide region.

[0620] In some embodiments, the AAV particle viral genome comprises one or two promoter sequence regions, a modulatory polynucleotide sequence region, and a bovine growth hormone (bGH) polyadenylation signal sequence region.

[0621] In some embodiments, the AAV particle viral genome comprises a two promoter sequence regions, a modulatory polynucleotide region, and a polyadenylation signal sequence region.

[0622] In some embodiments, the AAV particle viral genome comprises a CMV and T7 promoter sequence region, a modulatory polynucleotide region, and a bGH polyadenylation signal sequence region. Non-limiting examples of sequences for use in the AAV particles of the present disclosure having all of the sequence modules above are described in Table 38. In Table 38, the sequence identifier or sequence of the sequence region (Region SEQ ID NO) and the length of the sequence region (Region length) are described as well as the name of the sequence (e.g., VOYHT29).

TABLE 38
Sequence Regions

| | VOYHT29 | | VOYHT30 | | VOYHT31 | | VOYHT32 | |
|---|---|---|---|---|---|---|---|---|
| Sequence | Region SEQ | Region | Region SEQ | Region | Region SEQ | Region | Region SEQ | Region |
| Regions | ID NO | length | ID NO | length | ID NO | length | ID NO | length |
| CMV Promoter | 1411 | 588 | 1411 | 588 | 1411 | 588 | 1411 | 588 |
| T7 promoter | 1414 | 17 | 1414 | 17 | 1414 | 17 | 1414 | 17 |
| Modulatory | 1249 | 158 | 1259 | 260 | 1255 | 158 | 1253 | 260 |
| Polynucleotide | | | | | | | | |
| bGH PolyA Signal | 1421 | 225 | 1421 | 225 | 1421 | 225 | 1421 | 225 |

[0623] In some embodiments, the AAV particle viral genome comprises a CMV promoter sequence region (SEQ ID NO: 1411), a T7 promoter sequence region (SEQ ID NO: 1414), a modulatory polynucleotide sequence region (SEQ ID NO: 1249), and a bGH polyadenylation signal sequence region (SEQ ID NO: 1421).

[0624] In some embodiments, the AAV particle viral genome comprises a CMV promoter sequence region (SEQ ID NO: 1411), a T7 promoter sequence region (SEQ ID NO: 1414), a modulatory polynucleotide sequence region (SEQ ID NO: 1259), and a bGH polyadenylation signal sequence region (SEQ ID NO: 1421).

[0625] In some embodiments, the AAV particle viral genome comprises a CMV promoter sequence region (SEQ ID NO: 1411), a T7 promoter sequence region (SEQ ID NO: 1414), a modulatory polynucleotide sequence region (SEQ ID NO: 1255), and a bGH polyadenylation signal sequence region (SEQ ID NO: 1421).

[0626] In some embodiments, the AAV particle viral genome comprises a CMV promoter sequence region (SEQ ID NO: 1411), a 17 promoter sequence region (SEQ ID NO: 1414), a modulatory polynucleotide sequence region (SEQ ID NO: 1253), and a bGH polyadenylation signal sequence region (SEQ ID NO: 1421).

[0627] In some embodiments, the AAV particle viral genome comprises one or two promoter sequence regions, and a modulatory polynucleotide sequence region.

[0628] In some embodiments, the AAV particle viral genome comprises a CMV and T7 promoter sequence region, and a modulatory polynucleotide region. Non-limiting examples of sequences for use in the AAV particles of the present disclosure having all of the sequence modules above are described in Table 39. In Table 39, the sequence identifier or sequence of the sequence region (Region SEQ ID NO) and the length of the sequence region (Region length) are described as well as the name of the sequence (e.g., VOYHT33).

TABLE 39
Sequence Regions

| | VOYHT33 | | VOYHT34 | |
|---|---|---|---|---|
| Sequence | Region SEQ | Region | Region SEQ | Region |
| Regions | ID NO | length | ID NO | length |
| CMV Promoter | GTTG | 4 | — | — |
| H1 Promoter | 1413 | 219 | 1413 | 219 |
| Modulatory | 1249 | 158 | 1259 | 260 |
| Polynucleotide | | | | |

[0629] In some embodiments, the AAV particle viral genome comprises a CMV promoter sequence region (Sequence: GTTG), promoter sequence region (SEQ ID NO: 1413), and a modulatory polynucleotide sequence region (SEQ ID NO: 1249).

[0630] In some embodiments, the AAV particle viral genome comprises a H1 promoter sequence region (SEQ ID NO: 1413), and a modulatory polynucleotide sequence region (SEQ ID NO: 1259).

[0631] AAV particles may be modified to enhance the efficiency of delivery. Such modified AAV particles comprising the nucleic acid sequence encoding the siRNA molecules of the present disclosure can be packaged efficiently and can be used to successfully infect the target cells at high frequency and with minimal toxicity.

[0632] In some embodiments, the AAV particle comprising a nucleic acid sequence encoding the siRNA molecules of the present disclosure may be a human serotype AAV particle. Such human AAV particle may be derived from any known serotype, e.g., from any one of serotypes AAV1-AAV 11. As non-limiting examples, AAV particles may be vectors comprising an AAV1-derived genome in an AAV1-derived capsid; vectors comprising an AAV2-derived genome in an AAV2-derived capsid; vectors comprising an AAV4-derived genome in an AAV4 derived capsid; vectors comprising an AAV6-derived genome in an AAV6 derived capsid or vectors comprising an AAV9-derived genome in an AAV9 derived capsid.

[0633] In other embodiments, the AAV particle comprising a nucleic acid sequence for encoding siRNA molecules of the present disclosure may be a pseudotyped hybrid or chimeric AAV particle which contains sequences and/or components originating from at least two different AAV serotypes. Pseudotyped AAV particles may be vectors comprising an AAV genome derived from one AAV serotype and a capsid protein derived at least in part from a different AAV serotype. As non-limiting examples, such pseudotyped AAV particles may be vectors comprising an AAV2-derived genome in an AAV1-derived capsid; or vectors comprising, an AAV2-derived genome in an AAV6-derived capsid; or vectors comprising an AAV2-derived genome in an AAV4-derived capsid; or an AAV2-derived genome in an AAV9-derived capsid. In like fashion, the present disclosure contemplates any hybrid or chimeric AAV particle.

[0634] In other embodiments, AAV particles comprising a nucleic acid sequence encoding the siRNA molecules of the present disclosure may be used to deliver siRNA molecules to the central nervous system (e.g., U.S. Pat. No. 6,180,613; the contents of which is herein incorporated by reference in its entirety).

[0635] In some aspects, the AAV particles comprising a nucleic acid sequence encoding the siRNA molecules of the present disclosure may further comprise a modified capsid including peptides from non-viral origin. In other aspects, the AAV particle may contain a CNS specific chimeric capsid to facilitate the delivery of encoded siRNA. duplexes into the brain and the spinal cord. For example, an alignment of cap nucleotide sequences from AAV variants exhibiting CNS tropism may be constructed to identify variable region (VR) sequence and structure.

[0636] In any of the DNA and RNA sequences referenced and/or described herein, the single letter symbol has the following description: A for adenine; C for cytosine; G for guanine; T for thymine; U for Uracil; W for weak bases such as adenine or thymine; S for strong nucleotides such as cytosine and guanine; M for amino nucleotides such as adenine and cytosine; K for keto nucleotides such as guanine and thymine; R for purines adenine and guanine; Y for pyrimidine cytosine and thymine; B for any base that is not A (e.g., cytosine, guanine, and thymine); D for any base that is not C (e.g., adenine, guanine, and thymine); H for any base that is not G (e.g., adenine, cytosine, and thymine); V for any base that is not T (e.g., adenine, cytosine, and guanine); N for any nucleotide (which is not a gap); and Z is for zero. In any of the amino acid sequences referenced and/or described herein, the single letter symbol has the following description: G (Gly) for Glycine; A (Ala) for Alanine; L (Leu) for Leucine; M (Met) for Methionine; F (Phe) for Phenylalanine; W (Trp) for Tryptophan; K (Lys) for Lysine; Q (Gln) for Glutamine; E (Glu) for Glutamic Acid; S (Ser) for Serine; P (Pro) for Prolific; V (Val) for Valine; I (Ile) for Isoleucine; C (Cys) for Cysteine; Y (Tyr) for Tyrosine; H (His) for Histidine; R (Arg) for Arginine; N (Asn) for Asparagine; D (Asp) for Aspartic Acid; T (Thr) for Threonine; B (Asx) for Aspartic acid or Asparagine; J (Xle) for Leucine or Isoleucine; O (Pyl) for Pyrrolysine; U (Sec) for Selenocysteine; X (Xaa) for any amino acid; and Z (Glx) for Glutamine or Glutamic acid.

### Viral Production

[0637] The present disclosure provides a method for the generation of parvoviral particles, e.g. AAV particles, by viral genome replication in a viral replication cell comprising contacting the viral replication cell with an AAV polynucleotide or AAV genome.

[0638] The present disclosure provides a method for producing an AAV particle having enhanced (increased, improved) transduction efficiency comprising the steps of: 1) co-transfecting competent bacterial cells with a bacmid vector and either a viral construct vector and/or AAV payload construct vector, 2) isolating the resultant viral construct expression vector and AAV payload construct expression vector and separately transfecting viral replication cells, 3) isolating and purifying resultant payload and viral construct particles comprising viral construct expression vector or AAV payload construct expression vector, 4) co-infecting a viral replication cell with both the AAV payload and viral construct particles comprising viral construct expression vector or AAV payload construct expression vector, and 5) harvesting and purifying the viral particle comprising a parvoviral genome.

[0639] In some embodiments, the present disclosure provides a method for producing an AAV particle comprising the steps of 1) simultaneously co-transfecting mammalian cells, such as, but not limited to HEK.293 cells, with a payload region, a construct expressing rep and cap genes and a helper construct, 2) harvesting and purifying the AAV particle comprising a viral genome.

### Cells

[0640] 106401 The present disclosure provides a cell comprising an AAV polynucleotide and/or AAV genome.

[0641] Viral production disclosed herein describes processes and methods for producing AAV particles that contact a target cell to deliver a payload construct, e.g. a recombinant viral construct, which comprises a polynucleotide sequence encoding a payload molecule.

[0642] In some embodiments, the AAV particles may be produced in a viral replication cell that comprises an insect cell.

[0643] Growing conditions for insect cells in culture, and production of heterologous products in insect cells in culture are well-known in the art, see U.S. Pat. No. 6,204,059, the contents of which are herein incorporated by reference in their entirety.

[0644] Any insect cell which allows for replication of parvovirus and which can be maintained in culture can be used in accordance with the present disclosure. Cell lines may be used from Spodoptera frugiperda, including, but not limited to the Sf9 or Sf21 cell lines, Drosophila cell lines, or mosquito cell lines, such as Aedes albopictus derived cell lines. Use of insect cells for expression of heterologous proteins is well documented, as are methods of introducing nucleic acids, such as vectors, e.g., insect-cell compatible vectors, into such cells and methods of maintaining such cells in culture. See, for example, Methods in Molecular Biology, ed. Richard, Humana Press, NJ (1995); O'Reilly et al., Baculovirus Expression Vectors, A Laboratory Manual, Oxford Univ. Press (1994); Samulski et al., J. Vir.63:3822-8 (1989); Kajigaya et al., Proc. Nat'l. Acad. Set. USA 88: 4646-50 (1991); Ruffing et al., J. Vir. 66:6922-30 (1992); Kimbauer et al., Vir.219:37-44 (1996); Zhao et al., Vir.272:382-93 (2000); and Samulski et al., U.S. Pat. No. 6,204,059, the contents of each of which is herein incorporated by reference in its entirety.

[0645] The viral replication cell may be selected from any biological organism, including prokaryotic (e.g., bacterial) cells, and eukaryotic cells, including, insect cells, yeast cells and mammalian cells. Viral replication cells may comprise mammalian cells such as A549, WEH1, 3T3, 10T1/2, BHK, MDCK, COS 1, COS 7, BSC 1. BSC 40, BMT 10, VERO. W138, HeLa. HEK293, Saos, C2C12, L cells, HT1080, HepG2 and primary fibroblast, hepatocyte and myoblast cells derived from mammals. Viral replication cells comprise cells derived from mammalian species including, but not limited to, human, monkey, mouse, rat, rabbit, and hamster or cell type, including but not limited to fibroblast, hepatocyte, tumor cell, cell line transformed cell, etc.

### Small Scale Production of AAV Particles

[0646] Viral production disclosed herein describes processes and methods for producing AAV particles that contact a target cell to deliver a payload, e.g. a recombinant viral construct, which comprises a polynucleotide sequence encoding a payload.

[0647] In some embodiments, the AAV particles may be produced in a viral replication cell that comprises a mammalian cell.

[0648] Viral replication cells commonly used for production of recombinant AAV particles include, but are not limited to 293 cells, COS cells, HeLa cells, KB cells, and other mammalian cell lines as described in U.S. Pat. Nos. 6,156,303, 5,387,484, 5,741,683, 5,691,176, and 5,688,676; U.S. patent application 2002/0081721, and International Patent Applications WO 00/47757, WO 00/24916, and WO 96/17947, the contents of each of which are herein incorporated by reference in their entireties.

[0649] In some embodiments, AAV particles are produced in mammalian-cells wherein all three VP proteins are expressed at a stoichiometry approaching 1:1:10 (VP1:VP2:VP3). The regulatory mechanisms that allow this controlled level of expression include the production of two mRNAs, one for VP1, and the other for VP2 and VP3, produced by differential splicing.

[0650] In another embodiment. AAV particles are produced in mammalian cells using a triple transfection method wherein a payload construct, parvoviral Rep and parvoviral Cap and a helper construct are comprised within three different constructs. The triple transfection method of the three components of AAV particle production may be utilized to produce small lots of virus for assays including transduction efficiency, target tissue (tropism) evaluation, and stability.

[0651] AAV particles may be produced by triple transfection or baculovirus mediated virus production, or any other method known in the art. Any suitable permissive or packaging cell known in the art may be employed to produce the vectors. Mammalian cells are often preferred. Also preferred are trans-complementing packaging cell lines that provide functions deleted from a replication-defective helper virus, e.g., 293 cells or other E1a trans-complementing cells.

[0652] The gene cassette may contain some or all of the parvovinis (e.g., AAV) cap and rep genes. Preferably, however, some or all of the cap and rep functions are provided in trans by introducing a packaging vector(s) encoding the capsid and/or Rep proteins into the cell. Most preferably, the gene cassette does not encode the capsid or Rep proteins. Alternatively, a packaging cell line is used that is stably transformed to express the cap and/or rep genes.

[0653] Recombinant AAV virus particles are, in some cases, produced and purified from culture supernatants according to the procedure as described in US20160032254, the contents of which are incorporated by reference. Production may also involve methods known in the art including those using 293T cells, sf9 insect cells, triple transfection or any suitable production method.

[0654] In some cases, 293T cells (adhesion/suspension) are transfected with polyethyleneimine (PEI) with plasmids required for production of AAV, i.e., AAV2 rep, an adenoviral helper construct and a ITR flanked transgene cassette. The AAV2 rep plasmid also contains the cap sequence of the particular virus being studied. Twenty-four hours after transfection (no medium changes for suspension), which occurs in DMEM/F17 with/without serum, the medium is replaced with fresh medium with or without serum. Three (3) days after transfection, a sample is taken from the culture medium of the 293 adherent cells. Subsequently cells are scraped, or suspension cells are pelleted, and transferred into a receptacle. For adhesion cells, after centrifugation to remove cellular pellet, a second sample is taken from the supernatant after scraping. Next, cell lysis is achieved by three consecutive freeze-thaw cycles (˜80C to 37C) or adding detergent triton. Cellular debris is removed by centrifugation or depth filtration and sample 3 is taken from the medium. The samples are quantified for AAV particles by RNase resistant genome titration by DNA qPCR, The total production yield from such a transfection is equal to the particle concentration from sample 3.

[0655] AAV particle titers are measured according to genome copy number (genome particles per milliliter). Genome particle concentrations are based on DNA qPCR of the vector DNA as previously reported (Clark et al. (1999) Hum. Gene Ther., 10:1031-1039; Veldwijk et al, (2002) Mol. Ther., 6:272-278).

### Baculovirus

[0656] Particle production disclosed herein describes processes and methods for producing AAV particles that contact a target cell to deliver a payload construct which comprises a polynucleotide sequence encoding a payload.

[0657] Briefly, the viral construct vector and the AAV payload construct vector are each incorporated by a transposondonor/acceptor system into a bacmid, also known as a baculovirus plasmid, by standard molecular biology techniques known and performed by a person skilled in the art. Transfection of separate viral replication cell populations produces two baculoviruses, one that comprises the viral construct expression vector, and another that comprises the AAV payload construct expression vector, The two baculoviruses may be used to infect a single viral replication cell population for production of AAV particles,

[0658] Baculovirus expression vectors for producing viral particles in insect cells, including but not limited to Spodoptera frugiperda (Sf9) cells, provide high titers of viral particle product, Recombinant baculovirus encoding the viral construct expression vector and AAV payload construct expression vector initiates a productive infection of viral replicating cells. Infectious baculovirus particles released from the primary infection secondarily infect additional cells in the culture, exponentially infecting the entire cell culture population in a number of infection cycles that is a function of the initial multiplicity of infection, see Urabe, M. et al,. J Virol, 2006 February; 80 (4):1874-85, the contents of which are herein incorporated by reference in their entirety.

[0659] Production of AAV particles with baculovirus in an insect cell system may address known baculovirus genetic and physical instability. In some embodiments, the production system addresses baculovirus instability over multiple passages by utilizing a titerless infected-cells preservation and scale-up system. Small scale seed cultures of viral producing cells are transfected with viral expression constructs encoding the structural, non-structural, components of the viral particle. Baculovirus-infected viral producing cells are harvested into aliquots that may be cryopreserved in liquid nitrogen; the aliquots retain viability and infectivity for infection of large scale viral producing cell culture Wasilko D J et al., Protein Expr Purif. 2009 June; 65(2):122-32, the contents of which are herein incorporated by reference in their entirety.

[0660] A genetically stable baculovirus may be used to produce source of the one or more of the components for producing AAV particles in invertebrate cells. In some embodiments, defective baculovirus expression vectors may be maintained episomally in insect cells. In such an embodiment the bacmid vector is engineered with replication control elements, including but not limited to promoters, enhancers, and/or cell-cycle regulated replication elements.

[0661] In some embodiments, baculoviruses may be engineered with a (non-) selectable marker for recombination into the chitinase/cathepsin locus. The chia/v-cath locus is non-essential for propagating baculovirus in tissue culture, and the V-cath (EC 3.4.22.50) is a cysteine endoprotease that is most active on Arg-Arg dipeptide containing substrates. The Arg-Arg dipeptide is present in densovirus and parvovirus capsid structural proteins but infrequently occurs in dependovirus VP1.

[0662] In some embodiments, stable viral replication cells permissive for baculovirus infection are engineered with at least one stable integrated copy of any of the elements necessary for AAV replication and viral particle production including, but not limited to, the entire AAV genome, Rep and Cap genes, Rep genes, Cap genes, each Rep protein as a separate transcription cassette, each VP protein as a separate transcription cassette. the AAP (assembly activation protein), or at least one of the baculovirus helper genes with native or non-native promoters. Large-Scale Production

[0663] In some embodiments, AAV particle production may be modified to increase the scale of production. Large scale viral production methods according to the present disclosure may include any of those taught in U.S. Pat. Nos. 5,756,283, 6,258,595, 6,261,551, 6,270,996, 6,281,010, 6,365,394, 6,475,769, 6,482,634, 6,485,966, 6,943,019, 6,953,690, 7,022,519, 7,238,526, 7,291,498 and 7,491,508 or International Publication Nos. WO1996039530, WO1998010088, WO1999014354, WO1999015685, WO1999047691, WO2000055342, WO2000075353 and WO2001023597, the contents of each of which are herein incorporated by reference in their entirety. Methods of increasing viral particle production scale typically comprise increasing the number of viral replication cells. In some embodiments, viral replication cells comprise adherent cells. To increase the scale of viral particle production by adherent viral replication cells, larger cell culture surfaces are required. In some cases, large-scale production methods comprise the use of roller bottles to increase cell culture surfaces. Other cell culture substrates with increased surface areas are known in the art. Examples of additional adherent cell culture products with increased surface areas include, but are not limited to CELLSTACK®, CELLCUBE® (Corning Corp., Corning, N.Y.) and NUNC™ CELL FACTORY™ (Thermo Scientific. Waltham, Mass.) In some cases, large-scale adherent cell surfaces may comprise from about 1,000 cm² to about 100,000 cm². In some cases, large-scale adherent cell cultures may comprise from about 10⁷ to about 10⁹ cells, from about 10⁸ to about 10¹⁰ cells, from about 10⁹ to about 10¹² cells or at least 10¹² cells. In some cases, large-scale adherent cultures may produce from about 10⁹ to about 10¹², from about 10¹⁰ to about 10¹³, from about 10¹¹ to about 10¹⁴, from about 10¹² to about 10¹⁵ or at least 10¹⁵ viral particles.

[0664] In some embodiments, large-scale viral production methods of the present disclosure may comprise the use of suspension cell cultures. Suspension cell culture allows for significantly increased numbers of cells. Typically, the number of adherent cells that can be grown on about 10-50 cm² of surface area can be grown in about 1 cm³ volume in suspension.

[0665] Transfection of replication cells in large-scale culture formats may be carried out according to any methods known in the art. For large-scale adherent cell cultures, transfection methods may include, but are not limited to the use of inorganic compounds (e.g. calcium phosphate), organic compounds [e.g. polyethyleneimine (PEI)] or the use of non-chemical methods (e.g. electroporation.) With cells grown in suspension, transfection methods may include, but are not limited to the use of calcium phosphate and the use of PEI. In some cases, transfection of large-scale suspension cultures may be carried out according to the section entitled “Transfection Procedure” described in Feng, L. et al., 2008, Biotechnol Appl. Biochem. 50:121-32, the contents of which are herein incorporated by reference in their entirety. According to such embodiments, PEI-DNA complexes may be formed for introduction of plasmids to be transfected. In some cases, cells being transfected with PEI-DNA complexes may be ‘shocked’ prior to transfection. This comprises lowering cell culture temperatures to 4° C. for a period of about 1 hour. In some cases, cell cultures may be shocked for a period of from about 10 minutes to about 5 hours. In some cases, cell cultures may be shocked at a temperature of from about 0° C. to about 20° C.

[0666] In some cases, transfections may include one or more vectors for expression of an RNA effector molecule to reduce expression of nucleic acids from one or more AAV payload construct. Such methods may enhance the production of viral particles by reducing cellular resources wasted on expressing payload constructs. In some cases, such methods may be carried according to those taught in US Publication No. US2014/0099666, the contents of which are herein incorporated by reference in their entirety.

### Bioreactors

[0667] In some embodiments, cell culture bioreactors may be used for large scale viral production. In some cases, bioreactors comprise stirred tank reactors. Such reactors generally comprise a vessel, typically cylindrical in shape, with a stirrer (e.g. impeller.) In some embodiments, such bioreactor vessels may be placed within a water jacket to control vessel temperature and/or to minimize effects from ambient temperature changes. Bioreactor vessel volume may range in size from about 500 ml to about 2 L, from about 1 L to about 5 L, from about 2.5 L to about 20 L, from about 10 L to about 50 L, from about 25 L to about 100 L, from about 75 L to about 500 L, from about 250 L to about 2,000 L, from about 1,000 L to about 10,000 L, from about 5,000 L to about 50,000 L or at least 50,000 L. Vessel bottoms may be rounded or flat. In some cases, animal cell cultures may be maintained in bioreactors with rounded vessel bottoms.

[0668] In some cases, bioreactor vessels may be warmed through the use of a thermocirculator. Thermocirculators pump heated water around water jackets. In some cases, heated water may be pumped through pipes (e.g coiled pipes) that are present within bioreactor vessels. in some cases, warm air may be circulated around bioreactors, including, but not limited to air space directly above culture medium. Additionally, pH and CO₂ levels may be maintained to optimize cell viability.

[0669] In some cases, bioreactors may comprise hollow-fiber reactors. Hollow-fiber bioreactors may support the culture of both anchorage dependent and anchorage independent cells. Further bioreactors may include, but are not limited to, packed-bed or fixed-bed bioreactors. Such bioreactors may comprise vessels with glass beads for adherent cell attachment. Further packed-bed reactors may comprise ceramic beads,

[0670] In some cases, viral particles are produced through the use of a disposable bioreactor. In some embodiments, such bioreactors may include WAVE™ disposable bioreactors.

[0671] In some embodiments, AAV particle production in animal cell bioreactor cultures may be carried out according to the methods taught in U.S. Pat. Nos. 5,064764, 6,194,191, 6,566,118, 8,137,948 or US Patent Application No. US2011/0229971, the contents of each of which are herein incorporated by reference in their entirety.

### Cell Lysis

[0672] Cells of the disclosure, including, but not limited to viral production cells, may be subjected to cell lysis according to any methods known. Cell lysis may be carried out to obtain one or more agents (e.g, viral particles) present within any cells of the disclosure. In some embodiments, cell lysis may be carried out according to any of the methods listed in U.S. Pat. Nos. 7,326,555, 7,579,181, 7,048,920, 6,410,300, 6,436,394, 7,732,129, 7,510,875, 7,445,930, 6,726,907, 6,194,191, 7,125,706, 6,995,006, 6,676,935, 7,968,333, 5,756,283, 6,258,595, 6,261,551, 6,270,996, 6,281,010, 6,365,394, 6,475,769, 6,482,634, 6,485,966, 6,943,019, 6,953,690, 7,022,519, 7,238,526, 7,291,498 and 7,491,508 or International Publication Nos. WO1996039530, WO1998010088, WO1999014354, WO1999015685, WO1999047691, WO7000055342, WO2000075353 and WO2001023597, the contents of each of which are herein incorporated by reference in their entirety. Cell lysis methods may be chemical or mechanical. Chemical cell lysis typically comprises contacting one or more cells with one or more lysis agent. Mechanical lysis typically comprises subjecting one or more cells to one or more lysis condition and/or one or more lysis force.

[0673] In some embodiments, chemical lysis may be used to lyse cells. As used herein, the term “lysis agent” refers to any agent that may aid in the disruption of a cell. In some cases, lysis agents are introduced in solutions, termed lysis solutions or lysis buffers. As used herein, the term “lysis solution” refers to a solution (typically aqueous) comprising one or more lysis agent. In addition to lysis agents, lysis solutions may include one or more buffering agents, solubilizing agents, surfactants, preservatives, cryoprotectants, enzymes, enzyme inhibitors and/or chelators. Lysis buffers are lysis solutions comprising one or more buffering agent. Additional components of lysis solutions may include one or more solubilizing agent. As used herein, the term “solubilizing agent” refers to a compound that enhances the solubility of one or more components of a solution and/or the solubility of one or more entities to which solutions are applied. In some cases, solubilizing agents enhance protein solubility. In some cases, solubilizing agents are selected based on their ability to enhance protein solubility while maintaining protein conformation and/or activity.

[0674] Exemplary lysis agents may include any of those described in U.S. Pat. Nos. 8,685,734, 7,901,921, 7,732,129, 7,223,585, 7,125,706, 8,236,495, 8,110,351, 7,419,956, 7,300,797, 6,699,706 and 6,143,567, the contents of each of which are herein incorporated by reference in their entirety. In some cases, lysis aunts may be selected from lysis salts, amphoteric agents, cationic agents, ionic detergents and non-ionic detergents. Lysis salts may include, but are not limited to, sodium chloride (NaCl) and potassium chloride (KCl) Further lysis salts may include any of those described in U.S. Pat. Nos. 8,614,101, 7,326,555, 7,579,181, 7,048,920, 6,410,300, 6,436,394, 7,732,129, 7,510,875, 7,445,930, 6,726,907, 6,194,191, 7,125,706, 6,995,006, 6,676,935 and 7,968,333, the contents of each of which are herein incorporated by reference in their entirety. Concentrations of salts may be increased or decreased to obtain an effective concentration for rupture of cell membranes. Amphoteric agents, as referred to herein, are compounds capable of reacting as an acid or a base. Amphoteric agents may include, but are not limited to lysophosphatidylcholine, 3((3-Cholamidopropyl) dimethylammonium)-1-propanesulfonate (CHAPS), ZWITTERGENT® and the like. Cationic agents may include, but are not limited to, cetyltrimethylammonium bromide (C (16) TAB) and Benzalkonium chloride. Lysis agents comprising detergents may include ionic detergents or non-ionic detergents. Detergents may function to break apart or dissolve cell structures including, but not limited to cell membranes, cell walls, lipids, carbohydrates, lipoproteins and glycoproteins. Exemplary ionic detergents include any of those taught in U.S. Pat. Nos. 7,625,570 and 6,593,123 or US Publication No. US:2014/0087361, the contents of each of which are herein incorporated by reference in their entirety. Some ionic detergents may include, but are not limited to, sodium dodecyl sulfate (SDS), cholate and deoxycholate. In some cases, ionic detergents may be included in lysis solutions as a solubilizing agent. Non-ionic detergents may include, but are not limited to octylglucoside, digitonin, lubrol, C12E8, TWEEN®-20, TWEEN®-80, Triton X-100 and Noniodet P-40. Non-ionic detergents are typically weaker lysis agents but may be included as solubilizing agents for solubilizing cellular and/or viral proteins. Further lysis agents may include enzymes and urea. In some cases, one or more lysis agents may he combined in a lysis solution in order to enhance one or more of cell lysis and protein solubility. In some cases, enzyme inhibitors may be included in lysis solutions in order to prevent proteolysis that may be triggered by cell membrane disruption.

[0675] In some embodiments, mechanical cell lysis is carried out. Mechanical cell lysis methods may include the use of one or more lysis condition and/or one or more lysis force. As used herein, the term “lysis condition” refers to a state or circumstance that promotes cellular disruption. Lysis conditions may comprise certain temperatures, pressures, osmotic purity, salinity and the like. In some cases, lysis conditions comprise increased or decreased temperatures. According to some embodiments, lysis conditions comprise changes in temperature to promote cellular disruption. Cell lysis carried out according to such embodiments may include freeze-thaw lysis. As used herein, the term “freeze-thaw lysis” refers to cellular lysis in which a cell solution is subjected to one or more freeze-thaw cycle. According to freeze-thaw lysis methods, cells in solution are frozen to induce a mechanical disruption of cellular membranes caused by the formation and expansion of ice crystals. Cell solutions used according freeze-thaw lysis methods, may further comprise one or more lysis agents, solubilizing agents, buffering agents, cryoprotectants, surfactants, preservatives, enzymes, enzyme inhibitors and/or dictators. Once cell solutions subjected to freezing are thawed, such components may enhance the recovery of desired cellular products. In some cases, one or more cryoprotectants are included in cell solutions undergoing freeze-thaw lysis. As used herein, the term “cryoprotectant” refers to an agent used to protect one or more substance from damage due to freezing. Cryoprotectants may include any of those taught in US Publication No. US2013/0323302 or U.S. Pat. Nos. 6,503,888, 6,180,613, 7,888,096, 7,091,030, the contents of each of which are herein incorporated by reference in their entirety. In some cases, cryoprotectants may include, but are not limited to dimethyl sulfoxide, 1,2-propanediol, 2,3-butanediol, formamide, glycerol, ethylene glyco, 1,3-propanediol and n-dimethyl formamide, polyvinylpyrrolidone, hydroxyethyl starch, agarose, dextrans, inositol, glucose, hydroxyethylstarch, lactose, sorbitol, methyl glucose, sucrose and urea. In some embodiments, freeze-thaw lysis may be carried out according to any of the methods described in U.S. Pat. No. 7,704,721, the contents of which are herein incorporated by reference in their entirety. As used herein, the term “lysis force” refers to a physical activity used to disrupt a cell. Lysis forces may include, but are not limited to mechanical forces, some forces, gravitational forces, optical forces, electrical forces and the like. Cell lysis carried out by mechanical force is referred to herein as “mechanical lysis.” Mechanical forces that may be used according to mechanical lysis may include high shear fluid forces. According to such methods of mechanical lysis, a microfluidizer may be used. Microfluidizers typically comprise an inlet reservoir where cell solutions may be applied. Cell solutions may then be pumped into an interaction chamber via a pump (e.g. high-pressure pump) at high speed and/or pressure to produce shear fluid forces. Resulting lysates may then be collected in one or more output reservoir. Pump speed and/or pressure may be adjusted to modulate cell lysis and enhance recovery of products (e.g. viral particles.) Other mechanical lysis methods may include physical disruption of cells by scraping.

[0676] Cell lysis methods may be selected based on the cell culture format of cells to be lysed. For example, with adherent cell cultures, some chemical and mechanical lysis methods may be used. Such mechanical lysis methods may include freeze-thaw lysis or scraping. In another example, chemical lysis of adherent cell cultures may be carried out through incubation with lysis solutions comprising surfactant, such as Triton-X-100. In some cases, cell lysates generated from adherent cell cultures may be treated with one more nuclease to lower the viscosity of the lysates caused by liberated DNA.

[0677] In some embodiments, a method for harvesting AAV particles without lysis may be used for efficient and scalable AAV particle production. In a non-limiting example, AAV particles may be produced by culturing an AAV particle lacking a heparin binding site, thereby allowing the AAV particle to pass into the supernatant, in a cell culture, collecting supernatant from the culture; and isolating the AAV particle from the supernatant, as described in US Patent Application 20090275107, the contents of which are incorporated herein by reference in their entirety.

### Clarification

[0678] Cell lysates comprising viral particles may be subjected to clarification. Clarification refers to initial steps taken in purification of viral particles from cell lysates. Clarification serves to prepare lysates for further purification by removing larger, insoluble debris. Clarification steps may include, but are not limited to, centrifugation and filtration. During clarification, centrifugation may be carried out at low speeds to remove larger debris only. Similarly, filtration may be carried out using filters with larger pore sizes so that only larger debris is removed. In some cases, tangential flow filtration may be used during clarification. Objectives of viral clarification include high throughput processing of cell lysates and to optimize ultimate viral recovery. Advantages of including a clarification step include scalability for processing of larger volumes of lysate. In some embodiments, clarification may be carried out according to any of the methods presented in U.S. Pat. Nos. 8,524,446, 5,756,283, 6,258,595, 6,261,551, 6,270,996, 6,281,010, 6,365,394, 6,475,769, 6,482,634, 6,485,966, 6,943,019, 6,953,690, 7,022,519, 7,238,526, 7,291,498, 7,491,508, US Publication Nos. US2013/0045186, US2011/0263027, US2011/0151434, US2003/0138772, and International Publication Nos. WO2002012455, WO1996039530, WO1998010088, WO1999014354, WO1999015685, WO1999047691, WO2000055342, WO2000075353 and WO2001023597, the contents of each of which are herein incorporated by reference in their entirety.

[0679] Methods of cell lysate clarification by filtration are well understood in the art and may he carried out according to a variety of available methods including, but not limited to passive filtration and flow filtration. Filters used may comprise a variety of materials and pore sizes. For example, cell lysate filters may comprise pore sizes of from about 104 to about 5 μM, from about 0.5 μM to about 2 μM, from about 0.1 μM to about 1 μM, from about 0.05 μM to about 0.05 μM and from about 0.001 μM to about 0.1 μM. Exemplary pore sizes for cell lysate filters may include, but are not limited to, 2.0, 1.9, 1.8, 1.7, 1.6, 1.5, 1.4, 1.3, 1.2, 1.1, 1, 0.9, 0.8, 0.7, 0.6, 0.5, 0.4, 0.3, 0.2, 0.1, 0.95, 0.9, 0.85, 0.8, 0.75, 0.7, 0.65, 0.6, 0.55, 0.5, 0.45, 0.4, 0.35, 0.3, 0.25, 0.2, 0.15, 0.1, 0.05, 0.22, 0.21, 0.20, 0.19, 0.18, 0.17, 0.16, 0.15, 0.14, 0.13, 0.12, 0.11, 0.1, 0.09, 0.08, 0.07, 0.06, 0.05, 0.04, 0.03, 0.02, 0.01, 0.02, 0.019, 0.018, 0.017, 0.016, 0.015, 0.014, 0.013, 0.012, 0.011, 0.01, 0.009, 0.008, 0.007, 0.006, 0.005, 0.004, 0.003, 0.002, 0.001 and 0.001 μM In some embodiments, clarification may comprise filtration through a filter with 2.0 μM pore size to remove large debris, followed by passage through a filter with 0.45 μM pore size to remove intact cells.

[0680] Filter materials may be composed of a variety of materials. Such materials may include, but are not limited to, polymeric materials and metal materials (e.g. sintered metal and pored aluminum.) Exemplary materials may include, but are not limited to nylon, cellulose materials (e.g. cellulose acetate), polyvinylidene fluoride (PVDF), polyethersulfone, polyamide, polysulfone, polypropylene, and polyethylene terephthalate. In some cases, filters useful for clarification of cell lysates may include, but are not limited to ULTIPLEAT PROFILE™ filters (Pall Corporation. Port Washington, N.Y.), SUPOR™ membrane filters (Pall Corporation, Port Washington, N.Y.)

[0681] In some cases, flow filtration may be carried out to increase filtration speed and/or effectiveness. In some cases, flow filtration may comprise vacuum filtration. According to such methods, a vacuum is created on the side of the filter opposite that of cell lysate to be filtered. In some cases, cell lysates may be passed through filters by centrifugal forces. In some cases, a pump is used to force cell lysate through clarification filters. Flow rate of cell lysate through one or more filters may be modulated by adjusting one of channel size and/or fluid pressure.

[0682] According to some embodiments, cell lysates may be clarified by centrifugation. Centrifugation may be used to pellet insoluble particles in the lysate. During clarification, centrifugation strength [expressed in terms of gravitational units (g), which represents multiples of standard gravitational force] may be lower than in subsequent purification steps. In some cases, centrifugation may be carried out on cell lysates at from about 200 g to about 800 g, from about 500 g to about 1500 g, from about 1000 g to about 5000 g, from about 1200 g to about 10000 g or from about 8000 g to about 15000 g. In some embodiments, cell lysate centrifugation is carried out at 8000 g for 15 minutes. In some cases, density gradient centrifugation may be carried out in order to partition particulates in the cell lysate by sedimentation rate. Gradients used according to methods of the present disclosure may include, but are not limited to, cesium chloride gradients and iodixanol step gradients.

### Purification: Chromatography

[0683] In some cases, AAV particles may be purified from clarified cell lysates by one or more methods of chromatography. Chromatography refers to any number of methods known in the art for separating out one or more elements from a mixture. Such methods may include, but are not limited to, ion exchange chromatography (e.g. cation exchange chromatography and anion exchange chromatography), immunoaffinity chromatography and size-exclusion chromatography. In some embodiments, methods of viral chromatography may include any of those taught in U.S. Pat. Nos. 5,756,283, 6,258,595, 6,261,551, 6,270,996, 6,281,010, 6,365,394, 6,475,769, 6,482,634, 6,485,966, 6,943,019, 6,953,690, 7,022,519, 7,238,526, 7,291,498 and 7,491,508 or International Publication Nos. WO1996039530, WO1998010088, WO1999014354, WO1999015685, WO1999047691, WO2000055342, WO2000075353 and WO2001023597, the contents of each of which are herein incorporated by reference in their entirety.

[0684] In some embodiments, ion exchange chromatography may be used to isolate viral particles. Ion exchange chromatography is used to bind viral particles based on charge-charge interactions between capsid proteins and charged sites present on a stationary phase, typically a column through which viral preparations (e.g. clarified lysates) are passed. After application of viral preparations, bound viral particles may then be eluted by applying an elution solution to disrupt the charge-charge interactions. Elution solutions may be optimized by adjusting salt concentration and/or pH to enhance recovery of hound viral particles. Depending on the charge of viral capsids being isolated, cation or anion exchange chromatography methods may be selected. Methods of ion exchange chromatography may include, but are not limited to, any of those taught in U.S. Pat. Nos. 7,419,817, 6,143,548, 7,094,604, 6,593,123, 7,015,026 and 8,137,948, the contents of each of which are herein incorporated by reference in their entirety. In some embodiments, immunoaffinity chromatography may be used. Immunoaffinity chromatography is a form of chromatography that utilizes one or more immune compounds (e.g. antibodies or antibody-related structures) to retain viral particles. Immune compounds may bind specifically to one or more structures on viral particle surfaces, including, but not limited to one or more viral coat protein. In some cases, immune compounds may be specific for a particular viral variant. In some cases, immune compounds may bind to multiple viral variants. In some embodiments, immune compounds may include recombinant single-chain antibodies. Such recombinant single chain antibodies may include those described in Smith, R. H. et al., 2009. Mol. Ther. 17(11):1888-96, the contents of which are herein incorporated by reference in their entirety. Such immune compounds are capable of binding to several AAV capsid variants, including, but not limited to AAV1, AAV2, AAV6 and AAV8.

[0685] In some embodiments, size-exclusion chromatography (SEC) may be used. SEC may comprise the use of a gel to separate particles according to size. In viral particle purification, SEC filtration is sometimes referred to as “polishing.” In some cases, SEC may be carried out to generate a final product that is near-homogenous. Such final products may in some cases be used in pre-clinical studies and/or clinical studies (Kotin, R. M. 2011. Human Molecular Genetics. 20(1):R2-R6, the contents of which are herein incorporated by reference in their entirety.) In some cases, SEC may be carried out according to any of the methods taught in U.S. Pat. Nos. 6,143,548, 7,015,026, 8,476,418, 6,410,300, 8,476,418, 7,419,817, 7,094,604, 6,593,123, and 8,137,948, the contents of each of which are herein incorporated by reference in their entirety.

[0686] In some embodiments, the compositions comprising at least one AAV particle may be isolated or purified using the methods described in U.S. Pat. No. 6,146,874, the contents of which are herein incorporated by reference in its entirety.

[0687] In some embodiments, the compositions comprising at least one AAV particle may be isolated or purified using the methods described in U.S. Pat. No. 6,660,514, the contents of which are herein incorporated by reference in its entirety.

[0688] In some embodiments, the compositions comprising at least one AAV particle may be isolated or purified using the methods described in U.S. Pat. No. 8,283,151, the contents of which are herein incorporated by reference in its entirety.

[0689] In some embodiments, the compositions comprising at least one AAV particle may be isolated or purified using the methods described in U.S. Pat. No. 8,524,446, the contents of which are herein incorporated by reference in its entirety.

### II. Formulations and Delivery

[0690] Pharmaceutical compositions and formulation

[0691] In addition to the pharmaceutical compositions (AAV particles comprising a modulatory polynucleotide sequence encoding the siRNA molecules), provided herein are pharmaceutical compositions which are suitable for administration to humans, it will be understood by the skilled artisan that such compositions are generally suitable for administration to any other animal, e.g, to non-human animals, e.g. non-human mammals. Modification of pharmaceutical compositions suitable for administration to humans in order to render the compositions suitable for administration to various animals is well understood, and the ordinarily skilled veterinary pharmacologist can design and/or perform such modification with merely ordinary, if any, experimentation. Subjects to which administration of the pharmaceutical compositions is contemplated include, but are not limited to, humans and/or other primates; mammals, including commercially relevant mammals such as cattle, pigs, horses, sheep, cats, dogs, mice, and/or rats; and/or birds, including commercially relevant birds such as poultry, chickens, ducks, geese, and/or turkeys.

[0692] In some embodiments, compositions are administered to subjects, humans, or human patients in need thereof. For the purposes of the present disclosure, the phrase “active ingredient” generally refers either to the synthetic siRNA duplexes, the modulatory polynucleotide encoding the siRNA duplex, or the AAV particle comprising a modulatory polynucleotide encoding the siRNA duplex described herein.

[0693] Formulations of the pharmaceutical compositions described herein may be prepared by any method known or hereafter developed in the art of pharmacology. In general, such preparatory methods include the step of bringing the active ingredient into association with an excipient and/or one or more other accessory ingredients, and then, if necessary and/or desirable, dividing, shaping and/or packaging the product into a desired single- or multi-dose unit.

[0694] Relative amounts of the active ingredient, the pharmaceutically acceptable excipient, and/or any additional ingredients in a pharmaceutical composition in accordance with the disclosure will vary, depending upon the identity, size, and/or condition of the subject treated and further depending upon the route by which the composition is to be administered.

[0695] The AAV particles comprising the modulatory polynucleotide sequence encoding the siRNA molecules of the present disclosure can be formulated using one or more excipients to: (1) increase stability; (2) increase cell transfection or transduction; (3) permit the sustained or delayed release; or (4) alter the biodistribution (e.g., target the AAV particle to specific tissues or cell types such as brain and neurons).

[0696] Formulations of the present disclosure can include, without limitation, saline, lipidoids, liposomes, lipid nanoparticles, polymers, lipoplexes, core-shell nanoparticles, peptides, proteins, cells transfected with AAV particles (e.g., for transplantation into a subject), nanoparticle mimics and combinations thereof. Further, the AAV particles of the present disclosure may be formulated using self-assembled nucleic acid nanoparticles.

[0697] Formulations of the pharmaceutical compositions described herein may be prepared by any method known or hereafter developed in the art of pharmacology. In general, such preparatory methods include the step of associating the active ingredient with an excipient and/or one or more other accessory ingredients.

[0698] A pharmaceutical composition in accordance with the present disclosure may be prepared, packaged, and/or sold in bulk, as a single unit dose, and/or as a plurality of single unit doses. As used herein, a “unit dose” refers to a discrete amount of the pharmaceutical composition comprising a predetermined amount of the active ingredient. The amount of the active ingredient is generally equal to the dosage of the active ingredient which would be administered to a subject and/or a convenient fraction of such a dosage such as, for example, one-half or one-third of such a dosage.

[0699] Relative amounts of the active ingredient, the pharmaceutically acceptable excipient, and/or any additional ingredients in a pharmaceutical composition in accordance with the present disclosure may vary, depending upon the identity, size, and/or condition of the subject being treated and further depending upon the route by which the composition is to be administered. For example, the composition may comprise between 0.1% and 99% w/w) of the active ingredient. By way of example, the composition may comprise between 0.1% and 100%, e.g., between and 50%, between 1-30%, between 5-80%, at least 80% (w/w) active ingredient.

[0700] In some embodiments, a pharmaceutically acceptable excipient may be at least 95%, at least 96%, at least 97% at least 98%, at least 99%, or 100% pure. In some embodiments, an excipient is approved for use for humans and for veterinary use. in some embodiments, an excipient may be approved by United States Food and Drug Administration. In some embodiments, an excipient may be of pharmaceutical grade. In some embodiments, an excipient may meet the standards of the United States Pharmacopoeia (USP). the European Pharmacopoeia (EP), the British Pharmacopoeia, and/or the International Pharmacopoeia.

[0701] Excipients, which, as used herein, includes, but is not limited to, any and all solvents, dispersion media, diluents, or other liquid vehicles, dispersion or suspension aids, surface active agents, isotonic agents, thickening or emulsifying agents, preservatives, and the like, as suited to the particular dosage form desired. Various excipients for formulating pharmaceutical compositions and techniques for preparing the composition are known in the art (see Remington: The Science and Practice of Pharmacy, 21^{st} Edition, A. R. Gennaro, Lippincott, Williams & Wilkins, Baltimore, Md., 2006; incorporated herein by reference in its entirety). The use of a conventional excipient medium may be contemplated within the scope of the present disclosure, except insofar as any conventional excipient medium may be incompatible with a substance or its derivatives, such as by producing any undesirable biological effect or otherwise interacting in a deleterious manner with any other component(s) of the pharmaceutical composition.

[0702] Exemplary diluents include, but are not limited to, calcium carbonate, sodium carbonate, calcium phosphate, dicalcium phosphate, calcium sulfate, calcium hydrogen phosphate, sodium phosphate lactose, sucrose, cellulose, microcrystalline cellulose, kaolin, mannitol, sorbitol, inositol, sodium chloride, dry starch, cornstarch, powdered sugar, etc., and/or combinations thereof.

[0703] in some embodiments, additional excipients that may be used in formulating the pharmaceutical composition may include MgCl₂, arginine, sorbitol, and/or trehalose.

[0704] In some embodiments, the formulations may comprise at least one inactive ingredient. As used herein, the term “inactive ingredient” refers to one or more inactive agents included in formulations. In some embodiments, all, none or some of the inactive ingredients which may be used in the formulations of the present disclosure may be approved by the US Food and Drug Administration (FDA).

[0705] Formulations of vectors comprising the nucleic acid sequence for the siRNA molecules of the present disclosure may include cations or anions. In some embodiments, the formulations include metal cations such as, but not limited to, Zn2+, Ca2+, Cu2+, Mg+ and combinations thereof.

[0706] As used herein, “pharmaceutically acceptable salts” refers to derivatives of the disclosed compounds wherein the parent compound is modified by converting an existing acid or base moiety to its salt form (e.g., by reacting the free base group with a suitable organic acid). Examples of pharmaceutically acceptable salts include, but are not limited to, mineral or organic acid salts of basic residues such as amines; alkali or organic salts of acidic residues such as carboxylic acids; and the like. Representative acid addition salts include acetate, acetic acid, adipate, alginate, ascorbate, aspartate, benzenesulfonate, benzene sulfonic acid, benzoate, bisulfate, borate, butyrate, camphorate, camphorsulfonate, citrate, cyclopentanepropionate, digluconate, dodecylsulfate, ethanesulfonate, fumarate, glucoheptonate, glycerophosphate, hemisulfate, heptonate, hexanoate, hydrobromide, hydrochloride, hydroiodide, 2-hydroxy-ethanesulfonate, lactobionate, lactate, laurate, lauryl sulfate, malate, maleate, malonate, methanesulfonate, 2-naphthalenesulfonate, nicotinate, nitrate, oleate, oxalate, palmitate, pamoate, pectinate, persulfate, 3-phenylpropionate, phosphate, picrate, pivalate, propionate, stearate, succinate, sulfate, tartrate, thiocyanate, toluenesulfonate, undecanoate, valerate salts, and the like. Representative alkali or alkaline earth metal salts include sodium, lithium, potassium, calcium, magnesium, and the like, as well as nontoxic ammonium, quaternary ammonium, and amine cations, including, but not limited to ammonium, tetramethylammonium, tetraethylammonium, methylamine, dimethylamine, trimethylamine, triethylamine, ethylamine, and the like. The pharmaceutically acceptable salts of the present disclosure include the conventional non-toxic salts of the parent compound formed, for example, from non-toxic inorganic or organic acids. The pharmaceutically acceptable salts of the present disclosure can be synthesized from the parent compound which contains a basic or acidic moiety by conventional chemical methods. Generally, such salts can be prepared by reacting the free acid or base forms of these compounds with a stoichiometric amount of the appropriate base or acid in water or in an organic solvent, or in a mixture of the two; generally, nonaqueous media like ether, ethyl acetate, ethanol, isopropanol, or acetonitrile are preferred. Lists of suitable salts are found in Remington's Pharmaceutical Sciences, 17^{th} ed., Mack Publishing Company, Easton, Pa., 1985, p. 1418, Pharmaceutical Salts: Properties, Selection, and Use, P. H. Stahl and C. O. Wennuth (eds.), Wiley-VCH, 2008, and Berge et al., Journal of Pharmaceutical Science, 66, 1-19 (1977); the content of each of which is incorporated herein by reference in their entirety.

[0707] The term “pharmaceutically acceptable solvate,” as used herein, means a compound of the disclosure wherein molecules of a suitable solvent are incorporated in the crystal lattice. A suitable solvent is physiologically tolerable at the dosage administered. For example, solvates may be prepared by crystallization, recrystallization, or precipitation from a solution that includes organic solvents, water, or a mixture thereof. Examples of suitable solvents are ethanol, water (for example, mono-, di-, and tri-hydrates), N-methylpyrrolidinone (NMP), dimethyl sulfoxide (DMSO), N,N′-dimethylformarnide (DMF), N,N′-dimethylacetamide (DMAC), 1,3-dimethyl-2-imidazolidinone (DMEU), 1,3-dimethyl-3,4,5,6-tetrahydro-2-(1H)-pyrimidinone (DMPU), acetonitrile (ACN), propylene glycol, ethyl acetate, benzyl alcohol, 2-pyrrolidone, benzyl benzoate, and the like. When water is the solvent, the solvate is referred to as a “hydrate.”

[0708] According to the present disclosure, the AAV particle comprising the modulatory polynucleotide sequence encoding for the siRNA molecules may be formulated for CNS delivery. Agents that cross the brain blood barrier may be used. For example, some cell penetrating peptides that can target siRNA molecules to the brain blood barrier endothelium may be used to formulate the siRNA duplexes targeting the HTT gene.

### Sodium Phosphate

[0709] In some embodiments, at least one of the components in the formulation is sodium phosphate. The formulation may include monobasic, dibasic or a combination of both monobasic and dibasic sodium phosphate.

[0710] In some embodiments, the concentration of sodium phosphate in a formulation may be, but is not limited to, 0.1 mM, 0.2 mM, 0.3 mM, 0.4 mM, 0.5 mM, 0.6 mM, 0.7 mM, 0.8 mM, 0.9 mM, 1 mM, 1.1 mM, 1.2 mM, 1.3 mM, 1.4 mM, 1.5 mM, 1.6 mM, 1.7 mM, 1.8 mM, 1.9 mM, 2 mM, 2.1 mM, 2.2 mM, 2.3 mM, 2.4 mM, 2.5 mM, 2.6 mM, 2.7 mM, 2.8 mM, 2.9 mM, 3 mM, 3.1 mM, 3.2 mM, 3.3 mM, 3.4 mM, 3.5 mM, 3.6 mM, 3.7 mM, 3.8 3.9 mM, 4 mM, 4.1 mM, 4.2 mM, 4.3 mM, 4.4 mM, 4.5 mM, 4.6 mM, 4.7 mM, 4.8 mM, 4.9 mM, 5 M, 5.1 mM, 5.2 mM, 5.3 mM, 5.4 mM, 5.5 mM, 5.6 mM, 5.7 mM, 5.8 mM, 5.9 mM, 6 mM, 6.1 mM, 6.2 mM, 6.3 mM, 6.4 mM, 6.5 mM, 6.6 mM, 6.7 mM, 6.8 mM, 6.9 mM, 7 mM, 7.1 mM, 7.2 mM, 7.3 mM, 7.4 mM, 7.5 mM, 7.6 mM, 7.7 mM, 7.8 mM, 7.9 mM, 8 mM, 8.1 mM, 8.2 mM, 8.3 mM, 8.4 mM, 8.5 mM, 8.6 mM, 8.7 mM, 8.8 mM, 8.9 mM, 9 mM, 9.1 mM, 9.2 mM, 9.3 mM, 9.4 mM, 9.5 mM, 9.6 mM, 9.7 mM, 9.8 mM, 9.9 mM, 10 mM, 10.1 mM, 10.2 mM, 10.3 mM, 10.4 mM, 10.5 mM, 10.6 mM, 10.7 mM, 10.8 mM, 10.9 mM, 11 mM, 11.1 mM, 11.2 mM, 11.3 mM, 11.4 mM, 11.5 mM, 11.6 mM, 11.7 mM, 11.8 mM, 11.9 mM, 12 mM, 12.1 mM, 12.2 mM, 12.3 mM, 12.4 mM, 12.5 mM, 12.6 mM, 12.7 mM, 12.8 mM, 12.9 mM, 13 mM, 13.1 mM, 13.2 mM, 13.3 mM, 13.4 mM, 13.5 mM, 13.6 mM, 13.7 mM, 13.8 mM, 13.9 mM, 14 mM, 14.1 mM, 14.2 mM, 14.3 mM, 14.4 mM, 14.5 mM, 14.6 mM, 14.7 mM. 14.8 mM, 14.9 mM or 15 mM.

[0711] The formulation may include sodium phosphate in a range of 0-0.5 mM, 0.1-0.6 mM, 0.2-0.7 mM, 0.3-0.8 mM, 0.4-0.9 mM, 0.5-1 mM, 0.6-1.1 mM, 0.7-1.2 mM, 0.8-1.3 mM, 0.9-1.4 mM, 1-1.5 mM, 1.1-1.6 mM, 1.2-1.7 mM, 1.3-1.8 mM, 1.4-1.9 mM, 1.5-2 mM, 1.6-2.1 mM, 1.7-2.2 mM, 1.8-2.3 mM, 1.9-2.4 mM, 2-2.5 mM, 2.1-2.6 mM, 2.2-2.7 mM, 2.3-2.8 mM, 2.4-2.9 mM, 2.5-3 mM, 2.6-3.1 mM, 2.7-3.2 mM, 2.8-3.3 mM, 2.9-3.4 mM, 3-3.5 mM, 3.1-3.6 mM, 3.2-3.7 mM, 3.3-3.8 mM, 3.4-3.9 mM, 3.5-4 mM, 3.6-4.1 mM, 3.7-4.2 mM, 3.8-4.3 mM, 3.9-4.4 mM, 4-4.5 mM, 4.1-4.6 mM, 4.2-4.7 mM, 4.3-4.8 mM, 4.4-4.9 mM, 4.5-5 mM, 4.6-5.1 mM, 4.7-5.2 mM, 4.8-5.3 mM, 4.9-5.4 mM, 5-5.5 mM, 5.1-5.6 mM, 5.2-5.7 mM, 5.3-5.8 mM, 5.4-5.9 mM, 5.5-6 mM, 5.6-6.1 mM, 5.7-6.2 mM, 5.8-6.3 mM, 5.9-6.4 mM, 6-6.5 mM, 6.1-6.6 mM, 6.2-6.7 mM, 6.3-6.8 mM, 6.4-6.9 mM, 6.5-7 mM, 6.6-7.1 mM, 6.7-7.1 mM, 6.8-7.3 mM, 6.9-7.4 mM, 7-7.5 mM, 7.1-7.6 mM, 7.2-7.7 mM, 7.3-7.8 mM, 7.4-7.9 mM, 7.5-8 mM, 7.6-8.1 mM, 7.7-8.2 mM, 7.8-8.3 mM, 7.9-8.4 mM, 8-8.5 mM, 8.1-8.6 mM, 8.2-8.7 mM, 8.3-8.8 mM, 8.4-8.9 mM, 8.5-9 mM, 8.6-9.1 mM, 8.7-9.2 mM, 8.8-9.3 mM, 8.9-9.4 mM, 9-9.5 mM, 9.1-9.6 mM, 9.2-9.7 mM, 9.3-9.8 mM, 9.4-9.9 mM, 9.5-10 mM, 9.6-10.1 mM, 9.7-10.2 mM, 9.8-10.3 mM, 9.9-10.4 mM, 10-10.5 mM, 10.1-10.6 mM, 10.2-10.7 mM, 10.3-10.8 mM, 10.4-10.9 mM, 10.5-11 mM, 10.6-11.1 mM, 10.7-11.2 mM, 10.8-11.3 mM, 10.9-11.4 mM, 11-11.5 mM, 11.1-11.6 mM, 11.2-11.7 mM, 11.3-11.8 mM, 11.4-11.9 mM, 11.5-12 mM, 11.6-12.1 mM, 11.7-12.2 mM, 11.8-12.3 mM, 11.9-12.4 mM, 12-12.5 mM, 12.1-12.6 mM, 12.2-12.7 mM, 12.3-12.8 mM, 12.4-12.9 mM, 12.5-13 mM, 12.6-13.1 mM, 12.7-13.2 mM, 12.8-13.3 mM, 12.9-13.4 mM, 13-13.5 mM, 13.1-13.6 mM, 13.2-13.7 mM, 13.3-13.8 mM, 13.4-13.9 mM, 13.5-14 mM, 13.6-14.1 mM, 13.7-14.2 mM, 13.8-14.3 mM, 13.9-14.4 mM, 14-14.5 mM, 14.1-14.6 mM, 14.2-14.7 mM, 14.3-14.8 mM, 14.4-14.9 mM, 14.5-15 mM, 0-1 mM, 1-2 mM, 2-3 mM, 3-4 mM, 4-5 mM, 5-6 mM, 6-7 mM, 7-8 mM, 8-9 mM, 9-10 mM, 10-11 mM, 11-12 mM, 12-13 mM, 13-14 mM, 14-15 mM, 15-16 mM, 0-2 mM, 1-3 mM, 2-4 mM, 3-5 mM, 4-6 mM, 5-7 mM, 6-8 mM, 7-9 mM, 8-10 mM, 9-11 mM, 10-12 mM, 11-13 mM, 12-14 mM, 13-15 mM, 0-3 mM, 1-4 mM, 2-5 mM, 3-6 mM, 4-7 mM, 5-8 mM, 6-9 mM, 7-10 mM, 8-11 mM, 9-12 mM, 10-13 mM, 11-14 mM, 12-15 mM, 0-4 mM, 1-5 mM, 2-6 mM, 3-7 mM, 4-8 mM, 5-9 mM, 6-10 mM, 7-11 mM, 8-12 mM, 9-13 mM, 10-14 mM, 11-15 mM, 0-5 mM, 1-6 mM, 2-7 mM, 3-8 mM, 4-9 mM, 5-10 mM, 6-11 mM, 7-12 mM, 8-13 mM, 9-14 mM, 10-15 mM, 0-6 mM, 1-7 mM, 2-8 mM, 3-9 mM, 4-10 mM, 5-11 mM, 6-12 mM, 7-13 mM, 8-14 mM, 9-15 mM, 0-7 mM, 1-8 mM, 2-9 mM, 3-10 mM, 4-11 mM, 5-12 mM, 6-13 mM, 7-14 mM, 8-15 mM, 0-8 mM, 1-9 mM, 2-10 mM, 3-11 mM, 4-12 mM, 5-13 mM, 6-14 mM, 7-15 mM, 0-9 mM, 1-10 mM, 2-11 mM, 3-12 mM, 4-13 mM, 5-14 mM, 6-15 mM, 0-10 mM, 1-11 mM, 2-12 mM, 3-13 mM, 4-14 mM, 5-15 mM, 0-11 mM, 1-12 mM, 2-13 mM, 3-14 mM, 4-15 mM, 0-12 mM, 1-13 mM, 2-14 mM, 3-15 mM, 0-13 mM, 1-14 mM, 2-15 mM, 0-14 mM, 1-15 mM, or 0-15 mM.

[0712] In some embodiments, the formulation may include 0-10 mM of sodium phosphate.

[0713] In some embodiments, the formulation may include 2-3 mM of sodium phosphate.

[0714] In some embodiments, the formulation may include 2.7 mM of sodium phosphate.

[0715] In some embodiments, the formulation may include 9-10 mM of sodium phosphate.

[0716] In some embodiments, the formulation may include 10-11 mM of sodium phosphate.

[0717] In some embodiments, the formulation may include 10 mM of sodium phosphate.

### Potassium Phosphate

[0718] In some embodiments, at least one of the components in the formulation is potassium phosphate. The formulation may include monobasic, dibasic or a combination of both monobasic and dibasic potassium phosphate.

[0719] In some embodiments, the concentration of potassium phosphate in a formulation may be, but is not limited to, 0.1 mM, 0.2 mM, 0.3 mM, 0.4 mM, 0.5 mM, 0.6 mM, 0.7 mM, 0.8 mM, 0.9 mM, 1 mM, 1.1 mM, 1.2 mM, 1.3 mM, 1.4 mM, 1.5 mM, 1.6 mM, 1.7 mM, 1.8 mM, 1.9 mM, 2 mM, 2.1 mM, 2.2 mM, 2.3 mM, 2.4 mM, 2.5 mM, 2.6 mM, 2.7 mM, 2.8 mM, 2.9 mM, 3 mM, 3.1 mM, 3.2 mM, 3.3 mM, 3.4 mM, 3.5 mM, 3.6 mM, 3.7 mM, 3.8 mM, 3.9 mM, 4 mM, 4.1 mM, 4.2 mM, 4.3 mM, 4.4 mM, 4.5 mM, 4.6 mM, 4.7 mM, 4.8 mM, 4.9 mM, 5 mM, 5.1 mM, 5.2 mM, 5.3 mM, 5.4 mM, 5.5 mM, 5.6 mM, 5.7 mM, 5.8 mM, 5.9 mM, 6 mM, 6.1 mM, 6.2 mM, 6.3 mM, 6.4 mM, 6.5 mM, 6.6 mM, 6.7 mM, 6.8 mM, 6.9 mM, 7 mM, 7.1 mM, 7.2 mM, 7.3 mM, 7.4 mM, 7.5 mM, 7.6 mM, 7.7 mM, 7.8 mM, 7.9 mM, 8 mM, 8.1 mM, 8.2 mM, 8.3 mM, 8.4 mM, 8.5 mM, 8.6 mM, 8.7 mM, 8.8 mM, 8.9 mM, 9 mM, 9.1 mM, 9.2 mM, 9.3 mM, 9.4 mM, 9.5 mM, 9.6 mM, 9.7 M, 9.8 M, 9.9 M, 10 mM, 10.1 mM, 10.2 mM, 10.3 mM, 10.4 mM, 10.5 mM, 10.6 mM, 10.7 mM, 10.8 mM, 10.9 mM, 11 mM, 11.1 mM, 11.2 mM, 11.3 mM, 11.4 mM, 11.5 mM, 11.6 mM, 11.7 mM, 11.8 mM, 11.9 mM, 12 mM, 12.1 mM, 12.2 mM, 12.3 mM, 12.4 mM, 12.5 mM, 12.6 mM, 12.7 mM, 12.8 mM, 12.9 mM, 13 mM, 13.1 mM, 13.2 mM, 13.3 mM, 13.4 mM, 13.5 mM, 13.6 mM, 13.7 mM, 13.8 mM, 13.9 mM, 14 mM, 14.1 mM, 14.2 mM, 14.3 mM, 14.4 mM, 14.5 mM, 14.6 mM, 14.7 mM, 14.8 mM, 14.9 mM or 15 mM.

[0720] The formulation may include potassium phosphate in a range of 0-0.5 mM, 0.1-0.6 mM, 0.2-0.7 mM, 0.3-0.8 mM, 0.4-0.9 mM, 0.5-1 mM, 0.6-1.1 mM, 0.7-1.2 mM, 0.8-1.3 mM, 0.9-1.4 mM, 1-1.5 mM, 1.1-1.6 mM, 1.2-1.7 mM, 1.3-1.8 mM, 1.4-1.9 mM, 1.5-2 mM, 1.6-2.1 mM, 1.7-2.2 mM, 1.8-2.3 mM, 1.9-2.4 mM, 2-2.5 mM, 2.1-2.6 mM, 2.2-2.7 mM, 2.3-2.8 mM, 2.4-2.9 2.5-3 mM, 2.6-3.1 mM, 2.7-3.2 mM, 2.8-3.3 mM, 2.9-3.4 mM, 3-3.5 mM, 3.1-3.6 mM, 3.2-3.7 mM, 3.3-3.8 mM, 3.4-3.9 mM, 3.5-4 mM, 3.6-4.1 mM, 3.7-4.2 mM, 3.8-4.3 mM, 3.9-4.4 mM, 4-4.5 mM, 4.1-4.6 mM, 4.2-4.7 mM, 4.3-4.8 mM, 4.4-4.9 mM, 4.5-5 mM, 4.6-5.1 mM, 4.7-5.2 mM, 4.8-5.3 mM, 4.9-5.4 mM, 5-5.5 mM, 5.1-5.6 mM, 5.2-5.7 mM, 5.3-5.8 mM, 5.4-5.9 mM, 5.5-6 mM, 5.6-6.1 mM, 5.7-6.2 mM, 5.8-6.3 mM, 5.9-6.4 mM, 6-6.5 mM, 6.1-6.6 mM, 6.2-6.7 mM, 6.3-6.8 mM, 6.4-6.9 mM, 6.5-7 mM, 6.6-7.1 mM, 6.7-7.2 mM, 6.8-7.3 mM, 6.9-7.4 mM, 7-7.5 mM, 7.1-7.6 mM, 7.2-7.7 mM, 7.3-7.8 mM, 7.4-7.9 mM, 7.5-8 mM, 7.6-8.1 mM, 7.7-8.2 mM, 7.8-8.3 mM, 7.9-8.4 mM, 8-8.5 mM, 8.1-8.6 mM, 8.2-8.7 mM, 8.3-8.8 mM, 8.4-8.9 mM, 8.5-9 mM, 8.6-9.1 mM, 8.7-9.2 mM, 8.8-9.3 mM, 8.9-9.4 mM, 9-9.5 mM, 9.1-9.6 mM, 9.2-9.7 mM, 9.3-9.8 mM, 9.4-9.9 mM, 9.5-10 mM, 9.6-10.1 mM, 9.7-10.2 mM, 9.8-10.3 mM, 9.9-10.4 mM, 10-10.5 mM, 10.1-10.6 mM, 10.2-10.7 mM, 10.3-10.8 mM, 10.4-10.9 mM, 10.5-11 mM, 10.6-11.1 mM, 10.7-11.2 mM, 10.8-11.3 10.9-11.4 mM, 11-11.5 11.1-11.6 mM, 11.2-11.7 mM, 11.3-11.8 mM, 11.4-11.9 mM, 11.5-12 mM, 11.6-12.1 mM, 11.7-12.2 mM, 11.8-12.3 mM, 11.9-12.4 mM, 12-12.5 mM, 12.1-12.6 mM, 12.2-12.7 mM, 12.3-12.8 mM, 12.4-12.9 mM, 12.5-13 mM, 12.6-13.1 mM, 12.7-13.2 mM, 12.8-13.3 mM, 12.9-13.4 mM, 13-13.5 mM, 13.1-13.6 mM, 13.2-13.7 mM, 13.3-13.8 mM, 13.4-13.9 mM, 13.5-14 mM, 13.6-14.1 mM, 13.7-14.2 mM, 13.8-14.3 mM, 13.9-14.4 mM, 14-14.5 mM, 14.1-14.6 mM, 14.2-14.7 mM, 14.3-14.8 mM, 14.4-14.9 mM, 14.5-15 mM, 0-1 mM, 1-2 mM, 2-3 mM, 3-4 mM, 4-5 mM, 5-6 mM, 6-7 mM, 7-8 mM, 8-9 mM,9-10 mM, 10-11. mM, 11-12 mM, 12-13 mM, 13-14 mM,14-15 mM, 15-16 mM, 0-2 mM, 1-3 mM, 2-4 mM, 3-5 mM, 4-6 mM, 5-7 mM, 6-8 mM, 7-9 mM, 8-10 mM, 9-11 mM., 10-12 mM, 11-13 mM, 12-14 mM, 13-15 mM, 0-3 mM., 1-4 mM, 2-5 mM, 3-6 mM, 4-7 mM, 5-8 mM, 6-9 mM, 7-10 mM, 8-11 mM, 9-12 mM, 10-13 mM, 11-14 mM, 12-15 mM, 0-4 mM, 1-5 mM, 2-6 mM, 3-7 mM, 4-8 mM, 5-9 mM, 6-10 mM, 7-11 mM, 8-12 mM 9-13 mM, 10-14 mM, 11-15 mM, 0-5 mM, 1-6 mM, 2-7 mM, 3-8 mM, 4-9 mM, 5-10 mM, 6-11 mM, 7-12 mM, 8-13 mM, 9-14 mM, 10-15 mM, 0-6 mM, 1-7 mM, 2-8 mM, 3-9 mM, 4-10 mM, 5-11 mM, 6-12 mM, 7-13 mM, 8-14 mM, 9-15 mM, 0-7 mM, 1-8 mM, 2-9 mM, 3-10 mM, 4-11 mM, 5-12 mM, 6-13 mM, 7-14 mM, 8-15 mM, 0-8 mM, 1-9 mM, 2-10 mM, 3-11 mM, 4-12 mM, 5-13 mM, 6-14 mM, 7-15 mM, 0-9 mM, 1-10 mM, 2-11 mM, 3-12 mM, 4-13 mM, 5-14 mM, 6-15 mM, 0-10 mM, 1-11 mM, 2-12 mM, 3-13 mM, 4-14 mM, 5-15 mM, 0-11 mM, 1-12 mM, 2-13 mM, 3-14 mM, 4-15 mM, 0-12 mM, 1-13 mM, 2-14 mM, 3-15 mM, 0-13 mM, 1-14 mM, 2-15 mM, 0-14 mM, 1-15 mM, or 0-15 mM.

[0721] In some embodiments, the formulation may include 0-10 mM of potassium phosphate.

[0722] In some embodiments, the formulation may include 1-3 mM of potassium phosphate.

[0723] In some embodiments, the formulation may include 1-2 mM of potassium phosphate.

[0724] In some embodiments, the formulation may include 2-3 mM of potassium phosphate.

[0725] In some embodiments, the formulation may include 1.5 mM of potassium phosphate. In some embodiments, the formulation may include 1.54 mM of potassium phosphate.

[0726] In some embodiments, the formulation may include 2 mM of potassium phosphate.

### Sodium Chloride

[0727] In some embodiments, at least one of the components in the formulation is sodium chloride.

[0728] In some embodiments, the concentration of sodium chloride in a formulation may be, but is not limited to, 75 mM, 76 mM, 77 mM, 78 mM, 79 mM, 80 mM, 81 mM, 82 mM, 83 mM, 84 mM, 85 mM, 86 mM, 87 mM, 88 mM, 89 mM, 90 mM, 91 mM, 92 mM, 93 mM, 94 mM, 95 mM, 96 mM, 97 mM, 98 mM, 99 mM, 100 mM, 101 mM, 102 mM, 103 mM, 104 mM, 105 mM, 106 mM, 107 mM, 108 mM, 109 mM, 110 mM, 111 mM, 112 mM, 113 mM, 114 mM, 115 mM, 116 mM, 117 mM, 118 mM, 119 mM, 120 mM, 121 mM, 122 mM, 123 mM, 124 mM, 125 mM, 126 mM, 127 mM, 128 mM, 129 mM, 130 mM, 131 mM, 132 mM, 133 mM, 1.34 mM, 135 mM, 136 mM, 137 mM, 138 mM, 139 mM, 140 mM, 141 mM, 142 mM, 143 mM, 144 mM, 145 mM, 146 mM, 147 mM, 148 mM, 149 mM, 150 mM, 151 mM, 152 mM, 153 mM, 154 mM, 155 mM, 156 mM, 157 mM, 158 mM, 159 mM, 160 mM, 161 mM, 162 mM, 163 mM, 164 mM, 165 mM, 166 mM, 167 mM, 168 mM, 169 mM, 170 mM, 171 mM, 172 mM, 173 mM, 174 mM, 175 mM, 176 mM, 177 mM, 178 mM, 179 mM, 180 mM, 181 mM, 182 mM, 183 mM, 184 mM, 185 mM, 186 mM, 187 mM, 188 mM, 189 mM, 190 mM, 191 mM, 192 mM, 193 mM, 194 mM, 195 mM, 196 mM, 197 mM, 198 mM, 199 mM, 200 mM, 201 mM, 202 mM, 203 mM, 204 mM, 205 mM, 206 mM, 207 mM, 208 mM, 209 mM, 210 mM, 211 mM, 212 mM, 213 mM, 214 mM, 215 mM, 216 mM, 217 mM, 218 mM, 219 mM, or 220 mM.

[0729] The formulation may include sodium chloride in a range of 75-85 mM, 80-90 mM, 85-95 mM, 90-100 mM, 95-105 mM, 100-110 mM, 105-115 mM, 110-120 mM, 115-125 mM, 120-130 mM, 125-135 mM, 130-140 mM, 135-145 mM, 140-150 mM, 145-155 mM, 150-160 mM, 155-165 mM, 160-170 mM, 165-175 mM, 170-180 mM, 175-185 mM, 180-190 mM, 185-195 mM, 190-200 mM, 75-95 mM, 80-100 mM, 85-105 mM, 90-110 mM, 95-115 mM, 100-120 mM, 105-125 mM, 110-130 mM, 115-135 mM, 120-140 mM, 125-145 mM, 130-150 mM, 135-155 mM, 140-160 mM, 145-165 mM, 150-170 mM, 155-175 mM, 160-180 mM, 165-185 mM, 170-190 mM, 175-195 mM, 180-200 mM, 75-100 mM, 80-105 mM, 85-110 mM, 90-115 mM, 95-120 mM, 100-125 mM, 105-130 mM, 110-135 mM, 115-140 mM, 120-145 mM, 125-150 mM, 130-155 mM, 135-160 mM, 140-165 mM, 145-170 mM, 150-175 mM, 155-180 mM, 160-185 mM, 165-190 mM, 170-195 mM, 175-200 mM, 75405 mM, 80-110 mM, 85-115 mM, 90-120 mM, 95-125 mM, 100-130 mM, 105-135 mM, 110-140 mM, 115-145 mM, 120-150 mM, 125-155 mM, 130-160 mM, 135-165 mM, 140-170 mM, 145-175 mM, 150-180 mM, 155-185 mM, 160-190 mM, 165-195 mM, 170-200 mM, 75-115 mM, 80-120 mM, 85-125 mM, 90-130 mM, 95-135 mM, 100-140 mM, 105-145 mM, 110-150 mM, 115-155 mM, 120-160 mM, 125-165 mM, 130-170 mM, 135-175 mM, 140-180 mM, 145-185 mM, 150-190 mM, 155-195 mM, 160-200 mM, 75-120 mM, 80-125 mM, 85-130 mM, 90-135 mM, 95-140 mM, 100-145 mM, 105-150 mM, 110-155 mM, 115-160 mM, 120-165 mM, 125-170 mM, 130-175 mM, 135-180 mM, 140-185 mM, 145-190 mM, 150-195 mM, 155-200 mM, 75-125 mM, 80-130 mM, 85-135 mM, 90-140 mM, 95-145 mM, 100-150 mM, 105-155 mM, 110-160 mM, 115-165 mM, 120-170 mM, 125-175 mM, 130-180 mM, 135-185 mM, 140-190 mM, 145-195 mM, 150-200 mM, 75-125 mM, 80-130 mM, 85-135 mM, 90-140 mM, 95-145 mM, 100-150 mM, 105-155 mM, 110-160 mM, 115-165 mM, 120-170 mM, 125-175 mM, 130-180 mM, 135-185 mM, 140-190 mM, 145-195 mM, 150-200 mM, 75-135 mM, 80-140 mM, 85-145 mM, 90-150 mM, 95-155 mM, 100-160 mM, 105-165 mM, 110-170 mM, 115-175 mM, 120-180 mM, 125-185 mM, 130-190 mM, 135-195 mM, 140-200 mM, 75-145 mM, 80-150 mM, 85-155 mM, 90-160 mM, 95-165 mM, 100-170 mM, 105-175 mM, 110-180 mM, 115-185 mM, 120-190 mM, 125-195 mM, 130-200 mM, 75-155 mM, 80-160 mM, 85-165 mM, 90-170 mM, 95-175 mM, 100-180 mM, 105-185 mM, 110-190 mM, 115-195 mM, 120-200 mM, 75-165 mM, 80-170 mM, 85-175 mM, 90-180 mM, 95-185 mM, 100-190 mM, 105-195 mM, 110-200 mM, 75-175 mM, 80-180 mM, 85-185 mM, 90-190 mM, 95-195 mM, 100-200 mM, 80-220 mM, 90-220 mM, 100-220 mM, 110-220 mM, 120-220 mM, 130-220 mM, 140-220 mM, 150-220 mM, 160-220 mM, 170-220 mM, 180-220 mM, 190-220 mM, 200-220 mM, or 210-220 mM.

[0730] In some embodiments, the formulation may include 80-220 mM of sodium chloride.

[0731] In some embodiments, the formulation may include 80-150 mM of sodium chloride.

[0732] In some embodiments, the formulation may include 75 mM of sodium chloride.

[0733] in some embodiments, the formulation may include 83 mM of sodium chloride.

[0734] In some embodiments, the formulation may include 92 mM of sodium chloride.

[0735] In some embodiments, the formulation may include 95 mM of sodium chloride.

[0736] In some embodiments, the formulation may include 98 mM of sodium chloride

[0737] In some embodiments, the formulation may include 100 mM, of sodium chloride.

[0738] In some embodiments, the formulation may include 107 mM of sodium chloride.

[0739] In some embodiments, the formulation may include 109 mM of sodium chloride.

[0740] In some embodiments, the formulation may include 118 mM of sodium chloride.

[0741] In some embodiments, the formulation may include 125 mM of sodium chloride.

[0742] In some embodiments, the formulation may include 127 m41 of sodium chloride.

[0743] In some embodiments, the formulation may include 133 mM of sodium chloride.

[0744] In some embodiments, the formulation may include 142 in4i of sodium chloride.

[0745] In some embodiments, the formulation may include 150 moi of sodium chloride

[0746] In some embodiments, the formulation may include 155 mM of sodium chloride.

[0747] In some embodiments, the formulation may include 192 mM of sodium chloride.

[0748] In some embodiments, the formulation may include 210 mM of sodium chloride.

Potassium chloride

[0749] In some embodiments, at least one of the components in the formulation is potassium chloride.

[0750] In some embodiments, the concentration of potassium chloride in a formulation may be, but is not limited to, 0.1 mM, 0.2 mM, 0.3 mM, 0.4 mM, 0.5 mM, 0.6 mM, 0.7 mM, 0.8 mM, 0.9 mM, 1 mM, 1.1 mM, 1.2 mM, 1.3 mM, 1.4 mM, 1.5 mM, 1.6 mM, 1.7 mM, 1.8 mM, 1.9 mM, 2 mM, 2.1 mM, 2.2 mM, 2.3 mM, 2.4 mM, 2.5 mM, 2.6 mM, 2.7 mM, 2.8 mM, 2.9 mM, 3 mM, 3.1 mM, 3.2 mM, 3.3 mM, 3.4 mM, 3.5 mM, 3.6 mM, 3.7 mM, 3.8 mM, 3.9 mM, 4 mM, 4.1 mM, 4.2 mM, 4.3 mM, 4.4 mM, 4.5 mM, 4.6 mM, 4.7 mM, 4.8 mM, 4.9 mM, 5 mM, 5.1 mM, 5.2 mM, 5.3 mM, 5.4 mM, 5.5 mM, 5.6 M, 5.7 mM, 5.8 mM, 5.9 mM, 6 mM, 6.1 mM, 6.2 mM, 6.3 mM, 6.4 mM, 6.5 mM, 6.6 mM, 6.7 mM, 6.8 mM, 6.9 mM, 7 mM, 7.1 mM, 7.2 mM, 7.3 mM, 7.4 mM, 7.5 mM, 7.6 mM, 7.7 mM, 7.8 mM, 7.9 mM, 8 mM, 8.1 mM, 8.2 mM, 8.3 mM, 8.4 mM, 8.5 mM, 8.6 mM, 8.7 mM, 8.8 mM, 8.9 mM, 9 mM, 9.1 mM, 9.2 mM, 9.3 mM, 9.4 mM, 9.5 mM, 9.6 mM, 9.7 mM, 9.8 mM, 9.9 mM, 10 mM, 10.1 mM, 10.2 mM, 10.3 mM, 10.4 mM, 10.5 mM, 10.6 mM, 10.7 mM, 10.8 mM, 10.9 mM, 11 mM, 11.1 mM, 11.2 mM, 11.3 mM, 11.4 mM, 11.5 mM, 11.6 mM, 11.7 mM, 11.8 mM, 11.9 mM, 12 mM, 12.1 mM, 12.2 mM, 12.3 mM, 12.4 mM, 12.5 mM, 12.6 mM, 12.7 mM, 12.8 mM, 12.9 mM, 13 mM, 13.1 mM, 13.2 mM, 13.3 mM, 13.4 mM, 13.5 mM, 13.6 mM, 13.7 mM, 13.8 mM, 13.9 mM, 14 mM, 14.1 mM, 14.2 mM, 14.3 mM, 14.4 mM, 14.5 mM, 14.6 mM, 14.7 mM, 14.8 mM, 14.9 mM or 15 mM.

[0751] The formulation may include potassium chloride in a range of 0-0.5 mM, 0.1-0.6 mM, 0.2-0.7 mM, 0.3-0.8 mM, 0.4-0.9 mM, 0.5-1 mM, 0.6-1.1 mM, 0.7-1.2 mM, 0.8-1.3 mM, 0.9-1.4 mM, 1-1.5 mM, 1.1-1.6 mM, 1.2-1.7 mM, 1.3-1.8 mM, 1.4-1.9 mM, 1.5-2 mM, 1.6-2.1 mM, 1.7-2.2 mM, 1.8-2.3 mM, 1.9-2.4 mM, 2-2.5 mM, 2.1-2.6 mM, 2.2-2.7 mM, 2.3-2.8 mM, 2.4-2.9 mM, 2.5-3 mM, 2.6-3.1 mM, 2.7-3.2 mM, 2.8-3.3 mM, 2.9-3.4 mM, 3-3.5 mM, 3.1-3.6 mM, 3.2-3.7 mM, 3.3-3.8 mM, 3.4-3.9 mM, 3.5-4 mM, 3.6-4.1 mM, 3.7-4.2 mM, 3.8-4.3 mM, 3.9-4.4 mM, 4-4.5 mM, 4.1-4.6 mM, 4.2-4.7 mM, 4.3-4.8 mM, 4.4-4.9 mM, 4.5-5 mM, 4.6-5.1 mM, 4.7-5.2 mM, 4.8-5.3 mM, 4.9-5.4 mM, 5-5.5 mM, 5.1-5.6 mM, 5.2-5.7 mM, 5.3-5.8 mM, 5.4-5.9 mM, 5.5-6 mM, 5.6-6.1 mM, 5.7-6.2 mM, 5.8-6.3 mM, 5.9-6.4 mM, 6-6.5 mM, 6.1-6.6 mM, 6.2-6.7 mM, 6.3-6.8 mM, 6.4-6.9 mM, 6.5-7 mM, 6.6-7.1 mM, 6.7-7.2 mM, 6.8-7.3 mM, 6.9-7.4 mM, 7-7.5 mM, 7.1-7.6 mM, 7.2-7.7 mM, 7.3-7.8 mM, 7.4-7.9 mM, 7.5-8 mM, 7.6-8.1 mM, 7.7-8.2 mM, 7.8-8.3 mM, 7.9-8.4 mM, 8-8.5 mM, 8.1-8.6 mM, 8.2-8.7 mM, 8.3-8.8 mM, 8.4-8.9 mM, 8.5-9 mM, 8.6-9.1 mM, 8.7-9.2 mM, 8.8-9.3 mM, 8.9-9.4 mM, 9-9.5 mM, 9.1-9.6 mM, 9.2-9.7 mM, 9.3-9.8 mM, 9.4-9.9 mM, 9.5-10 mM, 9.6-10.1 mM, 9.7-10.2 mM, 9.8-10.3 mM, 9.9-10.4 mM, 10-10.5 mM, 10.1-10.6 mM, 10.2-10.7 mM, 10.3-10.8 mM, 10.4-10.9 mM, 10.5-11 mM, 10.6-11.1 mM, 10.7-11.2 mM, 10.8-11.3 mM, 10.9-11.4 mM, 11-11.5 mM, 11.1-11.6 mM, 11.2-11.7 mM, 11.3-11.8 mM, 11.4-11.9 mM, 11.5-12 mM, 11.6-12.1 mM, 11.7-12.2 mM, 11.8-12.3 mM, 11.9-12.4 mM, 12-12.5 mM, 12.1-12.6 mM, 12.2-12.7 mM, 12.3-12.8 mM, 12.4-12.9 mM, 12.5-13 mM, 12.6-13.1 mM, 12.7-13.2 mM, 12.8-13.3 mM, 12.9-13.4 mM, 13-13.5 mM, 13.1-13.6 mM, 13.2-13.7 mM, 13.3-13.8 mM, 13.4-13.9 mM, 13.5-14 mM, 13.6-14.1 mM, 13.7-14.2 mM, 13.8-14.3 mM, 13.9-14.4 mM, 14-14.5 mM, 14.1-14.6 mM, 14.2-14.7 mM, 14.3-14.8 mM, 14.4-14.9 mM, 14.5-15 mM, 0-1 mM, 1-2 mM, 2-3 mM, 3-4 mM, 4-5 mM, 5-6 mM, 6-7 mM, 7-8 mM, 8-9 mM, 9-10 mM, 10-11 mM, 11-12 mM, 12-13 mM, 13-14 mM, 14-15 mM, 15-16 mM, 0-2 mM, 1-3 mM, 2-4 mM, 3-5 mM, 4-6 mM, 5-7 mM, 6-8 mM, 7-9 mM, 8-10 mM, 9-11 mM, 10-12 mM, 11-13 mM, 12-14 mM, 13-15 mM, 0-3 mM, 1-4 mM, 2-5 mM, 3-6 mM, 4-7 mM, 5-8 mM, 6-9 mM, 7-10 mM, 8-11 mM, 9-12 mM, 10-13 mM, 11-14 mM, 12-15 mM, 0-4 mM, 1-5 mM, 2-6 mM, 3-7 mM, 4-8 mM, 5-9 mM, 6-10 mM, 7-11 mM, 8-12 mM, 9-13 mM, 10-14 mM, 11-15 mM, 0-5 mM, 1-6 mM, 2-7 mM, 3-8 mM, 4-9 mM, 5-10 mM, 6-11 mM, 7-12 mM, 8-13 mM, 9-14 mM, 10-15 mM, 0-6 mM, 1-7 mM, 2-8 mM, 3-9 mM, 4-10 mM, 5-11 mM, 6-12 mM, 7-13 mM, 8-14 mM, 9-15 mM, 0-7 mM, 1-8 mM, 2-9 mM, 3-10 mM, 4-11 mM, 5-12 mM, 6-13 mM, 7-14 mM, 8-15 mM, 0-8 mM, 1-9 mM, 2-10 mM, 3-11 mM, 4-12 mM, 5-13 mM, 6-14 mM, 7-15 mM, 0-9 mM, 1-10 mM, 2-11 mM, 3-12 mM, 4-13 mM, 5-14 mM, 6-15 mM, 0-10 mM, 1-11 mM, 2-12 mM, 3-13 mM, 4-14 mM, 5-15 mM, 0-11 mM, 1-12 mM, 2-13 mM, 3-14 mM, 4-15 mM, 0-12 mM, 1-13 mM, 2-14 mM, 3-15 mM, 0-13 mM, 1-14 mM, 2-15 mM, 0-14 mM, 1-15 mM, or 0-15 mM.

[0752] In some embodiments, the formulation may include 0-10 mM of potassium chloride.

[0753] In some embodiments, the formulation may include 1-3 ml-f of potassium chloride.

[0754] In some embodiments, the formulation may include 1-2 mM of potassium chloride.

[0755] In some embodiments, the formulation may include 2-3 mM of potassium chloride.

[0756] In some embodiments, the formulation may include 1.5 mM of potassium chloride.

[0757] In some embodiments, the formulation may include 2.7 moi of potassium chloride.

### Magnesium Chloride

[0758] In some embodiments, at least one of the components in the formulation is magnesium chloride.

[0759] In some embodiments, the concentration of magnesium chloride may be, but is not limited to, 1 mM, 2 mM, 3 mM, 4 mM, 5 mM, 6 mM, 7 mM, 8 mM, 9 mM, 10 mM, 11 mM, 12 mM, 13 mM, 14 mM, 15 mM, 16 mM, 17 mM, 18 mM, 1.9 mM, 20 mM, 21 mM, 22 mM, 23 mM, 24 mM, 25 mM, 26 mM, 27 mM, 28 mM, 29 mM, 30 mM, 31 mM, 32 mM, 33 mM, 34 mM, 35 mM, 36 mM, 37 mM, 38 mM, 39 mM, 40 mM, 41 mM, 42 mM, 43 mM, 44 mM, 45 mM, 46 mM, 47 mM, 48 mM, 49 mM, 50 mM, 51 mM, 52 mM, 53 mM, 54 mM, 55 mM, 56 mM, 57 mM, 58 mM, 59 mM, 60 mM, 61 mM, 62 mM, 63 mM, 64 mM, 65 mM, 66 mM, 67 mM, 68 mM, 69 mM, 70 mM, 71 mM, 72 mM, 73 mM, 74 mM, 75 mM, 76 mM, 77 mM, 78 mM, 79 mM, 80 mM, 81 mM, 82 mM, 83 mM, 84 mM, 85 mM, 86 mM, 87 mM, 88 mM, 89 mM, 90 mM, 91 mM, 92 mM, 93 mM, 94 mM, 95 mM, 96 mM, 97 mM, 98 mM, 99 mM, or 100 mM.

[0760] The formulation may include magnesium chloride in a range of 0-5 mM, 1-5 mM, 2-5 mM, 3-5 mM, 4-5 mM, 0-10 mM, 1-10 mM, 2-10 mM, 3-10 mM, 4-10 mM, 5-10 mM, 6-10 mM, 7-10 mM, 8-10 mM, 9-10 mM, 0-25 mM, 1-25 mM, 2-25 mM, 3-25 mM, 4-25 mM, 5-25 mM, 6-25 mM,7-25 mM, 8-25 mM, 9-25 mM, 10-25 mM,11-25 mM, 12-25 mM, 13-25 mM, 14-25 mM, 15-25 mM, 16-25 mM, 17-25 mM, 18-25 mM, 19-25 mM, 20-25 mM, 21-25 mM, 22-25 mM, 23-25 mM, 24-25 mM, 0-50 mM, 1-50 mM, 2-50 mM, 3-50 mM, 4-50 mM, 5-50 mM, 6-50 mM, 7-50 mM, 8-50 mM, 9-50 mM, 10-50 mM, 11-50 mM, 12-50 mM, 13-50 mM, 14-50 mM,15-50 mM, 16-50 mM, 17-50 mM, 18-50 mM, 19-50 mM, 20-50 mM, 21-50 mM, 22-50 mM, 23-50 mM, 24-50 mM, 25-50 mM, 26-50 mM, 27-50 mM, 28-50 mM, 29-50 mM, 30-50 mM, 31-50 mM, 32-50 mM, 33-50 mM, 34-50 mM, 35-50 mM, 36-50 mM, 37-50 mM, 38-50 mM, 39-50 mM, 40-50 mM, 41-50 mM, 42-50 mM, 43-50 mM, 44-50 mM, 45-50 mM, 46-50 mM, 47-50 mM, 48-50 mM, 49-50 mM, 0-75 mM, 1-75 mM, 2-75 mM, 3-75 mM, 4-75 mM, 5-75 mM, 6-75 mM, 7-75 mM, 8-75 mM, 9-75 mM, 10-75 mM, 11-75 mM, 12-75 mM, 13-75 mM, 14-75 mM, 15-75 mM, 16-75 mM, 17-75 mM, 18-75 mM, 19-75 mM, 20-75 mM, 21-75 mM, 22-75 mM, 23-75 mM, 24-75 mM, 25-75 mM, 26-75 mM, 27-75 mM, 28-75 mM, 29-75 mM, 30-75 mM, 31-75 mM, 32-75 mM, 33-75 mM, 34-75 mM, 35-75 mM, 36-75 mM, 37-75 mM, 38-75 mM, 39-75 mM, 40-75 mM, 41-75 mM, 42-75 mM, 43-75 mM, 44-75 mM, 45-75 mM, 46-75 mM, 47-75 mM, 48-75 mM, 49-75 mM, 50-75 mM, 51-75 mM, 52-75 mM, 53-75 mM, 54-75 mM, 55-75 mM, 56-75 mM, 57-75 mM, 58-75 mM, 59-75 mM, 60-75 mM, 61-75 mM, 62-75 mM, 63-75 mM, 64-75 mM, 65-75 mM, 66-75 mM, 67-75 mM, 68-75 mM, 69-75 mM, 70-75 mM, 71-75 mM, 72-75 mM, 73-75 mM, 74-75 mM, 50-100 mM, 60-100 mM, 75-100 mM, 80-100 mM, or 90-100 mM.

### Sugar

[0761] In some embodiments, the formulation may include at least one sugar and/or sugar substitute.

[0762] In some embodiments, the formulation may include at least one sugar and/or sugar substitute to increase the stability of the formulation. This increase in stability may provide longer hold times for in-process pools, provide a longer “shelf-life”, increase the concentration of AAV particles in solution (e.g., the formulation is able to have higher concentrations of AAV particles without rAAV dropping out of the solution) and/or reduce the generation or formation of aggregation in the formulations.

[0763] In some embodiments, the inclusion of at least one sugar and/or sugar substitute in the formulation may increase the stability of the formulation by 1%, 2%, 3%, 4%, 5%, 10%, 15%, 20%, 25%, 30%, 35%, 40%, 45%, 50%, 55%, 60%, 65%, 70%, 75%, 80%, 85%, 90%, 95%, or more than 95%, 1-5%, 5-15%, 5-20%, 5-25%, 5-30%, 5-35%, 5-40%, 5-45%, 5-50%, 5-55%, 5-60%, 5-65%, 5-70%, 5-75%, 5-80%, 5-85%, 5-90%, 5-95%, 10-20%, 10-25%, 10-30%, 10-35%, 10-40%, 10-45%, 10-50%, 10-55%, 10-60%, 10-65%, 10-70%, 10-75%, 10-80%, 10-85%, 10-90%, 10-95%, 15-25%, 15-30%, 15-35%, 15-40%, 15-45%, 15-50%, 15-55%, 15-60%, 15-65%, 15-70%, 15-75%, 15-80%, 15-85%, 15-90%, 15-95%, 20-30%, 20-35%, 20-40%, 20-45%, 20-50%, 20- 55%, 20-60%, 20-65%, 20-70%, 70-75%, 70-80%, 70-85%, 70-90%, 20-95%, 25-35%, 25-40%, 25-45%, 25-50%, 25-55%, 25-60%, 25-65%, 25-70%, 25-75%, 25-80%, 25-85%, 25-90%, 25- 95%, 30-40%, 30-45%, 30-50%, 30-55%, 30-60%, 30-65%, 30-70%, 30-75%, 30-80%, 30-85%, 30-90%, 30-95%, 35-45%, 35-50%, 35-55%, 35-60%, 35-65%, 35-70%, 35-75%, 35-80%, 35-85%, 35-90%, 35-95%, 40-50%, 40-55%, 40-60%, 40-65%, 40-70%, 40-75%, 40-80%, 40-85%, 40-90%, 40-95%, 45-55%, 45-60%, 45-65%, 45-70%, 45-75%, 45-80%, 45-85%, 45-90%, 45-95%, 50-60%, 50-65%, 50-70%, 50-75%, 50-80%, 50-85%, 50-90%, 50-95%, 55-65%, 55-70%, 55-75%, 55-80%, 55-85%, 55-90%, 55-95%, 60-70%, 60-75%, 60-80%, 60-85%, 60-90%, 60-95%, 65-75%, 65-80%, 65-85%, 65-90%, 65-95%, 70-80%, 70-85%, 70-90%, 70-95%, 75-85%, 75-90%, 75-95%, 80-90%, 80-95%, or 90-95% as compared to the same formulation without the sugar and/or sugar substitute.

[0764] In some embodiments, the sugar and/or sugar substitute is used in combination with a phosphate buffer for increased stability. The combination of the sugar and/or sugar substitute with the phosphate butter may increase stability by 1%, 2%, 3%, 4%, 5%, 10%, 15%, 20%, 25%, 30%, 35%, 40%, 45%, 50%, 55%, 60%, 65%, 70%, 75%, 80%, 85%, 90%, 95%, or more than 95%, 1-5%, 5-15%, 5-20%, 5-25%, 5-30%, 5-35%, 5-40%, 5-45%, 5-50%, -55%, 5-60%, 5-65%, 5-70%, 5-75%, 5-80%, 5-85%, 5-90%, 5-95%, 10-20%, 10-25%, 10-30%, 10-35%, 10-40%, 10-45%, 10-50%, 10-55%, 10-60%, 10-65%, 10-70%, 10-75%, 10-80%, 10-85%, 10-90%, 10-95%, 15-25%, 15-30%, 15-35%, 15-40%, 15-45%, 15-50%, 15-55%, 15-60%, 15-65%, 15-70%, 15-75%, 15-80%, 15-85%, 15-90%, 15-95%, 20-30%, 20-35%, 20-40%, 20-45%, 20-50%, 20-55%, 20-60%, 20-65%, 20-70%, 20-75%, 20-80%, 20-85%, 20-90%, 20-95° 0.25-35%, 25-40%, 25-45%, 25-50%, 25-55%, 25-60%, 25-65%, 25-70%, 25-75%, 25-80%, 25-85%, 25-90%, 25-95%, 30-40%, 30-45%, 30-50%, 30-55%, 30-60%, 30-65%, 30-70%, 30-75%, 30-80%, 30-85%, 30-90%, 30-95%, 35-45%, 35-50%, 35-55%, 35-60%, 35-65%, 35-70%, 35-75%, 35-80%, 35-85%, 35-90%, 35-95%, 40-50%, 40-55%, 40-60%, 40-65%, 40-70%, 40-75%, 40-80%, 40-85%, 40-90%, 40-95%, 45-55%, 45-60%, 45-65%, 45-70%, 45-75%, 45-80%, 45-85%, 45-90%, 15-95%, 50-60%, 50-65%, 50-70%, 50-75%, 50-80%, 50-85%, 50-90%, 50-95%, 55-65%, 55-70%, 55-75%, 55-80%, 55-85%, 55-90%, 55-95%, 60-70%, 60-75%, 60-80%, 60-85%, 60-90%, 60-95%, 65-75%, 65-80%, 65-85%, 65-90%, 65-95%, 70-80%, 70-85%, 70-90%, 70-95%, 75-85%, 75-90%, 75-95%, 80-90%, 80-95%, or 90-95% as compared to the same formulation without the sugar and/or sugar substitute. As a non-limiting example, the sugar is sucrose.

[0765] In some embodiments, formulations of pharmaceutical compositions described herein may comprise a disaccharide. Suitable disaccharides that may be used in the formulation described herein may include sucrose, lactulose, lactose, maltose, trehalose, cellobiose, chitobiose, kojibiose, nigerose, isomaltose. β,β-trehalose, α,β-trehalose, sophorose, laminaribiose, gentiobiose, turanose, maltulose, palatinose, gentiobiulose, mannobiose, melibiose, melibiulose, rutinose, rutinulose, and xylobiose. The concentration of disaccharide (w/v) used in the formulation may be between 1%-15%, for example, between 1%-5%, between 3%-6%, between 5%-8%, between 7%-10%, or between 10%-15%,

[0766] In some embodiments, the formulation may include at least one disaccharide which is sucrose.

[0767] In some embodiments, the formulation may include sucrose at 0.1%, 0.2%, 0.3%, 0.4%, 0.5%, 0.6%, 0.7%, 0.8%, 0.9%, 1%, 1.1%, 1.2%, 1.3%, 1.5%, 1.6%, 1.7%, 1.8%, 1.9%, 2%, 2.1%, 2.2%, 2.3%, 2.4%, 2.5%, 2.6%, 2.7%, 2.8%, 2.9%, 3%, 3.1%, 3.2%, 3.3%, 3.4%, 3.5%, 3.6%, 3.7%, 3.8%, 3.9%, 4.0%, 4.1%, 4.2%, 4.3%, 4.4%, 4.5%, 4.6%, 4.7%, 4.8%, 4.9%, 5%, 5.1%, 5.2%, 5.3%, 5.4%, 5.5%, 5.6%, 5.7%, 5.8%, 5.9%, 6%, 6.1%, 6,2%, 6.3%, 6.4%, 6.6%, 6.7%, 6.8%, 6.9%, 7%, 7.1%, 7.2%, 7.3%, 7.4%, 7.5%, 7.6%, 7.7%, 7.8%, 7.9%, 8%, 8.1%, 8.2%, 8.3%, 8.4%, 8.5%, 8.6%, 8.7%, 8.8%, 8.9%, 9%, 9.1%, 9.2%, 9.3%, 9.4%, 9.5%, 9.6%, 9.7%, 9.8%, 9.9%, or 10% w/v.

[0768] In some embodiments, the formulation may include sucrose in a range of 0-1%, 0.1-1%, 0.2-1%, 0.3-1%, 0.4-1%, 0.5-1%, 0.6-1%, 0.7-1%, 0.8-1%, 0.9-1%, 0-1.5%, 0.1-1.5%, 0.2-1.5%, 0.3-1.5%, 0.4-1.5%, 0.5-1.5%, 0.6-1.5%, 0.7-1.5%, 0.8-1.5%, 0.9-1.5%, 1-1.5%, 1.1-1.5%, 1.2-1.5%, 1.3-1.5%, 1.4-1.5%, 0-2%, 0.1-2%, 0.2-2%, 0.3-2%, 0.4-2%, 0.5-2%, 0.6-2%, 0.7-2%, 0.8-2%, 0.9-2%, 1-2%, 1.1-2%, 1.2-2%, 1.3-2%, 1.4-2%, 1.5-2%, 1.6-2%, 1.7-2%, 1.8-2%, 1.9-2%, 0-2.5%, 0.1-2.5%, 0.2-2.5%, 0.3-2.5%, 0.4-2.5%, 0.5-2.5%, 0.6-2.5%, 0.7-2.5%, 0.8-2.5%, 0.9-2.5%, 1-2.5%, 1.1-2.5%, 1.2-2.5%, 1.3-2.5%, 1.4-2.5%, 1.5-2.5%, 1.6-2.5%, 1.7-2.5%, 1.8-2.5%, 1.9-2.5%, 2-2.5%, 2.1-2.5%, 2.2-2.5%, 2.3-2.5%, 2.4-2.5%, 0-3%, 0.1-3%, 0.2-3%, 0.3-3%, 0.4-3 %, 0.5-3%, 0.6-3 %, 0.7-3%, 0.8-3%, 0.9-3%, 1-3%, 1.1-3%, 1.2-3%, 1.3-3%, 1.4-3%, 1.5-3%, 1.6-3%, 1.7-3%, 1.8-3%, 1.9-3%, 2-3%, 2.1-3%, 2.2-3%, 2.3-3%, 2.4-3%, 2.5-3%, 2.6-3%, 2.7-3%, 2.8-3%, 2.9-3%, 0-3.5%, 0.1-3.5%, 0.2-3.5%, 0.3-3.5%, 0.4-3.5%, 0.5 -3.5 %, 0.6-3.5%, 0.7-3.5%, 0.8-3.5%, 0.9-3.5%, 1-3.5%, 1. 1-3.5%, 1.2-3.5%, 1.3-3.5%, 1.4-3.5 %, 1.6-3.5%, 1.7-3.5%, 1.8-3.5 %, 1.9-3.5%, 2-3.5%, 2.1-3.5%, 2.2-3.5%, 2.3 -3.5%, 2.4-3.5%, 2.5-3.5%, 2.6-3.5%, 2.7-3.5%, 2.8-3.5%, 2.9-3.5%, 3-3.5%, 3.1-3.5%, 3.2-3.5%, 3.3-3.5%, 3.4-3.5%, 0-4%, 0.1-4%, 0.2-4%, 0.3-4%, 0.4-4%, 0.5-4%, 0.6-4%, 0.7-4%, 0.8-4%, 0.9-4%, 1-4%, 1.1-4%, 1.2-4%, 1.3-4%, 1.4-4%, 1.5-4%, 1.6-4%, 1.7-4%, 1.8-4%, 1.9-4%, 2-4%, 2.1-4%, 2.2-4%, 2.3-4%, 2.4-4%, 2.5-4%, 2.6-4%, 2.7-4%, 2.8-4%, 2.9-4%, 3-4%, 3.1-4%, 3.2-4%, 3.34%, 3.4-4%, 3.5-4%, 3.64%, 3.7-4%, 3.84%, 3.9-4%, 0-4.5), 0.1-4.5%, 0.2-4.5%, 0.3-4.5%, 0.4-4.5%, 0.5-4.5%, 0.6-4.5%, 0.7-4.5%, 0.8-4.5%, 0.9-4.5%, 1-4.5%, 1.1-4.5%, 1.2-4.5%, 1.3-45%, 1.4-4.5%, 1.5-4.5%, 1.6-4.5%, 1.7-4.5%, 1.8-4.5%, 1.9-4.5%, 2-4.5%, 2.1-4.5%, 2.2-4.5%, 2.3-4.5%, 2.4-4.5%, 2.5-4.5%, 2.6-4.5%, 2.7-4.5%, 2.8-4.5%, 2.9-4.5%, 3-4.5%, 3.1-4.5%, 3.2-4.5%, 3.3-4.5%, 3.4-4.5%, 3.5-4.5%, 3.6-4.5%, 3.7-4.5%, 3.8-4.5%, 3.9-4.5%, 4-4.5%, 4.1-4.5%, 4.2-4.5%, 4.3-4.5%, 4.4-4.5%, 0-5%, 0.1-5%, 0.2-5%, 0.3-5 %, 0.4-5%, 0.5-5 %, 0.6-5%, 0.7-5 %, 0.8-5%, 0.9-5%, 1-5%, 1.1-5%, 1.2-5%, 1.3-5%, 1.4-5%, 1.5-5%, 1.6-5%, 1.7-5%, 1.8-5%, 1.9-5%, 2-5%, 2.1-5%, 2.2-5%, 2.3-5%, 2.4-5%, 2.5-5%, 2.6-5%, 2.7-5%, 2.8-5%, 2.9-5%, 3-5%, 3.1-5%, 3.2-5%, 3.3-5%, 3.4-5%, 3.5-5%, 3.6-5%, 3.7-5%, 3.8-5%, 3.9-5%, 4-5%, 4.1-5%, 4.2-5%, 4.3-5%, 4.4-5%, 4.5-5%, 4.6-5%, 4.7-5%, 4.8-5%, 4.9-5%, 0-5.5%, 0.1-5.5%, 0.2-5.5%, 0.3-5.5%, 0.4-5.5%, 0.5-5.5%, 0.6-5.5%, 0.7-5.5%, 0.8-5.5%, 0.9-5.5%, 1-5.5%, 1.1-5.5%, 1.2-5.5%, 1.3-5.5%, 1.4-5.5%, 1.5-5.5%, 1.6-5.5%, 1.7-5.5%, 1.8-5.5 %, 1.9-5.5%, 2-5.5%, 2.1-5.5%, 2.2-5.5%, 2.3-5.5%, 2.4-5.5%, 2.5-5.5%, 2.6-5.5%, 2.7-5.5%, 2.8-5.5%, 2.9-5.5%, 3-5.5%, 3.1-5.5%, 3.2-5.5%, 3.3-5.5%, 3.4-5.5%, 3.5-5.5%, 3.6-5.5%, 5.5%, 3.8-5.5%, 3.9-5.5%, 4-5.5%, 4.1-5.5%, 4.2-5.5%, 4.3-5.5%, 4.4-5.5%, 4.5-5.5%, 4.6-5.5%, 4.7-5.5%, 4.8-5.5%, 4.9-5.5%, 5-5.5%, 5.1-5.5%, 5.2-5.5%, 5.3-5.5%, 5.4-5.5%, 0-6%, 0.1-6%, 0.2-6%, 0.3-6%, 0.4-6%, 0.5-6%, 0.6-6%, 0.7-6%, 0,8-6%, 0.9-6%, 1-6%, 1.1-6%, 1.2-6%, 1.3-6%, 1.4-6%, 1.5-6%, 1.6-6%, 1.7-6%, 1.8-6%, 1.9-6%, 2-6%, 2.1-6%, 2.2-6%, 2.3-6%, 2.4-6%, 2.5-6%, 2.6-6%, 2.7-6%, 28-6%, 2.9-6%, 3-6%, 3.1-6%, 3.2-6%, 3.3-6%, 3.4-6%, 3.5-6%, 3.6-6%, 3.7-6%, 3.8-6%, 3.9-6%, 4-6%, 4.1-6%, 4.2-6%, 4.3-6%, 4.4-6%, 4.5- 6%, 4.6-6%, 4.7-6%), 4.8-6%, 4.9-6%, 5-6%, 5.1-6%, 5.2-6%, 5.3-6%, 5.4-6%, 5.5-6%, 5.6-6%, 5.7-6%, 5.8-6%, 5.9-6%, 0-6.5%, 0.1-6.5%, 0.2-6.5%, 0.3-6.5%, 0.4-6.5%, 0.5-6.5%, 0.6-6.5%, 0.7-6.5%, 0.8-6.5%, 0.9-6.5%, 1-6.5%, 1.1-6.5%, 1.2-6.5%, 1.3-6.5%, 1.4-6.5%, 1.5-6.5%, 1.6-6.5%, 1.7-6.5%, 1.8-6.5%, 1.9-6.5%, 7-6.5%, 2.1-6.5%, 2.2-6.5%, 2.3-6.5%, 7.4-6.5%, 2.5 -6.5%, 2.6-6.5%, 2.7-6.5%, 2.8-6.5%, 2.9-6.5° A, 3-6.5%, 3.1-6.5%, 3.2-6.5%, 3.3-6.5%, 3.4-6.5%, 3.5-6.5%, 3.6-6.5%, 3.7-6.5%, 3.8-6.5%, 3.9-6.5%, 4-6.5%, 4.1-6.5%, 4.2-6.5%, 4.3-6.5%, 4.4-6.5%, 4.5-6.5%, 4.6-6.5%, 4.7-6.5%, 4.8-6.5%, 4.9-6.5%, 5-6.5%, 5.1-6.5%, 5.2-6.5%, 5.3-6.5%, 5.4-6.5%, 5.5-6.5%, 5.6-6.5%, 5.7-6.5%, 5.8-6.5%, 5.9-6.5%, 6-6.5%, 6.1-6.5%, 6.2-6.5%, 6.3-6.5%, 6.4-6.5%, 0-7%, 0.1-7%, 0.2-7%, 0.3-7%, 0.4-7%, 0.5-7%, 0.6-7%, 0.7-7%, 0.8-7%, 0.9-7%, 1-7%, 1.1-7%, 1.2-7%, 1.3-7%, 1.4-7%, 1.5-7%, 1.6-7%, 1.7-7%, 1.8-7%, 1.9-7%, 2-7%, 2.1-7%, 2.2-7%, 2.3-7%, 2.4-7%, 2.5-7%, 2.6-7%, 2.7-7%, 2.8-7%, 2.9-7%, 3-7%, 3.1-7%, 3.2-7%, 3.3-7%, 3.4-7%, 3.5-7%, 3.6-7%, 3.7-7%, 3.8-7%, 3.9-7%, 4-7%, 4.1-7%, 4.2-7%, 4.3-7%, 4.4-7%, 4.5-7%, 4.6-7%, 4.7-7%, 4.8-7%, 4.9-7%, 5-7%, 5.1-7%, 5.2-7%, 5.3-7%, 5.4-7%, 5.5-7%, 5.6-7%, 5.7-7%, 5.8-7%, 5.9-7%, 6-7%, 6.1-7%, 6.2-7%, 6.3-7° %, 6.4-7%, 6.5-7%, 6.6-7%, 6.7-7%, 6.8-7%, 6.9-7%, 0-7.5%, 0.1-7.5%, 0.2-7.5%, 0.3-7.5%, 0.4-7.5%, 0.5-7.5%, 0.6-75%, 0.7-7.5%, 0.8-7.5%, 0.9-7.5%, 1-7.5%, 1.1-7.5%, 1.2-7.5%, 1.3-7.5%, 1.4-7.5%, 1.5-7.5%, 1.6-7.5%, 1.7-7.5%, 1.8-7.5%, 1.9-7.5%, 2-7.5%, 2.1-7.5%, 2.2-7.5%, 2.3-7.5%, 2.4-7.5%, 2.5-7.5%, 2.6-7.5%, 2.7-7.5%, 2.8-7.5%, 2.9-7.5%, 3-7.5%, 3.1-7.5%, 3.2-7.5%, 3.3-7.5%, 3.4-7.5%, 3.5-7.5%, 3.6-7.5%, 3.7-7.5%, 3.8-7.5%, 3.9-7.5%, 4-7.5%, 4.1-7.5%, 4.2-7.5%, 4.3-7.5%, 4.4-7.5%, 4.5-7.5%, 4.6-7.5%, 4.7-7.5%, 4.8-7.5%, 4.9-7.5%, 5-7.5%, 5.1-7.5%, 5.2-7.5%, 5.3-7.5%, 5.4-7.5%, 5.5-7.5%, 5.6-7.5%, 5.7-7.5%, 5.8-7.5%, 5.9-7.5%, 6-7.5%, 6.1-7.5%, 6.2-7.5%, 6.3-7.5%, 6.4-7.5%, 6.5-7.5%, 6.6-7.5%, 6.7-7.5%, 6.8-7.5%, 6.9-7.5%, 7-7.5%, 7.1-7.5%, 7.2-7.5%, 7.3-7.5%, 7.4-7.5%, 0-8%, 0.1-8%, 0.2-8%, 0.3-8%, 0.4-8%, 0.5-8%, 0.6-8%, 0.7-8%, 0.8-8%, 0.9-8%, 1-8%, 1.1-8%, 1.2-8%, 1.3-8%, 1.4-8%, 1.5-8%, 1.6-8%, 1.7-8%, 1.8-8%, 1.9-8%, 2-8%, 2.1-8%, 2.2-8%, 2.3-8%, 2.4-8%, 2.5-8%, 2.6-8%, 2.7-8%), 2.8-8%, 2.9-8%, 3-8%, 3.1-8%, 3.2-8%, 3.3-8%, 3.4-8%, 3.5-8%, 3.6-8%, 3.7-8%, 3.8-8%, 3.9-8%, 4-8%, 4.1-8%, 4.2-8%, 4.3-8%, 4.4-8%, 4.5-8%, 4.6-8%, 4.7-8%, 4.8-8%, 4.9-8%, 5-8%, 5.1-8%, 5.2-8%, 5.3-8%, 5.4-8%, 5.5-8%, 5.6-8%, 5.7-8%, 5.8-8%, 5.9-8%, 6-8%, 6.1-8%, 6.2-8%, 6.3-8%, 6.4-8%, 6.5-8%, 6.6-8%, 6.7-8%, 6.8-8%, 6.9-8%, 7-8%, 7.1-8%, 7.2-8%, 7.3-8%, 7.4-8%, 7.5-8%, 7.6-8%, 7.7-8%, 7.8-8%, 7.9-8%, 0-8.5%, 0.1-8.5%, 0.2-8.5%, 0.3-8.5%, 0.4-8.5%, 0.5-8.50%, 0.6-8.5%, 0.7-8.5%, 0.8-8.5%, 0.9-8.5%, 1-8.5%, 1.1-8.5%, 1.2-8.5%, 1.3-8.5%, 1.4-8.5%, 1.5-8.5%, 1.6-8.5%, 1.7-8.5%, 1.8-8.5%, 1.9-8.5%, 2-8.5%, 2.1-8.5%, 2.2-8.5%, 2.3-8.5%, 2.4-8.5%, 2.5-8.5%, 2.6-8.5%, 2.7-8.5%, 2.8-8.5%, 2.9-8.5%, 3-8.5%, 3.1-8.5%, 3.2-8.5%, 3.3-8.5%, 3.4-8.5%, 3.5-8.5%, 3.6-8.5%, 3.7-8.5%, 3.8-8.5%, 3.9-8.5%, 4-8.5%, 4.1-8.5%, 4.2-8.5%, 4.3-8.5%, 4.4-8.5%, 4.5-8.5%, 4.6-8.5%, 4.7-8.5%, 4.8-8.5%, 4.9-8.5%, 5-8.5%, 5.1-8.5%, 5.2-8.5%, 5.3-8.5%, 5.4-8.5%, 5.5-8.5%, 5.6-8.5%, 5.7-8.5%, 5.8-8.5%, 5.9-8.5%, 6-8.5%, 6.1-8.5%, 6.2-8.5%, 6.3-8.5%, 6.4-8.5%, 6.5-8.5%, 6.6-8.5%, 6.7-8.5%, 6.8-8.5%, 6.9-8.5%, 7-8.5%, 7.1-8.5%, 7.2-8.5%, 7.3-8.5%, 7.4-8.5%, 7.5-8.5%, 7.6-8.5%, 7.7-8.5%, 7.8-8.5%, 7.9-8.5%, 8-8.5%, 8.1-8.5%, 8.2-8.5%, 8.3-8.5%, 8.4-8.5%, 0-9%, 0.1-9%, 0.2-9%, 0.3-9%, 0.4-9%, 0.5-9%, 0.6-9%, 0.7-9%, 0.8-9%, 0.9-9%, -9%, 1.1-9%, 1.2-9%, 1.3-9%, 1.4-9%, 1.5-9%, 1.6-9%, 1.7-9%, 1.8-9%, 1.9-9%, 2-9%, 2.1-9%, 2.2-9%, 2.3-9%, 2.4-9%, 2.5-9%, 2.6-9%, 2.7-9%, 2.8-9%, 2.9-9%, 3-9%, 3.1-9%, 3.2-9%, 3.3-9%, 3.4-9%, 3.5-9%, 3.6-9%, 3.7-9%, 3.8-9%, 3.9-9%, 4-9%, 4.1-9%, 4.2-9%, 4.3-9%, 4.4-9%, 4.5- 9%, 4.6-9%, 4.7-9%, 4.8-9%, 4.9-9%, 5-9%, 5.1-9%, 5.2-9%, 5.3-9%, 5.4-9%, 5.5-9°%, 5.6-9%, 5.7-9%, 5.8-9%, 5.9-9%, 6-9%, 6.1-9%, 6.2-9%, 6.3-9%, 6.4-9%, 6.5-9%, 6.6-9%, 6.7-9%, 6.8-9%, 6.9-9%, 7-9%, 7.1-9%, 7.2-9%, 7.3-9%, 7.4-9%, 7.5-9%, 7.6-9%, 7.7-9%, 7.8-9%, 7.9-9%, 8-9%, 8.1-9%, 8.2-9%, 8.3-9%, 8.4-9%, 8.5-9%, 8.6-9%, 8.7-9%, 8.8-9%, 8.9-9%, 0-9.5%, 0.1-9.5%, 0.2-9.5%, 0.3-9.5%, 0.4-9.5%, 0.5-9.5%, 0.6-9.5%, 0.7-9.5%, 0.8-9.5%, 0.9-9.5%, 1-9.5%, 1.1-9.5%, 1.2-9.5%, 1.3-9.5%, 1.4-9.5%, 1.5-9.5%, 1.6-9.5%, 1.7-9.5%, 1.8-9.5%, 1.9-9.5%, 2-9.5%, 2.1-9.5%, 2.2-9.5%, 2.3-9.5%, 2.4-9.5%, 2.5-9.5%, 2.6-9.5%, 2.7-9.5%, 2.8-9.5%, 2,9-9.5%, 3-9.5%, 3.1-9.5%, 3.2-9.5%, 3.3-9.5%, 3.4-9.5%, 3.5-9.5%, 3.6-9.5%, 3.7-9.5%, 3.8-9.5%, 3.9-9.5%, 4-9.5%, 4.1-9.5%, 4.2-9.5%, 4.3-9.5%, 4.4-9.5%, 4.5-9.5%, 4.6-9.5%, 4.7-9.5%, 4.8-9.5%, 4.9-9.5%, 5-9.5%, 5.1-9.5%, 5.2-9.5%, 5.3-9.5%, 5.4-9.5%, 5.5-9.5%, 5.6-9.5%, 5.7-9.5%, 5.8-9.5%, 5.9-9.5%, 6-9.5%, 6.1-9.5%, 6.2-9.5%, 6.3-9.5%, 6.4 -9.5%, 6.5-9.5%, 6.6-9.5%, 6.7-9.5%, 6.8-9.5%, 6.9-9.5%, 7-9.5%, 7.1-9.5%, 7.2-9.5%, 7.3-9.5%, 7.4-9.5%, 7.5-9.5%, 7.6-9.5%, 7.7-9.5%, 7.8-9.5%, 7.9-9.5%, 8-9.5%, 8.1-9.5%, 8.2-9.5%, 8.3-9.5%, 8.4-9.5%, 8.5-9.5%, 8.6-9.5%, 8.7-9.5%, 8.8-9.5%, 8.9-9.5%, 9-9.5%, 9.1-9.5%, 9.2-9.5%, 9.3-9.5%, 9.4-9.5%, 0-10%, 0.1-10%, 0.2-10%, 0.3-10%, 0.4-10%, 0.5-10%, 0.6-10%, 0.7-10%, 0.8-10%, 0.9-10%, 1-10%, 1.1-10%, 1.2-10%, 1.3-10%, 1.4-10%, 1.5-10%, 1.6-10%, 1.7-10%, 1.8-10%, 1.9-10%, 2-10%, 2.1-10%, 2.2-10%, 2.3-10%, 2.4-10%, 2.5-10%, 2.6-10%, 2.7-10%, 2.8-10%, 2.9-10%, 3-10%, 3.1-10%, 3.2-10%, 3.3-10%, 3.4-10%, 3.5-10%, 3.6-10%, 3.7-10%, 3.8-10%, 3.9-10%, 4-10%, 4.1-10%, 4.2-10%, 4.3-10%, 4.4-10%, 4.5-10%, 4.6-10%, 4.7-10%, 4.8-10%, 4.9-10%, 5-10%, 5.1-10%, 5.2-10%, 5.3-10%, 5.4-10%, 5.5-10%, 5.6-10%, 5.7-10%, 5.8-10%, 5.9-10%, 6-10%, 6.1-10%, 6.2-10%, 6.3-10%, 6.4-10%, 6.5-10%, 6.6-10%, 6.7-10%, 6.8-10%, 6.9-10%, 7-10%, 7.1-10%, 7.2-10%, 7.3-10%, 7.4-10%, 7.5-10%, 7.6-10%, 7.7-10%, 7.8-10%, 7.9-10%, 8-10%, 8.1-10%, 8.2-10%, 8.3-10%, 8.4-10%, 8.5-10%, 8.6-10%, 8.7-10%, 8.8-10%, 8.9-10%, 9-10%, 9.1-10%, 9.2-10%, 9.3-10%, 9.4-10%, 9.5-10%, 9.6-10%, 9.7-10%, 9.8-10%, or 9.9-10% w/v.

[0769] In some embodiments, the formulation may include 0-10% w/v of sucrose.

[0770] In some embodiments, the formulation may include 1% w/v of sucrose.

[0771] In some embodiments, the formulation may include 2% w/v of sucrose.

[0772] In some embodiments, the thnnulation may include 3% w/v of sucrose.

[0773] In some embodiments, the formulation may include 4% w/v of sucrose.

[0774] In some embodiments, the formulation may include 5% w/v of sucrose,

[0775] In some embodiments, the formulation may include 6% w/v of sucrose.

[0776] In some embodiments, the formulation may include 7% w/v of sucrose.

[0777] In some embodiments, the formulation may include 8% w/v of sucrose.

[0778] In some embodiments, the formulation may include 9% w/v of sucrose.

[0779] In some embodiments, the thnnulation may include 10% w/v of sucrose.

### Buffering Agents

[0780] In some embodiments, formulations of pharmaceutical compositions described herein may comprise a buffering agent to maintain the acidity (pH) of the solution near a desired value. In some embodiments, formulations described herein have a pH within the range of 7.0 to 8.5. The formulations of pharmaceutical compositions described herein may have a pH of 7.0, 7.1 7.2, 7.3, 7.4, 7.5, 7.6, 7.7, 7.8, 7.9, 8, 8.1, or 8.2. In some embodiments, formulations of pharmaceutical compositions described herein may have a pH from 7.2-8.2, 7.2-7.6, 7.3-7.7, or 7.8-8.2. In some embodiments, the pH is determined when the formulation is at 5° C. In some embodiments, the pH is determined when the formulation is at 25° C., Suitable buffering agents may include, hut not limited to, Tris HCl, Tris base, sodium phosphate (monosodium phosphate and/or disodium phosphate), potassium phosphate (monopotassium phosphate and/or dipotassium phosphate), histidine, boric acid, citric acid, glycine, HEPES (4-(2-hydroxyethyl)-1-piperazineethanesulfonic acid), and MOPS (3-(N-morpholino)propanesulfonic acid).

[0781] Concentration of buffering agents in the formulation may be between 1-50 mM, between 1-25 mM, between 5-30 mM, between 5-20 mM, between 5-15 mM, between 10-40 mM, or between 15-30 mM. Concentration of buffering agents in the formulation may be about 1 mM, 5 mM, 7.5 mM, 10 mM, 12.5 mM, 15 mM, 20 mM, 25 mM, 30 mM, 35 mM, 40 mM, or 50 mM.

[0782] In some embodiments, the formulation may include, but is not limited to, phosphate-buffered saline (PBS). As a non-limiting example, the PBS may include sodium chloride, potassium chloride, disodium phosphate, monopotassium phosphate, and distilled water. In some instances, the PBS does not contain potassium or magnesium. In other instances, the PBS contains calcium and magnesium.

[0783] In some embodiments, buffering agents used in the formulations of pharmaceutical compositions described herein may comprise sodium phosphate (monosodium phosphate and/or disodium phosphate). As a non-limiting example, sodium phosphate may be adjusted to a pH (at 5° C.) within the range of 7.4±0.2. In some embodiments, buffering agents used in the formulations of pharmaceutical compositions described herein may comprise Tris base. Tris base may be adjusted with hydrochloric acid to any pH within the range of 7.1 and 9.1. As a non-limiting example, Tris base used in the formulations described herein may be adjusted to 8.0±0.2. As a non-limiting example, Tris base used in the formulations described herein may be adjusted to 7.5±0.2.

[0784] In some embodiments, buffering agents in the formulation may be hydrochloric acid. Hydrochloric acid may be used alone or with other buffering agents to adjust the pH of the formulation,

[0785] In some embodiments, the concentration of hydrochloric acid in a formulation may be, but is not limited to, 0.1 mM, 0.2 mM, 0.3 mM, 0.4 mM, 0.5 mM, 0.6 mM, 0.7 mM, 0.8 mM, 0.9 mM, 1 mM, 1.1 mM, 1.2 mM, 1.3 mM, 1.4 mM, 1.5 mM, 1.6 mM, 1.7 mM, 1.8 mM, 1.9 mM, 2 mM, 2.1 mM, 2.2 mM, 2.3 mM, 2.4 mM, 2.5 mM, 2.6 mM, 2.7 mM, 2.8 mM, 2.9 mM, 3 mM, 3.1 mM, 3.2 mM, 3.3 mM, 3.4 mM, 3.5 mM, 3.6 mM, 3.7 mM, 3.8 mM, 3.9 mM, 4 mM, 4.1 mM, 4.2 mM, 4.3 mM, 4.4 mM, 4.5 mM, 4.6 mM, 4.7 mM, 4.8 mM, 4.9 mM, 5 mM, 5.1 mM, 5.2 mM, 5.3 mM, 5.4 mM, 5.5 mM, 5.6 mM, 5.7 mM, 5.8 mM, 5.9 mM, 6 mM, 6.1 mM, 6.2 mM, 6.3 mM, 6.4 mM, 6.5 mM, 6.6 mM, 6.7 mM, 6.8 mM, 6.9 mM, 7 mM, 7.1 mM, 7.2 mM, 7.3 mM, 7.4 mM, 7.5 mM, 7.6 mM, 7.7 mM, 7.8 mM, 7.9 mM, 8 mM, 8.1 mM, 8.2 mM, 8.3 mM, 8.4 mM, 8.5 mM, 8.6 mM, 8.7 mM, 8.8 mM, 8.9 mM, 9 mM, 9.1 mM, 9.2 mM, 9.3 mM, 9.4 mM, 9.5 mM, 9.6 mM, 9.7 mM, 9.8 mM, 9.9 mM, 10 mM, 10.1 mM, 10.2 mM, 10.3 mM, 10.4 mM, 10.5 mM, 10.6 mM, 10.7 mM, 10.8 mM, 10.9 mM, 11 mM, 11.1 mM, 11.2 mM, 11.3 mM, 11.4 mM, 11.5 mM, 11.6 mM, 11.7 mM, 11.8 mM, 11.9 mM, 12 mM, 12.1 mM, 12.2 mM, 12.3 mM, 12.4 mM, 12.5 mM, 12.6 mM, 12.7 mM, 12.8 mM, 12.9 mM, 13 mM, 13.1 mM, 13.2 mM, 13.3 mM, 13.4 mM, 13.5 mM, 13.6 mM, 13.7 mM, 13.8 mM, 13.9 mM, 14 mM, 14.1 mM, 14.2 mM, 14.3 mM, 14.4 mM, 14.5 mM, 14.6 mM, 14.7 mM, 14.8 mM, 14.9 mM or 15 mM.

[0786] The formulation may include hydrochloric acid in a range of 0-0.5 mM, 0.1-0.6 mM, 0.2-0.7 mM, 0.3-0.8 mM, 0.4-0.9 mM, 0.5-1 mM, 0.6-1.1 mM, 0.7-1.2 mM, 0.8-1.3 mM, 0.9-1.4 mM, 1-1.5 mM, 1.1-1.6 mM, 1.2-1.7 mM, 1.3-1.8 mM, 1.4-1.9 mM, 1.5-2 mM, 1.6-2.1 mM, 1.7-2.2 mM, 1.8-2.3 mM, 1.9-2.4 mM, 2-2.5 mM, 2.1-2.6 mM, 2.2-2.7 mM, 2.3-2.8 mM, 2.4-2.9 mM, 2.5-3 mM, 2.6-3.1 mM, 2.7-3.2 mM, 2.8-3.3 mM, 2.9-3.4 mM, 3-3.5 mM, 3.1-3.6 mM, 3.2-3.7 mM, 3.3-3.8 mM, 3.4-3.9 mM, 3.5-4 mM, 3.6-4.1 mM, 3.7-4.2 mM, 3.8-4.3 mM, 3.9-4.4 mM, 4-4.5 mM, 4.1-4.6 mM, 4.2-4.7 mM, 4.3-4.8 mM, 4.4-4.9 mM, 4.5-5 mM, 4.6-5.1 mM, 4.7-5.2 mM, 4.8-5.3 mM, 4.9-5.4 mM, 5-5.5 mM, 5.1-5.6 mM, 5.2-5.7 mM, 5.3-5.8 mM, 5.4-5.9 mM, 5.5-6 mM, 5.6-6.1 mM, 5.7-6.2 mM, 5.8-6.3 mM, 5.9-6.4 mM, 6-6.5 mM, 6.1-6.6 mM, 6.2-6.7 mM, 6.3-6.8 mM, 6.4-6.9 mM, 6.5-7 mM, 6.6-7.1 mM, 6.7-7.2 mM, 6.8-7.3 mM, 6.9-7.4 mM, 7-7.5 mM, 7.1-7.6 mM, 7.2-7.7 mM, 7.3-7.8 mM, 7.4-7.9 mM, 7.5-8 mM, 7.6-8.1 mM, 7.7-8.2 mM, 7.8-8.3 mM, 7.9-8.4 mM, 8-8.5 mM, 8.1-8.6 mM, 8.2-8.7 mM, 8.3-8.8 mM, 8.4-8.9 mM, 8.5-9 mM, 8.6-9.1 mM, 8.7-9.2 mM, 8.8-9.3 mM, 8.9-9.4 mM, 9-9.5 mM, 9.1-9.6 mM, 9.2-9.7 mM, 9.3-9.8 mM, 9.4-9.9 mM, 9.5-10 mM, 9.6-10.1 mM, 9.7-10.2 mM, 9.8-10.3 mM, 9.9-10.4 mM, 10-10.5 mM, 10.1-10.6 mM, 10.2-10.7 mM, 10.3-10.8 mM, 10.4-10.9 mM,10.5-11 mM, 10.6-11.1 mM, 10.7-11.2 mM, 10.8-11.3 mM, 10.9-11.4 mM, 11-11.5 mM, 11.1-11.6 mM, 11.2-11.7 mM, 11.3-11.8 mM, 11.4-11.9 mM, 11.5-12 mM, 11.6-12.1 mM, 11.7-12.2 mM, 11.8-12.3 mM, 11.9-12.4 mM, 12-12.5 mM, 12.1-12.6 mM, 12.2-12.7 mM, 12.3-12.8 mM, 12.4-12.9 mM, 12.5-13 mM, 12.6-13.1 mM, 12.7-13.2 mM, 12.8-13.3 mM, 12.9-13.4 mM, 13-13.5 mM, 13.1-13.6 mM, 13.2-13.7 mM, 13.3-13.8 mM, 13.4-13.9 mM, 13.5-14 mM, 13.6-14.1 mM, 13.7-14.2 mM, 13.8-14.3 mM, 13.9-14.4 mM, 14-14.5 mM, 14.1-14.6 mM, 14.2-14.7 mM, 14.3-14.8 mM, 14.4-14.9 mM, 14.5-15 mM, 0-1 mM, 1-2 mM, 2-3 mM, 3-4 mM, 4-5 mM, 5-6 mM, 6-7 mM, 7-8 mM, 8-9 mM, 9-10 mM, 10-11 mM, 11-12 mM, 12-13 mM, 13-14 mM, 14-15 mM, 15-16 mM, 0-2 mM, 1-3 mM, 2-4 mM, 3-5 mM, 4-6 mM, 5-7 mM, 6-8 mM, 7-9 mM, 8-10 mM, 9-11 mM, 10-12 mM, 11-13 mM, 12-14 mM, 13-15 mM, 0-3 mM, 1-4 mM, 2-5 mM, 3-6 mM, 4-7 mM, 5-8 mM, 6-9 mM, 7-10 mM, 8-11 mM, 9-12 mM, 10-13 mM, 11-14 mM, 12-15 mM, 0-4 mM, 1-5 mM, 2-6 mM, 3-7 mM, 4-8 mM, 5-9 mM, 6-10 mM, 7-11 mM, 8-12 mM, 9-13 mM, 10-14 mM, 11-15 mM, 0-5 mM, 1-6 mM, 2-7 mM, 3-8 mM, 4-9 mM, 5-10 mM, 6-11 mM, 7-12 mM, 8-13 mM, 9-14 mM, 10-15 mM, 0-6 mM, 1-7 mM, 2-8 mM, 3-9 mM, 4-10 mM, 5-11 mM, 6-12 mM, 7-13 mM, 8-14 mM, 9-15 mM, 0-7 mM, 1-8 mM, 2-9 mM, 3-10 mM, 4-1.1 mM, 5-12 mM, 6-13 mM, 7-14 mM, 8-15 mM, 0-8 mM, 1-9 mM, 2-10 mM, 3-11 mM, 4-12 mM, 5-13 mM, 6-14 mM, 7-15 mM, 0-9 mM, 1-10 mM, 2-11 mM, 3-12 mM, 4-13 mM, 5-14 mM, 6-15 mM,0-10 mM, 1-11 mM, 2-12 mM, 3-13 mM, 4-14 mM, 5-15 mM, 0-11 mM, 1-12, mM, 2-13 mM, 3-14 mM, 4-15 mM, 0-12 mM, 1-13 mM, 2-14 mM, 3-15 mM,0-13 mM, 1-14 mM, 2-15 mM, 0-14 mM, 1-15 mM, or 0-15 mM.

[0787] In some embodiments, the formulation may include 0-10 mM of hydrochloric acid.

[0788] In some embodiments, the formulation may include 6.2-6.3 mM of hydrochloric acid.

[0789] in some embodiments, the formulation may include 8.9-9 mM of hydrochloric acid.

[0790] In some embodiments, the formulation may include 6.2 mM of hydrochloric acid.

[0791] In some embodiments, the formulation may include 6.3 mM of hydrochloric acid.

[0792] In some embodiments, the formulation may include 8.9 mM of hydrochloric acid.

[0793] In some embodiments, the formulation may include 9 mM of hydrochloric acid.

### Surfactants

[0794] In some embodiments, formulations of pharmaceutical compositions described herein may comprise a surfactant. Surfactants may help control shear forces in suspension cultures. Surfactants used herein may be anionic, zwitterionic, or non-ionic surfactants and may include those known in the art that are suitable for use in pharmaceutical formulations. Examples of anionic surfactants include, but are not limited to, sulfate, sulfonate, phosphate esters, and carboxylates. Examples of nonionic surfactants include, but are not limited to, ehoxylates, fatty alcohol ethoxylates, alkylphenol ethoxylates (e.g., nonoxynols, Triton X-100), fatty acid ethoxylates, ethoxylated amines and/or fatty acid amides (e.g., polyethoxylated tallow amine, cocamide monoethanolamine, cocamide diethanolamine), ethylene oxide/propylene oxide copolymer (e.g., Poloxamers such as Pluronic® F-68 or F-127), esters of fatty acids and polyhydric alcohols, fatty acid alkanolatnides, ethoxylated aliphatic acids, ethoxylated aliphatic alcohols, ethoxylated sorbitol fatty acid esters, ethoxylated glycerides, ethoxylated block copolymers with. EDTA (ethylene diaminetetraacetic acid), ethoxylated cyclic ether adducts, ethoxylated amide and imidazoline adducts, ethoxylated amine adducts, ethoxylated mercaptan adducts, ethoxylated condensates with alkyl phenols, ethoxylated nitrogen-based hydrophobes, ethoxylated polyoxypropylenes, polymeric silicones, fluorinated surfactants, and polymerizable surfactants. Examples of zwitterionic surfactants include, but are not limited to, alkylamido betaines and amine oxides thereof, alkyl betaines and amine oxides thereof, sulth betaines, hydroxy sulfo betaines, amphoglycinates, amphopropionates, balanced amphopolycarboxyglycinates, and alkyl polyaminoglycinates. Proteins have the ability of being charged or uncharged depending on the pH; thus, at the right pH, a protein, preferably with a pi of about 8 to 9, such as modified Bovine Serum Albumin or chymnotrypsinogen, could function as a zwitterionic surfactant. Various mixtures of surfactants can be used if desired.

[0795] In some embodiments, surfactants used in the formulations of pharmaceutical compositions described herein includes at least one ethylene oxide/propylene copolymer.

[0796] In some embodiments, the formulation may include Poloxamer. In some embodiments, the formulation may include Poloxamer in a range of 0.00001%-0.0001%, 0.00001%-0.001%, 0.00001%-0.01%, 0.00001%-0.1%, 0.00001%-1%, 0.0001%-0.001%, 0.0001%-0.01%, 0.0001%-0.1%, 0.0001%-1%, 0.001%-0.01%, 0.001%-0.1%, 0.001%-1%, 0.01%-0.1%, 0.01%-1%, or 0.1-1% w/v.

[0797] In some embodiments, the formulation may include 0.001% w/v oxamer.

[0798] In some embodiments, the formulation may include Poloxamer 188 (e.g., Pluronic® F-68). In some embodiments, the formulation may include Poloxamer 188 at a concentration of 0.00001%, 0.0001%, 0.001%, 0.01%), 0.1%, or 1% w/v.

[0799] In some embodiments, the formulation may include Poloxamer 188 in a range of 0.00001%-0.0001%, 0.00001%-0.001%, 0.00001%-0.01%, 0.00001%-0.1%, 0.00001%-1%, 0.0001%-0.001%, 0.0001%-0.01%, 0.0001%-0.1%, 0.0001%-1%, 0.001%-0.01%, 0.001%-0.1%, 0.001%-1%, 0.01%-0.1%, 0.01%-1%, or 0.1-1% w/v.

[0800] In some embodiments, the formulation may include 0.001% w/v Poloxamer 188.

[0801] In some embodiments, the formulation may include Pluronic rt F-68. In some embodiments, the formulation may include Pluronic® F-68 at a concentration of 0.00001%, 0.0001%, 0.001%, 0.01%, 0.1%, or 1% w/v.

[0802] In some embodiments, the formulation may include Pluronic ® F-68 in a range of 0.00001%-0.0001%, 0.00001%-0.001%, 0.00001%-0.01%, 0.00001%-0.1%, 0.00001%-1%, 0.0001%-0.001%, 0.0001%-0.01%, 0.0001%-0.1%, 0.0001%-1%, 0.001%-0.01%, 0.001%-0.1%, 0.001%-1%, 0.01%-0.1%, 0.01%-1%, or 0.1-1% w/v.

[0803] In some embodiments, the formulation may include 0.001% w/v Pluronic rt F-68.

### Osmolality

[0804] In some embodiments, the formulation may be optimized for a specific The osmolality of the formulation may be, but is not limited to, 350, 351, 352, 353, 354, 355, 356, 357, 358, 359, 360, 361, 362, 363, 364, 365, 366, 367, 368, 369, 370, 371, 372, 373, 374, 375, 376, 377, 378, 379, 380, 381, 382, 383, 384, 385, 386, 387, 388, 389, 390, 391, 392, 393, 394, 395, 396, 397, 398, 399, 400, 401, 402, 403, 404, 405, 406, 407, 408, 409, 410, 411, 412, 413, 414, 415, 416, 417, 418, 419, 420, 421, 422, 423, 424, 425, 426, 427, 428, 429, 430, 431, 432, 433, 434, 435, 436, 437, 438, 439, 440, 441, 442, 443, 444, 445, 446, 447, 448, 449, 450, 451, 452, 453, 454, 455, 456 457, 458, 459, 460, 461, 462, 463, 464, 465, 466, 467, 468, 469, 470, 471, 472, 473, 474, 475, 476, 477, 478, 479 480, 481, 482, 483, 484, 485, 187, 488, 489, 490, 491, 492, 493, 494, 495, 496, 497, 498, 499, or 500 mOsm/kg (milliosmoles/kg).

[0805] In some embodiments, the formulation may be optimized for a specific range of osmolality. The range may be, but is not limited to, 350-360, 360-370, 370-380, 380-390, 390-400, 400-410, 410-420, 420-430, 430-440, 440-450, 450-460, 460-470, 470-480, 480-490, 490-500, 350-370, 360-380, 370-390, 380-400, 390-410, 400-420, 410-430, 420-440, 430-450, 440-460, 450-470, 460-480, 470-490, 480-500, 350-375, 375-400, 400-425, 425-450, 450-475, 475-500, 350-380, 360-390, 370-400, 380-410, 390-420, 400-430, 410-440, 420-450, 430-460, 440-470, 450-480, 460-490, 470-500, 350-390, 360-400, 370-410, 380-420, 390-430, 400-440, 410-450, 420-460, 430-470, 440-480, 450-490, 460-500, 350-400, 360-410, 370-420, 380-430, 390-440, 400-450, 410-460, 420-470, 430-480, 440-490, 450-500, 350-410, 360-420, 370-430, 380-440, 390-450, 400-460, 410-470, 420-480, 430-490, 440-500, 350-420, 360-430, 370-440, 380-450, 390-460, 400-470, 410-480, 420-490, 430-500, 350-430, 360-440, 370-450, 380-460, 390-470, 400-480, 410-490, 420-500, 350-440, 360-450, 370-460, 380-470, 390-480, 400-490, 410-500, 350-450, 360-460, 370-470, 380-480, 390-490, 400-500, 350-460, 360-470, 370-480, 380-490, 390-500, 350-470, 360-480, 370-490, 380-500, 350-480, 360-490, 370-500, 350-490, 360-500, or 350-500 mOsm/kg.

[0806] In some embodiments, the osmolality of the formulation is between 350-500 mOsm/kg.

[0807] In some embodiments, the osmolality of the formulation is between400-500 mOsm/kg.

[0808] In some embodiments, the osmolality of the formulation is between 400-480 mOsm/kg.

[0809] In some embodiments, the maximum osmolality of the formulation is about 500 mOsm/kg.

[0810] In some embodiments, the osmolality for convection enhanced delivery (CED) infusion into the brain is about 400-480 mOsm/kg.

[0811] In some embodiments, the maximum osmolality for convection enhanced delivery (CED) infusion into the brain is about 400-480 mOsm/kg.

[0812] In some embodiments, the maximum osmolality for convection enhanced delivery (CED) infusion into the brain is about 500 mOsm/kg.

### Concentration of AAV Particle

[0813] In some embodiments, the concentration of AAV particle in the formulation may be between about 1×10⁶ VG/mL and about 1×10¹⁶ VG/mL. As used herein, “VG/mL,” represents vector genomes (VG) per milliliter (mL). VG/mi, also may describe genome copy per milliliter or DNase resistant particle per milliliter.

[0814] In some embodiments, the formulation may include an AAV particle concentration of about 1×10⁶, 2×10⁶, 3×10⁶, 4×10⁶, 5×10⁶, 6×10⁶, 7×10⁶, 8×10⁶, 9×10⁶, 1×10⁷, 2×10⁷, 3×10⁷, 4×10⁷, 5×10⁷, 6×10⁷, 7×10⁷ 8×10⁷, 9×10⁷, 1×10⁸, 2×10⁸, 3×10⁸, 4×10⁸, 5×10⁵, 6×10⁸, 7×10⁸, 8×10⁸, 9×10⁸, 1×10⁹, 2×10⁹, 3×10⁹, 4×10⁹, 5×10⁹, 6×10⁹, 7×10⁹, 8×10⁹, 9×10⁹, 1×10¹⁰, 2×10¹⁰, 3×10¹⁰, 4×10¹⁰, 5×10¹⁰, 6×10¹⁰, 7×10¹⁰, 8×10¹⁰, 9×10¹⁰, 1×10¹¹, 2×10¹¹, 2.1×10¹¹, 2.2×10¹¹, 2.4×10¹¹, 2.5×10¹¹, 2.6×10¹¹, 2.7×10¹¹, 2.9×10¹¹, 3×10¹¹, 4×10¹¹, 5×10¹¹, 6×10¹¹, 7×10¹¹, 7.1×10¹¹, 7.2×10¹¹, 7.3×10¹¹, 7.4×10¹¹, 7.5×10¹¹, 7.6×10¹¹, 7.7×10¹¹, 7.8×10¹¹, 7.9×10¹¹, 8×10¹¹, 9×10¹¹, 1×10¹², 1.1×10¹², 1.2×10¹², 1.3×10¹², 1.4×10¹², 1.5×10¹², 1.6×10¹², 1.7×10¹², 1.8×10¹², 1.9×10¹², 2×10¹², 2.1×10¹², 2.2×10¹², 2.3×10¹², 2.4×10¹², 2.5×10¹², 2.6×10¹², 2.7×10¹², 2.8×10¹², 2.9×10¹², 3×10¹², 4×10¹², 4.1×10¹², 4.2×10¹², 4.3×10¹², 4.4×10¹², 4.5×10¹², 4.6×10¹², 4.7×10¹², 4.8×10¹², 4.9×10¹², 5×10 6×10¹², 7×10¹², 7.1×10¹², 7.2×10¹², 7.3×10¹², 7.4×10¹², 7.5×10¹², 7.6×10¹², 7.7×10¹², 7.8×10¹², 7.9×10¹², 8×10¹², 8.1×10¹², 8.2×10¹², 8.3×10¹², 8.4×10¹², 8.5×10¹², 8.6×10¹², 8.7×10¹², 8.8×10¹², 8.9×10¹², 9×10¹², 1×10¹³, 1.1×10¹³, 1.2×10¹³ 1.3×10¹³, 1.4×10¹³, 1.5×10¹³, 1.6×10¹³, 1.7×10¹³ 1.8×10¹³ 1.9×10¹³, 2×10¹³, 2.7×10¹³, 3×10¹³, 3.1×10¹³, 3.2×10¹³, 3.3×10¹³, 3.4×10¹³, 3.5×10¹³, 3.6×10¹³, 3.7×10¹³, 3.8×10¹³, 3.9×10¹³, 4×10¹³, 5×10¹³, 6×10¹³, 6.7×10¹³, 7×10¹³, 8×10¹³, 9×10¹³, 1×10¹⁴, 2×10¹⁴, 3×10¹⁴, 4×10¹⁴, 5×10¹⁴, 6×10¹⁴, 7×10¹⁴, 8×10¹⁴, 9×10¹⁴, 1×10¹⁵, 2×10¹⁵, 3×10¹⁵, 4×10¹⁵, 5×10¹⁵, 6×10¹⁵, 7×10¹⁵, 8×10¹⁵, 9×10¹⁵, or 1×10¹⁶ VG/mL.

[0815] In some embodiments, the concentration of AAV particles in the formulations may be between 1×10¹¹ and 5×10¹³, between 1×10¹² and 5×10¹², between 2×10¹² and 1×10¹³between 5×10¹² and 1×10¹³, between 1×10¹³ and 2×10¹³, between 2×10¹³ and 3×10¹³, between 2×10¹³ and 2.5×10¹³, between 2.5×10¹³ and 3×10¹³, or no more than 5×10¹³ VG/mL.

[0816] In some embodiments, the concentration of AAV particle in the formulation is 2.7×10¹¹ VG/mL,

[0817] In some embodiments, the concentration of AAV particle in the formulation is 9×10¹¹ VG/mL.

[0818] In some embodiments, the concentration of AAV particle in the formulation is 2.7×10¹²VG/mL.

[0819] In some embodiments, the concentration of AAV particle in the formulation is 4×10¹² VG/mL.

[0820] In some embodiments, the concentration of AAV particle in the formulation is 7.9×10¹² VG/mL.

[0821] In some embodiments, the concentration of AAV particle in the formulation is 1.0×10¹³ VG/mL.

[0822] In some embodiments, the concentration of AAV particle in the formulation is 2.2×10¹³ VG/mL.

[0823] In some embodiments, the concentration of AAV particle in the formulation is 2.7×10¹³ VG/mL,

[0824] In some embodiments, the concentration of AAV particle in the formulation is 3.5×10¹³ VG/ML.

[0825] In some embodiments, the concentration of AAV particle in the formulation may be between about 1×10⁶ total capsid/mL and about 1×10¹⁶ total capsid/mL. In some embodiments, delivery may comprise a composition concentration of about 1×10⁶, 2×10⁶, 3×10⁶, 4×10⁶, 5×10⁵, 6×10⁶, 7×10⁶, 8×10⁶, 9×10⁶, 1×10⁷, 2×10⁷, 3×10⁷, 4×10⁷, 5×10⁷, 6×10⁷, 7×10⁷, 8×10⁷, 9×10⁷, 1×10⁸, 2×10⁸, 3×10⁸, 4×10⁸, 5×10⁸, 6×10⁸, 7×10⁸, 8×10⁸, 9×10⁸, 1×10⁹, 2×10⁹, 3×10⁹, 4×10⁹, 5×10⁹, 6×10⁹, 7×10⁹, 8×10⁹, 9×10⁹, 1×10¹⁰, 2×10¹⁰, 3×10¹⁰, 4×10¹⁰, 5×10¹⁰, 6×10¹⁰, 7×10¹⁰, 8×10¹⁰, 9×10¹⁰, 1×10¹¹, 2×10¹¹, 3×10¹¹, 4×10¹¹, 5×10¹¹, 6×10¹¹, 7×10¹¹, 8×10¹¹, 9×10²², 1×10¹², 1.1×10¹², 1.2×10¹², 1.3×10¹², 1.4×10¹², 1.5×10¹², 1.6×10¹², 1.7×10¹², 1.8×10¹², 1.9×10¹², 2×10¹², 2.1×10¹², 2.2×10¹², 2.3×10¹², 2.4×10¹², 2.5×10¹², 2.6×10¹², 2.7×10¹², 2.8×10¹², 2.9×10¹², 3×10¹², 3.1×10¹², 3.2×10¹², 3.3×10¹², 3.4×10¹², 3.5×10¹², 3.6×10¹², 3.7×10¹², 3.8×10¹², 3.9×10¹², 4×10¹², 4.1×10¹², 4.2×10¹², 4.3×10¹², 4.4×10¹², 4.5×10¹², 4.6×10¹², 4.7×10¹², 4.8×10¹², 4.9×10¹², 5×10¹², 6×10¹², 7×10¹², 8×10¹², 9×10¹², 1×10¹³, 2×10¹³, 2.7×10¹³, 3×10¹³, 4×10¹³, 5×10¹³, 6×10¹³, 6.7×10¹³, 7×10¹³, 8×10¹³, 9×10¹³, 1×10¹⁴, 2×10¹⁴, 3×10¹⁴, 4×10¹⁴, 5×10¹⁴, 6×10¹⁴, 7×10¹⁴, 8×10¹⁴, 9×10¹⁴, 1×10¹⁵, 2×10¹⁵, 3×10¹⁵, 4×10¹⁵, 5×10¹⁵, 6×10¹⁵, 7×10¹⁵, 8×10¹⁵, 9×10¹⁵, or 1×10¹⁶ total capsid/mL.

### Total Dose of AAV Particle

[0826] In some embodiments, the total dose of the AAV particle in the form elation may be between about 1×10⁶ VG and about 1×10¹⁶ VG. In some embodiments, the formulation may include a total dose of AAV particle of about 1×10⁶, 2×10⁶, 3×10⁶, 4×10⁶, 5×10⁶, 6×10⁶, 7×10⁶, 8×10⁶, 9×10⁶, 1.×10⁷, 2×10⁷, 3×10⁷, 4×10⁷, 5×10⁷, 6×10⁷, 7×10⁷, 8×10⁷, 9×10⁷, 1×10⁸, 2×10⁸, 3×10⁸, 4×10⁸, 5×10⁸, 6×10⁸, 7×10⁸, 8×10⁸, 9×10⁸, 1×10⁹, 2×10⁹, 3×10⁹, 4×10⁹, 5×10⁹, 6×10⁹, 7×10⁹, 8×10⁹, 9×10⁹, 1×10¹⁰, 2×10¹⁰, 3×10¹⁰, 4×10¹⁰, 5×10¹⁰, 6×10¹⁰, 7×10¹⁰, 8×10¹⁰, 9×10¹⁰, 1×10¹¹, 2×10¹¹, 2×10¹¹, 2.2×10¹¹, 2.3×10¹¹, 2.4×10¹¹, 2.5×10¹¹, 2.6×10¹¹, 2.7×10¹¹, 2.8×10¹¹, 2.9×10¹¹, 3×10¹¹, 4×10¹¹, 5×10¹¹, 6×10¹¹, 7×10¹¹, 7.1×10¹¹, 7.2×10¹¹, 7.3×10¹¹, 7.4×10¹¹, 7.5×10¹¹, 7.6×10¹¹, 7.7×10¹¹, 7.8×10¹¹, 7.9×10¹¹, 8×10¹¹, 9×10¹¹, 1×10¹², 1.1×10¹², 1.2×10¹², 1.3×10¹², 1.4×10¹², 1.5×10¹², 1.6×10¹², 1.7×10¹², 1.8×10¹², 1.9×10¹², 2×10¹², 2.1×10¹², 2.2×10¹², 2.3×10¹², 2.4×10¹², 2.5×10¹², 2.6×10¹², 2.7×10¹², 2.8×10¹², 2.9×10¹², 3×10¹², 4×10¹², 4.1×10¹², 4.2×10¹², 4.3×10¹², 4.4×10¹², 4.5×10¹², 4.6×10¹², 4.7×10¹², 4.8×10¹², 4.9×10¹², 5×10¹², 6×10¹², 7×10¹², 7.1×10¹², 7.2×10¹², 7.3×10¹², 7.4×10¹², 7.5×10¹², 7.6×10¹², 7.7×10¹², 7.8×10¹², 7.9×10¹², 8×10¹², 8.1×10¹², 8.2×10¹², 8.3×10¹², 8.4×10¹², 8.5×10¹², 8.6×10¹², 8.7×10¹², 8.8×10¹², 8.9×10¹², 9×10¹², 1×10¹², 1.1×10¹³, 1.2×10¹², 1.3×10¹³, 1.4×10¹³, 1.5×10¹³, 1.6×10¹³, 1.7×10¹³, 1.8×10¹³, 1.9×10¹³, 2×10¹³, 2.7×10¹³, 3×10¹³, 3.1×10¹³, 3.2×10¹³, 3.3×10¹³, 3.4×10¹³, 3.5×10¹³, 3.6×10¹³, 3.7×10¹³, 3.8×10¹³, 3.9×10¹³, 4×10¹³, 5×10¹³, 6×10¹³, 6.7×10¹³, 7×10¹³, 8×10¹³, 9×10¹³, 1×10¹⁴, 2×10¹⁴, 3×10¹⁴, 4×10¹⁴, 5×10¹⁴, 6×10¹⁴, 7×10¹⁴, 8×10¹⁴, 9×10¹⁴, 1×10¹⁵, 2×10¹⁵, 3×10¹⁵, 4×10¹⁵, 5×10¹⁵, 6×10¹⁵, 7×10¹⁵, 8×10¹⁵, 9×10¹⁵, or 1×10¹⁶ VG.

[0827] In some embodiments, the total dose of AAV particle in the formulations between 1×10¹¹ and 2×10¹⁴ VG.

### Exemplary Formulations

[0828] In some embodiments, the formulations may include sodium phosphate, potassium phosphate, sodium chloride, potassium chloride, and optionally a surfactant such as Poloxamer 188 (e.g., Pluronic® F-68). As a non-limiting example, the formulation may include 10 mM sodium phosphate, 2 mM. potassium phosphate, 192 mM sodium chloride, 2.7 mM potassium chloride, and 0.001% (w/v) Poloxamer 188. The formulations may be used to formulate an AAV particle at a concentration of about 2.7×10¹² VG/mL.

[0829] In some embodiments, the formulations may include Phosphate Buffered Saline, sucrose and optionally a surfactant such as Poloxamer 188, As a non-limiting example, the formulation may include Phosphate Buffered Saline. 5% sucrose and 0.001% (w/v) Poloxamer 188. The formulations may be used to formulate an AAV particle at a concentration of about 2.2×10¹² VG/mL.

[0830] In some embodiments, the formulations may include sodium phosphate, potassium phosphate, sodium chloride, sucrose and optionally a surfactant such as Poloxamer 188. As a non-limiting example, the formulation may include 2.7 mM sodium phosphate, 1.54 mM potassium phosphate, 155 mM sodium chloride, and 5% (w/v) sucrose at pH 7.2 and with an osmolality of 450 mOsm/kg.

[0831] In some embodiments, the formulations may include sodium phosphate, potassium phosphate, sodium chloride, sucrose, and optionally a surfactant such as Poloxamer 188. As a non-limiting example, the formulation may include 10 mM sodium phosphate, 1.5 mM potassium phosphate, 95 mM sodium chloride, 7% (w/v) sucrose, and 0.001% (w/v) Poloxamer 188, pH 7.4±0.2 at 5° C. The formulations may be used to formulate an AAV particle at a concentration of about 2.7×10¹³ VG/mL.

[0832] In some embodiments, the formulation may include Tris Base, hydrochloric acid, potassium chloride, sodium chloride, sucrose, and optionally a surfactant such as Poloxamer 188. As a non-limiting example, the formulation may include 10 mM Tris Base, 6.3 mM HCl, 1.5 mM Potassium Chloride, 100 mM Sodium Chloride, 7% (w/v) Sucrose, and 0.001% (w/v) Poloxamer 188, pH 8.0±0.2 at 5° C. As another non-limiting example, the formulation may include 10 mM Tris Base, 9 mM HCl, 1.5 mM potassium chloride, 100 mM sodium chloride, 7% (w/v) sucrose, and 0.001% (w/v) Poloxamer 188, pH 7.5±0.2 at 5° C. The formulations may be used to formulate an AAV particle at a concentration of about 2.7×10¹³ VG/mL.

### Delivery

[0833] In some embodiments, the AAV particles described herein may be administered or delivered using the methods for the delivery of AAV virions described in European Patent Application No. EP1857552, the contents of which are herein incorporated by reference in its entirety.

[0834] In some embodiments, the AAV particles described herein may be administered or delivered using the methods for delivering proteins using AAV vectors described in European Patent Application No, EP2678433, the contents of which are herein incorporated by reference in its entirety.

[0835] In some embodiments, the AAV particle described herein may be administered or delivered using the methods for delivering DNA molecules using AAV vectors described in U.S. Pat. No. 5,858,351, the contents of which are herein incorporated by reference in its entirety.

[0836] In some embodiments, the AAV particle described herein may be administered or delivered using the methods for delivering DNA to the bloodstream described in U.S. Pat. No. 6,211,163, the contents of which are herein incorporated by reference in its entirety.

[0837] In some embodiments, the AAV particle described herein may be administered or delivered using the methods for delivering AAV virions described in U.S. Pat. No. 6,325,998, the contents of which are herein incorporated by reference in its entirety, In some embodiments, the AAV particle described herein may be administered or delivered using the methods for delivering a payload to the central nervous system described in U.S. Pat. No. 7,588,757, the contents of which are herein incorporated. by reference in its entirety.

[0838] In some embodiments, the AAV particle described herein may be administered or delivered using the methods for delivering a payload described in U.S. Pat. No. 8,283,151, the contents of which are herein incorporated by reference in its entirety.

[0839] In some embodiments, the AAV particle described herein may be administered or delivered using the methods for delivering a payload using a glutamic acid decarboxylase (GAD) delivery vector described in International Patent Publication No. WO2001089583, the contents of which are herein incorporated by reference in its entirety.

[0840] In some embodiments, the AAV particle described herein may be administered or delivered using the methods for delivering a payload to neural cells described in International Patent Publication No. WO2012057363, the contents of which are herein incorporated by reference in its entirety.

### Delivery to Cells

[0841] The present disclosure provides a method of delivering to a cell or tissue any of the above-described AAV polynucleotides or AAV genomes, comprising contacting the cell or tissue with said AAV polynucleotide or AAV genomes or contacting the cell or tissue with a particle comprising said AAV polynucleotide or AAV genome, or contacting the cell or tissue with any of the described compositions, including pharmaceutical compositions. The method of delivering the AAV polynucleotide or AAV genome to a cell or tissue can be accomplished in vitro, ex vivo, or in vivo.

Introduction into Cells—AAV Particles

[0842] The encoded siRNA molecules (e.g., siRNA duplexes) of the present disclosure may be introduced into cells by being encoded by the vector genome (VG) of an AAV particle. These AAV particles are engineered and optimized to facilitate the entry of siRNA molecule into cells that are not readily amendable to transfection. Also, some synthetic AAV particles possess an ability to integrate the shRNA into the cell genome, thereby leading to stable siRNA expression and long-term knockdown of a target gene. In this manner, AAV particles are engineered as vehicles for specific delivery while lacking the deleterious replication and/or integration features found in wild-type virus.

[0843] In some embodiments, the encoded siRNA molecules of the present disclosure are introduced into a cell by contacting the cell with an AAV particle comprising a modulatory polynucleotide sequence encoding a siRNA molecule, and a lipophilic carrier. In other embodiments, the siRNA molecule is introduced into a cell by transfecting or infecting the cell with an AAV particle comprising a nucleic acid sequence capable of producing the siRNA molecule when transcribed in the cell. In some embodiments, the siRNA molecule is introduced into a cell by injecting into the cell an AAV particle comprising a nucleic acid sequence capable of producing the siRNA molecule when transcribed in the cell.

[0844] In some embodiments, prior to transfection, an AAV particle comprising a nucleic acid sequence encoding the siRNA molecules of the present disclosure may be transfected into cells.

[0845] In other embodiments, the AAV particles comprising the nucleic acid sequence encoding the siRNA molecules of the present disclosure may be delivered into cells by electroporation (e.g. U.S. Patent Publication No. 20050014264; the content of which is herein incorporated by reference in its entirety).

[0846] Other methods for introducing AAV particles comprising the nucleic acid sequence encoding the siRNA molecules described herein may include photochemical internalization as described in U.S. Patent publication No. 20120264807; the content of which is herein incorporated by reference in its entirety.

[0847] In some embodiments, the formulations described herein may contain at least one AAV particle comprising the nucleic acid sequence encoding the siRNA molecules described herein. In some embodiments, the siRNA molecules may target the HTT gene at one target site. In another embodiment, the formulation comprises a plurality of AAV particles, each AAV particle comprising a nucleic acid sequence encoding a siRNA molecule targeting the HTT gene at a different target site. The HTT may be targeted at 2, 3, 4, 5 or more than 5 sites.

[0848] In some embodiments, the AAV particles from any relevant species, such as, but not limited to, human, pig, dog, mouse, rat or monkey may be introduced into cells.

[0849] In some embodiments, the AAV particles may be introduced into cells which are relevant to the disease to be treated. As a non-limiting example, the disease is HD and the target cells are neurons and astrocytes. As another non-limiting example, the disease is HD and the target cells are medium spiny neurons, cortical neurons and astrocytes.

[0850] In some embodiments, the AAV particles may be introduced into cells which have a high level of endogenous expression of the target sequence.

[0851] In another embodiment, the AAV particles may be introduced into cells which have a low level of endogenous expression of the target sequence.

[0852] In some embodiments, the cells may be those which have a high efficiency of AAV transduction.

### Delivery to Subjects

[0853] The present disclosure additionally provides a method of delivering to a subject, including a mammalian subject such as, but not limited to, a patient in need thereof, any of the above-described AAV polynucleotides or AAV genomes comprising administering to the subject said AAV polynucleotide or AAV genome, or administering to the subject a particle comprising said AAV polynucleotide or AAV genome, or administering to the subject any of the described compositions, including pharmaceutical compositions.

[0854] The pharmaceutical compositions of AAV particles described herein may be characterized by one or more of bioavailability, therapeutic window and/or volume of distribution.

### III. Administration and Dosing

### Administration

[0855] The AAV particles comprising a nucleic acid sequence encoding the siRNA molecules of the present disclosure may be administered by any route which results in a therapeutically effective outcome. These include, but are not limited to, within the parenchyma of an organ such as, but not limited to, a brain (e.g., intraparenchymal), corpus striatum (intrastriatal), enteral (into the intestine), gastroenteral, epidural, oral (by way of the mouth), transdermal, peridural, intracerebral (into the cerebrum), intracerebroventricular (into the cerebral ventricles), subpial (under the pia), epicutaneous (application onto the skin), intradermal, (into the skin itself), subcutaneous (under the skin), nasal administration (through the nose), intravenous (into a vein), intravenous bolus, intravenous drip, intraarterial (into an artery), intramuscular (into a muscle), intracardiac (into the heart), intraosseous infusion (into the bone marrow), intrathecal (into the spinal canal), intraganglionic (into the ganglion), intraperitoneal, (infusion or injection into the peritoneum), intravesical infusion, intravitreal, (through the eye), intracavemous injection (into a pathologic cavity) intracavitary (into the base of the penis), intravaginal administration, intrauterine, extra-amniotic administration, transdermal (diffusion through the intact skin for systemic distribution), transmucosal (diffusion through a mucous membrane), transvaginal, insufflation (snorting), sublingual, sublabial, enema, eye drops (onto the conjunctiva), in ear drops, auricular (in or by way of the ear), buccal (directed toward the cheek), conjunctival, cutaneous, dental (to a tooth or teeth), electro-osmosis, endocervical, endosinusial, endotracheal, extracorporeal, hemodialysis, infiltration, interstitial, intra-abdominal, intra-amniotic, intra-articular, intrabiliary, intrabronchial, intrabursal, intracartilaginous (within a cartilage), intracaudal (within the cauda equine), intracisternal (within the cisterna magna cerebellomedularis intracomeal (within the cornea), dental intracornal, intracoronary (within the coronary arteries), intracorporus cavernosum (within the dilatable spaces of the corporus cavernosa of the penis), intradiscal (within a disc), intraductal (within a duct of a gland), intraduodenal (within the duodenum), intradural (within or beneath the dura), intraepidermal (to the epidermis), intraesophageal (to the esophagus), intragastric (within the stomach), intragingival (within the gingivae), intraileal (within the distal portion of the small intestine), intralesional (within or introduced directly to a localized lesion), intraluminal (within a lumen of a tube), intralymphatic (within the lymph), intramedullary (within the marrow cavity of a bone), intrameningeal (within the meninges), intraocular (within the eye), intraovarian (within the ovary), intrapericardial (within the pericardium), intrapleural (within the pleura), intraprostatic (within the prostate gland), intrapulmonary (within the lungs or its bronchi), intrasinal (within the nasal or periorbital sinuses), intraspinal (within the vertebral column), intrasynovial (within the synovial cavity of a joint), intratendinous (within a tendon), intratesticular (within the testicle), intrathecal (within the cerebrospinal fluid at any level of the cerebrospinal axis), intrathoracic (within the thorax), intratubular (within the tubules of an organ), intratumor (within a tumor), intratympanic (within the aunts media), intravascular (within a vessel or vessels), intraventricular (within a ventricle), iontophoresis (by means of electric current where ions of soluble salts migrate into the tissues of the body), irrigation (to bathe or flush open wounds or body cavities), laryngeal (directly upon the larynx), nasogastric (through the nose and into the stomach), occlusive dressing technique (topical route administration which is then covered by a dressing which occludes the area), ophthalmic (to the external eye), oropharyngeal (directly to the mouth and pharynx), parenteral, percutaneous, periarticular, peridural, perineural, periodontal, rectal, respiratory (within the respiratory tract by inhaling orally or nasally for local or systemic effect), retrobulbar (behind the pons or behind the eyeball), soft tissue, subarachnoid, subconjunctival, submucosal, topical, transplacental (through or across the placenta), transtracheal (through the wall of the trachea), transtympanic (across or through the tympanic cavity), ureteral (to the ureter), urethral (to the urethra), vaginal, caudal block, diagnostic, nerve block, biliary perfusion, cardiac perfusion, photopheresis or spinal.

[0856] In specific embodiments, compositions of AAV particles comprising a nucleic acid sequence encoding the siRNA molecules of the present disclosure may be administered in a way which facilitates the vectors or siRNA molecule to enter the central nervous system and penetrate into medium spiny and/or cortical neurons and/or astrocytes.

[0857] In some embodiments, the AAV particles comprising a nucleic acid sequence encoding the siRNA molecules of the present disclosure may be administered by intramuscular injection.

[0858] In some embodiments, the AAV particles comprising a nucleic acid sequence encoding the siRNA molecules of the present disclosure may be administered via intraparenchymal injection.

[0859] In some embodiments, the AAV particles comprising a nucleic acid sequence encoding the siRNA molecules of the present disclosure may be administered via intraparenchymal injection and intrathecal injection.

[0860] In some embodiments, the AAV particles comprising a nucleic acid sequence encoding the siRNA molecules of the present disclosure may be administered via intrastriatal injection.

[0861] In some embodiments, the AAV particles comprising a nucleic acid sequence encoding the siRNA molecules of the present disclosure may be administered via intrastriatal injection and another route of administration described herein.

[0862] In some embodiments, AAV particles that express siRNA duplexes of the present disclosure may be administered to a subject by peripheral injections (e.g., intravenous) and/or intranasal delivery. It was disclosed in the art that the peripheral administration of AAV particles for siRNA duplexes can be transported to the central nervous system, for example, to the neurons (e.g., U. S. Patent Publication Nos. 20100240739; and 20100130594; the content of each of which is incorporated herein by reference in their entirety).

[0863] In other embodiments, compositions comprising at least one AAV particle comprising a nucleic acid sequence encoding the siRNA molecules of the present disclosure may be administered to a subject by intracranial delivery (See, e.g., U. S. Pat. No. 8,119,611; the content of which is incorporated herein by reference in its entirety),

[0864] The AAV particle comprising a nucleic acid sequence encoding the siRNA molecules of the present disclosure may be administered in any suitable form, either as a liquid solution or suspension, as a solid form suitable for liquid solution or suspension in a liquid solution. The siRNA duplexes may be formulated with any appropriate and pharmaceutically acceptable excipient.

[0865] The AAV particle comprising a nucleic acid sequence encoding the siRNA molecules of the present disclosure may be administered in a “therapeutically effective” amount, i.e., an amount that is sufficient to alleviate and/or prevent at least one symptom associated with the disease, or provide improvement in the condition of the subject.

[0866] In some embodiments, the AAV particle may be administered to the CNS in a therapeutically effective amount to improve function and/or survival for a subject with Huntington's Disease (HD). As a non-limiting example, the vector may be administered by direct infusion into the striatum.

[0867] In some embodiments, the AAV particle may be administered to a subject (e.g., to the CNS of a subject via intrathecal administration) in a therapeutically effective amount for the siRNA duplexes or dsRNA to target the medium spiny neurons, cortical neurons and/or astrocytes. As a non-limiting example, the siRNA duplexes or dsRNA may reduce the expression of HTT protein or mRNA. As another non-limiting example, the siRNA duplexes or dsRNA can suppress HTT and reduce HTT mediated toxicity. The reduction of HTT protein and/or mRNA as well as HTT mediated toxicity may be accomplished with almost no enhanced inflammation.

[0868] In some embodiments, the AAV particle may be administered to a subject (e.g., to the CNS of a subject) in a therapeutically effective amount to slow the functional decline of a subject (e.g., determined using a known evaluation method such as the unified Huntington's disease rating scale (UHDRS)). As a non-limiting example, the vector may be administered via intraparenchymal injection.

[0869] In some embodiments, the AAV particle may be administered to the cisterna magna in a therapeutically effective amount to transduce medium spiny neurons, cortical neurons and/or astrocytes. As a non-limiting example, the vector may be administered intrathecally.

[0870] In some embodiments, the AAV particle may be administered using intrathecal infusion in a therapeutically effective amount to transduce medium spiny neurons, cortical neurons and/or astrocytes. As a non-limiting example, the vector may be administered intrathecally.

[0871] In some embodiments, the AAV particle comprising a modulatory polynucleotide may be formulated. As a non-limiting example, the baricity and/or osmolality of the formulation may he optimized to ensure optimal drug distribution in the central nervous system or a region or component of the central nervous system.

[0872] In some embodiments, the AAV particle comprising a modulatory polynucleotide may be delivered to a subject via a single route of administration.

[0873] In some embodiments, the AAV particle comprising a modulatory polynucleotide may be delivered to a subject via a multi-site route of administration. A subject may be administered the AAV particle comprising a modulatory polynucleotide at 2, 3, 4, 5 or more than 5 sites.

[0874] In some embodiments, a subject may be administered the AAV particle comprising a modulatory polynucleotide described herein using a bolus injection.

[0875] In some embodiments, a subject may be administered the AAV particle comprising a modulatory polynucleotide described herein using sustained delivery over a period of minutes, hours or days. The infusion rate may be changed depending on the subject, distribution, formulation or another delivery parameter.

[0876] In some embodiments, the AV particle described herein is administered via putamen and caudate infusion. As a non-limiting example, the dual infusion provides a broad striatal distribution as well as a frontal and temporal cortical distribution.

[0877] In some embodiments, the AAV particle is AAV-DJ8 which is administered via unilateral putamen infusion. As a non-limiting, example, the distribution of the administered AAV-DJ8 is similar to the distribution of AAV1 delivered via unilateral putamen infusion.

[0878] In some embodiments, the AAV particle described herein is administered via intrathecal (IT) infusion at C1. The infusion may be for 1, 2, 3, 4, 6, 7, 8, 9, 10, 11, 12, 13, 14, 15 or more than 15 hours.

[0879] In some embodiments, the selection of subjects for administration of the AAV particle described herein and/or the effectiveness of the dose, route of administration and/or volume of administration may be evaluated using imaging of the perivascular spaces (PVS) which are also known as Virchow-Robin spaces. PVS surround the arterioles and venules as they perforate brain parenchyma and are filled with cerebrospinal fluid (CSF)/interstitial fluid. PVS are common in the midbrain, basal ganglia, and centrum semiovale. While not wishing to be bound by theory, PVS may play a role in the normal clearance of metabolites and have been associated with worse cognition and several disease states including Parkinson's disease. PVS are usually are normal in size but they can increase in size in a number of disease states. Potter et al. (Cerebrovasc Dis. 2015 January; 39(4): 224-231; the contents of which are herein incorporated by reference in its entirety) developed a grading method where they studied a full range of PVS and rated basal ganglia, centrum semiovale and midbrain PVS. They used the frequency and range of PVS used by Mac and Lullich et al. (J Neurol Neurosurg Psychiatry. 2004 November; 75(11):1519-23; the contents of which are herein incorporated by reference in its entirety) and Potter et al. gave 5 ratings to basal ganglia and centrum semiovale PVS: 0 (none), 1 (1-10), 2 (11-20), 3 (21-40) and 4 (>40) and 2 ratings to midbrain PVS: 0 (non-visible) or 1 (visible). The user guide for the rating system by Potter et al. can be found at: www.sbirc.ed.acuk/documentslepvs-rating-scale-user-guide.pdf.

[0880] In some embodiments, AAV particles described herein is administered via thalamus infusion. Infusion into the thalamus may be bilateral or unilateral.

[0881] In some embodiments, AAV particles described herein are administered via putamen infusion. Infusion into the thalamus may be bilateral or unilateral.

[0882] In some embodiments. AAV particles described herein are administered via putamen and thalamus infusion. Dual infusion into the putamen and thalamus may maximize brain distribution via axonal transport to cortical areas. Evers et at. observed positive transduction of neurons in the motor cortex and part of the parietal cortex after bilateral injections of AAV5-GFP into the putamen and thalamus of tgHD minipigs (Molecular Therapy (2018), doi: 10.101.6/j.ymthe.2018.06.021). Infusion into the putamen and thalamus may be independently bilateral or unilateral. As a non-limiting example, AAV particles may be infused into the putamen and thalamus from both sides of the brain. As another non-limiting example, AAV particles may be infused into the left putamen and left thalamus, or right putamen and right thalamus. As yet another non-limiting example, AAV particles may be infused into the left putamen and right thalamus, or right putamen and left thalamus. Dual infusion may occur consecutively or simultaneously.

[0883] In some embodiments, the AAV particle comprising a modulatory polynucleotide may be delivered to a subject in the absence of gene therapy-related changes in body weight.

[0884] In some embodiments, the AAV particle comprising a modulatory polynucleotide may he delivered to a subject in the absence of gene therapy-related clinical signs, including but not limited to incoordination, inappetence, decreased feeding, and overall weakness.

[0885] In some embodiments, the AAV particle comprising a modulatory polynucleotide may be delivered to a subject in the absence of gene therapy-related changes to blood of a subject. In certain embodiments, the changes in blood of a subject are serum chemistry, and coagulation parameters.

[0886] In some embodiments, the AAV particle comprising a modulatory polynucleotide may he delivered to a subject in the absence of pathological changes to a tissue of a subject (e.g., brain of the subject). In certain embodiments the pathological change is a gross pathological change, such as, but not limited to, atrophy. In certain embodiments, the pathological change is a histopathological change, including but not limited to, HTT inclusions.

### Dosing

[0887] The pharmaceutical compositions of the present disclosure may be administered to a subject using any amount effective for reducing, preventing and/or treating a HTT associated disorder (e.g., Huntington' Disease (HD)), The exact amount required will vary from subject to subject, depending on the species, age, and general condition of the subject, the severity of the disease, the particular composition, its mode of administration, its mode of activity, and the like.

[0888] The compositions of the present disclosure are typically formulated in unit dosage form for ease of administration and uniformity of dosage. It will be understood, however, that the total daily usage of the compositions of the present disclosure may be decided by the attending physician within the scope of sound medical judgment. The specific therapeutic effectiveness for any particular patient will depend upon a variety of factors including the disorder being treated and the severity of the disorder: the activity of the specific compound employed; the specific composition employed; the age, body weight, general health, sex and diet of the patient; the time of administration, route of administration, and rate of excretion of the siRNA duplexes employed, the duration of the treatment; drugs used in combination or coincidental with the specific compound employed; and like factors well known in the medical arts.

[0889] In some embodiments, the age and sex of a subject may be used to determine the dose of the compositions of the present disclosure. As a non-limiting example, a subject who is older may receive a larger dose (e.g., 5-10%, 10-20%, 15-30%, 20-50%, 25-50% or at least 1%, 2%, 3%, 4%, 5%, 10%, 20%, 30%, 40%, 50%, 60%, 70%, 80%, 90% or more than 90% more) of the composition as compared to a younger subject. As another non-limiting example, a subject who is younger may receive a larger dose (e.g., 5-10%, 10-20%, 15-30%, 20-50%, 25-50% or at least 1%, 2%, 3%, 4%, 5%, 10%, 20%, 30%, 40%, 50%, 60%, 70%, 80%, 90% or more than 90% more) of the composition as compared to an older subject. As yet another non-limiting example, a subject who is female may receive a larger dose (e.g., 5-10%, 10-20%, 15-30%, 20-50%, 25-50% or at least 1%, 2%, 3%, 4%, 5%, 10%, 20%, 30%, 40%, 50%, 60%, 70%, 80%, 90% or more than 90% more) of the composition as compared to a male subject. As yet another non-limiting example, a subject who is male may receive a larger dose (e.g., 5-10%, 10-20%, 15-30%, 20-50%, 25-50% or at least 1%, 2%, 3%, 4%, 5%, 10%, 20%, 30%, 40%, 50%, 60%, 70%, 80%, 90% or more than 90% more) of the composition as compared to a female subject

[0890] In some specific embodiments, the doses of AAV particles the delivering siRNA duplexes of the present disclosure may be adapted depending on the disease condition, the subject and the treatment strategy.

[0891] In some embodiments, delivery of the compositions in accordance with the present disclosure to cells comprises a rate of delivery defined by [VG/hour=mL/hour*VG/mL] wherein VG is viral genomes, VG/mL is composition concentration, and mL/hour is rate of prolonged delivery.

[0892] In some embodiments, delivery of compositions in accordance with the present disclosure to cells may comprise a total concentration per subject between about 1×10⁶ VG and about 1×10⁶ VG. In some embodiments, delivery may comprise a composition concentration of about 1×10⁶, 2×10⁶, 3×10⁶, 4×10⁶, 5×10⁶, 6×10⁶, 7×10⁶, 8×10⁶, 9×10⁶, 1×10⁷, 2×10⁷, 3×10⁷, 4×10⁷, 5×10⁷, 6×10⁷, 7×10⁷, 8×10⁷, 9×10⁷, 1×10⁸, 2×10⁸, 3×10⁸, 4×10⁸, 5×10⁸, 6×10⁸, 7×10⁸, 8×10⁸, 9×10⁸, 1×10⁹, 2×10⁹, 3×10⁹, 4×10⁹, 5×10⁹, 6×10⁹, 7×10⁹, 8×10⁹, 9×10⁹, 1×10¹⁰, 2×10¹⁰, 3×10¹⁰, 4×10¹⁰, 5×10¹⁰, 6×10¹⁰, 7×10¹⁰, 8×10¹⁰, 9×10¹⁰, 1×10¹¹, 1.1×10¹¹, 1.2×10¹¹, 1.3×10¹¹, 1.4×10¹¹, 1.5×10¹¹, 1.6×10¹¹, 1.7×10¹¹, 1.8×10¹¹, 1.9×10¹¹, 2×10¹¹, 2.1×10¹¹, 2.2×10¹¹, 2.3×10¹¹, 2.4×10¹¹, 2.5×10¹¹, 2.6×10¹¹, 2.7×10¹¹, 2.8×10¹¹, 2.9×10¹¹, 3×10¹¹, 4×10¹¹, 5×10¹¹, 6×10¹¹, 7×10¹¹, 7.1×10¹¹, 7.2×10¹¹, 7.3×10¹¹, 7.4×10¹¹, 7.5×10¹¹, 7.6×10¹¹, 7.7×10¹¹, 7.8×10¹¹, 7.9×10¹¹, 8×10¹¹, 9×10¹¹, 1×10¹², 1.1×10¹², 1.2×10¹², 1.3×10¹², 1.4×10¹², 1.5×10¹², 1.6×10¹², 1.7×10¹², 1.8×10¹², 1.9×10¹², 2×10¹², 2.1×10¹², 2.2×10¹², 2.3×10¹², 2.4×10¹², 2.5×10¹², 2.6×10¹², 2.7×10¹², 2.8×10¹², 2.9×10¹², 3×10¹², 3.1×10¹², 3.2×10¹², 3.3×10¹², 3.4×10¹², 3.5×10¹², 3.6×10¹², 3.7×10¹², 3.8×10¹², 3.9×10¹², 4×10¹², 4.1×10¹², 4.2×10¹², 4.3×10¹², 4.4×10¹², 4.5×10¹², 4.6×10¹², 4.7×10¹², 4.8×10¹², 4.9×10¹², 5×10¹², 6×10¹², 6.1×10¹², 6.2×10¹², 6.3×10¹², 6.4×10¹², 6.5×10¹², 6.6×10¹², 6.7×10¹², 6.8×10¹², 6.9×10¹², 7×10¹², 8×10¹², 8.1×10¹², 8.2×10¹², 8.3×10¹², 8.4×10¹², 8.5×10¹², 8.6×10¹², 8.7×10¹², 8.8×10¹², 8.9×10¹², 9×10¹², 1×10¹³, 1.1×10¹³, 1.2×10¹³, 1.3×10¹³, 1.4×10¹³, 1.5×10¹³, 1.6×10¹³, 1.7×10¹³, 1.8×10¹³, 1.9×10¹³, 2×10¹³, 2.7×10¹³, 3×10¹³, 4×10¹³, 5×10¹³, 6×10¹³, 6.7×10¹³, 7×10¹³, 8×10¹³, 9×10¹³, 1×10¹⁴, 2×10¹⁴, 3×10¹⁴, 4×10¹⁴, 5×10¹⁴, 6×10¹⁴, 7×10¹⁴, 8×10¹⁴, 9×10¹⁴, 1×10¹⁵, 2×10¹⁵, 3×10¹⁵, 4×10¹⁵, 5×10¹⁵, 6×10¹⁵, 7×10¹⁵, 8×10¹⁵ 9×10¹⁵, or 1×10¹⁶ VG/subject or VG/dose.

[0893] In some embodiments, delivery of compositions in accordance with the present disclosure to cells may comprise a total concentration per subject between about 1×10⁶ VG/kg and about 1×10¹⁶ VG/kg. In some embodiments, delivery may comprise a composition concentration of about 1×10⁶, 2×10⁶, 3×10⁶, 4×10⁶, 5×10⁶, 6×10⁶, 7×10⁶, 8×10⁶, 9×10⁶, 1×10⁷, 2×10⁷, 3×10⁷, 4×10⁷, 5×10⁷, 6×10⁷, 7×10⁷, 8×10⁷, 9×10⁷, 1×10⁸, 2×10⁸, 3×10⁸, 4×10⁸, 5×10⁸, 6×10⁸, 7×10⁸, 8×10⁸, 9×10⁸, 1×10⁹, 2×10⁹, 3×10⁹, 4×10⁹, 5×10⁹, 6×10⁹, 7×10⁹, 8×10⁹, 9×10⁹, 1×10¹⁰, 2×10¹⁰, 3×10¹⁴, 4×10¹⁰, 5×10¹⁰, 6×10¹⁰, 7×10¹⁰, 8×10¹⁰, 9×10¹⁰, 1×10¹¹, 1.1×10¹¹, 1.2×10¹¹, 1.3×10¹¹, 1.4×10¹¹, 1.5×10¹¹, 1.6×10¹¹, 1.7×10¹¹, 1.8×10¹¹, 1.9×10¹¹, 2×10¹¹, 2.1×10¹¹, 2.2×10¹¹, 2.3×10¹¹, 2.4×10¹¹, 2.5×10¹¹, 2.6×10¹¹, 2.7×10¹¹, 2.8×10¹¹, 2.9×10¹¹, 3×10¹¹, 4×10¹¹, 5×10¹¹, 6×10¹¹, 7×10¹¹, 7.1×10¹¹, 7.2×10¹¹, 7.3×10¹¹, 7.4×10¹¹, 7.5×10¹¹, 7.6×10¹¹, 7.7×10¹¹, 7.8×10¹¹, 7.9×10¹¹, 8×10¹¹, 9×10¹¹, 1×10¹², 1.1×10¹², 1.2×10¹², 1.3×10¹², 1.4×10¹², 1.5×10¹², 1.6×10¹², 1.7×10¹², 1.8×10⁷ 1.9×10¹², 2×10¹², 2.1×10^{.12} 2.2×10¹², 2.3×10¹², 2.4×10¹², 2.5×10¹², 2.6×10¹², 2.7×10¹², 2.8×10¹², 2.9×10¹², 3×10¹², 3.1×10¹² 3.2×10¹², 3.3×10¹² 3.4×10¹², 3.5×10¹², 3.6×10¹², 3.7×10¹², 3.8×10¹², 3.9×10¹², 4×10¹², 4.1×10¹², 4.2×10¹², 4.3×10¹², 4.4×10¹², 4.5×10¹², 4.6×10¹², 4.7×10¹², 4.8×10¹², 4.9×10¹², 5×10¹², 6×10¹², 6.1×10¹², 6.2×10¹², 6.3×10¹², 6.4×10¹², 6.5×10¹², 6.6×10¹², 6.7×10¹², 6.8×10¹², 6.9×10¹², 7×10¹², 8×10¹², 8.1×10¹², 8.2×10¹², 8.3×10¹², 8.4×10¹², 8.5×10¹², 8.6×10¹², 8.7×10¹², 8.8×10¹², 8.9×10¹², 9×10¹², 1×10¹³, 1.1×10¹³, 1.2×10¹³, 1.3×10¹³, 1.4×10¹³, 1.5×10¹³, 1.6×10¹³, 1.7×10¹³, 1.8×10¹³, 1.9×10¹³, 2×10¹³, 2.7×10¹³, 3×10¹³, 4×10¹³, 5×10¹³, 6×10¹³, 6.7×10¹³, 7×10¹³, 8×10¹³, 9×10¹³, 1×10¹⁴, 2×10¹⁴, 3×10¹⁴, 4×10¹⁴, 5×10¹⁴, 6×10¹⁴, 7×10¹⁴, 8×10¹⁴, 9×10¹⁴, 1×10¹⁵, 2×10¹⁵, 3×10¹⁵, 4×10¹⁵, 5×10¹⁵, 6×10¹⁵, 78×10¹⁵, 9×10¹⁵, or 1×10¹⁶ VG/kg.

[0894] In some embodiments, delivery of the compositions to accordance with be present disclosure to cells may comprise a total concentration between about 1×10⁶ VG/mL and about 1×10¹⁶ VG/mL. In some embodiments, delivery may comprise a composition concentration of about 1×10⁶, 2×10⁶, 3×10⁶, 4×10⁶, 5×10⁶, 6×10⁶, 7×10⁶, 8×10⁶, 9×10⁶, 1×10⁷, 2×10⁷, 3×10⁷, 4×10⁷, 5×10⁷, 6×10⁷, 7×10⁷, 8×10⁷, 9×10⁷, 1×10⁸, 2×10⁸, 3×10⁸, 4×10⁸, 5×10⁸, 6×10⁸, 7×10⁸, 8×10⁸, 9×10⁸, 1×10⁹, 2×10⁹, 3×10⁹, 4×10⁹, 5×10⁹, 6×10⁹, 7×10⁹, 8×10⁹, 9×10⁹, 1×10¹⁰, 2×10¹⁰, 3×10¹⁰, 4×10¹⁰, 5×10¹⁰, 6×10¹⁰, 7×10¹⁰, 8×10¹⁰, 9×10¹⁰, 1×10¹¹, 1.1×10¹¹, 1.2×10¹¹, 1.3×10¹¹, 1.4×10¹¹, 1.5×10¹¹, 1.6×10¹¹, 1.7×10¹¹, 1.8×10¹¹, 1.9×10¹¹, 2×10¹¹, 3×10¹¹, 4×10¹¹, 5×10¹¹, 6×10¹¹, 7×10¹¹, 8×10¹¹, 9×10¹¹, 1×10¹², 1.1×10¹², 1.2×10¹², 1.3×10¹², 1.4×10¹², 1.5×10¹², 1.6×10¹², 1.7×10¹², 1.8×10¹², 1.9×10¹², 2×10¹², 2.1×10¹² 2.2×10¹², 3×10¹², 2.4×10¹², 2.5×10¹², 2.6×10¹², 2.7×10¹², 2.8×10¹², 2.9×10¹², 3×10¹², 3.1×10¹², 3.2×10¹², 3.3×10¹², 3.4×10¹², 3.5×10¹², 3.6×10¹², 3.7×10¹², 3.8×10¹², 3.9×10 4×10¹², 4.1×10¹², 4.2×10¹², 4.3×10¹², 4.4×10³², 4.5×10¹², 4.6×10¹², 4.7×10¹², 4.8×10¹², 49×10¹², 5×10¹², 6×10¹², 6.1×10¹², 6.2×10¹², 6.3×10¹², 6.4×10¹², 6.5×10¹², 6.6×10¹², 6.7×10¹², 6.8×10¹², 6.9×10¹², 7×10¹², 8×10¹², 9×10¹², 1×10¹³, 1.1×10¹³, 1.2×10¹³, 1.3×10¹³, 1.4×10¹³, 1.5×10¹³, 1.6×10¹³, 1.7×10¹³, 1.8×10¹³, 1.9×10¹³, 2×10¹³, 2.7×10¹³, 3×10¹³, 4×10¹³, 5×10¹³, 6×10¹³, 6.7×10¹³, 7×10¹³, 8×10¹³, 9×10¹³, 1×10¹⁴, 2×10¹⁴, 3×10¹⁴, 4×10¹⁴, 5×10¹⁴, 6×10¹⁴, 7×10¹⁴⁹, 8×10¹⁴, 9×10¹⁴, 1×10¹⁵, 2×10¹⁵, 3×10¹⁵, 4×10¹⁵, 5×10¹⁵, 6X10¹⁵, 7×10¹⁵, 8×10¹⁵, 9×10¹⁵, or 1×10¹⁶ VG/mL.

[0895] In some embodiments, the compositions in accordance with the present disclosure to be delivered may comprise a concentration between 9×10¹¹VG/mL-2.7×10¹³ VG/mL. In some embodiments, the compositions in accordance with the present disclosure to be delivered may comprise a concentration of 2.7×10¹³ VG/mL.

[0896] In some embodiments, delivery of the compositions in accordance with the present disclosure o cells may comprise a total concentration between about 1×10⁶ total capsid/mL and about 1×10¹⁶ total capsid/mL. In some embodiments, delivery may comprise a composition concentration of about 1×10⁶, 2×10⁶, 3×10⁶, 4×10⁶, 5×10⁶, 6×10⁶, 7×10⁶, 8×10⁶, 9×10⁶, 1×10⁷, 2×10⁷, 3×10⁷, 4×10⁷, 5×10⁷, 6×10⁷, 7×10⁷, 8×10⁷, 9×10⁷, 1×10⁸, 2×10⁸, 3×10⁸, 4×10⁸, 5×10⁸, 6×10⁸, 7×10⁸, 8×10⁸, 9×10⁸, 1×10⁹, 2×10⁹, 3×10⁹, 4×10⁹, 5×10⁹, 6×10⁹, 7×10⁹, 8×10⁹, 9×10⁹, 1×10¹⁰, 2×10¹⁰, 3×10¹⁰, 4×10¹⁰, 5×10¹⁰, 6×10¹⁰, 7×10¹⁰, 8×10¹⁰, 9×10¹⁰, 1×10¹¹, 2×10¹¹, 3×10¹¹, 4×10¹¹, 5×10¹¹, 6×10¹¹, 7×10¹¹, 8×10¹¹, 9×10¹¹, 1×10¹², 1.1×10¹², 1.2×10¹², 1.3×10¹², 4×10¹², 1.5×10¹², 1.6×10¹², 1.7×10¹², 1.8×10¹², 1.9×10¹², 2×10¹², 2.1×10¹², 2.2×10¹², 2.3×10¹², 2.4×10¹², 2.5×10¹², 2.6×10¹², 2.7×10¹², 2.8×10¹², 2.9×10¹²², 3×10¹², 3.1×10¹², 3.2×10¹² 3.3×10¹², 3.4×10¹², 3.5×10¹², 3.6×10¹², 3.7×10¹², 3.8×10¹², 3.9×10¹², 4×10¹², 4.1×10¹², 2×10¹², 4.3×10¹², 4.4×10¹², 4.5×10¹², 4.6×10¹², 4.7×10¹², 4.8×10¹², 4.9×10¹², 5×10¹², 6×10¹², 7×10¹², 8×10¹², 9×10¹², 1×10¹³, 2×10¹³, 2.7×10¹³, 3×10¹³, 4×10¹³, 5×10¹³, 6×10¹³, 6.7×10¹³, 7×10¹³, 8×10¹³, 9×10¹³, 1×10¹⁴, 2×10¹⁴, 3×10¹⁴, 4×10¹⁴, 5×10¹⁴, 6×10¹⁴, 7×10¹⁴, 8×10¹⁴, 9×10¹⁴, 1×10¹⁵, 2×10¹⁵, 3×10¹⁵, 4×10¹⁵, 5×10¹⁵, 6×10¹⁵, 7×10¹⁵, 8×10¹⁵, 9×10¹⁵, or 1×10¹⁶ total capsid/mL.

[0897] In certain embodiments, the desired siRNA duplex dosage may be delivered using multiple administrations (e.g., two, three, tour, five, six, seven, eight, nine, ten, eleven, twelve, thirteen, fourteen, or more administrations). When multiple administrations are employed, split dosing regimens such as those described herein may be used. As used herein, a “split dose” is the division of single unit dose or total daily dose into two or more doses, e.g., two or more administrations of the single unit dose. As used herein, a “single unit dose” is a dose of any modulatory polynucleotide therapeutic administered in one dose/at one time/single route/single point of contact, i.e., single administration event. As used herein, a “total daily dose” is an amount given or prescribed in a 24-hour period. It may be administered as a single unit dose. In some embodiments, the AAV particles comprising the modulatory polynucleotides of the present disclosure are administered to a subject in split doses. They may be formulated in buffer only or in a formulation described herein.

[0898] In some embodiments, the dose, concentration and/or volume of the composition described herein may be adjusted depending on the contribution of the caudate or putamen to cortical and subcortical distribution after administration. The administration may be intracerebroventricular, intrastriatal, intraputaminal, intrathalamic, intraparenchymal, subpial. and/or intrathecal administration.

[0899] In some embodiments, the dose, concentration and/or volume of the composition described herein may be adjusted depending on the cortical and neuraxial distribution following administration by intracerebroventricular, intrastriatal, intraputaminal, intrathalamic, intraparenchymal, subpial, and/or intrathecal delivery.

[0900] The volume of the pharmaceutical compositions to be administered may be determined based on the subject, the volume of the targeted structure, and/or the dose of the composition. In some embodiments, the subject is a rodent such as, but not limited to a mouse or a rat. The mouse or the rat may be a wild-type (WT) or a transgenic rat or mouse. As a non-limiting example, the transgenic mouse is the YAC128 mouse. As another non-limiting example, the transgenic mouse is a BACHD mouse. In some embodiments, the subject is a primate. In some embodiments, the subject is a non-human primate. In some embodiments, the subject is a human.

[0901] In some embodiments, the volume of the pharmaceutical composition to be infused to a putamen or thalamus in a subject may be between about 0.5-3000 μL per side. In some embodiments, the volume of the composition to be infused to a putamen or thalamus may be about 5 μl, 10 μl, 25 μl, 50 μl, 75 μl, 100 μl, 125 μl, 150 μl, 175 μl, 200 μl, 225 μl, 250 μl, 275 μl, 300 μl, 325 μl, 350 μl, 375 μl, 400 μl, 425 μl, 450 μl, 475 μl, 500 525 μl, 550 μl, 575 μl, 600 μl, 625 μl, 650 μl, 675 μl, 700 μl, 725 μl, 750 μl, 775 μl, 800 μl, 825 μl, 850 μl, 875 μl, 900 μl, 925 μl, 950 μl, 975 μl, 1000 μl, 1025 μl, 1050 μl, 1075 μl, 1100 μl, 1125 μl, 1150 μl, 1175 μl, 1200 μl, 1225 μl, 1250 μl, 1275 μl, 1300 μl, 1325 μl, 1350 μl, 1375 μl, 1400 μl, 1425 μl, 1450 μl, 1475 μl, 1500 μl, 1600 μl, 1700 μl, 1800 μl, 1900 μl, 2000 μl, 2250 μl, 2500 μl, 2750 μl, or 3000 μl per side.

[0902] In some embodiments, the volume of the pharmaceutical composition to be infused to a striatum in a subject may be between about 5-3000 μL per side. In some embodiments, the volume of the composition to be infused to a putamen or thalamus may be about 5 10 μl, 25 μl, 50 μl, 75 μl, 100 μl, 125 μl, 150 μl, 175 μl, 200 μl, 225 μl, 250 μl, 275 μl, 300 μl, 325 μl, 350 μl, 375 μl, 400 μl, 425 μl, 450 μl, 475 μl, 500 μl, 525 μl, 550 μl, 575 μl, 600 μl, 625 μl, 650 μl, 675 μl, 700 μl, 725 μl, 750 μl, 775 μl, 800 μl, 825 850 μl, 875 μl, 900 μl, 925 μl, 950 μl, 975 μl, 1000 μl, 1025 μl, 1050 μl, 1075 μl, 1100 μl, 1125 μl, 1150 μl, 1175 μl, 1200 μl, 1225 μl, 1250 μl, 1275 μl, 1300 μl, 1325 μl, 1350 μl, 1375 μl, 1400 μl, 1425 μl, 1450 μl, 1475 μl, 1500 μl, 1600 μl, 1700 μl, 1800 μl, 1900 μl, 2000 μl, 2250 μl, 2500 μl, 2750 μl, or 3000 μl, per side.

[0903] In some embodiments, the pharmaceutical composition described herein is administered to a subject which is mouse. In some embodiments, the volume of the composition to be infused to the striatum of the mouse is 1-10 μl, per side. In some embodiments, the volume of the composition to be infused to the striatum in a mouse may be about 1 μl, 2 μl, 3 μl, 4 μl, 5 μl, 6 μl, 7 μl, 8 μl, 9 μl, or 10 μl per side. In some embodiments, the volume of the composition to be infused to the striatum in a mouse is 5 μl per side.

[0904] In some embodiments, the pharmaceutical composition described herein is administered to a subject which is a non-human primate. In some embodiments, the volume of the composition to be infused to the putamen in a non-human primate is 50-150 μl per side. In some embodiments, the volume of the composition to be infused to the putamen in a non-human primate is 100-200 μl per side. in some embodiments, the volume of the composition to he infused to the putamen in a non-human primate is 175-525 μL per side.

[0905] In some embodiments, the volume of the composition to be infused to the thalamus in a non-human primate is 70-250 μL per side. In some embodiments, the volume of the composition to be infused to the thalamus in a non-human primate is 100-250 μl, per side. In some embodiments, the volume of the composition to be infused to the thalamus in a non-human is 200-300 μL per side. In some embodiments, the volume of the composition to be mused to the thalamus in a non-human primate is 450-1500 μL per side.

[0906] In some embodiments, the pharmaceutical composition described herein is administered to a subject Which is a human. In some embodiments, the volume of the pharmaceutical composition administered to the putamen in a human may be no more than 2000 μL/hemisphere. In some embodiments, the volume of the composition to be infused to the putamen in a human is no more than 1500 μL/hemisphere per side.

[0907] In some embodiments, the volume of the composition to be infused to the putamen in a human is 300-1500 μL per side. In some embodiments, the volume of the composition to be infused to the putamen in a human may be about 300 μl, 325 μl, 350 μl, 375 μl, 400 μl, 425 μl, 450 μl, 475 μl, 500 μl, 525 μl, 550 μl, 575 μl, 600 μl, 625 μl, 650 μl, 675 μl, 700 μl, 725 μl, 750 μl, 775 μl, 800 μl, 825 μl, 850 μl, 875 μl, 900 μl, 925 μl, 950 μl, 975 μl, 1000 μl, 1025 μl, 1050 μl, 1075 μl, 1100 μl, 1125 μl, 1150 μl, 1175 μl, 1200 μl, 1225 μl, 1250 μl, 1275 μl, 1300 μl, 1325 μl, 1350 μl, 1375 μl, 1400 μl, 1425 μl, 1450 μl, 1475 μl, or 1500 μl per side. In some embodiments, the volume of the composition to be infused to the putamen in a human is 900 μl per side.

[0908] In some embodiments, the volume of the pharmaceutical composition administered to the thalamus in a human may be no more than 3000 μL/hemisphere, In some embodiments, the volume of the composition to be infused to a thalamus in a human is no more than 2500 μl, per side.

[0909] In some embodiments, the volume of the composition to be infused to a thalamus in a human is 1300-2500 μl, per side. In some embodiments, the volume of the composition to be infused to a thalamus in a human may be 1300 μL, 1325 μL, 1350 μL, 1375 μL, 1400 μL, 1425 μL, 1450 μL, 1475 μL, 1500 μL, 1525 μL, 1550 μL, 1575 μL, 1600 μL, 1625 μL, 1650 μL, 1675 μL, 1700 μL, 1725 μL, 1750 μL, 1775 μL, 1800 μL, 1825 μL, 1850 μL, 1875 μL, 1900 μL, 1925 μL, 1950 μL, 1975 μL, 2000 μL, 2025 μL, 2050 μL, 2075 μL, 2100 μL, 2125 μL, 2150 μL, 2175 μL, 2200 μL, 2225 μL, 2250 μL, 2275 μL, 2300 μL, 2325 μL, 2350 μL, 2375 μL, 2400 μL, 2425 μL, 2450 μL, 2475 μL, or 2500 μL per side. In some embodiments, the volume of the composition to be infused to the thalamus in a human is 1700 μl per side.

[0910] In some embodiments, the dose administered to the striatum in a subject may be about 1×10⁹ to 1×10¹⁵ VG per side. In some embodiments, the dose administered to the striatum in a subject may be about 1×10⁹, 2×10⁹, 3×10⁹, 4×10⁹, 5×10⁹, 6×10⁹, 7×10⁹, 8×10⁹, 9×10⁹, 1×10¹⁰, 2×10¹⁰ 3×10¹⁰, 4×10¹⁰, 5×10¹⁰, 6×10¹⁰, 7×10¹⁰, 8×10¹⁰, 9×10¹⁰, 1×10¹¹, 2×10¹¹, 3×10¹¹, 4×10¹¹, 5×10¹¹, 6×10¹¹, 7×10¹¹, 8×10¹¹, 9×10¹¹, 1.5×10¹², 2×10¹², 2.5×10¹², 3×10¹², 3.5×10¹², 4×10¹², 4.5×10¹², 5×10¹², 5.5×10¹², 6×10¹², 6.5×10¹², 7×10¹², 7.5×10¹², 8×10¹², 8.5×10¹², 9×10¹², 9.5×10¹², 1×10¹³, 1.5×10¹³, 2×10¹³, 2.5×10¹³, 3×10¹³, 3.5×10¹³, 4×10¹³, 4.5×10¹³, 5×10¹³, 5.5×10¹³, 6×10¹³, 6.5×10¹³, 7×10¹³, 7.5×10¹³, 8×10¹³, 8.5×10¹³, 9×10¹³, 1×10¹⁴, 2×10¹⁴, 3×10¹⁴, 4×10¹⁴, 5×10¹⁴, 6×10¹⁴, 7×10¹⁴, 8×10¹⁴, 9×10¹⁴, or 1×10¹⁵ VG per side.

[0911] In some embodiments, the dose administered to the putamen in a subject may be about 1×10¹⁰ to 1×10¹⁵ VG per side. In some embodiments, the dose administered to the putamen in a subject may be about 1×10¹⁰, 5×10¹⁰, 1×10¹¹, 2×10¹¹, 3×10¹¹, 4×10¹¹, 5×10¹¹, 6×10¹¹, 7×10¹¹, 8×10¹¹, 9×10¹¹, 1×10¹², 1.5×10¹², 2×10¹², 2.5×10¹², 3×10¹², 3.5×10¹², 4×10¹², 4.5×10¹², 5×10¹², 5.5×10¹², 6×10¹², 6.5×10¹², 7×10¹², 7.5×10¹², 8×10¹², 8.5×10¹², 9×10¹², 9.5×10¹², 1×10¹³, 1.5×10¹³, 2×10¹³, 2.5×10¹³, 3×10¹³, 3.5×10¹³, 4×10¹³, 4.5×10¹³, 5×10¹³, 5.5×10¹³, 6×10¹³, 6.5×10¹³, 7×10¹³, 7.5×10¹³, 8×10¹³, 8.5×10¹³, 9×10¹³, 1×10¹⁴, 2×10¹⁴, 3×10¹⁴, 4×10¹⁴, 5×10¹⁴, 6×10¹⁴, 7×10¹⁴, 8×10¹⁴, 9×10¹⁴, or 1×10¹⁵ VG per side.

[0912] In some embodiments, the dose administered to the thalamus in a subject may be about 1×10¹⁰to 1×10¹⁵ VG per side. In some embodiments, the close administered to the thalamus in a subject may be about 1×10¹⁰, 5×10¹⁰, 1×10¹¹, 2×10¹¹, 3×10¹¹, 4×10¹¹, 5×10¹¹, 6×10¹¹, 7×10¹¹, 8×10¹¹, 9×10¹¹, 1×10¹², 1.5×10¹², 2×10¹², 2.5×10¹², 3×10¹², 3.5×10¹², 4×10¹², 4.5×10¹², 5×10¹², 5.5×10¹², 6×10¹², 6.5×10¹², 7×10¹², 7.5×10¹², 8×10¹², 8.5×10¹², 9×10¹², 9.5×10¹², 1×10¹³, 1.5×10¹³, 2×10¹³, 2.5×10¹³, 3×10¹³, 3.5×10¹³, 4×10¹³, 4.5×10¹³, 5×10¹³, 5.5×10¹³, 6×10¹³, 6.5×10¹³, 7×10¹³, 7.5×10¹³, 8×10¹³, 8.5×10¹³, 9×10¹³, 1×10¹⁴, 2×10¹⁴, 3×10¹⁴, 4×10¹⁴, 5×10¹⁴, 6×10¹⁴, 7×10¹⁴, 8×10¹⁴, 9×10¹⁴, or 1×10¹⁵ VG per side.

[0913] In some embodiments, the total dose administered to the striatum in a subject may be about 1×10⁹ to 5×10¹⁵ VG. In some embodiments, the dose administered to the striatum in a subject may be about 1×10⁹, 2×10⁹, 3×10⁹, 4×10⁹, 5×10⁹, 6×10⁹, 7×10⁹, 8×10⁹, 9×10⁹, 1×10¹⁰, 2×10¹⁰, 3×10¹⁰, 4×10¹⁰, 5×10¹⁰, 6×10¹⁰, 7×10¹⁰, 8×10¹⁰, 9×10¹⁰, 1×10¹¹, 2×10¹¹, 3×10¹¹, 4×10¹¹, 5×10¹¹, 6×10¹¹, 7×10¹¹, 8×10¹¹, 9×10¹¹, 1×10¹², 1.5×10¹², 2×10¹², 2.5×10¹², 3×10¹², 3.5×10¹², 4×10¹², 4.5×10¹², 5×10¹², 5.5×10¹², 6×10¹², 6.5×10¹², 7×10¹², 7.5×10¹², 8×10¹², 8.5×10¹², 9×10¹². 9.5×10¹², 1×10¹³, 1.5×10¹³, 2×10¹³, 2.5×10¹³, 3×10¹³, 3.5×10¹³, 4×10¹³, 4.5×10¹³, 5×10¹³, 5.5×10¹³, 6×10¹³, 6.5×10¹³, 7×10¹³, 7.5×10¹³, 8×10¹³, 8.5×10¹³, 9×10¹³, 1×10¹⁴, 2×10¹⁴, 3×10¹⁴, 4×10¹⁴, 5×10¹⁴, 6×10¹⁴, 7×10¹⁴, 8×10¹⁴, 9×10¹⁴, or 1×10¹⁵ 2×10¹⁵, 3×10¹⁵, 4×10¹⁵, or 5×10¹⁵ VG.

[0914] In some embodiments, the total dose administered to the subject via putamen and thalamus infusion is 1×10¹⁰to 5×10¹⁵ VG. In some embodiments, the total dose administered to the subject via putamen and thalamus infusion may be about 1×10¹⁰, 5×10¹⁰, 1×10¹¹, 2×10¹¹, 3×10¹¹, 4×10¹¹, 5×10¹¹, 6×10¹¹, 7×10¹¹, 8×10¹¹, 9×10¹¹, 1×10¹², 1.5×10¹², 2×10¹², 2.5×10¹², 3×10¹², 3.5×10¹², 4×10¹², 4.5×10¹², 5×10¹², 5.5×10¹², 6×10¹², 6.5×10¹², 7×10¹², 7.5×10¹², 8×10¹², 8.5×10¹², 9×10¹², 9.5×10¹², 1×10¹³, 1.5×10¹³, 2×10¹³, 2.5×10¹³, 3×10¹³, 3.5×10¹³, 4×10¹³, 4.5×10¹³, 5×10¹³, 5.5×10¹³, 6×10¹³, 6.5×10¹³, 7×10¹³, 7.5×10¹³, 8×10¹³, 8.5×10¹³, 9×10¹³, 1×10¹⁴, 2×10¹⁴, 3×10¹⁴, 4×10¹⁴, 5×10¹⁴, 6×10¹⁴, 7×10¹⁴, 8×10¹⁴, 9×10¹⁴, 1×10¹⁵, 2×10¹⁵, 3×10¹⁵, 4×10¹⁵, or 5×10¹⁵ VG.

[0915] In some embodiments, the dose administered to the striatum in mouse may be about 4×10⁹ to 2×10¹¹ VG per side. In some embodiments, the dose administered to the striatum in a mouse may be about 4×10⁹, 5×10⁹, 6×10⁹, 7×10⁹, 8×10⁹, 9×10⁹, 1×10¹⁰, 2×10¹⁰, 3×10¹⁰, 4×10¹⁰, 5×10¹⁰, 6×10¹⁰, 7×10¹⁰, 8×10¹⁰, 9×10¹⁰, 1×10¹¹ or 2×10¹¹ VG per side. In some embodiments, the dose administered to the striatum in a mouse may be 4.4×10⁹ VG per side. In some embodiments, the dose administered to the striatum in a mouse may be 1.4×10¹⁰ VG per side. In some embodiments, the dose administered to the striatum in a mouse may be 4.4×10¹⁰ VG per side. In some embodiments, the dose administered to the striatum in a mouse may be 1.4×10¹¹ VG per side.

[0916] In some embodiments, the dose administered to the putamen in a non-human primate may be about 9×10¹⁰ to 5.5×10¹² VG per side. In some embodiments, the dose administered to the putamen in a non-human primate may be about 9×10¹⁰, 1×10¹¹, 2×10¹¹, 3×10¹¹, 4×10¹¹, 5×10¹¹, 6×10¹¹, 7×10¹¹, 8×10¹¹, 9×10¹¹, 1×10¹², 1.5×10¹², 2×10¹², 2.5×10¹², 3×10¹², 3.5×10¹², 4×10¹², 4.5×10¹², 5×10¹², or 5.5×10¹² VG per side.

[0917] In some embodiments, the dose administered to the putamen in a non-human primate may be about 2×10¹⁰ to 5×10¹¹ VG per side. In some embodiments, the dose administered to the putamen in a non-human primate may be about 2.0×10¹⁰, 2.2×10¹⁰, 2.4×10¹⁰, 2.6×10¹⁰, 2.8×10¹⁰, 3.0×10¹⁰, 3.2×10¹⁰, 3.4×10¹⁰, 3.6×10¹⁰, 3.8×10¹⁰, 4.0×10¹⁰, 4.2×10¹⁰, 4.4×10¹⁰, 4.6×10¹⁰, 4.8×10¹⁰, 5.0×10¹⁰, 5.2×10¹⁰, 5.4×10¹⁰, 5.6×10¹⁰, 5.8×10¹⁰, 6.0×10¹⁰, 6.2×10¹⁰, 6.4×10¹⁰, 6.6×10¹⁰, 6.8×10¹⁰, 7.0×10¹⁰, 7.2×10¹⁰, 7.4×10¹⁰, 7.6×10¹⁰, 7.8×10¹⁰, 8.0×10¹⁰, 8.2×10¹⁰, 8.4×10¹⁰, 8.6×10¹⁰, 8.8×10¹⁰, 9.0×10¹⁰, 9.2×10¹⁰, 9.4×10¹⁰, 9.6×10¹⁰, 9.8×10¹⁰, 1.0×10¹¹, 1.2×10¹¹, 1.4×10¹¹, 1.6×10¹¹, 1.8×10¹¹, 2.0×10¹¹, 2.2×10¹¹, 2.4×10¹¹, 2.6×10¹¹, 2.8×10¹¹, 3.0×10¹¹, 3.2×10¹¹, 3.4×10¹¹, 3.6×10¹¹, 3.8×10¹¹, 4.0×10¹¹, 4.2×10¹¹, 4.4×10¹¹, 4.6×10¹¹, 4.8×10¹¹, 5.0×10¹¹VG per side.

[0918] In some embodiments, the dose administered to the thalamus in a non-human primate may be about 1.5×10¹¹ to 8.5×10¹² VG per side. in some embodiments, the dose administered to the thalamus in a non-human primate may be about 1.5×10¹¹, 1.8×10¹¹, 2×10¹¹, 3×10¹¹, 4×10¹¹, 5×10¹¹, 6×10¹¹, 7×10¹¹, 8×10¹¹, 9×10¹¹, 1×10¹², 1.5×10¹², 2×10¹², 2.5×10¹², 3×10¹², 3.5×10¹², 4×10¹², 4.5×10¹², 5×10¹², 5.5×10¹², 6×10¹², 6.5×10¹², 7×10¹², 7.5×10¹², 8×10¹², or 8.5×10¹² VG per side.

[0919] In some embodiments, the dose administered to the thalamus a non-human primate may be about 4.0×10¹⁰ to 7.0×10¹¹ VG per side. In some embodiments, the dose administered to the thalamus in a non-human primate may be about 4.0×10¹⁰, 4.2×10¹⁰, 4.4×10¹⁰, 4.6×10¹⁰, 4.8×10¹⁰, 5.0×10¹⁰, 5.2×10¹⁰, 5.4×10¹⁰, 5.6×10¹⁰, 5.8×10¹⁰, 6.0×10¹⁰, 6.2×10¹⁰, 6.4×10¹⁰, 6.6×10¹⁰, 6.8×10¹⁰, 7.0×10¹⁰, 7.2×10¹⁰, 7.4×10¹⁰, 7.6×10¹⁰, 7.8×10¹⁰, 8.0×10¹⁰, 8.2×10¹⁰, 8.4×10¹⁰, 8.6×10¹⁰, 8.8×10¹⁰, 9.0×10¹⁰, 9.2×10¹⁰, 9.4×10¹⁰, 9.6×10¹⁰, 9.8×10¹⁰, 1.0×10¹¹, 1.2×10¹¹, 1.4×10¹¹, 1.6×10¹¹, 1.8×10¹¹, 2.0×10¹¹, 2.2×10¹¹, 2.4×10¹¹, 2.6×10¹¹, 2.8×10¹¹, 3.0×10¹¹, 3.2×10¹¹, 3.4×10¹¹, 3.6×10¹¹, 3.8×10¹¹, 4.0×10¹¹, 4.2×10¹¹, 4.4×10¹¹, 4.6×10¹¹, 4.8×10¹¹, 5.0×10¹¹, 5.2×10¹¹, 5.4×10¹¹, 5.6×10¹¹, 5.8×10¹¹, 6.0×10¹¹, 6.2×10¹¹, 6.4×10¹¹, 6.6×10¹¹, 6.8×10¹¹, or 7.0×10¹¹VG per side.

[0920] In some embodiments, the total dose administered to the mouse via striatum infusion is 8×10⁹to 3×10¹¹ VG. In some embodiments, the total dose administered to the mouse via striatum infusion may be about 8.0×10¹⁰, 8.2×10¹⁰, 8.4×10¹⁰, 8.6×10¹⁰, 8.8×10¹⁰, 9.0×10¹⁰, 9.2×10¹⁰, 9.4×10¹⁰, 9.6×10¹⁰, 9.8×10¹⁰, 1.0×10¹¹, 1.2×10¹¹, 1.4×10¹¹, 1.6×10 ¹¹, 1.8×10¹¹, 2.0×10¹¹, 2.2×10¹¹, 2.4×10¹¹, 2.6×10¹¹, 2.8×10¹¹, 3.0×10¹¹ VG. In some embodiments, the total dose administered to the mouse via striatum infusion is 8.8×10⁹ VG. In some embodiments, the total dose administered to the mouse via striatum infusion is 2.8×10¹⁰ VG. In some embodiments, the total dose administered to the mouse via striatum infusion is 8.8×10¹⁰ VG. In some embodiments, the total dose administered to the mouse via striatum infusion is 2.8×10¹¹ VG

[0921] In some embodiments, the total dose administered to the non-human primate via putamen and thalamus infusion is 5×10¹¹ to 3×10¹³ VG. In some embodiments, the total dose administered to the non-human primate via putamen and thalamus infusion may be about 5×10¹¹, 6×10¹¹, 7×10¹¹, 8×10¹¹, 9×10¹¹, 1×10¹², 1.5×10¹², 2×10¹², 2.5×10¹², 3×10¹², 3.5×10¹², 4×10¹², 4.5×10¹², 5×10¹², 5.5×10¹², 6×10¹², 6.5×10¹², 7×10¹², 7.5×10¹², 8×10¹², 8.5×10¹², 9×10¹², 9.5×10¹², 1×10¹³, 1.5×10¹³, 2×10¹³, 2.5×10¹³, or 3×10¹³ VG.

[0922] In some embodiments, the total dose administered to the non-human primate via putamen and thalamus infusion is 1×10¹¹to 2×10¹³ VG, In some embodiments, the total dose administered to the non-human primate via putamen and thalamus infusion may be about 1×10¹¹, 1.5×10¹¹, 2×10¹¹, 2.5×10¹¹, 3×10¹¹, 3.5×10¹¹, 4×10¹¹, 4.5×10¹¹, 5×10¹¹, 5.5×10¹¹, 6×10¹¹, 6.5×10¹¹, 7×10¹¹, 7.5×10¹¹, 8×10¹¹, 8.5×10¹¹, 9×10¹¹, 9.5×10¹¹, 1×10¹², 1.5×10¹², 2×10¹², 2.5×10¹², 3×10¹², 3.5×10¹², 4×10¹², 4.5×10¹², 5×10¹², 5.5×10¹², 6×10¹², 6.5×10¹², 7×10¹², 7.5×10¹², 8×10¹², 8.5×10¹², 9×10¹², 9.5×10¹², 1×10¹³, 1.5×10¹³, 2×10¹³ VG. In certain embodiments, the total dose administered to the non-human primate via putamen and thalamus infusion is 1.5×10¹¹ VG. In certain embodiments, the total dose administered to the non-human primate via putamen and thalamus infusion is 1.4×10¹¹ VG. In certain embodiments, the total dose administered to the non-human primate via putamen and thalamus infusion is 4.5×10¹¹ VG. In certain embodiments, the total dose administered to the non-human primate via putamen and thalamus infusion is 1.4×10¹² VG. In certain embodiments, the total dose administered to the non-human primate via putamen and thalamus infusion is 2.2×10¹² VG. In certain embodiments, the total dose administered to the non-human primate via putamen and thalamus infusion is 1.8×10¹³ VG.

[0923] In some embodiments, the dose administered to the putamen in a human may be about 2.5×10¹¹ to 4.5×10¹³ VG per side. In some embodiments, the dose administered to the putamen in a human may be about 2.5×10¹¹, 3×10¹¹, 4×10¹¹, 5×10¹¹, 6×10¹¹, 7×10¹¹, 8×10¹¹, 9×10¹¹, 1×10¹², 1.5×10¹², 2×10¹², 2.5×10¹², 3×10¹², 3.5×10¹², 4×10¹², 4.5×10¹², 5×10¹², 5.5×10¹², 6×10¹², 6.5×10¹², 7×10¹², 7.5×10¹², 8×10¹², 8.5×10¹², 9×10¹², 9.5×10¹², 1×10¹³, 1.5×10¹³, 2×10¹³, 2.5×10¹³, 3×10¹³, 3.5×10¹³, 4×10¹³, or 4.5×10¹³ VG per side. In some embodiments, the dose administered to the putamen in a human may be between 8×10¹¹ to 4×10¹³ VG per side.

[0924] In some embodiments, the dose administered to the thalamus in a human may be about 1×10¹² to 7×10¹³ VG per side. In some embodiments, the dose administered to the thalamus in a human may be about 1×10¹², 1.5×10¹², 2×10¹², 2.5×10¹², 3×10¹², 3.5×10¹², 4×10¹², 4.5×10¹², 5×10¹², 5.5×10¹², 6×10¹², 6.5×10¹², 7×10¹², 7.5×10¹², 8×10¹², 8.5×10¹², 9×10¹², 9.5×10¹², 1×10¹³, 1.5×10¹³, 2×10¹³, 2.5×10¹³, 3×10¹³, 3.5×10¹³, 4×10¹³, 4.5×10¹³, 5×10¹³, 5.5×10¹³, 6×10¹³, 6.5×10¹³, 6.8×10¹³, 7×10¹³ VG per side. In some embodiments, the close administered to the thalamus is between 3.5×10¹² to 6.8×10¹³ VG per side.

[0925] In some embodiments, the total dose administered to the human via putamen and thalamus infusion is 2.5×10¹² to 2.5×10¹⁴ VG. In some embodiments, the total dose administered to the human via putamen and thalamus infusion may be about 2.5×10¹², 3×10¹², 3.5×10¹², 4×10¹², 4.5×10¹², 5×10¹², 5.5×10¹², 6×10¹², 6.5×10¹², 7×10¹², 7.5×10¹², 8×10¹², 8.5×10¹², 8.6×10¹², 9×10¹², 9.5×10¹², 1×10¹³, 1.5×10¹³, 2×10¹³, 2.5×10¹³, 3×10¹³, 3.5×10¹³, 4×10¹³, 4.5×10¹³, 5×10¹³, 5.5×10¹³, 6×10¹³, 6.5×10¹³, 7×10¹³, 7.5×10¹³, 8×10¹³, 8.5×10¹³, 9×10¹³. 1×10¹⁴, 2×10¹⁴, 2.1×10¹⁴, 2.2×10¹⁴, 23×10¹⁴, 2.4×10¹⁴, or 2.5×10¹⁴ VG. In some embodiments, the total dose administered to the subject is between 8.6×10¹² to 2×10¹⁴ VG.

[0926] In some embodiments, dose volumes may be deposited into infusion site using ascending infusion rates. As a non-limiting example, dose volumes may be deposited into Infusion site in 3 different stages (e.g., at dose rates of 1, 3, 5 μL/min) with appropriate durations to complete the total dose volume.

[0927] In some embodiments, dose volumes mar be deposited into infusion site using a range of infusion rates. As a non-limiting example, dose volumes may be deposited into infusion site at dose rates ranging from 1 μL/min to 5 μL/min, with appropriate durations to complete the total dose volume.

[0928] In some embodiments, dose volumes may be deposited into infusion site using an infusion rate of 0.5 μL/min, with an appropriate duration to complete the total dose volume.

### IV. Kits and Devices

### Kits

[0929] In some embodiments, the disclosure provides a variety of kits for conveniently and/or effectively carrying out methods of the present disclosure. Typically, kits will comprise sufficient amounts and/or numbers of components to allow a user to perform multiple treatments of a subject(s) and/or to perform multiple experiments.

[0930] Any of the AAV particles of the present disclosure may be comprised in a kit. In some embodiments, kits may further include reagents and/or instructions for creating and/or synthesizing compounds and/or compositions of the present disclosure. In some embodiments, kits may also include one or more buffers. In some embodiments, kits of the disclosure may include components for making protein or nucleic acid arrays or libraries and thus, may include, for example, solid supports.

[0931] In some embodiments, kit components may be packaged either in aqueous media or in lyophilized form. The container means of the kits will generally include at least one vial, test tube, flask, bottle, syringe or other container means, into which a component may be placed, and preferably, suitably aliquoted. Where there is more than one kit component, (labeling reagent and label may be packaged together), kits may also generally contain second, third or other additional containers into which additional components may be separately placed. In some embodiments, kits may also comprise second container means for containing sterile, pharmaceutically acceptable buffers and/or other diluents. In some embodiments, various combinations of components may be comprised in one or more vial. Kits of the present disclosure may also typically include means for containing compounds and/or compositions of the present disclosure, e.g., proteins, nucleic acids, and any other reagent containers in close confinement for commercial sale. Such containers may include injection or blow-molded plastic containers into which desired vials are retained.

[0932] In some embodiments, kit components are provided in one and/or more liquid solutions. In some embodiments, liquid solutions are aqueous solutions, with sterile aqueous solutions being particularly preferred. In some embodiments, kit components may be provided as dried powder(s). When reagents and/or components are provided as dry powders, such powders may be reconstituted by the addition of suitable volumes of solvent. In some embodiments, it is envisioned that solvents may also be provided in another container means. In some embodiments, labeling dyes are provided as dried powders. In some embodiments, it is contemplated that 10, 20, 30, 40, 50, 60, 70, 80, 90, 100, 120, 120, 130, 140, 150, 160, 170, 180, 190, 200, 300, 400, 500, 600, 700, 800, 900, 1000 micrograms or at least or at most those amounts of dried dye are provided in kits of the disclosure. In such embodiments, dye may then he resuspended in any suitable solvent, such as DMSO.

[0933] In some embodiments, kits may include instructions for employing kit components as well the use of any other reagent not included in the kit. Instructions may include variations that may be implemented.

### Devices

[0934] In some embodiments, the AAV particles may delivered to a subject using a device to deliver the AAV particles and a head fixation assembly. The head fixation assembly may be, but is not limited to, any of the head fixation assemblies sold by MRI interventions. As a non-limiting example, the head fixation assembly may be any of the assemblies described in U.S. Pat. Nos. 8,099,150, 8,548,569 and 9,031,636 and International Patent Publication Nos. WO201108495 and WO2014014585, the contents of each of which are incorporated by reference in their entireties. A head fixation assembly may be used in combination with an MRI compatible drill such as, but not limited to, the MRI compatible drills described in International Patent Publication No. WO2013181008 and US Patent Publication No. US20130325012, the contents of which are herein incorporated by reference in its entirety.

[0935] In some embodiments, the AAV particles may be delivered using a method, system and/or computer program for positioning apparatus to a target point on a subject to deliver the AAV particles. As a non-limiting example, the method, system and/or computer program may be the methods, systems and/or computer programs described in U.S. Pat. No. 8, 340,743, the contents of which are herein incorporated by reference in its entirety. The method may include: determining a target point in the body and a reference point, wherein the target point and the reference point define a planned trajectory line (PTL) extending through each; determining a visualization plane, wherein the PTL intersects the visualization plane at a sighting point; mounting the guide device relative to the body to move with respect to the PTL, wherein the guide device does not intersect the visualization plane; determining a point of intersection (GPP) between the guide axis and the visualization plane; and aligning the GPP with the sighting point in the visualization plane.

[0936] In some embodiments, the AAV particles may be delivered to a subject using a convention-enhanced delivery device. Non-limiting examples of targeted delivery of drugs using convection are described in US Patent Publication Nos, US20100217228, US20130035574 and US20130035660 and International Patent Publication No. WO2013019830 and WO2008144585, the contents of each of which are herein incorporated by reference in their entireties.

[0937] In some embodiments, a subject may be imaged prior to, during and/or after delivery of the AAV particles. The imaging method may be a method known in the art and/or described herein, such as but not limited to, magnetic resonance imaging (MRI)). As a non-limiting example, imaging may be used to assess therapeutic effect. As another non-limiting example, imaging may be used for assisted delivery of AAV particles.

[0938] In some embodiments, the AAV particles may be delivered using an MRI-guided device. Non-limiting examples of MRI-guided devices are described in U.S. Pat. Nos. 9,055,884, 9,042,958, 8,886,288, 8,768,433, 8,396,532, 8,369,930, 8,374,677 and 8,175,677 and US Patent Application No. US20140024927 the contents of each of which are herein incorporated by reference in their entireties. As a non-limiting example, the MRI-guided device may be able to provide data in real time such as those described in U.S. Pat. Nos. 8,886,288 and 8,768,433, the contents of each of which is herein incorporated by reference in its entirety. As another non-limiting example, the MRI-guided device or system may be used with a targeting cannula such as the systems described in U.S. Pat. Nos. 8,175,677 and 8,374,677, the contents of each of which are herein incorporated by reference in their entireties. As yet another non-limiting example, the MRI-guided device includes a trajectory guide frame for guiding an interventional device as described, for example, in U.S. Pat. No. 9,055,884 and US Patent Application No. US20140024927, the contents of each of which are herein incorporated by reference in their entireties.

[0939] In some embodiments, the AAV particles may be delivered using an MRI-compatible tip assembly. Non-limiting examples of MRI-compatible tip assemblies are described in US Patent Publication No. US20140275980, the contents of which is herein incorporated by reference in its entirety.

[0940] In some embodiments, the AAV particles may be delivered using a cannula which is MRI-compatible. Non-limiting examples of MRI-compatible cannulas include those taught in International Patent Publication No. WO2011130107, the contents of which are herein incorporated by reference in its entirety. In some embodiments, the cannula or a portion thereof or the tubing associated with the cannula is attached, mounted, glued, affixed or otherwise makes reversible contact with the tissue surrounding the surgical site/field. Such contact may be localized and/or stabilized in one position during all or a portion of the procedure.

[0941] In some embodiments, the AAV particles may be delivered using a catheter which is MRI-compatible. Non-limiting examples of MRI-compatible catheters include those taught in International Patent Publication No. WO2012116265, US Patent Publication No. 8,825,133 and US Patent Publication No. US20140024909, the contents of each of which are herein incorporated by reference in their entireties.

[0942] In some embodiments, the AAV particles may be delivered using a device with an elongated tubular body and a diaphragm as described in US Patent Publication Nos. US20140276582 and US20140276614, the contents of each of which are herein incorporated by reference in their entireties.

[0943] In some embodiments, the AAV particles may be delivered using an MRI compatible localization and/or guidance system such as, but not limited to, those described in US Patent Publication Nos, US20150223905 and US20150230871, the contents of each of which are herein incorporated by reference in their entireties. As a non-limiting example, the MRI compatible localization and/or guidance systems may comprise a mount adapted for fixation to a patient, a targeting cannula with a lumen configured to attach to the mount so as to be able to controllably translate in at least three dimensions, and an elongate probe configured to snugly advance via slide and retract in the targeting cannula lumen, the elongate probe comprising at least one of a stimulation or recording electrode.

[0944] in some embodiments, the AAV particles may be delivered to a subject using a trajectory frame as described in US Patent Publication Nos, US20150031982 and US20140066750 and International Patent Publication Nos. WO2015057807 and WO2014039481, the contents of each of which are herein incorporated by reference in their entireties.

[0945] In some embodiments, the AAV particles may be delivered to a subject using a gene gun.

### V. Methods and Uses of the Compositions of the Disclosure

### Huntington's Disease (HD)

[0946] Huntington's Disease (HD) is a monogenic fatal neurodegenerative disease characterized by progressive chorea, neuropsychiatric and cognitive dysfunction. Huntington's disease is known to be caused by an autosomal dominant triplet (CAG) repeat expansion in the huntingtin (RH) gene, which encodes poly-glutamine at the N-terminus of the HTT protein. This repeat expansion results in a toxic gain of function of HTT and ultimately leads to striatal neurodegeneration which progresses to widespread brain atrophy. Medium spiny neurons of the striatum appear to be especially vulnerable in HD with up to 95% loss, whereas interneurons are largely spared,

[0947] Huntington's Disease has a profound impact on quality of life. Symptoms typically appear between the ages of 35-44 and life expectancy subsequent to onset is 10-25 years. In a small percentage of the HD population (˜6%), disease onset occurs prior to the age of 21 with appearance of an akinetic-rigid syndrome. These cases tend to progress faster than those of the later onset variety and have been classified as juvenile or Westphal variant HD. It is estimated that approximately 35,000-70,000 patients are currently suffering from HD in the US and Europe. Currently, only symptomatic relief and supportive therapies are available for treatment of HD, with a cure yet to be identified. Ultimately, individuals with HD succumb to pneumonia, heart failure or other complications such as physical injury from falls.

[0948] While not wishing to be bound by theory, the function of the wild type HTT protein may serve as a scaffold to coordinate complexes of other proteins. HTT is a very large protein (67 exons, 3144 amino acids, ˜350kDa) that undergoes extensive post-translational modification and has numerous sites for interaction with other proteins, particularly at its N-terminus (coincidently the region that carries the repeats in HD). HTT localizes primarily to the cytoplasm but has been shown to shuttle into the nucleus where it may regulate gene transcription. It has also been suggested that HTT has a role in vesicular transport and regulating RNA trafficking.

[0949] As a non-limiting example, the HT1 protein sequence is SEQ ID NO: 1424 (NCBI NP_002102.4) and the HTT nucleic acid sequence is SEQ ID NO: 1425 (NCBI NM_002111.7).

[0950] The mechanisms by which CAG-expanded HTT disrupts normal HTT function and results in neurotoxicity were initially thought to be a disease of haploinsufficiency, this theory was disproven when terminal deletion of the HTT gene in human did not lead to development of HD, suggesting that fully expressed HTT protein is not critical to survival. However, conditional knockout of HTT in mouse led to neurodegeneration, indicating that some amount of HTT is necessary for cell survival. Huntingtin protein is expressed in all cells, though its concentration is highest in the brain where large aggregates of abnormal HTT are fbund in neuronal nuclei. In the brains of HD patients, HTT aggregates into abnormal nuclear inclusions. It is now believed that it is this process of misfolding and aggregating along with the associated protein intermediates (i.e. the soluble species and toxic N-terminal fragments) that result in neurotoxicity. In fact. HD belongs to a family of nine additional human genetic disorders all of which are characterized by CAG-expanded genes and resultant polyglutatnine (poly-Q) protein products with subsequent formation of intraneuronal aggregates. Interestingly, in all of these diseases the length of the expansion correlates with both age of onset and rate of disease progression, with longer expansions linked to greater severity of disease.

[0951] Hypotheses on the molecular mechanisms underlying the neurotoxicity of CAG-expanded HTT and its resultant aggregates have been wide ranging, but include, caspase activation, dysregulation of transcriptional pathways, increased production of reactive oxygen species, mitochondrial dysfunction, disrupted axonal transport and/or inhibition of protein degradation systems within the cell. CAG-expanded HTT may not only have a toxic gain of function, but also exert a dominant negative effect by interfering with the normal function of other cellular proteins and processes. HTT has also been implicated in non-cell autonomous neurotoxicity, whereby a cell hosting HTT spreads the HTT to other neurons nearby.

[0952] In some embodiments, a subject has fully penetrant HD where the HTT gene has 41 or more CAG repeats (e.g., 41, 42, 43, 44, 45, 46, 47, 48, 49, 50, 51, 52, 53, 54, 55, 56, 57, 58, 59, 60, 61, 62, 63, 64, 65, 66, 67, 68, 69, 70, 71, 72, 73, 74, 75, 76, 77, 78, 79, 80, 81, 82, 83, 84, 85, 86, 87, 88, 89, 90 or more than 90 CAG repeats)

[0953] In some embodiments, a subject has incomplete penetrance where the HTT gene has between 36 and 40 CAG repeats (e.g., 36, 37, 38. 39 and 40 CAG repeats).

[0954] Symptoms of HD may include features attributed to CNS degeneration such as, but are not limited to, chorea, dystonia, bradykinesia, incoordination, irritability and depression, problem solving difficulties, reduction in the ability of a person to function in their normal day to day life, diminished speech, and difficulty swallowing, as well as features not attributed to CNS degeneration such as, but not limited to, weight loss, muscle wasting, metabolic dysfunction and endocrine disturbances.

[0955] Model systems for studying Huntington's Disease which may be used with the modulatory polynucleotides and AAV particles described herein include, but are not limited to, cell models (e.g., primary neurons and induced pluripotent stem cells), invertebrate models (e.g., drosophila or caenorhabditis elegans), mouse models (e.g., YAC128 mouse model; R6/2 mouse model; BAC and knock-in mouse model), rat models (e.g., BAC) and large mammal models (e.g., mini-pigs, pigs, sheep or monkeys).

[0956] Studies in animal models of HD have suggested that phenotypic reversal is feasible, for example, subsequent to gene shut off in regulated-expression models. In a mouse model allowing shut off of expression of a 94-polyglutamine repeat HTT protein, not only was the clinical syndrome reversed but also the intracellular aggregates were resolved. Further, animal models in which silencing of HTT was tested, demonstrated promising results with the therapy being both well tolerated and showing potential therapeutic benefit.

[0957] Such siRNA mediated HTT expression inhibition may be used for treating HD. According to the present disclosure, methods for treating and/or ameliorating HD in a patient comprises administering to the patient an effective amount of AAV particles comprising a nucleic acid sequence encoding the siRNA molecules of the present disclosure into cells. The administration of the AAV particles comprising such a nucleic acid sequence will encode the siRNA molecules which cause the inhibition/silence of HTT gene expression.

[0958] In some embodiments, the AAV particles described herein may be used to reduce the amount of HTT in a subject or patient in need thereof and thus provides a therapeutic benefit as described herein.

[0959] In certain aspects, the symptoms of HD include behavioral difficulties and symptoms such as, but not limited to, apathy or lack of initiative, dysphoria, irritability, agitation or anxiety, poor self-care, poor judgment, inflexibility, disinhibition, depression, suicidal ideation euphoria, aggression, delusions, compulsions, hypersexuality, hallucinations, speech deterioration, slurred speech, difficulty swallowing, weight loss, cognitive dysfunction which impairs executive functions (e.g., organizing, planning, checking or adapting alternatives, and delays in the acquisition of new motor skills), unsteady gait and involuntary movements (chorea). In other aspects, the composition of the present disclosure is applied to one or both of the brain and the spinal cord. In some embodiments, the survival of the subject is prolonged by treating any of the symptoms of HD described herein.

[0960] Disclosed in the present disclosure are methods for treating Huntington's Disease (HD) associated with HTT protein in a subject or patient in need of treatment. The method optionally comprises administering to the subject a therapeutically effective amount of a composition comprising at least AAV particles comprising a nucleic acid sequence encoding the siRNA molecules of the present disclosure. As a non-limiting example, the siRNA molecules can silence HTT gene expression, inhibit HTT protein production, and reduce one or more symptoms of HD in the subject such that HD is therapeutically treated.

Methods of treatment of Huntington's Disease

[0961] The present disclosure provides AAV particles comprising modulatory polynucleotides encoding siRNA molecules targeting the HTT gene, and methods for their design and manufacture. While not wishing to be bound by a single theory of operability, the AAV particles described herein provide modulatory polynucleotides, including siRNAs, that interfere with HTT expression, including HTT mutant and/or wild-type HTT gene expression. Particularly, the present disclosure employs viral genomes such as adeno-associated viral (AAV) viral genomes comprising modulatory polynucleotide sequences encoding the siRNA molecules of the present disclosure. The AAV vectors comprising the modulatory polynucleotides encoding the siRNA molecules of the present disclosure may increase the delivery of active agents into neurons of interest such as medium spiny neurons of the striatum and cortical neurons. The siRNA duplexes or encoded dsRNA targeting the HTT gene may be able to inhibit HTT gene expression (e.g., mRNA level) significantly inside cells; therefore, reducing HTT expression-induced stress inside the cells such as aggregation of protein and formation of inclusions, increased free radicals, mitochondrial dysfunction and RNA metabolism.

[0962] Provided in the present disclosure are methods for introducing the AAV particles comprising a modulatory polynucleotide sequence encoding the siRNA molecules of the present disclosure into cells, the method comprising introducing into said cells any of the AAV particles in an amount sufficient for degradation of target HTT mRNA to occur, thereby activating target-specific RNAi. in the cells. In some aspects, the cells may be stem cells, neurons such as medium spiny or cortical neurons, muscle cells and glial cells such as astrocytes. In another aspect, the cells may be FRhK-4 rhesus macaque (Macaw mulatta) kidney cells, and fibroblasts from HD patients.

[0963] In some embodiments, the present disclosure provides methods for treating or ameliorating Huntington's Disease (HD) by administering to a subject or patient in need thereof a therapeutically effective amount of a plasmid or AAV vector described herein.

[0964] In some embodiments, the AAV particles comprising modulatory polynucleotides encoding the siRNA molecules of the present disclosure may be used to treat and/or ameliorate for HD.

[0965] In some embodiments, the AAV particles comprising modulatory polynucleotides encoding the siRNA molecules of the present disclosure may be used to reduce the cognitive and/or motor decline of a subject with HD, where the amount of decline is determined by a standard evaluation system such as, but not limited to, Unified Huntington's Disease Ratings Scale (UHDRS) and subscores, and cognitive testing.

[0966] In some embodiments, the AAV particles comprising modulatory polynucleotides encoding the siRNA molecules of the present disclosure may be used to reduce the motor decline of a subject with HD, where the amount of decline is determined by a standard behavioral test such as, but not limited to, a rotarod test, a balance beam test, and/or an open field test.

[0967] In some embodiments, the AAV particles comprising modulatory polynucleotides encoding the siRNA molecules of the present disclosure may be used to reduce the anxiety of a subject with HD, where the amount of anxiety is determined by a standard behavioral test such as, but not limited to an open field test and/or a light/dark box test.

[0968] In some embodiments, the AAV particles comprising modulatory polynucleotides encoding the siRNA molecules of the present disclosure may be used to reduce the decline of functional capacity and activities of daily living as measured by a standard evaluation system such as, but not limited to, the total functional capacity (TFC) scale.

[0969] In some embodiments, the present disclosure provides methods for treating, or ameliorating Huntington's Disease associated with HTT gene and/or HTT protein in a subject or patient in need of treatment, the method comprising administering to the subject a pharmaceutically effective amount of AAV particles comprising modulatory polynucleotides encoding at least one siRNA duplex targeting the HTT gene, inhibiting HTT gene expression and protein production, and ameliorating symptoms of HD in the subject.

[0970] In some embodiments, the AAV vectors of the present disclosure may be used as a method of treating Huntington's disease in a subject or patient in need of treatment, Any method known in the art for defining a subject or patient in need of treatment may be used to identify said subject(s). A subject may have a clinical diagnosis of Huntington's disease, or may be pre-symptomatic. Any known method for diagnosing HD may be utilized, including, but not limited to, cognitive assessments and/or neurological or neuropsychiatric examinations, motor tests, sensory tests, psychiatric evaluations, brain imaging, family history and/or genetic testing.

[0971] In some embodiments, HD subject selection is determined with the use of the Prognostic Index for Huntington's Disease, or a derivative thereof (Long ID et al., Movement Disorders, 2017, 32(2), 256-263, the contents of which are herein incorporated by reference in their entirety). This prognostic index uses four components to predict probability of motor diagnosis, (1) total motor score (TMS) from the Unified Huntington's Disease Rating Scale (UHDRS), (2) Symbol Digit Modality Test (SDMT), (3) base-line age, and (4) cytosine-adenine-guanine (CAG) expansion.

[0972] In some embodiments, the prognostic index for Huntington's Disease is calculated with the following formula: PI_{HD}=51×TMS+(−34)×SDMT+7×Age×(CAG-34), wherein larger values for PI_{HD} indicate greater risk of diagnosis or onset of symptoms.

[0973] In another embodiment, the prognostic index for Huntington's Disease is calculated with the following normalized formula that gives standard deviation (stdev or SD) units to be interpreted in the context of 50% 10-year survival: PIN_{HD}=(PI_{HD}−883)/1044, wherein PIN_{HD}<0 indicates greater than 50% 10-year survival, and PIN_{HD}>0 suggests less than 50% 10-year survival.

[0974] In some embodiments, the prognostic index may be used to identify subjects whom will develop symptoms of HD within several years, but that do not yet have clinically diagnosable symptoms. Further, these asymptomatic patients may be selected for and receive treatment using the AAV vectors and compositions of the present disclosure during the asymptomatic period.

[0975] In some embodiments, the AAV particles may be administered to a subject who has undergone biomarker assessment. Potential biomarkers in blood for premanifest and early progression of HD include, but are not limited to, 8-OhdG oxidative stress marker, metabolic markers (e.g., creatine kinase, branched-chain amino acids), cholesterol metabolites (e.g., 24-OH cholesterol), immune and inflammatory proteins clusterin, complement components, interleukins 6 and 8), gene expression changes (e.g., transcriptomic markers), endocrine markers (e.g., cortisol, ghrelin and leptin), BDNF, adenosine 2A receptors. Potential biomarkers for brain imaging for premanifest and early progression of HD include, but are not limited to, striatal volume, subcortical white-matter volume, cortical thickness, whole brain and ventricular volumes, functional imaging (e.g., functional MRI), PET (e.g, with fluorodeoxyglucose), and magnetic resonance spectroscopy (e.g., lactate). Apart from measurement of huntingtin, among other potential biomarkers is neurofilament light chain, which is a potential marker of neurodegeneration and may be assessed in biofluids such as cerebrospinal fluid or using neuroimaging approaches. Potential biomarkers for quantitative clinical tools for premanifest and early progression of HD include, but are not limited to, quantitative motor assessments, motor physiological assessments (e.g., transcranial magnetic stimulation), and quantitative eye movement measurements. Non-limiting examples of quantitative clinical biomarker assessments include tongue force variability, metronome-guided tapping, grip force, oculomotor assessments and cognitive tests. Non-limiting examples of multicenter observational studies include PREDICT-HD and TRACK-HD. A subject may have symptoms of HD, diagnosed with HD or may be asymptomatic for HD.

[0976] In some embodiments, the AAV particles may be administered to a subject who has undergone biomarker assessment using neuroimaging. A subject may have symptoms of HD, diagnosed with HD or may be asymptomatic for HD.

[0977] In some embodiments, the AAV particles may be administered to a subject who is asymptomatic for HD. A subject may be asymptomatic but may have undergone predictive genetic testing or biomarker assessment to determine if they are at risk for HD and/or a subject may have a family member (e.g., mother, father, brother, sister, aunt, uncle, grandparent) who has been diagnosed with HD.

[0978] In some embodiments, the AAV particles may be administered to a subject who is in the early stages of HD. In the early stage a subject has subtle changes in coordination, some involuntary movements (chorea), changes in mood such as irritability and depression, problem solving difficulties, reduction in the ability of a person to function in their normal day to day life.

[0979] In some embodiments, the AAV particles may be administered to a subject who is in the middle stages of HD. In the middle stage a subject has an increase in the movement disorder, diminished speech, difficulty swallowing, and ordinary activities will become harder to do. At this stage a subject may have occupational and physical therapists to help maintain control of voluntary movements and a subject may have a speech language pathologist.

[0980] In some embodiments, the AAV particles may be administered to a subject who is in the late stages of HD. In the late stage, a subject with HD is almost completely or completely dependent on others for care as the subject can no longer walk and is unable to speak. A subject can generally still comprehend language and is aware of family and friends, but choking is a major concern.

[0981] In some embodiments, the AAV particles may be used to treat a subject who has the juvenile form of HD which is the onset of HD before the age of 20 years and as early as 2 years.

[0982] In some embodiments, the AAV particles may be used to treat a subject with HD who has fully penetrant HD where the HTT gene has 41 or more GAG repeats (e.g., 41, 42, 43, 44, 45, 46, 47, 48, 49, 50, 51, 52, 53, 54, 55, 56, 57, 58, 59, 60, 61, 62, 63, 64, 65, 66, 67, 68, 69, 70, 71, 72, 73, 74, 75, 76, 77, 78, 79, 80, 81, 82, 83, 84, 85, 86, 87, 88, 89, 90 or more than 90 CAG repeats).

[0983] In some embodiments, the AAV particles may be used to treat a subject with HD who has incomplete penetrance where the HTT gene has between 36 and 40 CAG repeats (e.g., 36, 37, 38, 39 and 40 CAG repeats).

[0984] In some embodiments, the composition comprising the AAV particles comprising modulatory polynucleotides encoding the siRNA molecules of the present disclosure is administered to the central nervous system of the subject. In other embodiments, the composition comprising the AAV particles comprising modulatory polynucleotides encoding the siRNA molecules of the present disclosure is administered to a tissue of a subject (e.g., brain of the subject).

[0985] In some embodiments, the AAV particles comprising modulatory polynucleotides encoding the siRNA molecules of the present disclosure may be delivered into specific types of targeted cells, including, but not limited to, neurons including medium spiny or cortical neurons; glial cells including oligodendrocytes, astrocytes and microglia; and/or other cells surrounding neurons such as T cells.

[0986] In some embodiments, the AAV particles comprising modulatory polynucleotides encoding the siRNA molecules of the present disclosure may be delivered to neurons in the striatum and/or neurons of the cortex.

[0987] In some embodiments, the composition of the present disclosure for treating HD is administered to the subject or patient in need intravenously, intramuscularly, subcutaneously, intraperitoneally, intraparenchymally, subpially, intrathecally and/or intraventricularly, allowing the siRNA molecules or vectors comprising the siRNA molecules to pass through one or both the blood-brain barrier and the blood spinal cord barrier, or directly access the brain and/or spinal cord. In some aspects, the method includes administering (e.g., intraparenchymal administration, subpial administration, intraventricular administration and/or intrathecal administration) directly to the central nervous system (CNS) of a subject (using, e.g., an infusion pump and/or a delivery scaffold) a therapeutically effective amount of a composition comprising AAV particles encoding the nucleic acid sequence for the siRNA molecules of the present disclosure. The vectors may be used to silence or suppress HTT gene expression, and/or reducing one or more symptoms of HD in the subject such that HD is therapeutically treated.

[0988] In some embodiments, the siRNA molecules or the AAV vectors comprising such siRNA molecules may be introduced directly into the central nervous system of the subject, for example, by infusion into the white matter of a subject. While not wishing to be bound by theory, distribution via direct white matter infusion may be independent of axonal transport mechanisms which may be impaired in subjects with Huntington's Disease which means white matter infusion may allow for more transport of the AAV vectors.

[0989] In some embodiments, the composition comprising the AAV particles comprising modulatory polynucleotides encoding the siRNA molecules of the present disclosure is administered to the central nervous system of the subject via intraparenchymal injection,

[0990] In some embodiments, the AAV particle composition comprising modulatory polynucleotides encoding the siRNA molecules of the present disclosure is administered to the central nervous system of the subject via intraparenchymal injection and intrathecal injection,

[0991] In some embodiments, the AAV particle composition comprising modulatory polynucleotides encoding the siRNA molecules of the present disclosure is administered to the central nervous system. of the subject via intraparenchymal injection and intracerebroventricular injection.

[0992] In some embodiments, the composition of the present disclosure for treating HD is administered to the subject or patient in need by intraparenchymal administration.

[0993] In some embodiments, the AAV particle composition comprising modulatory polynucleotides encoding the siRNA molecules of the present disclosure may be introduced directly into the central nervous system of the subject, for example, by infusion into the putamen.

[0994] In some embodiments, the AAV particle composition comprising modulatory polynucleotides encoding the siRNA molecules of the present disclosure may be introduced directly into the central nervous system of the subject, for example, by infusion into the thalamus of a subject. While not wishing to be bound by theory, the thalamus is an area of the brain which is relatively spared in subjects with Huntington's Disease which means it may allow for more widespread cortical transduction via axonal transport of the AAV vectors.

[0995] In some embodiments, the AAV particle composition comprising modulatory polynucleotides encoding the siRNA molecules of the present disclosure may be introduced indirectly into the central nervous system of the subject, for example, by intravenous administration.

[0996] In some embodiments, AAV particles described herein are administered via putamen and thalamus infusion. Dual infusion into the putamen and thalamus may be independently bilateral or unilateral. As a non-limiting example, AAV particles may be infused into the putamen and thalamus from bath sides of the brain. As another non-limiting example, AAV particles may be infused into the left putamen and left thalamus, or right putamen and right thalamus, As yet another non-limiting example, AAV particles may be infused into the left putamen and right thalamus, or right putamen and left thalamus. Dual infusion may occur consecutively or simultaneously.

### Modulation of HTT Expression

[0997] In some embodiments, administration of the AAV particles to a subject will reduce the expression of HTT in a subject and the reduction of expression of the HTT will reduce the effects of HD in a subject.

[0998] In some embodiments, the encoded dsRNA once expressed and contacts a cell expressing HTT protein, inhibits the expression of HTT protein by at least 10%, at least 20%, at least 25%, at least 30%, at least 35% or at least 40% or more, such as when assayed by a method as described herein.

[0999] In some embodiments, administration of the AAV particles comprising a modulatory polynucleotide sequence encoding a siRNA of the disclosure, to a subject may lower HTT (e.g., mutant HTT, wild-type HTT and/or mutant and wild-type HTT) in a subject. In some embodiments, administration of the AAV particles to a subject may lower wild-type HTT in a subject. In yet another embodiment, administration of the AAV particles to a subject may lower both mutant HTT and wild-type HTT in a subject e mutant and/or wild-type HTT may he lowered by about 10%, 20%, 30%, 40%, 50%, 60%, 70%, 80%, 85%, 90%, 95% and 100%, or at least 10-20%, 10-30%, 10-40%, 10-50%, 10-60%, 10-70%, 10-80%, 10-90%, 10-95%, 10-100%, 20-30%, 20-40%, 20-50%, 20-60%, 20-70%, 20-80%, 20-90%, 20-95%, 20-100%, 40%, 30-50%, 30-60%, 30-70%, 30-80%, 30-90%, 30-95%, 30-100%, 40-504;, 40-60%, 40-70%, 40-80%, 40-90%, 40-95%, 40-100%, 50-60%, 50-70%, 50-80%, 50-90%, 50-95%, 50-100%, 60-70%, 60-80%, 60-90%, 60-95%, 60-100%, 70-80%, 70-90%, 70-95%, 70-100%, 80-90%, 80-95%, 80-100%, 90-95%, 90-100% or 95-100% in a subject such as, but not limited to, the CNS, a region of the CNS, or a specific cell of the CNS of a subject. The mutant HTT may be lowered by about 10%, 0.20%, 30%, 40%, 50%, 60%, 70%, 80%, 85%, 90%, 95% and 100%, or at least 10-20%, 10-30%, 10-40%, 10-50%, 10-60%, 10-70%, 10-80%, 10-90%, 10-95%, 10-100%, 20-30%, 20-40%, 20-50%, 20-60%, 20-70%, 20-80%, 20-90%, 20-95%, 20-100%, 30-40%, 30-50%, 30-60%, 30-70%, 30-80%, 30-90%, 30-95%, 30-100%, 40-50%, 40-60%, 40-70%, 40-80%, 40-90%, 40-95%, 40-100%, 50-60%, 50-70%, 50-80%, 50-90%, 50-95%, 50-100%, 60-70%, 60-80%, 60-90%, 60-95%), 60-100%, 70-80%, 70-90%, 70-95%, 70-100%, 80-90%, 80-95%, 80-100%, 90-95%, 90-100% or 95-100% in a subject such as, but not limited to, the CNS, a region of the CNS, or a specific cell of the CNS of a subject. The wild-type HTT may be lowered by about 10%, 20%, 30%, 40%, 50%, 60%, 70%, 80%, 85%, 90%, 95% and 100%, or at least 10-20%, 10-30%, 10-40%, 10-50%, 10-60%, 10-70%, 10-80%, 10-90%, 10-95%, 10-100%,20-30%, 20-40%, 20-50%, 20-60%, 20-70%, 20-80%, 20-90%, 20-95%, 20-100%, 30-40%, 30-50%, 30-60%, 30-70%, 30-80%, 30-90%, 30-95%, 30-100%, 40-50%, 40-60%, 40-70%, 40-80%, 40-90%, 40-95%, 40-100%), 50-60%, 50-70%, 50-80%, 50-90%, 50-95%, 50-100%, 60-70%, 60-80%, 60-90%, 60-95%, 60-100%, 70-80%, 70-90%, 70-95%, 70-100%, 80-90%, 80-95%, 80-100%, 90-95%, 90-100% or 95-100% in a subject such as, but not limited to, the CNS, a region of the CNS, or a specific cell of the CNS of a subject. The mutant and wild-type HTT may be lowered by about 10%, 20%, 30%, 40%, 50%, 60%, 70%, 80%, 85%, 90%, 95% and 100%, or at least 10-20%, 10-30%, 10-40%, 10-50%, 10-60%, 10-70%, 10-80%, 10-90%, 10-95%, 10-100%, 20-30%, 20-40%, 20-50%, 20-60%, 20-70%, 20-80%, 20-90%, 20-95%, 20-100%, 30-40%, 30-50%, 30-60%, 30-70%, 30-80%, 30-90%, 30-95%, 30-100%, 40-50%, 40-60%, 40-70%, 40-80%, 40-90%, 40-95%, 40-100%, 50-60%, 50-70%, 50-80%, 50-90%, 50-95%, 50-100%, 60-70%, 60-80%, 60-90%, 60-95%, 60-100%, 70-80%, 70-90%, 70-95%, 70-100%, 80-90%, 80-95%, 80-100%, 90-95%, 90-100% or 95-100% in a subject such as, but not limited to, the CNS, a region of the CNS, or a specific cell of the CNS of a subject. As a non-limiting example, the AAV particles may lower the expression of HTT by at least 50% in the medium spiny neurons. As a non-limiting example, the vectors, AAV vectors may lower the expression of HTT by at least 40% in the medium spiny neurons. As a non-limiting example, the AAV particles may lower the expression of HTT by at least 40% in the medium spiny neurons of the putamen. As a non-limiting example, AAV particles may lower the expression of HTT by at least 30% in the medium spiny neurons of the putamen. As yet another non-limiting example, the AAV particles may lower the expression of HTT in the putamen and cortex by at least 40%. As yet another non-limiting example, the AAV particles may lower the expression of HTT in the putamen and cortex by at least 30%. As yet another non-limiting example, the AAV particles may lower the expression of HTT in the putamen by at least 30%. As yet another non-limiting example, the AAV particles may lower the expression of HTT in the putamen by at least 30% and cortex by at least 15%.

[1000] In some embodiments, the AAV particles may be used to reduce the expression of HTT protein by at least about 10%, 11%, 12%, 13%, 14%, 15%, 16%, 17%, 18%, 19%, 20%, 21%, 22%, 23%, 24%, 25%, 26%, 27%, 28%, 29%, 30%, 31%, 32%, 33%, 34%, 35%, 36%, 37%, 38%, 39%, 40%, 41%, 42%, 43%, 44%, 45%, 46%, 47%, 48%, 49%, 50%, 51%, 52%, 53%, 54%, 55%, 56%, 57%, 58%, 59%, 60%, 61%, 62%, 63%, 64%, 65%, 66%, 67%, 68%, 69%, 70%, 71%, 72%, 73%, 74%, 75%, 76%, 77%, 78%, 79%, 80%, 85%, 90%, 95% and 100%, or at least 10-20%, 20-30%, 20-40%, 20-50%, 20-60%, 20-70%, 20-80%, 20-90%, 20-95%, 20-100%, 30-40%, 30-50%, 30-60%, 30-70%, 30-80%, 30-90%, 30-95%, 30-100%, 40-50%, 40-60%, 40-70%, 40-80%, 40-90%, 40-95%, 40-100%, 50-60%, 50-70%, 50-80%, 50-90%, 50-95%, 50-100%, 55-60%, 55-70%, 55-80%, 55-90%, 55-95%, 55-100%, 60-70%, 60-80%, 60-90%, 60-95%, 60-100%, 70-80%, 70-90%, 70-95%, 70-100%, 80-90%, 80-95%, 80-100%, 90-95%, 90-100% or 95-100%. As a non-limiting example, the expression of HTT protein expression may be reduced by 50-90%. As a non-limiting example, the expression of HTT protein expression may be reduced by 30-70%.

[1001] In some embodiments, the siRNA duplexes or encoded dsRNA may be used to reduce the expression of HTT mRNA by at least about 10%, 11%, 12%, 13%, 14%, 15%, 16%, 17%, 18%, 19%, 20%, 21%, 22%, 23%, 24%, 25%, 26%, 27%, 28%, 29%, 30%, 31%, 32%, 33%, 34%, 35%, 36%, 37%, 38%, 39%, 40%, 41%, 42%, 43%, 44%, 45%, 46%, 47%, 48%, 49%, 50%, 51%, 52%, 53%, 54%, 55%, 56%, 57%, 58%, 59%, 60%, 61%, 62%, 63%, 64%, 65%, 66%, 67%, 68%, 69%, 70%, 71%, 72%, 73%, 74%, 75%, 76%, 77%, 78%, 79%, 80%, 85%, 90%, 95% and 100%, or at least 10-30%, 20-30%, 20-40%, 20-50%, 20-60%, 20-70%, 20-80%, 20-90%, 20-95%, 20-100%, 30-40%, 30-50%, 30-60%, 30-70%, 30-80%, 30-90%, 30-95%, 30-100%, 40-50%, 40-60%, 40-70%, 40-80%, 40-90%, 40-95%, 40-100%, 50-60%, 50-70%, 50-80%, 50-85%, 50-90%, 50-95%, 50-100%, 55-60%, 55-70%, 55-80%, 55-90%, 55-95° c, 55-100%, 60-70%, 60-80%, 60-90%, 60-95%, 60-100%, 70-80%, 70-90%, 70-95%, 70-100%, 80-90%, 80-95%, 80-100%, 90-95%, 90-100% or 95-100%. As a non-limiting example, the expression of HTT mRNA may be reduced by 50-90%. As a non-limiting example, the expression of HTT mRNA expression may be reduced by 30-70%. As a non-limiting example, the expression of HTT mRNA expression may be reduced by 40-70%. As a non-limiting example, the expression of HTT mRNA expression may be reduced by 50-80%. As a non-limiting example, the expression of HTT mRNA expression may be reduced by 50-85%. As a non-limiting example, the expression of HTT mRNA expression may be reduced by 60-90%.

[1002] In some embodiments, the AAV particles may be used to decrease HTT protein in a subject. The decrease may independently be 5%, 10%, 15%, 20%, 25%, 30%, 35%, 40%, 45%, 50%, 55%, 60%, 65%, 70%, 75%, 80%, 85%, 90%, 95%, or more than 95%, 5-15%, 5-20%, 5-25%, 5-30%, 5-35%, 5-40%, 5-45%, 5-50%, 5-55%, 5-60%, 5-65%, 5-70%, 5-75%, 5-80%, 5-85%, 5-90%, 5-95%, 10-20%, 10-25%, 10-30%, 10-35%, 10-40%, 10-45%, 10-50%, 10-55%, 10-60%, 10-65%, 10-70%, 10-75%, 10-80%, 10-85%, 10-90%, 10-95%, 15-25%, 15-30%, 15-35%, 15-40%, 15-45%, 15-50%, 15-55%, 15-60%, 15-65%, 15-70%, 15-75%, 15-80%, 15-85%, 15-90%, 15-95%, 20-30%, 20-35%, 20-40%, 20-45%, 20-50%, 20-55%, 20-60%, 20-65%, 20-70%, 20-75%, 20-80%, 20-85%, 20-90%, 20-95%, 25-35%, 25-40%, 25-45%, 25-50%, 25-55%, 25-60%, 25-65%, 25-70%, 25-75%, 25-80%. 25-85%. 25-90%, 25-95%, 30-40%, 30-45%, 30-50%, 30-55%, 30-60%, 30-65%, 30-70%, 30-75%, 30-80%, 30-85%, 30-90%, 30-95%, 35-45%, 35-50%, 35-55%, 35-60%, 35-65%, 35-70%, 35-75%, 35-80%, 35-85%, 35-90%, 35-95%, 40-50%, 40-55%, 40-60%, 40-65%, 40-70%, 40-75%, 40-80%, 40-85%, 40-90%, 40-95%, 45-55%, 45-60%, 45-65%, 45-70%, 45-75%, 45-80%, 45-85%, 45-90%, 45-95%, 50-60%, 50-65%, 50-70%, 50- 75%, 50-80%, 50-85%, 50-90%, 50-95%, 55-65%, 55-70%, 55-75%, 55-80%, 55-85%, 55-90%, 55-95%, 60-70%, 60-75%, 60-80%, 60-85%, 60-90%), 60-95%), 65-75%, 65-80%, 65-85%, 65-90%, 65-95%, 70-80%, 70-85%, 70-90%, 70-95%, 75-85%, 75-90%, 75-95%, 80-90%, 80-95%, or 90-95%. As a non-limiting example, a subject may have a 50% decrease of HTT protein. As a non-limiting example, a subject may have a decrease of 70% of HTT protein and a decrease of 10% of wild type HTT protein. As a non-limiting example, the decrease of HTT in the medium spiny neurons of the putamen may be about 40%. As a non-limiting example, the decrease of HTT in neurons of the caudate may be about 30%. As a non-limiting example, the decrease of HTT in neurons of the thalamus may be about 40%. As a non-limiting example, the decrease of HTT in the cortex may be about 20%. As a non-limiting example, the decrease of HTT in pyramidal neurons of the primary motor and somatosensory cortices may be about 30%. As a non-limiting example, the decrease of HTT in the putamen and cortex may be about 40%. As a non-limiting example, the decrease of HTT in the putamen, caudate and cortex may be about 40%. As a non-limiting example, the decrease of HTT in the putamen, caudate, cortex and thalamus may be about 40%. As a non-limiting example, the decrease of HTT in the medium spiny neurons of the putamen may be between 40%-70%. As a non-limiting example, the decrease of HTT in neurons of the caudate may be between 30%-70%. As a non-limiting example, the decrease of HTT in the putamen and cortex may be between 40%-70%. As a non-limiting example, the decrease of HTT in the putamen, caudate and cortex may be between 40%-70%. As a non-limiting example, the decrease of HTT in the putamen, caudate, cortex and thalamus may be between 40%-80%.

[1003] In some embodiments. the AAV particles may be used to decrease wild type HTT protein in a subject. The decrease may independently be 5%, 10%, 15%, 20%, 25%, 30%, 35%, 40%, 45%, 50%, 55%, 60%, 65%, 70%, 75%, 80%, 85%, 90%, 95%, or more than 95%, 5-15%, 5-20%, 5-25%, 5-30%, 5-35%, 5-40%, 5-45%, 5-50%, 5-55%, 5-60%, 5-65%, 5-70%, 5-75%, 5-80%, 5-85%, 5-90%, 5-95%, 10-20%, 10-25%, 10-30%, 10-35%, 10-40%, 10-45%, 10-50%, 10-55%, 10-60%, 10-65%, 10-70%, 10-75%, 10-80%, 10-85%, 10-90%, 10-95%, 15-25%, 15-30%, 15-35%, 15-40%, 15-45%, 15-50%, 15-55%, 15-60%, 15-65%, 15-70%, 15-75%, 15-80%, 15-85%, 15-90%, 15-95%, 20-30%, 20-35%, 20-40%, 20-45%, 20-50%, 20-55%, 20-60%, 20-65%, 20-70%, 20-75%, 20-80%, 20-85%, 20-90%, 20-95%, 25-35%, 25-40%, 25-45%, 25-50%, 25-55%, 25-60%, 25-65%, 25-70%, 25-75%, 25-80%, 25-85%, 25-90%, 25-95%, 30-40%, 30-45%, 30-50%, 30-55%, 30-60%, 30-65%, 30-70%, 30-75%, 30-80%, 30-85%, 30-90%, 30-95%, 35-45%, 35-50%, 35-55%, 35-60%, 35-65%, 35-70%, 35-75%, 35-80%, 35-85%, 35-90%, 35-95%, 40-50%, 40-55%, 40-60%, 40-65%, 40-70%, 40-75%, 40-80%, 40-85%, 40-90%, 40-95%, 45-55%, 45-60%, 45-65%, 45-70%, 45-75%, 45-80%, 45-85%, 45-90%, 45-95%, 50-60%, 50-65%, 50-70%, 50-75%, 50-80%, 50-85%, 50-90%, 50-95%, 55-65%, 55-70%, 55-75%, 55-80%, 55-85%, 55-90%, 55-95%, 60-70%, 60-75%, 60-80%, 60-85%, 60-90%, 60-95%, 65-75%, 65-80%, 65-85%, 65-90%, 65-95%, 70-80%, 70-85%, 70-90%, 70-95%, 75-85%, 75-90%, 75-95%, 80-90%, 80-95%, or 90-95%. As a non-limiting example, a subject may have a 50% decrease of wild type HTT protein. As a non-limiting example, the decrease of wild type HTT in the medium spiny neurons of the putamen may be about 40%. As a non-limiting example, the decrease of wild type HTT in neurons of the caudate may be about 30%. As a non-limiting example, the decrease of wild type HTT in neurons of the thalamus may be about 40%. As a non-limiting example, the decrease of wild type HTT in the cortex may be about 20%. As a non-limiting example, the decrease of wild type HTT in pyramidal neurons of the primary motor and somatosensory cortices may be about 30%. As a non-limiting example, the decrease of wild type HTT in the putamen and cortex may be about 40%. As a non-limiting example, the decrease of wild type HTT in the putamen, caudate and cortex may be about 40%. As a non-limiting example, the decrease of wild type HYT in the putamen, caudate, cortex and thalamus may be about 40%, As a non-limiting example, the decrease of wild type HTT in the medium spiny neurons of the putamen may be between 40%-70%. As a non-limiting example, the decrease of wild type HTT in neurons of the caudate may be between 30%-70%. As a non-limiting example, the decrease of wild type HTT in the putamen and cortex may be between 40%-70%. As a non-limiting example, the decrease of wild type HTT in the putamen, caudate and cortex may be between 40%-70%. As a non-limiting example, the decrease of wild type HTT in the putamen, caudate, cortex and thalamus may be between 40%-80%.

[1004] In some embodiments, the AAV particles may be used to decrease mutant HTT protein in a subject. The decrease may independently be 5%, 10%, 15%, 20%, 25%, 30%, 35%, 40%, 45%, 50%, 55%, 60%, 65%, 70%, 75%, 80%, 85%, 90%, 95%, or more than 95%, 5-15%, 5-20%, 5-25%, 5-30%, 5-35%, 5-40%, 5-45%, 5-50%, 5-55%, 5-60%, 5-65%, 5-70%, 5-75%, 5-80%, 5-85%, 5-90%, 5-95%, 10-20%, 10-25%, 10-30%, 10-35%, 10-40%, 10-45%, 10-50%, 10-55%, 10-60%, 10-65%, 10-70%, 10-75%, 10-80%, 10-85%, 10-90%, 10-95%, 15-25%, 15-30%, 15-35%, 15-40%, 15-45%, 15-50%, 15-55%, 15-60%, 15-65%, 15-70%, 15-75%, 15-80%, 15-85%, 15-90%, 15-95%, 20-30%, 20-35%, 20-40%, 20-45%, 20-50%, 20-55%, 20-60%, 20-65%, 20-70%, 70-75%, 20-80%, 20-85%, 20-90%, 20-95%, 25-35%, 25-40%, 25-45%, 25-50%, 25-55%, 25-60%, 25-65%, 25-70%, 25-75%, 25-80%, 25-85%, 25-90%, 25-95%, 30-40%, 30-45%, 30-50%, 30-55%, 30-60%, 30-65%, 30-70%, 30-75%, 30-80%, 30-85%, 30-90%, 30-95%, 35-45%, 35- 50%, 35-55%, 35-60%, 35-65%, 35-70%, 35-75%, 35-80%, 35-85%, 35-90%, 35-95%, 40-50%, 40-55%, 40-60%, 40-65%, 40-70%, 40-75%, 40-80%, 40-85%, 40-90%, 40-95%, 45-55%, 45-60%, 45-65%, 45-70%, 45-75%, 45-80%, 45-85%, 45-90%, 45-95%, 50-60%, 50-65%, 50-70%, 50-75%, 50-80%, 50-85%, 50-90%, 50-95%, 55-65%, 55-70%, 55-75%, 55-80%, 55-85%, 55-90%, 55-95%, 60-70%, 60-75%, 60-80%, 60-85%, 60-90%, 60-95%, 65-75%, 65-80%, 65-85%, 65-90%, 65-95%, 70-80%, 70-85%, 70-90%, 70-95%, 75-85%, 75-90%, 75-95%, 80-90%, 80-95%, or 90-95%. As a non-limiting example, a subject may have a 50% decrease of mutant HTT protein. As a non-limiting example, the decrease of mutant HTT in the medium spiny neurons of the putamen may be about 40%. As a non-limiting example, the decrease of mutant HTT in neurons of the caudate may be about 30%. As a non-limiting example, the decrease of mutant HTT in neurons of the thalamus may be about 40%. As a non-limiting example, the decrease of mutant HTT in the cortex may be about 20%. As a non-limiting example, the decrease of mutant HTT in pyramidal neurons of the primary motor and somatosensory cortices may be about 30%. As a non-limiting example, the decrease of mutant HTT in the putamen and cortex may be about 40%. As a non-limiting example, the decrease of mutant HTT in the putamen, caudate and cortex may be about 40%. As a non-limiting example, the decrease of mutant HTT in the putamen, caudate, cortex and thalamus may be about 40%. As a non-limiting example, the decrease of mutant HTT in the medium spiny neurons of the putamen may be between 40%-70%. As a non-limiting example, the decrease of mutant HTT in neurons of the caudate may be between 30%-70%. As a non-limiting example, the decrease of mutant HTT in the putamen and cortex may be between 40%-70%. As a non-limiting example, the decrease of mutant HTT in the putamen, caudate and cortex may be between 40%-70%. As a non-limiting example, the decrease of mutant HTT in the putamen, caudate, cortex and thalamus may be between 40%-80%.

[1005] In some embodiments, the present disclosure provides methods for inhibitinglsilencing HTT gene expression in a cell. Accordingly, the siRNA duplexes or encoded dsRNA can be used to substantially inhibit HTT gene expression in a cell, in particular in a neuron. In some aspects, the inhibition of HTT gene expression refers to an inhibition by at least about 20%, such as by at least about 30%, 31%, 32%, 33%, 34%, 35%, 36%, 37%, 38%, 39%, 40%, 41%, 42%, 43%, 44%, 45%, 46%, 47%, 48%, 49%, 50%, 51%, 52%, 53%, 54%, 55%, 56%, 57%, 58%, 59%, 60%, 61%, 62%, 63%, 64%, 65%, 66%, 67%, 68%, 69%, 70%, 71%, 72%, 73%, 74%, 75% 76%, 77%, 78%, 79%, 80%, 85%, 90%, 95% and 100%, or at least 20-30%, 20-40%, 20-50%, 20-60%, 20-70%, 20-80%, 20-90%, 20-95%, 20-100%, 30-40%, 30-50%, 30-60%, 30-70%, 30-80%, 30-90%, 30-95%, 30-100%, 40-50%, 40-60%, 40-70%, 40-80%, 40-90%, 40-95%, 40-100%, 50-60%, 50-70%, 50-80%, 50-90%, 50-95%, 50-100%, 55-60%, 55-70%, 55-80%, 55-90%, 55-95%, 55-100%, 60-70%, 60-80%, 60-90%, 60-95%, 60-100%, 70-80%, 70-90%, 70-95%, 70-100%, 80-90%, 80-95%, 80-100%, 90-95%, 90-100% or 95-100%. Accordingly, the protein product of the targeted gene may be inhibited by at least about 20%, preferably by at least about 30%, 31%, 32%, 33%, 34%, 35%, 36%, 37%, 38%, 39%, 40%, 41%, 42%, 43%, 44%, 45%, 46%, 47%, 48%, 49%, 50%, 51%, 52%, 53%, 54%, 55%, 56%, 57%, 58%, 59%, 60%, 61%, 62%, 63%, 64%, 65%, 66%, 67%, 68%, 69%, 70%, 71%, 72%, 73%, 74%, 75%, 76%, 77%, 78%, 79%, 80%, 85%, 90%. 95% and 100%, or at least 20-30%, 20-40%, 20-50%, 20-60%, 20-70%, 20-80%, 20-90%, 20-95%, 20-100%, 30-40%, 30-50%, 30-60%, 30-70%, 30-80%, 30-90%, 30-95%, 30-100%, 40-50%, 40-60%, 40-70%, 40-80%, 40-90%, 40-95%, 40-100%, 50-60%, 50-70%, 50-80%, 50-90%, 50-95%, 50-100%, 60-70%, 60-80%, 60-90%, 60-95%, 60-100%, 70-80%, 70-90%, 70-95%, 70-100%, 80-90%, 80-95%, 80-100%, 90-95%, 90-100% or 95-100%.

[1006] In some embodiments, the present disclosure provides methods for inhibiting/silencing HTT gene expression in a cell, in particular in a medium spiny neuron. In some aspects, the inhibition of HTT gene expression refers to an inhibition by at least about 20%, such as by at least about 30%, 31%, 32%, 33%, 34%, 35%, 36%, 37%, 38%, 39%, 40%, 41%, 42%, 43%, 44%, 45%, 46%, 47%, 48%, 49%, 50%, 51%, 52%, 53%, 54%, 55%, 56%, 57%, 58%, 59%, 60%, 61%, 62%, 63%, 64%, 65%, 66%, 67%, 68%, 69%, 70%, 71%, 72%, 73%, 74%, 75%, 76%, 77%, 78%, 79%, 80%, 85%, 90%, 95% and 100%, or at least 20-30%, 20-40%, 20-50%, 20-60%, 20-70%, 20-80%, 20-90%, 20-95%, 20-100%, 30-40%, 30-50%, 30-60%, 30-70%, 30-80%, 30-90%, 30-95%, 30-100%, 40-50%, 40-60%, 40-70%, 40-80%, 40-90%, 40-95%, 40-100%, 50-60%, 50-70%, 50-80%, 50-90%, 50-95%, 50-100%, 55-60%, 55-70%, 55-80%, 55-90%, 55-95%, 55-100%, 60-70%, 60-80%, 60-90%, 60-95%, 60-100%, 70-80%, 70-90%, 70-95%, 70-100%, 80-90%, 80-95%, 80-100%, 90-95%, 90-100% or 95-100%. Accordingly, the protein product of the targeted gene may be inhibited by at least about 20%, preferably by at least about 30%, 31%, 32%, 33%, 34%, 35%, 36%, 37%, 38%, 39%, 40%, 41%, 42%, 43%, 44%, 45%, 46%, 47%, 48%, 49%, 50%, 51%, 52%, 53%, 54%, 55%, 56%, 57%, 58%, 59%, 60%, 61%, 62%, 63%, 64%, 65%, 66%, 67%, 68%, 69%, 70%, 71%, 72%, 73%, 74%, 75%. 76%, 77%, 78%, 79%, 80%, 85%, 90%, 95% and 100, or at least 20-30%, 20-40%, 20-50%, 20-60%, 20-70%, 20-80%, 20-90%, 20-95%, 20-100%, 30-40%, 30-50%, 30-60%, 30-70%, 30-80%, 30-90%, 30-95%, 30-100%, 40-50%, 40-60%, 40-70%, 40-80%, 40-90%, 40-95%, 40-100%, 50-60%, 50-70%, 50-80%, 50-90%, 50-95%, 50-100%, 55-60%, 55-70%, 55-80%, 55-90%, 55-95%, 55-100%, 60-70%, 60-80%, 60-90%, 60-95%, 60-100%, 70-80%, 70-90%, 70-95%, 70-100%, 80-90%, 80-95%, 80-100%, 90-95%, 90-100% or 95-100%.

[1007] In some embodiments, the present disclosure provides methods for inhibiting/silencing HTT gene expression in a cell, in particular in a glial cell such as, but not limited to, an astrocyte, an oligodendrocyte, or a microglial cell. In some aspects, the inhibition of HTT gene expression refers to an inhibition by at least about 20%, such as by at least about 30%, 31%, 32%, 33%, 34%, 35%, 36%, 37%, 38%, 39%, 40%, 41%, 42%, 43%, 44%, 45%, 46%, 47%, 48%, 49%, 50%, 51%, 52%, 53%, 54%, 55%, 56%, 57%, 58%, 59%, 60%, 61%, 62%, 63%, 64%, 65%, 66%, 67%, 68%, 69%, 70%, 71%, 72%, 73%, 74%, 75%, 76%, 77%, 78%, 79%, 80%, 85%, 90%, 95% and 100%, or at least 20-30%, 20-40%, 20-50%, 20-60%, 20-70%, 20-80%, 20-90%, 20-95%, 20-100%, 30-40%, 30-50%, 30-60%, 30-70%, 30-80%, 30-90%, 30-95%, 30-100%, 40-50%, 40-60%, 40-70%, 40-80%, 40-90%, 40-95%, 40-100%, 50-60%, 50-70%, 50-80%, 50-90%, 50-95%, 50-100%, 55-60%, 55-70%, 55-80%, 55-90%, 55-95%, 55-100%, 60-70%, 60-80%, 60-90%, 60-95%, 60-100%, 70-80%, 70-90%, 70-95%, 70-100%, 80-90%, 80-95%, 80-100%, 90-95%, 90-100% or 95-10000. Accordingly, the protein product of the targeted gene may be inhibited by at least about 20% preferably by at least about 30%, 31%, 32%, 33%, 34%, 35%, 36%, 37%, 38%, 39%, 40%, 41%, 42%, 43%, 44%, 45%, 46%, 47%, 48%, 49%, 50%, 51%, 52%, 53%, 54%, 55%, 56%, 57%, 58%, 59%, 60%, 61%, 62%, 63%, 64%, 65%, 66%, 67%, 68%, 69%, 70%, 71%, 72%, 73%, 74%, 75%, 76%, 77%, 78%, 79%, 80%, 85%, 90%, 95% and 100%, or at least 20-30%, 20-40%, 20-50%, 20-60%, 20-70%, 20-80%, 20-90%, 20-95%, 20-100%, 30-40%, 30-50%, 30-60%, 30-70%, 30-80%, 30-90%, 30-95%, 30-100%, 40-50%, 40-60%, 40-70%, 40-80%, 40-90%, 40-95%, 40-100%, 50-60%, 50-70%, 50-80%, 50-90%, 50-95%, 50-100%, 55-60%, 55-70%, 55-80%, 55-90%, 55-95%, 55-100%, 60-70%, 60-80%, 60-90%, 60-95%, 60-100%, 70-80%, 70-90%, 70-95%, 70-100%. 80-90%, 80-95%, 80-100%, 90-95%, 90-100% or 95-100%,

[1008] In some embodiments, the present disclosure provides methods for inhibiting/silent HTT gene expression in a cell, in particular in an astrocyte. In some aspects, the inhibition of HTT gene expression refers to an inhibition by at least about 20%, such as by at least about 30%, 31%, 32%, 33%, 34%, 35%, 36%, 37%, 38%, 39%, 40%, 41%, 42%, 43%, 44%, 45%, 46%, 47%, 48%, 49%, 50%, 51%, 52%, 53%, 54%, 55%, 56%, 57%, 58%, 59%, 60%, 61%, 62%, 63%, 64%, 65%, 66%, 67%, 68%, 69%, 70%, 71%, 72%, 73%, 74%, 75%, 76%, 77%, 78%, 79%, 80%, 85%, 90%, 95% and 100%, or at least 20-30%, 20-40%, 20-50%, 20-60%, 20-70%, 20-80%, 20-90%, 20-95%, 20-100%, 30-40%, 30-50%, 30-60%, 30-70%, 30-80%, 30-90%, 30-95%, 30-100%, 40-50%, 40-60%, 40-70%, 40-80%, 40-90%, 40-95%, 40-100%, 50-60%, 50-70%, 50-80%, 50-90%, 50-95%, 50-100%, 55-60%, 55-70%, 55-80%, 55-90%, 55-95%, 55-100%, 60-70%, 60-80%, 60-90%, 60-95%, 60-100%, 70-80%, 70-90%, 70-95%, 70-100%, 80-90%, 80-95%, 80-100%, 90-95%, 90-100% or 95-100%. Accordingly, the protein product of the targeted gene may be inhibited by at least about 20%, preferably by at least about 30%, 31%, 32%, 33%, 34%, 35%, 36%, 37%, 38%, 39%, 40%, 41%, 42%, 43%, 44%, 45%, 46%, 47%, 48%, 49%, 50%, 51%, 52%, 53%, 54%, 55%, 56%, 57%, 58%, 59%, 60%, 61%, 62%, 63%, 64%, 65%, 66%, 67%, 68%, 69%, 70%, 71%, 72%, 73%, 74%, 75%, 76%, 77%, 78%, 79%, 80%, 85%, 90%, 95% and 100%, or at least 20-30%, 20-40%, 20-50%, 20-60%, 20-70%, 20-80%, 20-90%, 20-95%, 20-100%, 30-40%, 30-50%, 30-60%, 30-70%, 30-80%, 30-90%, 30-95%, 30-100%, 40-50%, 40-60%, 40-70%, 40-80%, 40-90%, 40-95%, 40-100%, 50-60%, 50-70%, 50-80%, 50-90%, 50-95%, 50-100%, 55-60%, 55-70%, 55-80%, 55-90%, 55-95%, 55-100%, 60-70%, 60-80%, 60-90%, 60-95%, 60-100%, 70-80%, 70-90%, 70-95%, 70-100%, 80-90%, 80-95%, 80-100%, 90-95%, 90-100% or 95-100%.

[1009] In some embodiments, the present disclosure provides methods for inhibiting/silencing HTT gene expression in a cell, in particular in an oligodendrocyte. In some aspects, the inhibition of HTT gene expression refers to an inhibition by at least about 20%, such as by at least about 30%, 31%, 32%, 33%, 34%, 35%, 36%, 37%, 38%, 39%, 40%, 41%, 42%, 43%, 44%, 45%, 46%, 47%, 48%, 49%, 50%, 51%, 52%, 53%, 54%, 55%, 56%, 57%, 58%, 59%, 60%, 61%, 62%, 63%, 64%, 65%, 66%, 67%, 68%, 69%, 70%, 71%, 72%, 73%, 74%, 75%, 76%, 77%, 78%, 79%, 80%, 85%, 90%, 95% and 100%, or at least 20-30%, 20-40%, 20-50%, 20-60%, 20-70%, 20-80%, 20-90%, 20-95%, 20-100%, 30-40%, 30-50%, 30-60%, 30-70%, 30-80%, 30-90%, 30-95%, 30-100%, 40-50%, 40-60%, 40-70%, 40-80%, 40-90%, 40-95%, 40-100%, 50-60%, 50-70%, 50-80%, 50-90%, 50-95%, 50-100%, 55-60%, 55-70%, 55-80%, 55-90%, 55-95%, 55-100%, 60-70%, 60-80%, 60-90%, 60-95%, 60-100%, 70-80%, 70-90%, 70-95%, 70-100%, 80-90%, 80-95%, 80-100%, 90-95%, 90-100% or 95-100%. Accordingly, the protein product of the targeted aerie may be inhibited by at least about 20%, preferably by at least about 30%, 31%, 32%, 33%, 34%, 35%, 36%, 37%, 38%, 39%, 40%, 41%, 42%, 43%, 44%, 45%, 46%, 47%, 48%, 49%, 50%, 51%, 52%, 53%, 54%, 55%, 56%, 57%, 58%, 59%, 60%, 61%, 62%, 63%, 64%, 65%, 66%, 67%, 68%, 69%, 70%, 71%, 72%, 73%, 74%, 75%, 76%, 77%, 78%, 79%, 80%, 81%, 90%, 95% and 100%, or at least 20-30%, 20-40%, 20-50%, 20-60%, 20-70%, 20-80%, 20-90%, 20-95%, 20-100%, 30-40%, 30-50%, 30-60%, 30-70%, 30-80%, 30-90%, 30-95%, 30-100%, 40-50%, 40-60%, 40-70%, 40-80%, 40-90%, 40-95%, 40-100%, 50-60%, 50-70%, 50-80%, 50-90%, 50-95%, 50-100%, 55-60%, 55-70%, 55-80%, 55-90%, 55-95%, 55%-100%, 60-70%, 60-80%, 60-90%, 60-95%, 60-100%, 70-80%, 70-90%, 70-95%, 70-100%, 80-90%, 80-95%, 80-100%, 90-95%, 90-100% or 95-100%.

[1010] In some embodiments, the present disclosure provides methods for inhibiting/silencing HTT gene expression in a cell, in particular in a microglial cell. In some aspects, the inhibition of HTT gene expression refers to an inhibition by at least about 20%, such as by at least about 30%, 31%, 32%, 33%, 34%, 35%, 36%, 37%, 38%, 39%, 40%, 41%, 42%, 43%, 44%, 45%, 46%, 47%, 48%, 49%, 50%, 51%, 52%, 53%, 54%, 55%, 56%, 57%, 58%, 59%, 60%, 61%, 62%, 63%, 64%, 65%, 66%, 67%, 68%, 69%, 70%, 71%, 72%, 73%, 74%, 75%, 76%, 77%, 78%, 79%, 80%, 85%, 90%, 95% and 100%, or at least 20-30%, 20-40%, 20-50%, 20-60%, 20-70%, 20-80%, 20-90%, 20-95%, 20-100%, 30-40%, 30-50%, 30-60%, 30-70%, 30-80%, 30-90%, 30-95%, 30-100%, 40-50%, 40-60%, 40-70%, 40-80%, 40-90%, 40-95%, 40-100%, 50-60%, 50-70%, 50-80%, 50-90%, 50-95%, 50-100%, 55-60%, 55-70%, 55-80%, 55-90%, 55-95%. 55-100%, 60-70%, 60-80%, 60-90%, 60-95%, 60-100%, 70-80%, 70-90%, 70-95%, 70-100%, 80-90%, 80-95%, 80-100%, 90-95%, 90-100% or 95-100%. Accordingly, the protein product of the targeted gene may be inhibited by at least about 20%, preferably by at least about 30%, 31%, 32%, 33%. 34%, 35%, 36%, 37%, 38%, 39%, 40%, 41%, 42%, 43%, 44%, 45%, 46%, 47%, 48%, 49%, 50%, 51%, 52%, 53%, 54%, 55%, 56%, 57%, 58%, 59%, 60%, 61%, 62%, 63%, 64%, 65%, 66%, 67%, 68%, 69%, 70%, 71%, 72%, 73%, 74%, 75%, 76%, 77%, 78%, 79%, 80%, 85%, 90%, 95% and 100%, or at least 20-30%, 20-40%, 20-50%, 20-60%, 20-70%, 20-80%, 20-90%, 20-95%, 20-100%, 30-40%, 30-50%, 30-60%, 30-70%, 30-80%, 30-90%, 30-95%, 30-100%, 40-50%, 40-60%, 40-70%, 40-80%, 40-90%, 40-95%, 40-100%, 50-60%, 50-70%, 50-80%, 50-90%, 50-95%, 50-100%, 55-60%, 55-70%, 55-80%, 55-90%, 55-95%, 55-100%, 60-70%, 60-80%, 60-90%, 60-95%, 60-100%, 70-80%, 70-90%, 70-95%, 70-100%, 80-90%, 80-95%, 80-100%, 90-95%, 90-100% or 95-100%.

[1011] In some embodiments, the siRNA duplexes or encoded dsRNA may be used to reduce the expression of HTT protein and/or mRNA in at least one region of the CNS such as, but not limited to the midbrain. The expression of HTT protein and/or mRNA is reduced by at least about 30%, 31%, 32%, 33%, 34%, 35%, 36%, 37%, 38%, 39%, 40%, 41%, 42%, 43%, 44%, 45%, 46%, 47%, 48%, 49%, 50%, 51%, 52%, 53%, 54%, 55%, 56%, 57%, 58%, 59%, 60%, 61%, 62%, 63%, 64%, 65%, 66%, 67%, 68%, 69%, 70%, 71%, 72%, 73%, 74%, 75%, 76%, 77%, 78%, 79%, 80%, 85%, 90%, 95% and 100%, or at least 20-30%, 20-40%, 20-50%, 20-60%, 20-70%, 20-80%, 20-90%, 20-95%, ?0-100%, 30-40%, 30-50%, 30-60%, 30-70%, 30-80%, 30-90%, 30-95%, 30-100%, 40-50%, 40-60%, 40-70%, 40-80%, 40-90%, 40-95%, 40-100%, 50-60%, 50-70%, 50-80%, 50-90%, 50-95%, 50-100%, 55-60%, 55-70%, 55-80%, 55-90%, 55-95%, 55-100%, 60-70%, 60-80%, 60-90%, 60-95%, 60-100%, 70-80%, 70-90%, 70-95%, 70-100%, 80-90%, 80-95%, 80-100%, 90-95%, 90-100% or 95-100% in at least one region of the CNS. As a non-limiting example, the expression of HTT protein and mRNA in the striatum and/or cortex is reduced by 50-90%. As a non-limiting example, the expression of HTT protein and mRNA in the striatum is reduced by 40-50%. As a non-limiting example, the expression of HTT protein and mRNA in the cortex is reduced by 40-50%. As a non-limiting example, the expression of HTT protein and mRNA in the cortex is reduced by 30-70%. As a non-limiting example, the expression of HTT protein and mRNA in the cortex is reduced by at least 30%. As a non-limiting example, the expression of HTT protein and mRNA in the striatum and/or cortex is reduced by 40-70%. As a non-limiting example, the expression of HTT protein and mRNA in the striatum and/or cortex is reduced by 40-50%. As a non-limiting example, the expression of HTT protein and mRNA in the striatum and/or cortex is reduced by 50-70%. As a non-limiting example, the expression of HTT protein and mRNA in the striatum and/or cortex is reduced by 50-60%. As a non-limiting example, the expression of HTT protein and mRNA in the striatum and/or cortex is reduced by 50%. As a non-limiting example, the expression of HTT protein and mRNA in the striatum and/or cortex is reduced by 51%. As a non-limiting example, the expression of HTT protein and mRNA in the striatum and/or cortex is reduced by 52%. As a non-limiting example, the expression of HTT protein and mRNA in the striatum and/or cortex is reduced by 53%. As a non-limiting example, the expression of HTT protein and mRNA in the striatum and/or cortex is reduced by 54%, As a non-limiting example, the expression of HTT protein and mRNA in the striatum and/or cortex is reduced by 55%. As a non-limiting example, the expression of HTT protein and mRNA in the striatum and/or cortex is reduced by 56%. As a non-limiting example, the expression of HTT protein and mRNA in the striatum and/or cortex is reduced by 57%. As a non-limiting example, the expression of HTT protein and mRNA in the striatum and/or cortex is reduced by 58%. As a non-limiting example, the expression of HTT protein and mRNA in the striatum and/or cortex is reduced by 59%. As a non-limiting example, the expression of HTT protein and mRNA in the striatum and/or cortex is reduced by 60%. As a non-limiting example, the expression of HTT protein and mRNA in the striatum, thalamus, and/or cortex is reduced by at least 20%. As a non-limiting example, the expression of HTT protein and mRNA in the striatum, thalamus, and/or cortex is reduced by 30%. As a non-limiting example, the expression of HTT protein and mRNA in the striatum, thalamus, and/or cortex is reduced by 30-70%. As a non-limiting example, the expression of HTT protein and mRNA in the striatum, thalamus, and/or cortex is reduced by 40-80%. As a non-limiting example, the expression of HTT protein and mRNA in the striatum, thalamus, and/or cortex is reduced by 40-70%. As a non-limiting example, the expression of HTT protein and mRNA in the striatum, thalamus, and/or cortex is reduced by 40-60%. As a non-limiting example, the expression of HTT protein and mRNA in the striatum, thalamus, and/or cortex is reduced by 50-80%. As a non-limiting example, the expression of HTT protein and mRNA in the striatum, thalamus, and/or cortex is reduced by 50-70%.

[1012] In some embodiments, the present disclosure provides methods for inhibiting/silencing HTT gene expression in a cell, in particular in a pyramidal neuron of the primary motor cortex or primary somatosensory cortex or temporal cortex. in some aspects, the inhibition of HTT gene expression refers to an inhibition by at least about 20%, such as by at least about 30%, 31%, 32%, 33%, 34%, 35%, 36%, 37%, 38%, 39%, 40%, 41%, 42%, 43%, 44%, 45%, 46%, 47%, 48%, 49%, 50%, 51%, 52%, 53%, 54%, 55%, 56%, 57%, 58%, 59%, 60%, 61%, 62%, 63%, 64%, 65%, 66%, 67%, 68%, 69%, 70%, 71%, 72%, 73%, 74%, 75%, 76%, 77%, 78%, 79%, 80%, 85%, 90%, 95% and 100%, or at least 20-30%, 20-40%, 20-50%, 20-60%, 20-70%, 20-80%, 20-90%, 20-95%, 20-100%, 30-40%, 30-50%, 30-60%, 30-70%, 30-80%, 30-90%, 30-95%, 30-100%, 40-50%, 40-60%, 40-70%, 40-80%, 40-90%, 40-95%, 40-100%, 50-60%, 50-70%, 50-80%, 50-90%, 50-95%, 50-100%, 55-60%, 55-70%, 55-80%, 55-90%, 55-95%, 55-100%, 60-70%, 60-80%, 60-90%, 60-95%, 60-100%, 70-80%, 70-90%, 70-95%, 70-100%, 80-90%, 80-95%, 80-100%, 90-95%, 90-100% or 95-100%, Accordingly, the protein product of the targeted gene may be inhibited by at least about 20%, preferably by at least about 30%, 31%. 32%, 33%, 34%, 35%, 36%, 37%, 38%, 39%, 40%, 41%, 42%, 43%, 44%, 45%, 46%, 47%, 48%, 49%, 50%, 51%, 52%, 53%, 54%, 55%, 56%, 57%, 58%, 59%, 60%, 61%, 62%, 63%, 64%, 65%, 66%, 67%, 68%, 69%, 70%, 71%, 72%, 73%, 74%, 75%, 76%, 77%, 78%, 79%, 80%, 85%, 90%, 95% and 100%, or at least 20-30%, 20-40%, 20-50%, 20-60%, 20-70%, 20-80%, 20-90%, 20-95%, 20-100%, 30-40%, 30-50%, 30-60%, 30-70%, 30-80%, 30-90%, 30.-95%, 30-100%, 40-50%, 40-60%, 40-70%, 40-80%, 40-90%, 40-95%, 40-100%, 50-60%, 50-70%, 50-80%, 50-90%, 50-95%, 50-100%, 55-60%, 55-70%, 55-80%, 55-90%, 55-95%, 55-100%, 60-70%, 60-80%, 60-90%, 60-95%, 60-100%, 70-80%, 70-90%, 70-95%, 70-100%, 80-90%, 80-95%, 80-100%, 90-95%, 90-100% or 95-100%.

[1013] In some embodiments, the siRNA duplexes or encoded dsRNA may be used to reduce the expression of HTT protein and/or mRNA in at least one region of the CNS such as, but not limited to the forebrain. The expression of HTT protein and/or mRNA is reduced by at least about 30%, 31%, 32%, 33%, 34%, 35%, 36%, 37%, 38%, 39%, 40%, 41%, 42%, 43%, 44%, 45%, 46%, 47%, 48%, 49%, 50%, 51%, 52%, 53%, 54%, 55%, 56%, 57%, 58%, 59%, 60%, 61%, 62%, 63%, 64%, 65%, 66%, 67%, 68%, 69%, 70%, 71%, 72%, 73%, 74%, 75%, 76%, 77%, 78%, 79%, 80%, 85%, 90%, 95% and 100%, or at least 20-30%, 20-40%, 20-50%, 20-60%, 20-70%, 20-80%, 20-90%, 20-95%, 20-100%, 30-40%, 30-50%, 30-60%, 30-70%, 30-80%, 30-90%, 30-95%, 30-100%, 40-50%, 40-60%, 40-70%, 40-80%, 40-90%, 40-95%, 40-100%, 50-60%, 50-70%, 50-80%, 50-90%, 50-95%, 50-100%, 55-60%, 55-70%, 55-80%, 55-90%, 55-95%, 55-100%, 60-70%, 60-80%, 60-90%, 60-95%, 60-100%, 70-80%, 70-90%, 70-95%, 70-100%, 80-90%, 80-95%, 80-100%, 90-95%, 90-100%, or 95-100% in at least one region of the CNS. As a non-limiting example, the expression of HTT protein and/or mRNA in the putamen is reduced by 50-90%. As anon-limiting example, the expression of HTT protein and/or mRNA in the striatum is reduced by 40-50%. As a non-limiting example, the expression of HTT protein and/or mRNA in the cot/ex is reduced by 40-50%. As a non-limiting example, the expression of HTT protein and/or mRNA in the cortex is reduced by 30-70%.

[1014] As a non-limiting example, the expression of HTT protein and/or mRNA in the striatum and/or cortex is reduced by 40-70%. As a non-limiting example, the expression of HTT protein and/or mRNA in the striatum and/or cortex is reduced by 40-50%. As a non-limiting example, the expression of HTT protein and/or mRNA in the striatum and/or cortex is reduced by 50-70%. As a non-limiting example, the expression of HTT protein and/or mRNA in the striatum and/or cortex is reduced by 50-60%. As a non-limiting example, the expression of HTT protein and/or mRNA in the striatum and/or cortex is reduced by 50%. As a non-limiting example, the expression of HTT protein and/or mRNA in the striatum and/or cortex is reduced by 51%. As a non-limiting example, the expression of HTT protein and/or mRNA in the striatum and/or cortex is reduced by 52%. As a non-limiting example, the expression of HTT protein and/or mRNA in the striatum and/or cortex is reduced by 53%. As a non-limiting example, the expression of HTT protein and/or mRNA in the striatum and/or cortex is reduced by 54%. As a non-limiting example, the expression of HTT protein and/or mRNA in the striatum and/or cortex is reduced by 55%. As a non-limiting example, the expression of HTT protein and/or mRNA in the striatum and/or cortex is reduced by 56%. As a non-limiting example, the expression of HTT protein and/or mRNA in the striatum and/or cortex is reduced by 57%. As a non-limiting example, the expression of HTT protein and/or mRNA in the striatum and/or cortex is reduced by 58%. As a non-limiting example, the expression of HTT protein and/or mRNA in the striatum and/or cortex is reduced by 59%. As a non-limiting example, the expression of HTT protein and/or mRNA in the striatum and/or cortex is reduced by 60%. As a non-limiting example, the expression of HTT protein and/or mRNA in the striatum and/or cortex is reduced by 61%. As a non-limiting example, the expression of HTT protein and/or mRNA in the striatum and/or cortex is reduced by 62%. As a non-limiting example, the expression of HTT protein and/or mRNA in the striatum and/or cortex is reduced by 63%. As a non-limiting example, the expression of HTT protein and/or mRNA in the striatum and/or cortex is reduced by 64%. As a non-limiting example, the expression of HTT protein and/or mRNA in the striatum and/or cortex is reduced by 65%, As a non-limiting example, the expression of HTT protein and/or mRNA in the striatum and/or cortex is reduced by 66%. As a non-limiting example, the expression of HTT protein and/or mRNA in the striatum and/or cortex is reduced by 67%. As a non-limiting example, the expression of HTT protein and/or mRNA in the striatum and/or cortex is reduced by 68%. As a non-limiting example, the expression of HTT protein and/or mRNA in the striatum and/or cortex is reduced by 69%. As a non-limiting example, the expression of HTT protein and/or mRNA in the striatum and/or cortex is reduced by 70%.

[1015] In some embodiments, the siRNA duplexes or encoded dsRNA may be used to reduce the expression of HTT protein and/or mRNA in the striatum. The expression of HTT protein and/or mRNA is reduced by at least about 30%, 31%, 32%, 33%, 34%, 35%, 36%, 37%, 38%, 39%, 40%, 41%, 42%, 43%, 44%, 45%, 46%, 47%, 48%, 49%, 50%, 51%, 52%, 53%, 54%. 55%, 56%, 57%, 58%, 59%, 60%, 61%, 62%, 63%, 64%, 65%, 66%, 67%, 68%, 69%, 70%, 71%, 72%, 73%, 74%, 75%, 76%, 77%, 78%, 79%, 80%, 85%, 90%, 95% and 100%, or at least 20-30%, 20-40%, 20-50%, 20-60%, 20-70%, 20-80%, 20-90%, 20-95%, 20-100%, 30-40%, 30-50%, 30-60%, 30-70%, 30-80%, 30-90%, 30-95%, 30-100%, 40-50%, 40-60%, 40-70%, 40-80%, 40-90%, 40-95%, 40-100%, 50-60%, 50-70%, 50-80%, 50-90%, 50-95%, 50-100%, 60-70%, 60-80%, 60-90%, 60-95%, 60-100%, 70-80%, 70-90%, 70-95%, 70-100%, 80-90%, 80-95%, 80-100%, 90-95%, 90-100% or 95-100%. As a non-limiting example, the expression of HTT protein and/or mRNA in the striatum is reduced by 40-50%. As a non-limiting example, the expression of HTT protein and/or mRNA in the striatum is reduced by 30-70%. As a non-limiting example, the expression of HTT protein and/or mRNA in the striatum is reduced by at least 30%. As a non-limiting example, the expression of HTT protein and/or mRNA in the striatum is reduced by 40-70%, As a non-limiting example, the expression of HTT protein and/or mRNA in the striatum is reduced by 40-50%. As a non-limiting example, the expression of HTT protein and/or mRNA in the striatum is reduced by 50-70%. As a non-limiting example, the expression of HTT protein and/or mRNA in the striatum is reduced by 50-60%, As a non-limiting example, the expression of HTT protein and/or mRNA in the striatum is reduced by 50%. As a non-limiting example, the expression of HTT protein and/or mRNA in the striatum is reduced by 51%. As a non-limiting example, the expression of HTT protein and/or mRNA in the striatum is reduced by 52%. As a non-limiting example, the expression of HTT protein and/or mRNA in the striatum is reduced by 53%. As a non-limiting example, the expression of HTT protein and/or mRNA in the striatum is reduced by 54%. As a non-limiting example, the expression of HTT protein and/or mRNA in the striatum is reduced by 55%. As a non-limiting example, the expression of HTT protein and/or mRNA in the striatum is reduced by 56%. As a non-limiting example, the expression of HTT protein and/or mRNA in the striatum is reduced by 57%. As a non-limiting example, the expression of HTT protein and/or mRNA in the striatum is reduced by 58%. As a non-limiting example, the expression of HTT protein and/or mRNA in the striatum is reduced by 59%. As a non-limiting example, the expression of HTT protein and/or mRNA in the striatum is reduced by 60%. As a non-limiting example, the expression of HTT protein and/or mRNA in the striatum is reduced by 61%. As a non-limiting example, the expression of HTT protein and/or mRNA in the striatum is reduced by 62%. As a non-limiting example, the expression of HTT protein and/or mRNA in the striatum is reduced by 63%. As a non-limiting example, the expression of HTT protein and/or mRNA in the striatum is reduced by 64%. As a non-limiting example, the expression of HTT protein and/or mRNA in the striatum is reduced by 65%. As a non-limiting example, the expression of HTT protein and/or mRNA in the striatum is reduced by 66%. As a non-limiting example, the expression of HTT protein and/or mRNA in the striatum is reduced by 67%. As a non-limiting example, the expression of HTT protein and/or mRNA in the striatum is reduced by 68%. As a non-limiting example, the expression of HTT protein and/or mRNA in the striatum is reduced by 69%. As a non-limiting example, the expression of HTT protein and/or mRNA in the striatum is reduced by 70%.

[1016] In some embodiments, the AAV particles comprising modulatory polynucleotides encoding the siRNA molecules of the present disclosure may be used to suppress HTT protein in neurons and/or astrocytes of the striatum and/or the cortex. As a non-limiting example, the suppression of HTT protein is in medium spiny neurons of the striatum and/or neurons of the cortex. As a non-limiting example, the suppression of HTT protein is in medium spiny neurons of the striatum and/or pyramidal neurons of the primary motor cortex and primary somatosensory cortex.

[1017] In some embodiments, the AAV particles comprising modulatory polynucleotides encoding the siRNA molecules of the present disclosure may be used to suppress HTT protein in neurons and/or astrocytes of the striatum and/or the cortex and reduce associated neuronal toxicity. The suppression of HTT protein in the neurons and/or astrocytes of the striatum and/or the cortex may be, independently, suppressed by 5%, 10%, 15%, 20%, 25%, 30%, 35%, 40%, 45%, 50%, 55%, 60%, 65%, 70%, 75%, 80%, 85%, 90%, 95%, or more than 95%, 5-15%, 5-20%, 5-25%, 5-30%, 5-35%, 5-40%, 5-45%, 5-50%, 5-55%, 5-60%, 5-65%, 5-70%, 5-75%, 5-80%, 5-85%, 5-90%, 5-95%, 10-20%, 10-25%, 10-30%, 10-35%, 10-40%, 10-45%, 10-50%, 10-55%, 10-60%, 10-65%, 10-70%, 10-75%, 10-80%, 10-85%, 10-90%, 10-95%, 15-25%, 15-30%, 15-35%, 15-40%, 15-45%, 15-50%, 15-55%, 15-60%, 15-65%, 15-70%, 15-75%, 15-80%, 15-85%, 15-90%, 15-95%, 70-30%, 20-35%, 20-40%, 20-45%, 20-50%, 20-55%, 20-60%, 20-65%, 20-70%, 20-75%, 20-80%, 20-85%, 20-90%, 20-95%, 25-35%, 25-40%, 25-45%, 25-50%, 25-55%, 25-60%, 25-65%, 25-70%, 25-75%, 25-80%, 25-85%, 25-90%, 25-95%, 30-40%, 30-45%, 30-50%, 30-55%, 30-60%, 30-65%, 30-70%, 30-75%, 30-80%, 30-85%, 30-90%, 30-95%, 35-45%, 35-50%, 35-55%, 35-60%, 35-65%, 35-70%, 35-75%, 35-80%, 35-85%, 35-90%, 35-95%, 40-50%, 40-55%, 40-60%, 40-65%, 40-70%, 40-75%, 40-80%, 40-85%, 40-90%, 40-95%, 45-55%, 45-60%, 45-65%, 45-70%, 45-75%, 45-80%, 45-85%, 45-90%, 45-95%, 50-60%, 50-65%, 50-70%, 50-75%, 50-80%, 50-85%, 50-90%, 50-95%, 55-65%, 55-70%, 55-75%, 55-80%, 55-85%, 55-90%, 55-95%, 60-70%, 60-75%, 60-80%, 60-85%, 60-90%, 60-95%, 65-75%, 65-80%, 65-85%, 65-90%, 65-95%, 70-80%, 70-85%, 70-90%, 70-95%, 75-85%, 75-90%, 75-95%, 80-90%, 80-95%, or 90-95%. The reduction of associated neuronal toxicity may be 5%, 10%, 15%, 20%, 25%, 30%, 35%, 40%, 45%, 50%, 55%, 60%, 65%, 70%, 75%, 80%, 85%, 90%, 95%, or more than 95%, 5-15%, 5-20%, 5-25%, 5-30%, 5-35%, 5-40%, 5-45%, 5-50%, 5-55%, 5-60%, 5-65%, 5-70%, 5-75%, 5-80%, 5-85%, 5-90%, 5-95%, 10-20%, 10-25%, 10-30%, 10-35%, 10-40%, 10-45%, 10-50%, 10-55%, 10-60%, 10-65%, 10-70%, 10-75%, 10-80%, 10-85%, 10-90%, 10-95%, 15-25%, 15-30%, 15-35%, 15-40%, 15-45%, 15-50%, 15-55%, 15-60%, 15-65%, 15-70%, 15-75%, 15-80%, 15-85%, 15-90%, 15-95%, 20-30%, 20-35%, 20-40%, 20-45%, 20-50%, 20-55%, 20-60%, 20-65%, 20-70%, 20-75%, 20-80%, 20-85%, 20-90%, 20-95%, 25-35%, 25-40%, 25-45%, 25-50%, 25-55%, 25-60%, 25-65%, 25-70%, 25-75%, 25-80%, 25-85%, 25-90%, 25-95%, 30-40%, 30-45%, 30-50%, 30-55%, 30-60%, 30-65%, 30-70%, 30-75%, 30-80%, 30-85%, 30-90%, 30-95%, 35-45%, 35-50%, 35-55%, 35-60%, 35-65%, 35-70%, 35-75%, 35-80% 35-85%, 35-90%, 35-95%, 40-50%, 40-55%, 40-60%, 40-65%, 40-70%, 40-75%, 40-80%, 40-85%, 40-90%, 40-95%, 45-55%, 45-60%, 45-65%, 45-70%, 45-75%, 45-80%, 45-85%, 45-90%, 45-95%, 50-60%, 50-65%, 50-70%, 50-75%, 50-80%, 50-85%, 50-90%, 50-95%, 55-65%, 55-70%, 55-75%, 55-80%, 55-85%, 55-90%, 55-95%, 60-70%, 60-75%, 60-80%, 60-85%, 60-90%, 60-95%, 65-75%, 65-80%, 65-85%, 65-90%, 65-95%, 70-80%, 70-85%, 70-90%, 70-95%, 75-85%, 75-90%, 75-95%, 80-90%, 80-95%, or 90-95%.

[1018] In some embodiments, the siRNA duplexes or encoded dsRNA may be used to reduce the expression of HTT protein and/or snRNA in the cortex. The expression of HTT protein and/or mRNA is reduced by at least about 30%, 31%, 32%, 33%, 34%, 35%, 36%, 37%, 38%, 39%, 40%, 41%, 42%, 43%, 44%, 45%, 46%, 47%, 48%, 49%, 50%, 51%, 52%, 53%, 54%, 55%, 56%, 57%, 58%, 59%, 60%, 61%, 62%, 63%, 64%, 65%, 66%, 67%, 68%, 69%, 70%, 71%, 72%, 73%, 74%, 75%, 76%, 77%, 78%, 79%, 80%, 85%, 90%, 95% and 100%, or at least 20-30%, 20-40%, 20-50%, 20-60%, 20-70%, 20-80%, 20-90%, 20-95%, 20-100%, 30-40%, 30-50%, 30-60%, 30-70%, 30-80%, 30-90%, 30-95%, 30-100%, 40-50%, 40-60%, 40-70%, 40-80%, 40-90%, 40-95%, 40-100%, 50-60%, 50-70%, 50-80%, 50-90%, 50-95%, 50-100%, 60-70%, 60-80%, 60-90%, 60-95%, 60-100%, 70-80%, 70-90%, 70-95%, 70-100%, 80-90%, 80-95%, 80-100%, 90-95%, 90-100% or 95-100%. As a non-limiting; example, the expression of HTT protein and/or mRNA in the cortex is reduced by 40-50%, As a non-limiting example, the expression of HTT protein and/or mRNA in the cortex is reduced by 30-70%. As a non-limiting example, the expression of HTT protein and/or mRNA in the cortex is reduced by at least 30%.

[1019] As a non-limiting example, the expression of HTT protein and/or mRNA in the cortex is reduced by 40-70%. As a non-limiting example, the expression of HTT protein and/or mRNA in the cortex is reduced by 40-50%. As a non-limiting example, the expression of HTT protein and/or mRNA in the cortex is reduced by 50-70%. As a non-limiting example, the expression of HTT protein and/or mRNA in the cortex is reduced by 50-60%. As a non-limiting example, the expression of HTT protein and/or mRNA in the cortex is reduced by 50%, As a non-limiting example, the expression of HTT protein and/or mRNA in the cortex is reduced by 51%. As a non-limiting example, the expression of HTT protein and/or mRNA in the cortex is reduced by 52%. As a non-limiting example, the expression of HTT protein and/or mRNA in the cortex is reduced by 53%. As a non-limiting example, the expression of HTT protein and/or mRNA in the cortex is reduced by 54%. As a non-limiting example, the expression of HTT protein and/or mRNA in the cortex is reduced by 55%. As a non-limiting example, the expression of HTT protein and/or mRNA in the cortex is reduced by 56%. As a non-limiting; example, the expression of HTT protein and/or mRNA in the cortex is reduced by 57%. As a non-limiting example, the expression of HTT protein and/or mRNA in the cortex is reduced by 58%. As a non-limiting example, the expression of HTT protein and/or mRNA in the cortex is reduced by 59%. As a non-limiting example, the expression of HTT protein and/or mRNA in the cortex is reduced by 60%.

[1020] In some embodiments, the siRNA duplexes or encoded dsRNA may be used to reduce the expression of HTT protein and/or mRNA in the motor cortex. The expression of HTT protein and/or mRNA is reduced by at least about 30%, 31%, 32%, 33%, 34%, 35%, 36%, 37%, 38%, 39%, 40%, 41%, 42%, 43%, 44%, 45%, 46%, 47%, 48%, 49%, 50%, 51%, 52%, 53%, 54%, 55%, 56%, 57%, 58%, 59%, 60%, 61%, 62%, 63%, 64%, 65%, 66%, 67%, 68%, 69%, 70%. 71%, 72%, 73%, 74%, 75%, 76%, 77%, 78%, 79%, 80%, 85%, 90%, 95% and 100%, or at least 20-30%, 20-40%, 20-50%, 20-60%, 20-70%, 20-80%, 20-90%, 70-95%, 70-100%, 30-40%, 30-50%, 30-60%, 30-70%, 30-80%, 30-90%, 30-95%, 30-100%, 40-50%, 40-60%, 40-70%, 40-80%, 40-90%, 40-95%, 40-100%, 50-60%, 50-70%, 50-80%, 50-90%, 50-95%, 50-100%, 60-70%, 60-80%, 60-90%, 60-95%, 60-100%, 70-80%, 70-90%, 70-95%, 70-100%, 80-90%, 80-95%, 80-100%, 90-95%, 90-100% or 95-100%. As a non-limiting example, the expression of HTT protein and/or mRNA in the motor cortex is reduced by 20-30%. As a non-limiting example, the expression of HTT protein and/or mRNA in the motor cortex is reduced by 40-50%. As a non-limiting example, the expression of HTT protein and/or mRNA in the motor cortex is reduced by 30-70%. As a non-limiting example, the expression of HTT protein and/or mRNA in the motor cortex is reduced by at least 30%. As a non-limiting example, the expression of HTT protein and/or mRNA in the motor cortex is reduced by 40-70%. As a non-limiting example, the expression of HTT protein and/or mRNA in the motor cortex is reduced by 40-50%. As a non-limiting example, the expression of HTT protein and/or mRNA in the motor cortex is reduced by 50-70%. As a non-limiting example, the expression of HTT protein and/or mRNA in the motor cortex is reduced by 50-60%. As a non-limiting example, the expression of HTT protein and/or mRNA in the motor cortex is reduced by 50%, As a non-limiting example, the expression of HTT protein and/or mRNA in the motor cortex is reduced by 51%. As a non-limiting example, the expression of HTT protein and/or mRNA in the motor cortex is reduced by 52%. As a non-limiting example, the expression of HTT protein and/or mRNA in the motor cortex is reduced by 53%. As a non-limiting example, the expression of HTT protein and/or mRNA in the motor cortex is reduced by 54%. As a non-limiting example, the expression of HTT protein and/or mRNA in the motor cortex is reduced by 55%. As a non-limiting example, the expression of KU protein and/or mRNA in the motor cortex is reduced by 56%. As a non-limiting example, the expression of HTT protein and/or mRNA in the motor cortex is reduced by 57%. As a non-limiting example, the expression of HTT protein and/or mRNA in the motor cortex is reduced by 58%. As a non-limiting example, the expression of HTT protein and/or mRNA in the motor cortex is reduced by 59%. As a non-limiting example, the expression of HTT protein and/or mRNA in the motor cortex is reduced by 60%.

[1021] In some embodiments, the siRNA duplexes or encoded dsRNA may be used to reduce the expression of HTT protein and/or mRNA in the somatosensory cortex, The expression of HTT protein and/or mRNA is reduced by at least about 30%, 31%, 32%, 33%, 34%, 35%, 36%, 37%, 38%, 39%, 40%, 41%, 42%, 43%, 44%, 45%, 46%, 47%, 48%, 49%, 50%, 51%, 52%, 53%, 54%, 55%, 56%, 57%, 58%, 59%, 60%, 61%, 62%, 63%, 64%, 65%, 66%, 67%, 68%, 69%, 70%, 71%, 72%, 73%, 74%, 75%, 76%, 77%, 78%, 79%, 80%, 85%, 90%, 95% and 100%, or at least 20-30%, 20-40%, 20-50%, 20-60%, 20-70%, 20-80%, 20-90%, 20-95%, 20-100%, 30-40%, 30-50%, 30-60%, 30-70%, 30-80%, 30-90%, 30-95%, 30-100%, 40-50%, 40-60%, 40-70%, 40-80%, 40-90%, 40-95%, 40-100%, 50-60%, 50-70%, 50-80%, 50-90%, 50-95%, 50-100%, 60-70%, 60-80%, 60-90%, 60-95%, 60-100%, 70-80%, 70-90%, 70-95%, 70-100%, 80-90%, 80-95%, 80-100%, 90-95%, 90-100% or 95-100%. As a non-limiting example, the expression of HTT protein and/or mRNA in the somatosensory cortex is reduced by 20-30%.

[1022] As a non-limiting example, the expression of HTT protein and/or mRNA in the somatosensory cortex is reduced by 40-50%. As a non-limiting example, the expression of HTT protein and/or mRNA in the somatosensory cortex is reduced by 30-70%. As a non-limiting example, the expression of HTT protein and/or mRNA in the somatosensory cortex is reduced by at least 30%. As a non-limiting example, the expression of HTT protein and/or mRNA in the somatosensory cortex is reduced by 40-70%. As a non-limiting example, the expression of HTT protein and/or mRNA in the somatosensory cortex is reduced by 40-50%. As a non-limiting example, the expression of HTT protein and/or mRNA in the somatosensory cortex is reduced by 50-70%. As a non-limiting example, the expression of HTT protein and/or mRNA in the somatosensory cortex is reduced by 50-60%. As a non-limiting; example, the expression of HUI: protein and/or mRNA in the somatosensory cortex is reduced by 50%. As a non-limiting example, the expression of HTT protein and/or mRNA in the somatosensory cortex is reduced by 51%. As a non-limiting example, the expression of HTT protein and/or mRNA in the somatosensory cortex is reduced by 52%. As a non-limiting example, the expression of HTT protein and/or mRNA in the somatosensory cortex is reduced by 53%. As a non-limiting example, the expression of HTT protein and/or mRNA in the somatosensory cortex is reduced by 54%. As a non-limiting example, the expression of HTT protein and/or mRNA in the somatosensory cortex is reduced by 55%. As a non-limiting example, the expression of HTT protein and/or mRNA in the somatosensory cortex is reduced by 56%. As a non-limiting example, the expression of HTT protein and/or mRNA in the somatosensory cortex is reduced by 57%. As a non-limiting example, the expression of HTT protein and/or mRNA in the somatosensory cortex is reduced by 58%. As a non-limiting example, the expression of HTT protein and/or mRNA in the somatosensory cortex is reduced by 59%. As a non-limiting example, the expression of HTT protein and/or mRNA in the somatosensory cortex is reduced by 60%.

[1023] In some embodiments, the siRNA duplexes or encoded dsRNA may be used to reduce the expression of HTT protein and/or snRNA in the temporal cortex. The expression of HTT protein and/or mRNA is reduced by at least about 30%, 31%, 32%, 33%, 34%, 35%, 36%, 37%, 38%, 39%, 40%, 41%, 42%, 43%, 44%, 45%, 46%, 47%, 48%, 49%, 50%, 51%, 52%, 53%, 54%, 55%, 56%, 57%, 58%, 59%, 60%, 61%, 62%, 63%, 64%, 65%, 66%, 67%, 68%, 69%, 70%, 71%, 72%, 73%, 74%, 75%, 76%, 77%, 78%, 79%, 80%, 85%, 90%, 95% and 100%, or at least 20-30%, 20-40%, 20-50%, 20-60%, 20-70%, 20-80%, 20-90%, 20-95%, 20-100%, 30-40%, 30-50%, 30-60%, 30-70%, 30-80%, 30-90%, 30-95%, 30-100%, 40-50%, 40-60%, 40-70%, 40-80%, 40-90%, 40-95%, 40-100%, 50-60%, 50-70%, 50-80%, 50-90%, 50-95%, 50-100%, 60-70%, 60-80%, 60-90%, 60-95%, 60-100%, 70-80%, 70-90%, 70-95%, 70-100%, 80-90%, 80-95%, 80-100%, 90-95%, 90-100% or 95-100%. As a non-limiting example, the expression of HTT protein and/or mRNA in the temporal cortex is reduced by 40-50%. As a non-limiting example, the expression of HTT protein and/or mRNA in the temporal cortex is reduced by 30-70%. As a non-limiting example, the expression of HTT protein and/or mRNA in the temporal cortex is reduced by at least 30%. As a non-limiting example, the expression of HTT protein and/or mRNA in the temporal cortex is reduced by 40-70%. As a non-limiting example, the expression of HTT protein and/or mRNA in the temporal cortex is reduced by 40-50%. As a non-limiting example, the expression of HTT protein and/or mRNA in the temporal cortex is reduced by 50-70%. As a non-limiting example, the expression of HTT protein and/or mRNA in the temporal cortex is reduced by 50-60%. As a non-limiting example, the expression of HTT protein and/or mRNA in the temporal cortex is reduced by 50%. As a non-limiting example, the expression of HTT protein and/or mRNA in the temporal cortex is reduced by 51%. As a non-limiting example, the expression of HTT protein and/or mRNA in the temporal cortex is reduced by 52%. As a non-limiting example, the expression of HTT protein and/or mRNA in the temporal cortex is reduced by 53%. As a non-limiting example, the expression of HTT protein and/or mRNA in the temporal cortex is reduced by 54%. As a non-limiting example, the expression of HTT protein and/or mRNA in the temporal cortex is reduced by 55%. As a non-limiting example, the expression of HTT protein and/or mRNA in the temporal cortex is reduced by 56%. As a non-limiting example, the expression of HTT protein and/or mRNA in the temporal cortex is reduced by 57%. As a non-limiting example, the expression of HTT protein and/or mRNA in the temporal cortex is reduced by 58%. As a non-limiting example, the expression of HTT protein and/or mRNA in the temporal cortex is reduced by 59%. As a non-limiting example, the expression of HTT protein and/or mRNA in the temporal cortex is reduced by 60%,

[1024] In some embodiments, the siRNA duplexes or encoded dsRNA may be used to reduce the expression of HTT protein and/or mRNA in the motor cortex, the somatosensory cortex, and the temporal cortex when combined together. The expression of HTT protein and/or mRNA is reduced by at least about 30%, 31%, 32%, 33%, 34%, 35%, 36%, 37%, 38%, 39%, 40%, 41%, 42%, 43%, 44%, 45%, 46%, 47%, 48%, 49%, 50%, 51%, 52%, 53%, 54%, 55%, 56%, 57%, 58%, 59%, 60%, 61%, 62%, 63%, 64%, 65%, 66%, 67%, 68%, 69%, 70%, 71%, 72%, 73%, 74%, 75%, 76%, 77%, 78%, 79%, 80%, 85%, 90%, 95% and 100%, or at least 20-30%, 20-40%, 20-50%, 20-60%, 20-70%, 20-80%, 20-90%, 20-95%, 20-100%, 30-40%, 30-50%, 30-60%, 30-70%, 30-80%, 30-90%, 30-95%, 30-100%, 40-50%, 40-60%, 40-70%, 40-80%, 40-90%, 40-95%, 40-100%, 50-60%, 50-70%, 50-80%, 50-90%, 50-95%, 50-100%, 60-70%, 60-80%, 60-90%, 60-95%, 60-100%, 70-80%, 70-90%, 70-95%, 70-100%, 80-90%, 80-95%, 80-100%, 90-95%, 90-100% or 95-100%. As a non-limiting example, the expression of HTT protein and/or mRNA in the motor cortex, the somatosensory cortex, and the temporal cortex when combined together is reduced by 40-50%. As a non-limiting example, the expression of HTT protein and/or mRNA in the motor cortex, the somatosensory cortex, and the temporal cortex when combined together is reduced by 30-70%. As a non-limiting example, the expression of HTT protein and/or mRNA in the motor cortex, the somatosensory cortex, and the temporal cortex when combined together is reduced by at least 30%. As a non-limiting example, the expression of HTT protein and/or mRNA in the motor cortex, the somatosensory cortex, and the temporal cortex when combined together is reduced by 40-70%. As a non-limiting example, the expression of HTT protein and/or mRNA in the motor cortex, the somatosensory cortex, and the temporal cortex when combined together is reduced by 40-50%. As a non-limiting example, the expression of HTT protein and/or mRNA in the motor cortex, the somatosensory cortex, and the temporal cortex when combined together is reduced by 50-70%. As a non-limiting example, the expression of HTT protein and/or mRNA in the motor cortex, the somatosensory cortex, and the temporal cortex when combined together is reduced by 50-60%. As a non-limiting example, the expression of HTT protein and/or mRNA in the motor cortex, the somatosensory cortex, and the temporal cortex when combined together is reduced by 50%. As a non-limiting example, the expression of HTT protein and/or mRNA in the motor cortex, the somatosensory cortex, and the temporal cortex when combined together is reduced by 51%. As a non-limiting example, the expression of HTT protein and/or mRNA in the motor cortex, the somatosensory cortex, and the temporal cortex when combined together is reduced by 52%. As a non-limiting example, the expression of HTT protein and/or mRNA in the motor cortex, the somatosensory cortex, and the temporal cortex when combined together is reduced by 53%. As a non-limiting example, the expression of HTT protein and/or snRNA in the motor cortex, the somatosensory cortex, and the temporal cortex when combined together is reduced by 54%. As a non-limiting example, the expression of HTT protein and/or mRNA in the motor cortex, the somatosensory cortex, and the temporal cortex when combined together is reduced by 55%. As a non-limiting example, the expression of HTT protein and/or mRNA in the motor cortex, the somatosensory cortex, and the temporal cortex when combined together is reduced by 56%. As a non-limiting example, the expression of HTT protein and/or mRNA in the motor cortex, the somatosensory cortex, and the temporal cortex when combined together is reduced by 57%. As a non-limiting example, the expression of HTT protein and/or mRNA in the motor cortex, the somatosensory cortex, and the temporal cortex when combined together is reduced by 58%. As a non-limiting example, the expression of HTT protein and/or mRNA in the motor cortex, the somatosensory cortex, and the temporal cortex when combined together is reduced by 59%. As a non-limiting example, the expression of HTT protein and/or mRNA in the temporal cortex is reduced by 60%.

[1025] In some embodiments, the siRNA duplexes or encoded dsRNA may be used to reduce the expression of HTT protein and/or mRNA in the putamen. The expression of HTT protein and/or mRNA is reduced by at least about 30%, 31%, 32%, 33%, 34%, 35%, 36%, 37%, 38%, 39%, 40%, 41%, 42%, 43%, 44%, 45%, 46%, 47%, 48%, 49%, 50%, 51%, 52%, 53%, 54%. 55%, 56%, 57%, 58%, 59%, 60%, 61%, 62%, 63%, 64%, 65%, 66%, 67%, 68%, 69%, 70%, 71%, 72%, 73%, 74%, 75%, 76%, 77%, 78%, 79%, 80%, 85%, 90%, 95% and 100%, or at least 20-30%, 20-40%, 20-50%, 20-60%, 20-70%, 20-80%, 20-90%, 20-95%, 20-100%, 30-40%, 30-50%, 30-60%, 30-70%, 30-80%, 30-90%, 30-95%, 30-100%, 40-50%, 40-60%, 40-70%, 40-80%, 40-90%, 40-95%, 40-100%, 50-60%, 50-70%, 50-80%, 50-90%, 50-95%, 50-100%, 55-60%, 55-70%, 55-80%, 55-90%, 55-95%, 55-100%, 60-70%, 60-80%, 60-90%, 60-95%, 60-100%, 70-80%, 70-90%, 70-95%, 70-100%, 80-90%, 80-95%, 80-100%, 90-95%, 90-100% or 95-100% in the putamen. As a non-limiting example, the expression of HTT protein and/or mRNA in the putamen is reduced by 40-70%. As a non-limiting example, the expression of HTT protein and/or mRNA in the putamen is reduced by 30-40%. As a non-limiting example, the expression of HTT protein and/or mRNA in the putamen is reduced by 40-50%. As a non-limiting example, the expression of HTT protein and/or mRNA in the putamen is reduced by 50-80%. As a non-limiting example, the expression of HTT protein and/or mRNA in the putamen is reduced by 50-70%. As a non-limiting example, the expression of HTT protein and/or mRNA in the putamen is reduced by 50-60%. As a non-limiting example, the expression of HTT protein and/or mRNA in the putamen is reduced by 60-70%. As a non-limiting example, the expression of HTT protein and/or mRNA in the putamen is reduced by 50%. As a non-limiting example, the expression of HTT protein and/or mRNA in the putamen is reduced by 51%. As a non-limiting example, the expression of HTT protein and/or mRNA in the putamen is reduced by 52%. As a non-limiting example, the expression of HTT protein and/or mRNA in the putamen is reduced by 53%. As a non-limiting example, the expression of HTT protein and/or mRNA in the putamen is reduced by 54%. As a non-limiting example, the expression of HTT protein and/or mRNA in the putamen is reduced by 55%. As a non-limiting example, the expression of HTT protein and/or mRNA in the putamen is reduced by 56%. As a non-limiting example, the expression of HTT protein and/or mRNA in the putamen is reduced by 57%. As a non-limiting example, the expression of HTT protein and/or mRNA in the putamen is reduced by 58%. As a non-limiting example, the expression of HTT protein and/or mRNA in the putamen is reduced by 59%. As a non-limiting example, the expression of HTT protein and/or mRNA in the putamen is reduced by 60%. As a non-limiting example, the expression of HTT protein and/or mRNA in the putamen is reduced by 61%. As a non-limiting example, the expression of HTT protein and/or mRNA in the putamen is reduced by 62%. As a non-limiting example, the expression of HTT protein and/or mRNA in the putamen is reduced by 63%. As a non-limiting example, the expression of HTT protein and/or mRNA in the putamen is reduced by 64%. As a non-limiting example, the expression of HTT protein and/or mRNA in the putamen is reduced by 65%. As a non-limiting example, the expression of HTT protein and/or mRNA in the putamen is reduced by 66%, As a non-limiting example, the expression of HTT protein and/or mRNA in the putamen is reduced by 67%. As a non-limiting example, the expression of HTT protein and/or mRNA in the putamen is reduced by 68%. As a non-limiting example, the expression of HTT protein and/or mRNA in the putamen is reduced by 69%. As a non-limiting example, the expression of HTT protein and/or mRNA in the putamen is reduced by 70%.

[1026] In some embodiments, the siRNA duplexes or encoded dsRNA may be used to reduce the expression of HTT protein and/or mRNA in the caudate. The expression of HTT protein and/or mRNA is reduced by at least about 30%, 31%, 32%, 33%, 34%, 35%, 36%, 37%, 38%, 39%, 40%, 41%, 42%, 43%, 44%, 45%, 46%, 47%, 48%, 49%, 50%, 51%, 52%, 53%, 54%, 55%, 56%, 57%, 58%, 59%, 60%, 61%, 62%, 63%, 64%, 65%, 66%, 67%, 68%, 69%, 70%, 71%, 72%, 73%, 74%, 75%, 76%, 77%, 78%, 79%, 80%, 85%, 90%, 95% and 100%, or at least 20-30%, 20-40%, 20-50%, 20-60%, 20-70%, 20-80%, 20-90%, 20-95%, 20-100%, 30-40%, 30-50%, 30-60%, 30-70%, 30-80%, 30-90%, 30-95%, 30-100%, 40-50%, 40-60%, 40-70%, 40-80%, 40-90%, 40-95%, 40-100%, 50-60%, 50-70%, 50-80%, 50-85%, 50-90%, 50-95%, 50-100%, 55-60%, 55-70%, 55-80%, 55-90%, 55-95%, 55-100%, 60-70%, 60-80%, 60-90%, 60-95%, 60-100%, 70-80%, 70-90%, 70-95%, 70-100%, 80-90%, 80-95%, 80-100%, 90-95%, 90-100% or 95-100% in the caudate. As a non-limiting example, the expression of HTT protein and/or mRNA in the caudate is reduced by 40-70%. As a non-limiting example, the expression of HTT protein and/or mRNA in the caudate is reduced by 40-50%. As a non-limiting example, the expression of HTT protein and/or mRNA in the caudate is reduced by 50-85%. As a non-limiting example, the expression of HTT protein and/or mRNA in the caudate is reduced by 50-80%. As a non-limiting example, the expression of HTT protein and/or mRNA in the caudate is reduced by 50-70%. As a non-limiting example, the expression of HTT protein and/or mRNA in the caudate is reduced by 50-60%. As a non-limiting example, the expression of HTT protein and/or mRNA in the caudate is reduced by 60-70%. As a non-limiting example, the expression of HTT protein and/or mRNA in the caudate is reduced by 50%. As a non-limiting example, the expression of HTT protein and/or mRNA in the caudate is reduced by 51%. As a non-limiting example, the expression of HTT protein and/or mRNA in the caudate is reduced by 52%. As a non-limiting example, the expression of HTT protein and/or mRNA in the caudate is reduced by 53%. As a non-limiting example, the expression of HTT protein and/or mRNA in the caudate is reduced by 54%. As a non-limiting example, the expression of HTT protein and/or mRNA in the caudate is reduced by 55%. As a non-limiting example, the expression of HTT protein and/or mRNA in the caudate is reduced by 56%. As a non-limiting example, the expression of HTT protein and/or mRNA in the caudate is reduced by 57%. As a non-limiting example, the expression of HTT protein and/or mRNA in the caudate is reduced by 58%. As a non-limiting example, the expression of HTT protein and/or mRNA in the caudate is reduced by 59%. As a non-limiting example, the expression of HTT protein and/or mRNA in the caudate is reduced by 60%. As a non-limiting example, the expression of HTT protein and/or mRNA in the caudate is reduced by 61%. As a non-limiting example, the expression of HTT protein and/or mRNA in the caudate is reduced by 62%. As a non-limiting example, the expression of HTT protein and/or mRNA in the caudate is reduced by 63%. As a non-limiting example, the expression of HTT protein and/or mRNA in the caudate is reduced by 64%. As a non-limiting example, the expression of HTT protein and/or mRNA in the caudate is reduced by 65%. As a non-limiting example, the expression of HTT protein and/or mRNA in the caudate is reduced by 66%. As a non-limiting example, the expression of HTT protein and/or mRNA in the caudate is reduced by 67%. As a non-limiting example, the expression of HTT protein and/or mRNA in the caudate is reduced by 68%. As a non-limiting example, the expression of HTT protein and/or mRNA in the caudate is reduced by 69%. As a non-limiting example, the expression of HTT protein and/or mRNA in the caudate is reduced by 70%.

[1027] In some embodiments, the siRNA duplexes or encoded dsRNA may be used to reduce the expression of HTT protein and/or mRNA in the thalamus. The expression of HTT protein and/or mRNA is reduced by at least about 30%, 31%, 32%, 33%, 34%, 35%, 36%, 37%, 38%, 39%, 40%, 41%, 42%, 43%, 44%, 45%, 46%, 47%, 48%, 49%, 50%, 51%, 52%, 53%, 54%, 55%, 56%, 57%, 58%, 59%, 60%, 61%, 62%, 63%, 64%, 65%, 66%, 67%, 68%, 69%, 70%, 71%, 72%, 73%, 74%, 75%, 76%, 77%, 78%, 79%, 80%, 85%, 90%, 95% and 100%, or at least 20-30%, 20-40%, 20-50%, 20-60%, 20-70%, 20-80%, 20-90%, 20-95%, 20-100%, 30-40%, 30-50%, 30-60%, 30-70%, 30-80%, 30-90%, 30-95%, 30-100%, 40-50%, 40-60%, 40-70%, 40-80%, 40-90%, 40-95%, 40-100%, 50-60%, 50-70%, 50-80%, 50-85%, 50-90%, 50-95%, 50-100%, 55-60%, 55-70%, 55-80%, 55-90%, 55-95%, 55-100%, 60-70%, 60-80%, 60-90%, 60-95%, 60-100%, 70-80%, 70-90%, 70-95%, 70-100%, 80-90%, 80-95%, 80-100%, 90-95%, 90-100% or 95-100% in the thalamus. As a non-limiting example, the expression oft-ITT protein and/or mRNA in the thalamus is reduced by at least 30%. As a non-limiting example, the expression of HTT protein and/or mRNA in the thalamus is reduced by 40-70%. As a non-limiting limiting example, the expression of HTT protein and/or mRNA in the thalamus is reduced by 40-80%. As a non-limiting example, the expression of HTT protein and/or mRNA in the thalamus is reduced by 60-90%. As a non-limiting example, the expression of HTT protein and/or mRNA in the thalamus is reduced by 60-80%. As a non-limiting example, the expression of HTT protein and/or mRNA in the thalamus is reduced by 60-70%. As a non-limiting example, the expression of HTT protein and/or mRNA in the thalamus is reduced by 60%. As a non-limiting example, the expression of HU protein and/or mRNA in the thalamus is reduced by 61%. As a non-limiting example, the expression of HTT protein and/or mRNA in the thalamus is reduced by 62%. As a non-limiting example, the expression of HTT protein and/or mRNA in the thalamus is reduced by 63%. As a non-limiting example, the expression of HTT protein and/or mRNA in the thalamus is reduced by 64%. As a non-limiting example, the expression of HTT protein and/or mRNA in the thalamus is reduced by 65%, As a non-limiting example, the expression of HTT protein and/or mRNA in the thalamus is reduced by 66%. As a non-limiting example, the expression of HTT protein and/or snRNA in the thalamus is reduced by 67%. As a non-limiting example, the expression of HTT protein and/or mRNA in the thalamus is reduced by 68%. As a non-limiting example, the expression of HTT protein and/or mRNA in the thalamus is reduced by 69%. As a non-limiting example, the expression of HTT protein and/or mRNA in the thalamus is reduced by 70%. As a non-limiting example, the expression of HTT protein and/or mRNA in the thalamus is reduced by 71%, As a non-limiting example, the expression of HTT protein and/or mRNA in the thalamus is reduced by 72%. As a non-limiting example, the expression of HTT protein and/or snRNA in the thalamus is reduced by 73%. As a non-limiting example, the expression of HTT protein and/or mRNA in the thalamus is reduced by 74%. As a non-limiting example, the expression of HTT protein and/or mRNA in the thalamus is reduced by 75%. As a non-limiting example, the expression of HTT protein and/or mRNA in the thalamus is reduced by 76%. As a non-limiting example, the expression of HTT protein and/or mRNA in the thalamus is reduced by 77%, As a non-limiting example, the expression of HTT protein and/or mRNA in the thalamus is reduced by 78%. As a non-limiting example, the expression of HTT protein and/or snRNA in the thalamus is reduced by 79%. As a non-limiting example, the expression of HTT protein and/or mRNA in the thalamus is reduced by 80%.

[1028] In some embodiments. AAV particles encoding siRNA duplexes, or pharmaceutical compositions thereof, have a half maximal effective concentration (EC₅₀) of about 1-300 VG/cell. The half maximal effective concentration (EC₅₀), as used herein, refers to the concentration of AAV vectors encoding siRNA duplexes that produces 50% reduction in HTT expression in a cell. HTT expression may be HTT mRNA or protein expression. AAV particles encoding siRNA duplexes, or pharmaceutical compositions thereof, may have an EC₅₀ of 1-10, 1-20, 1-30, 1-40, 1-50, 10-20, 10-30, 10-40, 10-50, 10-60, 15-30, 20-30, 20-40, 20-50, 20-60, 20-70, 30-40, 30-50, 30-60, 30-70, 30-80, 35-50, 40-50, 40-60, 40-70, 40-80, 40-90, 50-60, 50-70, 50-80, 50-90, 50-100, 60-70, 60-80, 60-90, 60-100, 70-90, 70-100, 70-120, 80-100, 80-120, 80-140, 90-120, 90-150, 90-180, 100-120, 100-150, 100-180, 100-200, 120-160, 120-180, 150-200, 200-250, 200-300, or 250-300 VG/cell. For example, the AAV particles encoding siRNA duplexes, or pharmaceutical compositions thereof, may have an EC₅₀ of about 20, 21, 22, 23, 24, 25, 26, 27, 28, 29, 30, 31, 32, 33, 34, 35, 36, 37, 38, 39, 40, 41, 42, 43, 44, 45 46, 47, 48, 49, 50, 60, 70, 80, 90, 100, 110, 120, 130, 140, 150, 160, 170, 180, 190, 200, 250, or 300 VG/cell. As a non-limiting example, AAV particles encoding siRNA duplexes, or pharmaceutical compositions thereof, may have an EC₅₀ of about 35-50 VG/cell in the putamen. As another non-limiting example, AAV particles encoding siRNA duplexes, or pharmaceutical compositions thereof, may have an EC₅₀ of about 15-30 G/cell in the caudate.

### HTT Protein Aggregates and Cells

[1029] In some embodiments, administration of the AAV particles to a subject will modulate the quantity, e.g., level and/or number, of HTT protein aggregates and/or cells in a subject. As a non-limiting example, the HTT protein aggregates may be nuclear HTT protein aggregates. The nuclear HTT protein aggregates may be EM48-positive nuclear HTT protein aggregates, which express EM48 mRNA and/or protein. In particular embodiments, the EM48 mRNA and/or protein may be detected and measured as an index of, or proxy for, the quantity of nuclear protein aggregates. As a non-limiting example, the EM48 mRNA and/or protein may be detected and measured using any method known in the art, including quantitative reverse transcription polymerase chain reaction (RT-qPCR) and immunohistochemistry. The cells may be nervous system cells such as, but not limited, to neurons, medium-sized spiny neurons, and glial cells, e.g., astrocytes, oligodendrocytes, and/or microglia.

[1030] In some embodiments, administration of the AAV particles to a subject will modulate the quantity of neurons in a subject. As a non-limiting example, the neuron is a neuronal nuclear antigen (NeuN)-positive neuron, which expresses NeuN mRNA and/or protein. In particular embodiments, the NeuN snRNA and/or protein may be detected and measured as an index of, or proxy for, the quantity of neurons. As a non-limiting example, the NeuN mRNA and/or protein may be detected and measured using any method known in the art, including quantitative reverse transcription polymerase chain reaction (RT-qPCR) and immunohistochemistry.

[1031] In some embodiments, administration of the AAV particles to a subject will modulate the quantity of medium-size spiny neurons in a subject. As a non-limiting example, the medium-size spiny neuron is a dopamine- and cAMP-regulated phosphoprotein. Mr 32 kDa (DARPP32)-positive medium-size spiny neuron, which expresses DARPP32 mRNA and/or protein. In particular embodiments, the DARPP32 mRNA and/or protein may be detected and measured as an index of or proxy for, the quantity of medium-size spiny neurons. As a non-limiting example, the DARPP32 mRNA and/or protein may be detected and measured using any method known in the art, including quantitative reverse transcription polymerase chain reaction (RT-qPCR) and immunohistochemistry.

[1032] In some embodiments, administration of the AAV particles to a subject will modulate the quantity of astrocytes in a subject. As a non-limiting example, the astrocyte is a glial fibrillary acidic protein (GFAP)-positive astrocyte, which expresses GFAP mRNA and/or protein. In particular embodiments, the GFAP mRNA and/or protein may be detected and/or measured as an index of, or proxy for, the quantity of astrocytes. As a non-limiting example, the GFAP mRNA and/or protein may be detected and/or measured using any method known in the art, including quantitative reverse transcription polymerase chain reaction (RT-qPCR) and immunohistochemistry.

[1033] In some embodiments, administration of the AAV particles to a subject will modulate the level and/or number of microglia in a subject. As a non-limiting example, the microglia is a ionized calcium binding adaptor molecule 1 (Iba1)-positive microglia, which expresses Iba1 mRNA and/or protein. in particular embodiments, the Iba1 mRNA and/or protein may be detected and/or measured as an index of, or proxy for, the quantity of astrocytes. As a non-limiting example, the GFAP mRNA and/or protein may be detected and/or measured using any method known in the art, including quantitative reverse transcription polymerase chain reaction (RT-qPCR) and immunohistochemistry.

### Solo and Combination Therapy

[1034] In some embodiments, the present composition is administered as a solo therapeutic or combination therapeutics for the treatment of HD.

[1035] In some embodiments, the pharmaceutical composition of the present disclosure is used as a solo therapy. In other embodiments, the pharmaceutical composition of the present disclosure is used in combination therapy. The combination therapy may be in combination with one or more neuroprotective agents such as small molecule compounds, growth factors and hormones which have been tested for their neuroprotective effect on neuron degeneration.

[1036] The AAV particles encoding siRNA duplexes targeting the HTT gene may be used in combination with one or more other therapeutic agents. By “in combination with,” it is not intended to imply that the agents must be administered at the same time and/or formulated for delivery together, although these methods of delivery are within the scope of the present disclosure. Compositions can be administered concurrently with, prior to, or subsequent to, one or more other desired therapeutics or medical procedures. In general, each agent will be administered at a dose and/or on a time schedule determined for that agent.

[1037] Therapeutic agents that may be used in combination with the AAV particles encoding the nucleic acid sequence for the siRNA molecules of the present disclosure can be small molecule compounds which are antioxidants, anti-inflammatory agents, anti-apoptosis agents, calcium regulators, anti-glutamatergic agents, structural protein inhibitors, compounds involved. in muscle function, and compounds involved in metal ion regulation.

[1038] Compounds tested for treating HD which may be used in combination with the vectors described herein include, but are not limited to, dopamine-depleting agents (e.g., tetrabenazine for chorea), benzodiazepines (e.g., clonazepam for myoclonus, chorea, dystonia, rigidity, and/or spasticity), anticonvulsants (e.g., sodium valproate and levetiracetam for myoclonus), amino acid precursors of dopamine (e.g., levodopa for rigidity which is particularly associate with juvenile HD or young adult-onset parkinsonian phenotype), skeletal muscle relaxants (e.g., baclofen, tizanidine for rigidity and/or spasticity), inhibitors for acetylcholine release at the neuromuscular junction to cause muscle paralysis (e.g., botulinum toxin for bruxism and/or dystonia), atypical neuroleptics (e.g., olanzapine and quetiapine for psychosis and/or irritability, risperidone, sulpiride and haloperidol for psychosis, chorea and/or irritability, clozapine for treatment-resistant psychosis, aripiprazole for psychosis with prominent negative symptoms), agents to increase ATP/cellular energetics (e.g., creatine), selective serotonin reuptake inhibitors (SSRIs) (e.g., citalopram, fluoxetine, paroxetine, sertraline, mirtazapine, venlafaxine for depression, anxiety, obsessive compulsive behavior and/or irritability). hypnotics (e.g., xopiclone and/or zolpidem for altered sleep-wake cycle), anticonvulsants (e.g., sodium valproate and carbamazepine for mania or hypomania) and mood stabilizers (e.g., lithium for mania or hypomania).

[1039] Neurotrophic factors may be used in combination therapy with the AAV particles encoding the nucleic acid sequence for the siRNA molecules of the present disclosure for treating HD. Generally, a neurotrophic factor is defined as a substance that promotes survival, growth, differentiation, proliferation and /or maturation of a neuron, or stimulates increased activity of a neuron. In some embodiments, the present methods further comprise delivery of one or more trophic factors into the subject or patient in need of treatment. Trophic factors may include, but are not limited to, IGF-I, GDNF, BDNF, CTNF, VEGF, Colivelin, Xaliproden, Thyrotrophin-releasing hormone and ADNF, and variants thereof.

[1040] In some aspects, the AAV particles comprising modulatory polynucleotides encoding the siRNA duplex targeting the fill gene may be co-administered with AAV vectors expressing neurotrophic factors such as AAV-IGF-I (See e.g., Vincent et al., Neuromo/ecular medicine, 2004, 6, 79-85; the content of which is incorporated herein by reference in its entirety) and AAV-GDNF (See e.g., Wang et al., J Neurosci., 2002, 22. 6920-6928; the content of which is incorporated herein by reference in its entirety).

### VI. Definitions

[1041] At various places in the present disclosure, substituents or properties of compounds of the present disclosure are disclosed in groups or in ranges. It is specifically intended that the present disclosure include each and every individual or sub combination of the members of such groups and ranges.

[1042] Unless stated otherwise, the following terms and phrases have the meanings described below. The definitions are not meant to be limiting in nature and serve to provide a clearer understanding of certain aspects of the present disclosure.

[1043] About: As used herein, the term “about” means +/−10% of the recited value.

[1044] Adeno-associated virus: The term “adeno-associated virus” or “AAV” as used herein refers to any vector which comprises or derives from components of an adeno-associated vector and is suitable to infect mammalian cells, preferably human cells. The term AAV vector typically designates an AAV type viral particle or virion comprising a payload. The AAV vector may be derived from various serotypes, including combinations of serotypes (i.e., “pseudotyped” AAV) or from various genomes (e.g., single stranded or self-complementary). In addition, the AAV vector may be replication defective and/or targeted.

[1045] AAV Particle: As used herein, an “AAV particle” is a virus which includes a capsid and a viral genome with at least one payload region and at least one ITR region. AAV particles of the present disclosure may be produced recombinantly and may be based on adeno-associated virus (AAV) parent or reference sequences. AAV particle may be derived from any serotype, described herein or known in the art, including combinations of serotypes (i.e., “pseudotyped” AAV) or from various genomes (e.g., single stranded or self-complementary). In addition, the AAV particle may be replication defective and/or targeted.

[1046] Activity: As used herein, the term “activity” refers to the condition in which things are happening or being done. Compositions of the present disclosure may have activity and this activity may involve one or more biological events.

[1047] Administering: As used herein, the term “administering” refers to providing a pharmaceutical agent or composition to a subject.

[1048] Administered in combination: As used herein, the term “administered in combination” or “combined administration” means that two or more agents are administered to a subject at the same time or within an interval such that there may be an overlap of an effect of each agent on the patient. In certain embodiments, they are administered within about 60, 30, 15, 10, 5, or 1 minute of one another. In certain embodiments, the administrations of the agents are spaced sufficiently closely together such that a combinatorial (e.g., a synergistic) effect is achieved. Amelioration: As used herein, the tern “amelioration” or “ameliorating” refers to a lessening of severity of at least one indicator of a condition or disease. For example, in the context of neurodegeneration disorder, amelioration includes the reduction of neuron loss. Animal: As used herein, the term “animal” refers to any member of the animal kingdom. In certain embodiments, “animal” refers to humans at any stage of development. In certain embodiments, “animal” refers to non-human animals at any stage of development. in certain embodiments, the non-human animal is a mammal (e.g., a rodent, a mouse, a rat, a rabbit, a monkey, a dog, a cat, a sheep, cattle, a primate, or a pig). In certain embodiments, animals include, but are not limited to, mammals, birds, reptiles, amphibians, fish, and worms. In certain embodiments, the animal is a transgenic animal, genetically-engineered animal, or a clone. Ant/sense strand: As used herein, the term “the antisense strand” or “the first strand” or “the guide strand” of a siRNA molecule refers to a strand that is substantially complementary to a section of about 10-50 nucleotides, about 15-30, 16-25, 18-23 or 19-22 nucleotides of the mRNA of the gene targeted for silencing. The antisense strand or first strand has sequence sufficiently complementary to the desired target mRNA sequence to direct target-specific silencing, e.g., complementarity sufficient to trigger the destruction of the desired target mRNA by the RNAi machinery or process.

[1049] Approximately: As used herein, the term “approximately” or “about,” as applied to one or more values of interest, refers to a value that is similar to a stated reference value. In certain embodiments, the term “approximately” refers to a range of values that fall within 25%, 20%, 19%, 18%, 17%, 16%, 15%, 14%, 13%, 12%, 11%, 10%, 9%, 8%, 7%, 6%, 5%, 4%, 3%, 2%, 1%, or less in either direction (greater than or less than) of the stated reference value unless otherwise stated or otherwise evident from the context (except where such number would exceed 100% of a possible value).

[1050] Associated with: As used herein, the terms “associated with,” “conjugated,” “linked,” “attached,” and “tethered,” when used with respect to two or more moieties, means that the moieties are physically associated or connected with one another, either directly or via one or more additional moieties that serves as a linking agent, to form a structure that is sufficiently stable so that the moieties remain physically associated under the conditions in which the structure is used, e.g., physiological conditions. An “association” need not be strictly through direct covalent chemical bonding. It may also suggest ionic or hydrogen bonding or a hybridization-based connectivity sufficiently stable such that the “associated” entities remain physically associated.

[1051] Baculoviral expression vector (BEV): As used herein a BEV is a baculoviral expression vector, i.e., a polynucleotide vector of haculoviral origin. Systems using BEVs are known as haculoviral expression vector systems (BEVSs).

[1052] mBEV or modified BEV: As used herein, a modified BEV is an expression vector of baculoviral origin which has been altered from a starting BEV (whether wild type or artificial) by the addition and/or deletion and/or duplication and/or inversion of one or more: genes; gene fragments; cleavage sites; restriction sites; sequence regions; sequence(s) encoding a payload or gene of interest; or combinations of the foregoing.

[1053] Bifunctional: As used herein, the term “bifunctional” refers to any substance, molecule or moiety which is capable of or maintains at least two functions. The functions may affect the same outcome or a different outcome. The structure that produces the function may be the same or different.

[1054] BIIC: As used herein a BIIC is a baculoviral infected insect cell.

[1055] Biocompatible: As used herein, the term “biocompatible” means compatible with living cells, tissues, organs or systems posing little to no risk of injury, toxicity or rejection by the immune system.

[1056] Biodegradable: As used herein, the term “biodegradable” means capable of being broken down into innocuous products by the action of living things.

[1057] Biologically active: As used herein, the phrase “biologically active” refers to a characteristic of any substance that has activity in a biological system and/or organism. For instance, a substance that, when administered to an organism, has a biological effect on that organism, is considered to be biologically active. In particular embodiments, an AAV particle of the present disclosure may be considered biologically active if even a portion of the encoded payload is biologically active or mimics an activity considered biologically relevant.

[1058] Capsid As used herein, the term “capsid” refers to the protein shell of a virus particle.

[1059] Codon optimized: As used herein, the terms “codon optimized” or “codon optimization” refers to a modified nucleic acid sequence which encodes the same amino acid sequence as a parent/reference sequence, but which has been altered such that the codons of the modified nucleic acid sequence are optimized or improved for expression in a particular system (such as a particular species or group of species). As a non-limiting example, a nucleic acid sequence which includes an AAV capsid protein can be codon optimized for expression in insect cells or in a particular insect cell such Spodoptera frugiperda cells. Codon optimization can be completed using methods and databases known to those in the art.

[1060] Complementary and substantially complementary: As used herein, the term. “complementary” refers to the ability of polynucleotides to form base pairs with one another. Base pairs are typically formed by hydrogen bonds between nucleotide units in antiparallel polynucleotide strands. Complementary polynucleotide strands can form base pair in the Watson-Crick manner (e.g., A to T, A to U, C to G), or in any other manner that allows for the formation of duplexes. As persons skilled in the art are aware, when using RNA as opposed to DNA, uracil rather than thymine is the base that is considered to be complementary to adenosine. However, when a U is denoted in the context of the present disclosure, the ability to substitute a T is implied, unless otherwise stated. Perfect complementarity or 100% complementarity refers to the situation in which each nucleotide unit of one polynucleotide strand can form hydrogen bond with a nucleotide unit of a second polynucleotide strand. Less than perfect complementarity refers to the situation in which some, but not all, nucleotide units of two strands can form hydrogen bond with each other. For example, for two 20-mers, if only two base pairs on each strand can form hydrogen bond with each other, the polynucleotide strands exhibit 10% complementarity. In the same example, if 18 base pairs on each strand can form hydrogen bonds with each other, the polynucleotide strands exhibit 90% complementarity. As used herein, the term “substantially complementary” means that the siRNA has a sequence (e.g., in the antisense strand) which is sufficient to bind the desired target mRNA, and to trigger the RNA silencing of the target mRNA.

[1061] Compound: Compounds of the present disclosure include all of the isotopes of the atoms occurring in the intermediate or final compounds. “Isotopes” refers to atoms having the same atomic number but different mass numbers resulting from a different number of neutrons in the nuclei. For example, isotopes of hydrogen include tritium and deuterium.

[1062] The compounds and salts of the present disclosure can be prepared in combination with solvent or water molecules to form solvates and hydrates by routine methods.

[1063] Conditionally active: As used herein, the term “conditionally active” refers to a mutant or variant of a wild-type polypeptide, wherein the mutant or variant is more or less active at physiological conditions than the parent polypeptide. Further, the conditionally active polypeptide may have increased or decreased activity at aberrant conditions as compared to the parent polypeptide. A conditionally active polypeptide may be reversibly or irreversibly inactivated at normal physiological conditions or aberrant conditions.

[1064] Conserved: As used herein, the term “conserved” refers to nucleotides or amino acid residues of a polynucleotide sequence or polypeptide sequence, respectively, that are those that occur unaltered in the same position of two or more sequences being compared. Nucleotides or amino acids that are relatively conserved are those that are conserved amongst more related sequences than nucleotides or amino acids appearing elsewhere in the sequences.

[1065] In certain embodiments, two or more sequences are said to be “completely conserved” if they are 100% identical to one another. In certain embodiments, two or more sequences are said to be “highly conserved” if they are at least 70% identical, at least 80% identical, at least 90% identical, or at least 95% identical to one another. In certain embodiments, two or more sequences are said to be “highly conserved” if they are about 70% identical, about 80% identical, about 90% identical, about 95%, about 98%, or about 99% identical to one another. In certain embodiments, two or more sequences are said to be “conserved” if they are at least 30% identical, at least 40% identical, at least 50% identical, at least 60% identical, at least 70% identical, at least 80% identical, at least 90% identical, or at least 95% identical to one another. In certain embodiments, two or more sequences are said to be “conserved” if they are about 30% identical, about 40% identical, about 50% identical, about 60% identical, about 70% identical, about 80% identical, about 90% identical, about 95% identical, about 98% identical, or about 99% identical to one another. Conservation of sequence may apply to the entire length of a polynucleotide or polypeptide or may apply to a portion, region or feature thereof.

[1066] Control Elements: As used herein, “control elements”, “regulatory control elements” or “regulatory sequences” refers to promoter regions, polyadenylation signals, transcription termination sequences, upstream regulatory domains, origins of replication, internal ribosome entry sites (“IRES”), enhancers, and the like, which provide for the replication, transcription and translation of a coding sequence in a recipient cell. Not all of these control elements need always he present as long as the selected coding sequence is capable of being replicated, transcribed and/or translated in an appropriate host cell.

[1067] Control/ed Release: As used herein, the term “controlled release” refers to a pharmaceutical composition or compound release profile that conforms to a particular pattern of release to affect a therapeutic outcome.

[1068] Cytostatic: As used herein, “cytostatic” refers to inhibiting, reducing, suppressing the growth, division, or multiplication of a cell (e.g., a mammalian cell (e.g., a human cell)), bacterium, virus, fungus, protozoan, parasite, prion, or a combination thereof.

[1069] Cytotoxic: As used herein. “cytotoxic” refers to killing or causing injurious, toxic, or deadly effect on a cell (e.g., a mammalian cell (e.g., a human cell)), bacterium, virus, fungus, protozoan, parasite, prion, or a combination thereof.

[1070] Delivery: As used herein, “delivery” refers to the act or manner of delivering an AAV particle, a compound, substance, entity, moiety, cargo or payload.

[1071] Delivery Agent: As used herein, “delivery agent” refers to any substance which facilitates, at least in part, the in vivo delivery of an AAV particle to targeted cells.

[1072] Destabilized: As used herein, the term “destable,” “destabilize,” or “destabilizing region” means a region or molecule that is less stable than a starting, wild-type or native form of the same region or molecule.

[1073] Detectable label: As used herein, “detectable label” refers to one or more markers, signals, or moieties which are attached, incorporated or associated with another entity that is readily detected by methods known in the art including radiography, fluorescence, chemiluminescence, enzymatic activity, absorbance and the like. Detectable labels include radioisotopes, fluorophores, chromophores, enzymes, dyes, metal ions, ligands such as biotin, avidin, streptavidin and haptens, quantum dots, and the like, Detectable labels may be located at any position in the peptides or proteins disclosed herein. They may be within the amino acids, the peptides, or proteins, or located at the N- or C-termini.

[1074] Digest: As used herein, the term “digest” means to break apart into smaller pieces or components. When referring to polypeptides or proteins, digestion results in the production of peptides.

[1075] Distal: As used herein, the term “distal” means situated away from the center or away from a point or region of interest.

[1076] Dosing regimen: As used herein, a “dosing regimen” is a schedule of administration or physician determined regimen of treatment, prophylaxis, or palliative care.

[1077] Encapsulate: As used herein, the term “encapsulate” means to enclose, surround or encase.

[1078] Engineered: As used herein, embodiments of the present disclosure are “engineered” when they are designed to have a feature or property, whether structural or chemical, that varies from a starting point, wild type or native molecule,

[1079] Effective Amount: As used herein, the term “effective amount” of an agent is that amount sufficient to effect beneficial or desired results, for example, clinical results, and, as such, an “effective amount” depends upon the context in which it is being applied. For example, in the context of administering an agent that treats HD, an effective amount of an agent is, for example, an amount sufficient to achieve treatment, as defined herein, of HD, as compared to the response obtained without administration of the agent.

[1080] Expression: As used herein, “expression” of a nucleic acid sequence refers to one or more of the following events: (1) production of an RNA template from a DNA sequence (e.g., by transcription); (2) processing of an RNA. transcript (e.g., by splicing, editing, 5′ cap formation, and/or 3′ end processing); (3) translation of an RNA into a polypeptide or protein; and (4) post-translational modification of a polypeptide or protein.

[1081] Feature: As used herein, a “feature” refers to a characteristic, a property, or a distinctive element.

[1082] Formulation: As used herein, a “formulation” includes at least one AAV particle and a delivery agent or excipient.

[1083] Fragment: A “fragment,” as used herein, refers to a portion. For example, fragments of proteins may include polypeptides obtained by digesting full-length protein isolated from cultured cells.

[1084] Functional: As used herein, a “functional” biological molecule is a biological molecule in a form in which it exhibits a property and/or activity by which it is characterized.

[1085] Gene expression: The term “gene expression” refers to the process by which a nucleic acid sequence undergoes successful transcription and in most instances translation to produce a protein or peptide. For clarity, when reference is made to measurement of “gene expression”, this should be understood to mean that measurements may be of the nucleic acid product of transcription, e.g., RNA or mRNA or of the amino acid product of translation, e.g., polypeptides or peptides. Methods of measuring the amount or levels of RNA, mRNA, polypeptides and peptides are well known in the art.

[1086] Homology: As used herein, the term “homology” refers to the overall relatedness between polymeric molecules, e.g between polynucleotide molecules (e.g. DNA molecules and/or RNA molecules) and/or between polypeptide molecules. In certain embodiments, polymeric molecules are considered to be “homologous” to one another if their sequences are at least 25%, 30%, 35%, 40%, 45%, 50%, 55%, 60%, 65%, 70%, 75%, 80%, 85%, 90%, 95%, or 99% identical or similar. The term “homologous” necessarily refers to a comparison between at least two sequences (polynucleotide or polypeptide sequences). In accordance with the present disclosure, two polynucleotide sequences are considered to be homologous if the polypeptides they encode are at least about 50%, 60%, 70%, 80%, 90%, 95%, or even 99% for at least one stretch of at least about 20 amino acids. In certain embodiments, homologous polytrucleotide sequences are characterized by the ability to encode a stretch of at least 4-5 uniquely specified amino acids. For polynucleotide sequences less than 60 nucleotides in length, homology is determined by the ability to encode a stretch of at least 4-5 uniquely specified amino acids. In accordance with the present disclosure, two protein sequences are considered to be homologous if the proteins are at least about 50%, 60%, 70%, 80%, or 90% identical for at least one stretch of at least about 20 amino acids.

[1087] Heterologous Region: As used herein the term “heterologous region” refers to a region which would not be considered a homologous region.

[1088] Homologous Region: As used herein the term “homologous region” refers to a region which is similar in position, structure, evolution origin, character, form or function.

[1089] Identity: As used herein, the term “identity” refers to the overall relatedness between polymeric molecules, e.g., between polynucleotide molecules (e.g. DNA molecules and/or RNA molecules) and/or between polypeptide molecules. Calculation of the percent identity of two polynucleotide sequences, for example, can be performed by aligning the two sequences for optimal comparison purposes (e.g., gaps can be introduced in one or both of a first and a second nucleic acid sequences for optimal alignment and non-identical sequences can be disregarded for comparison purposes). In certain embodiments, the length of a sequence aligned for comparison purposes is at least 30%, at least 40%, at least 50%, at least 60%, at least 70%, at least 80%, at least 90%, at least 95%, or 100% of the length of the reference sequence. The nucleotides at corresponding nucleotide positions are then compared. When a position in the first sequence is occupied by the same nucleotide as the corresponding position in the second sequence, then the molecules are identical at that position. The percent identity between the two sequences is a function of the number of identical positions shared by the sequences, taking into account the number of gaps, and the length of each gap, which needs to be introduced for optimal alignment of the two sequences. The comparison of sequences and determination of percent identity between two sequences can be accomplished using a mathematical algorithm. For example, the percent identity between two nucleotide sequences can be determined using methods such as those described in Computational Molecular Biology, Lesk, A. M., ed., Oxford University Press, New York, 1988; Biocomputing: lnfhnnatics and Genome Projects, Smith, D. W., ed., Academic Press, New York, 1993; Sequence Analysis in Molecular Biology, von Heinje, G., Academic Press, 1987; Computer Analysis of Sequence Data, Part I, Griffin, A. M., and Griffin, H. G., eds., Humana Press, New Jersey, 1994; and Sequence Analysis Primer, Gribskov, M. and Devereux, J., eds., M Stockton Press, New York, 1991; each of which is incorporated herein by reference. For example, the percent identity between two nucleotide sequences can be determined using the algorithm of Meyers and Miller (CABIOS, 1989, 4:11-17), which has been incorporated into the ALIGN program (version 2.0) using a PAM120 weight residue table, a gap length penalty of 12 and a gap penalty of 4. The percent identity between two nucleotide sequences can, alternatively, be determined using the GAP program in the GCG software package using an NWSgapdna.CMP matrix. Methods commonly employed to determine percent identity between sequences include, but are not limited to those disclosed in Carillo. H., and Lipman, D., SIAM J Applied Math., 48:1073 (1988); incorporated herein by reference. Techniques for determining identity are codified in publicly available computer programs. Exemplary computer software to determine homology between two sequences include, but are not limited to, GCG program package, Devereux, J., et al., Nucleic Acids Research, 12(1), 387 (1984)), BLASTP. BLASTN, and FASTA Altschul, S. F. et al.,1 J. Molec. Biol., 215, 403 (1990)).

[1090] Inhibit expression of a gene: As used herein, the phrase “inhibit expression of a gene” means to cause a reduction in the amount of an expression product of the gene. The expression product can be an RNA transcribed from the gene e.g., an mRNA) or a polypeptide translated from an mRNA transcribed from the gene. Typically, a reduction in the level of an mRNA results in a reduction in the level of a polypeptide translated therefrom. The level of expression may be determined using standard techniques for measuring mRNA or protein.

[1091] In vitro: As used herein, the term “in vitro” refers to events that occur in an artificial environment, e.g., in a test tube or reaction vessel, in cell culture, in a Petri dish, etc., rather than within an organism (e.g., animal, plant, or microbe).

[1092] In vivo: As used herein, the term “in vivo” refers to events that occur within an organism (e.g, animal, plant, or microbe or cell or tissue thereof).

[1093] isolated: As used herein, the term “isolated” refers to a substance or entity that has been separated from at least some of the components with which it was associated (whether in nature or in an experimental setting). Isolated substances may have varying levels of purity in reference to the substances from which they have been associated. Isolated substances and/or entities may be separated from at least about 10%, about 20%, about 30%, about 40%, about 50%, about 60%, about 70%, about 80%, about 90%, or more of the other components with which they were initially associated. In certain embodiments, isolated agents are more than about 80%, about 85%, about 90%, about 91%, about 92%, about 93%, about 94%, about 95%, about 96%, about 97%, about 98%, about 99%, or more than about 99% pure. As used herein, a substance is “pure” if it is substantially free of other components.

[1094] Substantially isolated: By “substantially isolated” is meant that a substance is substantially separated from the environment in which it was formed or detected. Partial separation can include, for example, a composition enriched in the substance or AAV particles of the present disclosure. Substantial separation can include compositions containing at least about 50%, at least about 60%, at least about 70%, at least about 80%, at least about 90%, at least about 95%, at least about 97%, or at least about 99% by weight of the compound of the present disclosure, or salt thereof. Methods for isolating compounds and their salts are routine in the art.

[1095] Linker: As used herein “linker” refers to a molecule or group of molecules which connects two molecules. A linker may be a nucleic acid sequence connecting two nucleic acid sequences encoding two different polypeptides. The linker may or may not be translated. The linker may be a cleavable linker.

[1096] MicroRNA (miRNA) binding site: As used herein, a microRNA (miRNA) binding site represents a nucleotide location or region of a nucleic acid transcript to which at least the “seed” region of a miRNA hinds.

[1097] Modified: As used herein “modified” refers to a changed state or structure of a molecule of the present disclosure. Molecules may be modified in many ways including chemically, structurally, and functionally. As used herein, embodiments of the disclosure are “modified” when they have or possess a feature or proper, whether structural or chemical, that varies from a starting point, wild type or native molecule.

[1098] Mutation: As used herein, the term “mutation” refers to any changing of the structure of a gene, resulting in a variant (also called “mutant”) form that may be transmitted to subsequent generations. Mutations in a gene may be caused by the alternation of single base in DNA, or the deletion, insertion, or rearrangement of larger sections of genes or chromosomes.

[1099] Naturally Occurring: As used herein, “naturally occurring” or “wild-type” means existing in nature without artificial aid, or involvement of the hand of man.

[1100] Neurodegeneration: As used herein, the term “neurodegeneration” refers to a pathologic state which results in neural cell death. A large number of neurological disorders share neurodegeneration as a common pathological state. For example, Alzheimer's disease, Parkinson's disease, Huntington's disease, and amyotrophic lateral sclerosis (ALS) all cause chronic neurodegeneration, which is characterized by a slow, progressive neural cell death over a period of several years, whereas acute neurodegeneration is characterized by a sudden onset of neural cell death as a result of ischemic, such as stroke, or trauma, such as traumatic brain injury, or as a result of axonal transection by demyelination or trauma caused, for example, by spinal cord injury or multiple sclerosis. In some neurological disorders, mainly one type of neuronal cell is degenerative, for example, medium spiny neuron degeneration in early HD.

[1101] Non-human vertebrate: As used herein, a “non-human vertebrate” includes all vertebrates except Homo sapiens, including wild and domesticated species. Examples of non-human vertebrates include, but are not limited to, mammals, such as alpaca, banteng, bison, camel, cat, cattle, deer, dog, donkey, gayal, goat, guinea pig, horse, llama, mule, pig, rabbit, reindeer, sheep water buffalo, and yak.

[1102] Nucleic Acid: As used herein, the term “nucleic acid”, “polynucleotide” and “oligonucleotide” refer to any nucleic acid polymers composed of either polydeoxyribonucleotides (containing 2-deoxy-D-ribose), or polyribonucleotides (containing D-ribose), or any other type of polynucleotide which is an N glycoside of a purine or pyrimidine base, or modified purine or pyrimidine bases. There is no intended distinction in length between the term “nucleic acid”, “polynucleotide” and “oligonucleotide”, and these terms will be used interchangeably. These terms refer only to the primary structure of the molecule. Thus, these terms include double- and single-stranded DNA, as well as double- and single stranded RNA.

[1103] Off-target: As used herein, “off target” refers to any unintended effect on any one or more target, gene, or cellular transcript.

[1104] Open reading frame: As used herein, “open reading frame” or “ORE” refers to a sequence which does not contain a stop codon within the given reading frame, other than at the end of the reading frame.

[1105] Operably linked: As used herein, the phrase “operably linked” refers to a functional connection between two or more molecules, constructs, transcripts, entities, moieties or the like.

[1106] Patient: As used herein, “patient” refers to a subject who may seek or be in need of treatment, requires treatment, is receiving treatment, will receive treatment, or a subject who is under care by a trained professional for a particular disease or condition.

[1107] Payload: As used herein, “payload” or “payload region” refers to one or more polynucleotides or polynucleotide regions encoded by or within a viral genome or an expression product of such polynucleotide or polynucleotide region, e.g., a transgene, a polynucleotide encoding a polypeptide or multi-polypeptide, or a modulatory nucleic acid or regulatory nucleic acid.

[1108] Payload construct: As used herein, “payload construct” is one or more vector construct which includes a polynucleotide region encoding or comprising a payload that is flanked on one or both sides by an inverted terminal repeat (ITR) sequence. The payload construct presents a template that is replicated in a viral production cell to produce a therapeutic viral genome.

[1109] Payload construct vector: As used herein, “payload construct vector” is a vector encoding or comprising a payload construct, and regulatory regions for replication and expression of the payload construct in bacterial cells.

[1110] Payload construct expression vector: As used herein, a “payload construct expression vector” is a vector encoding or comprising a payload construct and which further comprises one or more polynucleotide regions encoding or comprising components for viral expression in a viral replication cell.

[1111] Peptide: As used herein, “peptide” is less than or equal to 50 amino acids long, e.g., about 5, 10, 15, 20, 25, 30, 35, 40, 45, or 50 amino acids long.

[1112] Pharmaceutically acceptable: The phrase “pharmaceutically acceptable” is employed herein to refer to those compounds, materials, compositions, and/or dosage forms which are, within the scope of sound medical judgment, suitable for use in contact with the tissues of human beings and animals without excessive toxicity, irritation, allergic response, or other problem or complication, commensurate with a reasonable benefit/risk ratio.

[1113] Pharmaceutically acceptable excipients: The phrase “pharmaceutically acceptable excipient,” as used herein, refers any ingredient other than the compounds described herein (for example, a vehicle capable of suspending or dissolving the active compound) and having the properties of being substantially nontoxic and non-inflammatory in a patient. Excipients may include, for example: antiadherents, antioxidants, binders, coatings, compression aids, disintegrants, dyes (colors), emollients, emulsifiers, fillers (diluents), film formers or coatings, flavors, fragrances, glidants (flow enhancers), lubricants, preservatives, printing inks, sorbents, suspensing or dispersing agents, sweeteners, and waters of hydration. Exemplary excipients include, but are not limited to: butylated hydroxytoluene (BHT), calcium carbonate, calcium phosphate (dibasic), calcium stearate, croscannellose, crosslinked polyvinyl pyrrolidone, citric acid, crospovidone, cysteine, ethylcellulose, gelatin, hydroxypropyl cellulose, hydroxypropyl methylcellulose, lactose, magnesium stearate, maltitol, mannitol, methionine, methylcellulose, methyl paraben, microcrystalline cellulose, polyethylene glycol, polyvinyl pyrrolidone, povidone, pregelatinized starch, propyl paraben, retinyl palmitate, shellac, silicon dioxide, sodium carboxymethyl cellulose, sodium citrate, sodium starch glycolate, sorbitol, starch (corn), stearic acid, sucrose, talc, titanium dioxide, vitamin A, vitamin E, vitamin C, and xylitol.

[1114] Pharmaceutically acceptable salts: The present disclosure also includes pharmaceutically acceptable salts of the compounds described herein. As used herein, “pharmaceutically acceptable salts” refers to derivatives of the disclosed compounds wherein the parent compound is modified by converting an existing acid or base moiety to its salt form by reacting the free base group with a suitable organic acid). Examples of pharmaceutically acceptable salts include, but are not limited to, mineral or organic acid salts of basic residues such as amines; alkali or organic salts of acidic residues such as carboxylic acids; and the like. Representative acid addition salts include acetate, acetic acid, adipate, alginate, ascorbate, aspartate, benzenesulthnate, benzene sulthnic acid, benzoate, bisulfate, borate, butyrate, camphorate, camphorsulfonate, citrate, cyclopentanepropionate, digluconate, dodecylsulfate, ethanesulfonate, fumarate, glucoheptonate, glycerophosphate, hemisulfate, heptonate, hexanoate, hydrobromide, hydrochloride, hydroiodide, 2-hydroxy-ethanesulfonate, lactobionate, lactate, laurate, lauryl sulfate, malate, maleate, malonate, methanesulfonate, 2-naphthalenesulfonate, nicotinate, nitrate, oleate, oxalate, palmitate, pamoate, pectinate, persulfate, 3-phenylpropionate, phosphate, picrate, pivalate, propionate, stearate, succinate, sulfate, tartrate, thiocyanate, toluenesulthnate, undecanoate, valerate salts, and the like. Representative alkali or alkaline earth metal salts include sodium, lithium, potassium, calcium, magnesium, and the like, as well as nontoxic ammonium, quaternary ammonium, and amine cations, including, but not limited to ammonium, tetramethylammonium, tetraethylammonium, methylamine, dimethylamine, trimethylamine, triethylamine, ethylamine, and the like. The pharmaceutically acceptable salts of the present disclosure include the conventional non-toxic salts of the parent compound formed, for example, from non-toxic inorganic or organic acids. The pharmaceutically acceptable salts of the present disclosure can be synthesized from the parent compound which contains a basic or acidic moiety by conventional chemical methods. Generally, such salts can be prepared by reacting the free acid or base forms of these compounds with a stoichiometric amount of the appropriate base or acid in water or in an organic solvent, or in a mixture of the two; generally, nonaqueous media like ether, ethyl acetate, ethanol, isopropanol, or acetonitrile can be used. Lists of suitable salts are found in Remington's Pharmaceutical Sciences, 17^{th} ed., Mack Publishing Company, Easton, Pa., 1985, p. 1418, Pharmaceutical Salts: Properties, Selection, and Use, P.H. Stahl and C.G. Weimuth (eds.), Wiley-VCR, 2008, and Berge et al., Journal of Pharmaceutical Science, 66, 1-19 (1977), each of which is incorporated herein by reference in its entirety.

[1115] Pharmaceutically acceptable solvate: The term “pharmaceutically acceptable solvate,” as used herein, means a compound of the present disclosure wherein molecules of a suitable solvent are incorporated in the crystal lattice. A suitable solvent is physiologically tolerable at the dosage administered. For example, solvates may be prepared by crystallization, recrystallization, or precipitation from a solution that includes organic solvents, water, or a mixture thereof. Examples of suitable solvents are ethanol, water (for example, mono-, di-, and tri-hydrates), N-methylpyrrolidinone (NMP), dimethyl sulfoxide (DMSO), N,N′-dimethylformamide (DMF), N,N′-dimethylacetamide (DMAC), 1,3-dimethyl-2-imidazolidinone (DMEU), 1,3-dimethyl-3,4,5,6-tetrahydro-2-(1H)-pyrimidinone (DMPU), acetonitrile (ACN), propylene glycol, ethyl acetate, benzyl alcohol, 2-pyrrolidone, benzyl benzoate, and the like. When water is the solvent, the solvate is referred to as a “hydrate,”

[1116] Pharmacokinetic: As used herein, “pharmacokinetic” refers to any one or more properties of a molecule or compound as it relates to the determination of the fate of substances administered to a living organism. Pharmacokinetics is divided into several areas including the extent and rate of absorption, distribution, metabolism and excretion. This is commonly referred to as ADME where: (A) Absorption is the process of a substance entering the blood circulation; (D) Distribution is the dispersion or dissemination of substances throughout the fluids and tissues of the body; (M) Metabolism (or Biotransformation) is the irreversible transformation of parent compounds into daughter metabolites; and (E) Excretion (or Elimination) refers to the elimination of the substances from the body. In rare cases, some drugs irreversibly accumulate in body tissue.

[1117] Physicochemical: As used herein, “physicochemical” means of or relating to a physical and/or chemical property.

[1118] Preventing: As used herein, the term “preventing” or “prevention” refers to partially or completely delaying onset of an infection, disease, disorder and/ or condition; partially or completely delaying onset of one or more symptoms, features, or clinical manifestations of a particular infection, disease, disorder, and/or condition; partially or completely delaying onset of one or more symptoms, features, or manifestations of a particular infection, disease, disorder, and/or condition; partially or completely delaying progression from an infection, a particular disease, disorder and/or condition; and/or decreasing the risk of developing pathology associated with the infection, the disease, disorder, and/or condition.

[1119] Proliferate: As used herein, the term “proliferate” means to grow, expand or increase or cause to grow, expand or increase rapidly. “Proliferative” means having the ability to proliferate. “Anti-proliferative” means having properties counter to or inapposite to proliferative properties.

[1120] Prophylactic: As used herein, “prophylactic” refers to a therapeutic or course of action used to prevent the spread of disease.

[1121] Prophylaxis: As used herein, a “prophylaxis” refers to a measure taken to maintain health and prevent the spread of disease.

[1122] Protein of interest: As used herein, the terms “proteins of interest” or “desired proteins” include those provided herein and fragments, mutants, variants, and alterations thereof.

[1123] Proximal: As used herein, the term “proximal” means situated nearer to the center or to a point or region of interest.

[1124] Purified: As used herein, “purify,” “purified,” “purification” means to make substantially pure or clear from unwanted components, material defilement, admixture or imperfection. “Purified” refers to the state of being pure. “Purification” refers to the process of making pure.

[1125] Region: As used herein, the term “region” refers to a zone or general area, In certain embodiments, when referring to a protein or protein module, a region may include a linear sequence of amino acids along the protein or protein module or may include a three-dimensional area, an epitope and/or a cluster of epitopes. In certain embodiments, regions include terminal regions. As used herein, the term “terminal region” refers to regions located at the ends or termini of a given agent. When referring to proteins, terminal regions may include N- and/or C-termini. N-termini refer to the end of a protein comprising an amino acid with a free amino group. C-termini refer to the end of a protein comprising an amino acid with a free carboxyl group. N- and/or C-terminal regions may there for include the N- and/or C-termini as well as surrounding amino acids. In certain embodiments, N- and/or C-terminal regions include from about 3 amino acid to about 30 amino acids, from about 5 amino acids to about 40 amino acids, from about 10 amino acids to about 50 amino acids, from about 20 amino acids to about 100 amino acids and/or at least 100 amino acids. In certain embodiments, N-terminal regions may include any length of amino acids that includes the N-terminus but does not include the C-terminus. In certain embodiments, C-terminal regions may include any length of amino acids, which include the C-terminus, but do not include the N-terminus.

[1126] In certain embodiments, when referring to a polynucleotide, a region may include a linear sequence of nucleic acids along the polynucleotide or may include a three-dimensional area, secondary structure, or tertiary structure. In certain embodiments, regions include terminal regions. As used herein, the term “terminal region” refers to regions located at the ends or termini of a given agent. When referring to polynucleotides, terminal regions may include 5′ and 3′ termini. 5′ termini refer to the end of a polynucleotide comprising a nucleic acid with a free phosphate group. 3′ termini refer to the end of a polynucleotide comprising a nucleic acid with a free hydroxyl group. 5′ and 3′ regions may there for include the 5′ and 3′ termini as well as surrounding nucleic acids. In certain embodiments, 5′ and 3′ terminal regions include from about 9 nucleic acids to about 90 nucleic acids, from about 15 nucleic acids to about 120 nucleic acids, from about 30 nucleic acids to about 150 nucleic acids, from about 60 nucleic acids to about 300 nucleic acids and/or at least 300 nucleic acids. In certain embodiments, 5′ regions may include any length of nucleic acids that includes the 5′ terminus but does not include the 3′ terminus. In certain embodiments, 3′ regions may include any length of nucleic acids, which include the 3′ terminus, but does not include the 5′ terminus.

[1127] RNA or RNA molecule: As used herein, the term “RNA” or “RNA molecule” or “ribonucleic acid molecule” refers to a polymer of ribonucleotides; the term “DNA” or “DNA molecule” or “deoxyribonucleic acid molecule” refers to a polymer of deoxyribonucleotides. DNA and RNA can be synthesized naturally, e.g., by DNA replication and transcription of DNA, respectively; or be chemically synthesized. DNA and RNA can be single-stranded (i.e., ssRNA or ssDNA, respectively) or multi-stranded (e.g., double stranded, i.e., dsRNA and dsDNA, respectively). The term “mRNA” or “messenger RNA”, as used herein, refers to a single stranded RNA that encodes the amino acid sequence of one or more polypeptide chains.

[1128] RNA interfering or RNAi: As used herein, the term “RNA interfering” or “RNAi” refers to a sequence specific regulatory mechanism mediated by RNA molecules which results in the inhibition or interfering or “silencing” of the expression of a corresponding protein-coding gene. RNAi has been observed in many types of organisms, including plants, animals and fungi. RNAi occurs in cells naturally to remove foreign RNAs (e.g., viral RNAs). Natural RNAi proceeds via fragments cleaved from free dsRNA which direct the degradative mechanism to other similar RNA sequences. RNAi is controlled by the RNA-induced silencing complex (RISC) and is initiated by short/small dsRNA molecules in cell cytoplasm, where they interact with the catalytic RISC component argonaute. The dsRNA molecules can be introduced into cells exogenously. Exogenous dsRNA. initiates RNAi by activating the ribonuclease protein Dicer, which binds and cleaves dsRNAs to produce double-stranded fragments of 21-25 base pairs with a few unpaired overhang bases on each end. These short double stranded fragments are called small interfering RNAs (siRNAs).

[1129] Sample: As used herein, the term “sample” or “biological sample” refers to a subset of its tissues, cells or component parts (e.g. body fluids, including but not limited to blood, mucus, lymphatic fluid, synovial fluid, cerebrospinal fluid, saliva, amniotic fluid, amniotic cord blood, urine, vaginal fluid and semen). A sample further may include a homogenate, lysate or extract prepared from a whole organism or a subset of its tissues, cells or component parts, or a fraction or portion thereof, including but not limited to, for example, plasma, serum, spinal fluid, lymph fluid, the external sections of the skin, respiratory, intestinal, and genitourinary tracts, tears, saliva, milk, blood cells, tumors, organs. A sample further refers to a medium, such as a nutrient broth or gel, which may contain cellular components, such as proteins or nucleic acid molecule.

[1130] Self-complementary viral particle: As used herein, a “self-complementary viral particle” is a particle included of at least two components, a protein capsid and a polynucleotide sequence encoding a self-complementary genome enclosed within the capsid.

[1131] Sense Strand: As used herein, the term “the sense strand” or “the second strand” or “the passenger strand” of a siRNA molecule refers to a strand that is complementary to the antisense strand or first strand. The antisense and sense strands of a siRNA molecule are hybridized to form a duplex structure. As used herein, a “siRNA duplex” includes a siRNA strand having sufficient complementarity to a section of about 10-50 nucleotides of the mRNA of the gene targeted for silencing and a siRNA strand having sufficient complementarity to form a duplex with the other siRNA strand.

[1132] Short interfering RATA or siRNA: As used herein, the terms “short interfering RNA,” “small interfering RNA” or “siRNA” refer to an RNA molecule (or RNA analog) comprising between about 5-60 nucleotides (or nucleotide analogs) which is capable of directing or mediating RNAi. In certain embodiments, a siRNA molecule includes between about 15-30 nucleotides or nucleotide analogs, such as between about 16-25 nucleotides (or nucleotide analogs), between about 18-23 nucleotides (or nucleotide analogs), between about 19-22 nucleotides (or nucleotide analogs) (e.g., 19, 20, 21 or 22 nucleotides or nucleotide analogs), between about 19-25 nucleotides (or nucleotide analogs), and between about 19-24 nucleotides (or nucleotide analogs). The term “short” siRNA refers to a siRNA comprising 5-23 nucleotides, such as 21 nucleotides (or nucleotide analogs), for example, 19, 20, 21 or 22 nucleotides. The term “long” siRNA refers to a siRNA comprising 24-60 nucleotides, such as about 24-25 nucleotides, for example, 23, 24, 25 or 26 nucleotides. Short siRNAs may, in some instances, include fewer than 19 nucleotides, e.g., 16, 17 or 18 nucleotides, or as few as 5 nucleotides, provided that the shorter siRNA retains the ability to mediate RNAi. Likewise, long siRNAs may, in some instances, include more than 26 nucleotides, e.g., 27, 28, 29, 30, 35, 40, 45, 50, 55, or even 60 nucleotides, provided that the longer siRNA retains the ability to mediate RNAi or translational repression absent further processing, e.g., enzymatic processing, to a short siRNA. siRNAs can be single stranded RNA molecules (ss-siRNAs) or double stranded RNA molecules (ds-siRNAs) comprising a sense strand and an antisense strand which hybridized to form a duplex structure called siRNA duplex.

[1133] Signal Sequences: As used herein, the phrase “signal sequences” refers to a sequence which can direct the transport or localization of a protein.

[1134] Single unit dose: As used herein, a “single unit dose” is a dose of any therapeutic administered in one dose/at one time/single route/single point of contact, i.e., single administration event. In certain embodiments, a single unit dose is provided as a discrete dosage form (e.g., a tablet, capsule, patch, loaded syringe, vial, etc.).

[1135] Similarity: As used herein, the term “similarity” refers to the overall relatedness between polymeric molecules, e.g. between polynucleotide molecules (e.g. DNA molecules and/or RNA molecules) and/or between polypeptide molecules. Calculation of percent similarity of polymeric molecules to one another can be performed in the same manner as a calculation of percent identity, except that calculation of percent similarity takes into account conservative substitutions as is understood in the art.

[1136] Split dose: As used herein, a “split dose” is the division of single unit dose or total daily dose into two or more doses.

[1137] Stable: As used herein “stable” refers to a compound that is sufficiently robust to survive isolation to a useful degree of purity from a reaction mixture, and in certain embodiments, capable of formulation into an efficacious therapeutic agent.

[1138] Stabilized: As used herein, the term “stabilize”, “stabilized,” “stabilized region” means to make or become stable.

[1139] Subject: As used herein, the term “subject” or “patient” refers to any organism to which a composition in accordance with the present disclosure may be administered, e.g., for experimental, diagnostic, prophylactic, and/or therapeutic purposes. Typical subjects include animals (e.g., mammals such as mice, rats, rabbits, non-human primates, and humans) and/or plants.

[1140] Substantially: As used herein, the term “substantially” refers to the qualitative condition of exhibiting total or near-total extent or degree of a characteristic or property of interest. One of ordinary skill in the biological arts will understand that biological and chemical phenomena rarely, if ever, go to completion and/or proceed to completeness or achieve or avoid an absolute result. The term “substantially” is therefore used herein to capture the potential lack of completeness inherent in many biological and chemical phenomena.

[1141] Substantially equal: As used herein as it relates to time differences between doses, the term means plus/minus

[1142] Substantially simultaneously: As used herein and as it relates to plurality of doses, the term means within 2 seconds.

[1143] Suffering from: An individual who is “suffering from” a disease, disorder, and/or condition has been diagnosed with or displays one or more symptoms of a disease, disorder, and/or condition.

[1144] Susceptible to: An individual who is “susceptible to” a disease, disorder, and/or condition has not been diagnosed with and/or may not exhibit symptoms of the disease, disorder, and/or condition but harbors a propensity to develop a disease or its symptoms. In certain embodiments, an individual who is susceptible to a disease, disorder, and/or condition (for example, cancer) may be characterized by one or more of the following: (1) a genetic mutation associated with development of the disease, disorder, and/or condition; (2) a genetic polymorphism associated with development of the disease, disorder, and/or condition; (3) increased and/or decreased expression and/or activity of a protein and/or nucleic acid associated with the disease, disorder, and/or condition; (4) habits and/or lifestyles associated with development of the disease, disorder, and/or condition; (5) a family history of the disease, disorder, and/or condition; and (6) exposure to and/or infection with a microbe associated with development of the disease, disorder, and/or condition. In certain embodiments, an individual who is susceptible to a disease, disorder, and/or condition will develop the disease, disorder, and/or condition. In certain embodiments, an individual who is susceptible to a disease, disorder, and/or condition will not develop the disease, disorder, and/or condition.

[1145] Sustained release: As used herein, the term “sustained release” refers to a pharmaceutical composition or compound release profile that conforms to a release rate over a specific period of time.

[1146] Synthetic: The term “synthetic” means produced, prepared, and/or manufactured by the hand of man. Synthesis of polynucleotides or polypeptides or other molecules of the present disclosure may be chemical or enzymatic.

[1147] Targeting: As used herein, “targeting” means the process of design and selection of nucleic acid sequence that will hybridize to a target nucleic acid and induce a desired effect.

[1148] Targeted Cells: As used herein, “targeted cells” refers to any one or more cells of interest. The cells may be found in vitro, in vivo, in situ or in the tissue or organ of an organism. The organism may be an animal, such as a mammal, a human, or a human patient.

[1149] Terminal region: As used herein, the term “terminal region” refers to a region on the 5′ or 3′ end of a region of linked nucleosides or amino acids (polynucleotide or polypeptide, respectively).

[1150] Terminally optimized: The term “terminally optimized” when referring to nucleic acids means the terminal regions of the nucleic acid are improved in some way, e.g., codon optimized, over the native or wild type terminal regions.

[1151] Therapeutic Agent: The term “therapeutic agent” refers to any agent that, when administered to a subject, has a therapeutic, diagnostic, and/or prophylactic effect and/or elicits a desired biological and/or pharmacological effect.

[1152] Therapeutically effective amount: As used herein, the term “therapeutically effective amount” means an amount of an agent to be delivered (e.g., nucleic acid, drug, therapeutic aunt, diagnostic agent, prophylactic agent, etc.) that is sufficient, when administered to a subject suffering from or susceptible to an infection, disease, disorder, and/or condition, to treat, improve symptoms of, diagnose, prevent, and/or delay the onset of the infection, disease, disorder, and/or condition. In certain embodiments, a therapeutically effective amount is provided in a single dose. In certain embodiments, a therapeutically effective amount is administered in a dosage regimen comprising a plurality of doses. Those skilled in the art will appreciate that in certain embodiments, a unit dosage form may be considered to include a therapeutically effective amount of a particular agent or entity if it includes an amount that is effective when administered as part of such a dosage regimen.

[1153] Therapeutically effective outcome: As used herein, the term “therapeutically effective outcome” means an outcome that is sufficient in a subject suffering from or susceptible to an infection, disease, disorder, and/or condition, to treat, improve symptoms of, diagnose, prevent, and/or delay the onset of the infection, disease, disorder, and/or condition.

[1154] Total daily dose: As used herein, a “total daily dose” is an amount given or prescribed in 24-hour period. It may be administered as a single unit dose.

[1155] Transfection: As used herein, the term “transfection” refers to methods to introduce exogenous nucleic acids into a cell. Methods of transfection include, but are not limited to, chemical methods, physical treatments and cationic lipids or mixtures, The list of agents that can be transfected into a cell is large and includes, but is not limited to, siRNA, sense and/or anti-sense sequences, DNA encoding one or more genes and organized into an expression plasmid, proteins, protein fragments, and more.

[1156] Treating,: As used herein, the term “treating” refers to partially or completely alleviating, ameliorating, improving, relieving, delaying onset of, inhibiting progression of, reducing severity of, and/or reducing incidence of one or more symptoms or features of a particular infection, disease, disorder, and/or condition. For example, “treating” cancer may refer to inhibiting survival, growth, and/or spread of a tumor. Treatment may be administered to a subject who does not exhibit signs of a disease, disorder, and/or condition and/or to a subject who exhibits only early signs of a disease, disorder, and/or condition for the purpose of decreasing the risk of developing pathology associated with the disease, disorder, and/or condition.

[1157] Unmodified: As used herein, “unmodified” refers to any substance, compound or molecule prior to being changed in any way. Unmodified may, but does not always, refer to the wild type or native form of a biomolecule. Molecules may undergo a series of modifications whereby each modified molecule may serve as the “unmodified” starting molecule for a subsequent modification,

[1158] Vector: As used herein, a “vector” is any molecule or moiety which transports, transduces or otherwise acts as a carrier of a heterologous molecule. Vectors of the present disclosure may be produced recombinantly and may be based on and/or may include adeno-associated virus (AAV) parent or reference sequence. Such parent or reference AAV sequences may serve as an original, second, third or subsequent sequence for engineering vectors. In non-limiting examples, such parent or reference AAV sequences may include any one or more of the following sequences: a polynucleotide sequence encoding a polypeptide or multi-polypeptide, which sequence may be wild-type or modified from wild-type and which sequence may encode full-length or partial sequence of a protein, protein domain, or one or more subunits of a protein; a polynucleotide comprising a modulatory or regulatory nucleic acid which sequence may be wild-type or modified from wild-type; and a transgene that may or may not be modified from wild-type sequence. These AAV sequences may serve as either the “donor” sequence of one or more codons (at the nucleic acid level) amino acids (at the polypeptide level) or “acceptor” sequences of one or more codons (at the nucleic acid level) or amino acids (at the polypeptide level).

[1159] Viral genome: As used herein, a “viral genome” or “vector genome” or “viral vector” refers to the nucleic acid sequence(s) encapsulated in an AAV particle, Viral genomes comprise at least one payload region encoding polypeptides or fragments thereof.

### EXAMPLES

### Example 1

### Dose Optimization Study 1

[1160] i. Study Design

[1161] The primary objective of this study was to evaluate delivery parameters to optimize distribution of an AAV 1 packaged AAV1-miRNA expression vector comprising an ITR to ITR sequence, VOYHT1, (hereinafter referred to as AAV1-VOYHT1 or VY-HTT01; SEQ ID NO for VOYHT: 1352) within the striatum, cortex and thalamus of rhesus macaques, and to provide a basis for establishing future dosing parameters and for extrapolation to a clinical dosing paradigm. A secondary objective was to conduct a limited safety and tolerability assessment of delivery parameters.

[1162] The rhesus macaque (Macaca mulatto) was selected as the test system due to its established usefulness and acceptance as a model for pharmacological and toxicological studies, especially when using gene therapy delivery to the central nervous system (CNS). The more completely understood mapping of rhesus genome, relative to other non-human primates (NHPs), is particularly relevant for assessment of RNA interference products, The large brain volume and anatomical structure were also important factors taken into consideration when choosing this species to address the study objectives.

[1163] This study involved the screening of 34 animals to obtain 18 for dosing and 2 alternates. The 18 animals were assigned to 6 treatment groups as summarized in Table 40. Bilateral intraparenchymal infusion into the putamen and thalamus was chosen to maximize brain distribution via axonal transport to cortical areas. Also, putamen and thalamus were preferred infusion sites because putamen and thalamus in early HD human patients are 4-5 times larger than in rhesus, and severe atrophy of the caudate nucleus would prevent direct infusion into the caudate.

TABLE 40
Study design

| | | | | | | Total |
|---|---|---|---|---|---|---|
| | | Number of | Volume (μL/side) | | Dosing Titer | dose |
| Group | Description | animals | Putamen | Thalamus | (vg/μl) | (vg) |
| Group A1 | Low Vol; High Conc. | 3 | 50 | 75 | 2.7e12 | 6.8e11 |
| Group A2 | Mid Vol; High Conc. | 3 | 100 | 150 | 2.7e12 | 1.4e12 |
| Group A3 | High Vol; High Conc. | 3 | 150 | 250 | 2.7e12 | 2.2e12 |
| Group A4 | Mid Vol; Mid Conc. | 3 | 100 | 150 | 9.0e11 | 4.5e11 |
| Group A5 | Mid Vol; Lower Conc. | 3 | 100 | 150 | 2.7e11 | 1.4e11 |
| Group A6 | Vehicle Control | 3 | Left: 100 | Left: 150 | N/A | N/A |
| | | | Right: 150 | Right: 250 | | |

[1164] The calculated human equivalent dose corresponding to each group in Table 40 is presented in Table 41.

TABLE 41
Human equivalent dose

| | | Human Equivalent Dose | | |
|---|---|---|---|---|
| | | | | Total |
| | | Putamen | Thalamus | dose |
| Group | Description | (μL/side) | (μL/side) | (vg) |
| Group A1 | Low Vol; High Conc. | 175 | 450 | 3.4e12 |
| Group A2 | Mid Vol; High Conc. | 350 | 900 | 6.8e12 |
| Group A3 | High Vol; High Conc. | 525 | 1500 | 1.1e13 |
| Group A4 | Mid Vol; Mid Conc. | 350 | 900 | 2.3e12 |
| Group A5 | Mid Vol; Lower Conc. | 350 | 900 | 6.8e11 |
| Group A6 | Vehicle Control | Left: 350 | Left: 900 | N/A |
| | | Right: 525 | Right: 1500 | |

[1165] Each animal received bilateral intracranial infusion of the test article containing AAV1-VOYHT1 or a vehicle control into the putamen and thalamus using magnetic resonance imaging (MRI)-guided convection-enhanced delivery (CED). Animals were euthanized 5 weeks (Day 36±3) after dosing, and tissues were collected for post-mortem analysis.

[1166] ii. Animal Care and Sample Collection

[1167] Thirty-four (N=34) healthy adult male or female rhesus macaques (4-10 years old) were selected for prescreening. Animals weighed 4-10 kg. Animals were acclimated for a minimum of 2 weeks after clearance from Centers for Disease Control and Prevention (CDC) quarantine, Animals had a pre-project blood sample collected for screening of anti-AAV1 neutralizing antibodies (nAb) titers. Eighteen (N=18) animals with anti-AAV1 NAb serum titers ≤1:16 were selected, weighed, and randomized into the study groups for dosing as indicated in Table 40. An additional 2 animals were selected as alternate study animals. Animals were maintained on Harlan 20% Primate Diet with ad libitum access to water. Samples of water were routinely analyzed for specified microorganisms and environmental contaminants. Environmental controls for the animal room were set to maintain 70±6° F., a minimum of 10 air changes/hour, and a 12-hour light/12-hour dark cycle. Cage-side monitoring were performed twice daily, and food consumption assessment was performed once daily. Body weight was measured once per week. Animals were housed in individual cages throughout the study.

[1168] Blood samples were collected for clinical pathology evaluation and neutralizing antibody (nAb) analysis at Pre-dose (i.e., 7 days prior to the initiation of dosing of the first animal receiving AAV1VOYHT1 infusion), Day 15±2, and immediately prior to necropsy on Day 36±3. The clinical pathology evaluation included hematology (CBC), serum clinical chemistry (Chem), and coagulation (Coag) analysis. Cerebrospinal fluid (CSF) samples were collected for nAb analysis from the cervical region prior to dosing (Day 1). and immediately prior to necropsy on Day 36±3. Following necropsy, the brain, spinal cord, dorsal root ganglia, and major organs were collected and then fresh frozen or 4% paraformaldehyde (PFA) post-fixed by immersion.

[1169] iii. Test Article Preparation and Dosing Procedures

[1170] The test article used in the study contained AAV1-VOYHT1 gene transfer vector (2.7e12 vg/mL) formulated in aqueous solution containing 192 mM sodium chloride, 10 mM sodium phosphate. 2 mM potassium phosphate, 2.7 mM potassium chloride, and 0.001% Poloxamer 188 (Pluronic® F-68). The vehicle control contained the formulation buffer only. The samples were stored at −60° C. or below and were thawed to and maintained at 2-8° C. on day of dosing. ProHance® (Bracco Diagnostics, Inc), i.e. gadoteridol, was added at a 1:250 ratio (1 μL of ProHance per 250 μL of test article or control) and carefully mixed by inverting tubes prior to loading into the infusion system. The dosing solution contained the test article or control and a 2 mM concentration of gadoteridol. Dilution of the dosing solutions are summarized in Table 42. “N/A” indicates data not applicable.

TABLE 42
Dilutions of dosing solutions

| | Final vector | Vector | | | Final |
|---|---|---|---|---|---|
| | concentration | stock | Diluent | ProHance | Volume |
| Group | (vg/mL) | (μL) | (μL) | (μL) | (μL) |
| A1, A2, A3 | 2.7e12 | 2250 | 0 | 9 | 2259 |
| A4 | 9.0e11 | 700 | 1392 | 8.4 | 2100 |
| A5 | 2.7e11 | 210 | 1882 | 8.4 | 2100 |
| A6 | N/A | N/A | 15000 | 60 | 15060 |

[1171] Immediately prior to surgery, each animal was anesthetized with intramuscular (IM) Ketamine (10 mg/kg) and IM dexmedetomidine (15 μg/kg), weighed, intubated, and maintained on 1-5% Isoflurane. The head was secured onto a stereotaxic frame and the overlying skin prepared for neurosurgical implantation procedures. Using aseptic techniques, the wound site was opened in anatomical layers to expose the skull. A bilateral craniotomy was performed at entry sites located above the frontal and/or parietal lobe on each side. A skull mounted cannula guide ball array was temporarily secured to the skull over each burr hole using titanium screws. Immediately after surgery to implant cannula guides, the animal was transferred to the MRI suite. MR imaging was used to align cannula guides with putamen and thalamus targets ipsilateral to each cannula guide. Test article or control was administered with repeated MR imaging to visually monitor infusions within the brain as specified in Table 40 above. Each animal received up to 2 infusions (sites) of test article or control using convection enhanced delivery (CED) in each putamen and thalamus. An adjustable tip 16G cannula (MRI Interventions Inc.) was guided into each target site through the skull mounted cannula arrays. The cannula was connected to a syringe mounted on a syringe pump (Harvard Apparatus). Dose volumes (50-400 μL per hemisphere) were deposited into each putamen or thalamnus using ascending infusion rates (up to 10 μL/minute), Serial MRI scans were acquired to monitor infusate distribution within each target site and provide real-time monitoring of the dosing. In some cases, cannula was advanced deeper into the putamen or thalamus during the infusion to maximize infusate distribution within the putamen or thalamus. Immediately after the MRI CED dosing procedure, the animal was transferred back to the operating room, the cannula guide system was explanted, and the wound site was closed in anatomical layers with absorbable vicryl suture and using a simple interrupted suturing pattern. Pre- and post-operative medications included buprenorphine (0.03 mg/kg, IM, b.i.d.), carprofen (2.2 mg/kg SQ, b.i.d.), ketoprofen (2 mg/kg, IM, s.i.d.), and cefazolin (100 mg IV, pre- and post-surgery, followed by 25 mg/kg, IM, b.i.d) or ceftriaxone (50 mg/kg, IM, s.i.d.), Animals were monitored for full recovery from anesthesia and returned to their home cages.

[1172] iv. HTT Knockdown and Vector Genome (VG Measurement in punches from NHP Striatum, Cortex, and Thalamus across Different Infusion Volumes

[1173] This analysis was designed to evaluate the impact of different infusion volumes on vector distribution and coverage. Selected brain slabs containing the motor and somatosensoty cortex and anterior putamen from Groups A1 (low vol), A2 (med vol), A3 (high vol), and A6 (control) were used to collect 2 mm punches. Six cortex, 8 putamen, 2 caudate, and 5 thalamus punches were collected from each side of the brain (42 total per animal), with a total number of 504 punches collected from all four groups. Samples were homogenized in QuantiGene® homogenization buffer and subjected to protease K digest. Cleared cell lysates were generated and processed for both HTT mRNA measurement using a branched DNA (bDNA) assay and vector genome (VG) measurement using droplet digital PCR (ddPCR) after an additional DNA purification step (Qtagen, catalog-469506). The bDNA assay was carried out according to the QuantiGene® Plex Assay (Thermaisher Scientific) protocol using a probe set specifically for rhesus HTT. Cell lysate was assayed in duplicates. HTT mRNA level was normalized to the geometric mean of three rhesus housekeeping genes, i.e., AARS, TBP, and XPNPEP1. Results were calibrated to the normalized mean of the vehicle group and presented as: mean of relative remaining HTT mRNA (%)±standard deviation (stdev). For ddPCR, whole cell DNA was prepared from same tissue homogenate used in the bDNA assay. The level of vector genome detected with probe set, CBA Promoter, was normalized to a Host probe set (RNase P). All samples were blinded during the analysis.

[1174] In the putamen, all groups showed HTT mRNA knockdown, with 63%, 48% and 39% HTT mRNA remaining relative to vehicle for Groups A1, A2, and A3, respectively (see FIG. 10A-C). Of the 16 punches per animal (total 3 animals per group), an average of 52%, 79%, and 92% of the punches for Group A1, A2 and A3 respectively, reached at least 30% HTT mRNA knockdown. HTT mRNA levels in putamen from each AAV1-VOYHT1-treated group averaged per animal after normalization to the vehicle control group are presented in Table 43.

TABLE 43
HTT mRNA knockdown in putamen punches across
infusion volumes averaged per animal

| | | | HTT mRNA |
|---|---|---|---|
| | | Number | relative to vehicle |
| Group | Description | of animals | (% ± stdev) |
| Group A1 | Low Vol; High Conc. | 3 | 63 ± 12 |
| Group A2 | Mid Vol; High Conc. | 3 | 48 ± 7 |
| Group A3 | High Vol; High Conc. | 3 | 39 ± 8 |
| Group A6 | Vehicle Control | 3 | 100 ± 1 |

[1175] When VG copies were analyzed in all putamen punches sampled from each of the three groups, differential VG distributions were observed across different vector infusion volumes. The highest and most stable VG distribution pattern was observed in Group A3, followed by Group A2 and Group A1 (see FIG. 10A-C). This differential vector distribution pattern was observed in left and right hemispheres. VG levels tracked with putamen HTT knockdown, with Group A3 possessing both the highest VG representation and the greatest HTT mRNA knockdown. For VG levels, the number of VG copies detected in putamen punches from each group averaged per animal is presented in Table 44.

TABLE 44
VG copies in putamen punches across
infusion volumes averaged per animal

| | | Sample | VG copies/cell |
|---|---|---|---|
| Group | Description | size | (mean ± stdev) |
| Group A1 | Low Vol; High Conc. | 3 | 327.2 ± 191.2 |
| Group A2 | Mid Vol; High Conc. | 3 | 527.5 ± 207.0 |
| Group A3 | High Vol; High Conc. | 3 | 710.5 ± 163.8 |
| Group A6 | Vehicle Control | 3 | 0.2 ± 0.2 |

[1176] A Grubbs' test (Q=0.1%) was applied for removal of outliers and the VG copies/cell recalculated. Following this post-hoc statistical analysis, VG copies in putamen punches per animal were unchanged for groups A1 and A3, but for Group A2, VG copies/cell was recalculated to 489.7±204.0.

[1177] In the caudate, Group A3 showed the greatest HTT mRNA knockdown with 70% HTT mRNA remaining relative to vehicle (see FIG. 11A-C). Group A1 and Group A2 showed 91% and 87% HTT mRNA remaining relative to vehicle, respectively. VG levels correlated with HTT mRNA knockdown (see FIG. 11A-C). HTT mRNA levels in caudate from each AAV1-VOYHT1-treated group averaged per animal after normalization to the vehicle control group are presented in Table 45.

TABLE 45
HTT mRNA knockdown in caudate punches across
infusion volumes averaged per animal

| | | | HTT mRNA |
|---|---|---|---|
| | | Number | relative to vehicle |
| Group | Description | of animals | (% ± stdev) |
| Group A1 | Low Vol; High Conc. | 3 | 91 ± 2 |
| Group A2 | Mid Vol; High Conc. | 3 | 87 ± 18 |
| Group A3 | High Vol; High Conc. | 3 | 70 ± 23 |
| Group A6 | Vehicle Control | 3 | 100 ± 1 |

[1178] When VG copies were analyzed in all caudate punches sampled from each of the three groups, VG levels tracked with HTT mRNA knockdown (see FIG. 11A-C). Hence, Group A3 exhibited the highest VG representation and the greatest HTT mRNA knockdown. For VG levels, the number of VG copies detected in caudate punches from each group averaged per animal is presented in Table 46,

TABLE 46
VG copies in candate punches across
infusion volumes averaged per animal

| | | Sample | VG copies/cell |
|---|---|---|---|
| Group | Description | size | (mean ± stdev) |
| Group A1 | Low Vol; High Conc. | 3 | 1.6 ± 0.3 |
| Group A2 | Mid Vol; High Conc. | 3 | 4.9 ± 5.4 |
| Group A3 | High Vol; High Conc. | 3 | 18.8 ± 24.2 |
| Group A6 | Vehicle Control | 3 | 00.0 ± 0.1 |

[1179] When a Grubbs' test (Q=0.1%) was applied to remove outliers, the average number of VG copies/cell detected in caudate punches remained unchanged for Group A1, but was re-quantified as 1.8±0.5 and 10.7±10.3 for Groups A2 and A3, respectively. Punches were analyzed from three cortical areas: motor cortex (mCTX), somatosensory cortex (ssCTX), and temporal cortex (tCTX) in the mCTX, significant HTT knockdown was observed for Groups A3 and A2, with greater knockdown in Group A3 than Group A2, resulting in 86% and 91% HTT snRNA remaining relative to vehicle, respectively (see FIG. 12A-C). HTT mRNA levels in mCTX from each AAV1-VOYHT1-treated group averaged per animal after normalization to the vehicle control group are presented in Table 47.

TABLE 47
HTT mRNA knockdown in mCTX punches across
infusion volumes averaged per animal

| | | | HTT mRNA |
|---|---|---|---|
| | | Number | relative to vehicle |
| Group | Description | of animals | (% ± stdev) |
| Group A1 | Low Vol; High Conc. | 3 | 95 ± 1 |
| Group A2 | Mid Vol; High Conc. | 3 | 91 ± 3 |
| Group A3 | High Vol; High Conc. | 3 | 86 ± 6 |
| Group A6 | Vehicle Control | 3 | 100 ± 3 |

[1180] When VG copies were analyzed in all mCTX punches sampled from each of the three groups. VG levels were lower in mCTX than in the putamen in all groups, with Group A3 showing the highest VG representation (see FIG. 12A-C). VG variability was seen between left and right sides of the mCTX. For VG levels, the number of VG copies detected in mCTX punches from each group averaged per animal is presented in Table 48. VG copies were below the quantification limit (BLQ) for Group A6 (vehicle control).

TABLE 48
VG copies in mCTX punches across infusion
volumes averaged per animal

| | | Sample | VG copies/cell |
|---|---|---|---|
| Group | Description | size | (mean ± stdev) |
| Group A1 | Low Vol; High Conc. | 3 | 1.36 ± 0.8 |
| Group A2 | Mid Vol; High Conc. | 3 | 1.34 ± 1.03 |
| Group A3 | High Vol; High Conc. | 3 | 2.35 ± 0.3 |
| Group A6 | Vehicle Control | 3 | BLQ |

[1181] In the ssCTX, HTT knockdown was seen in somatosensory cortex of Group A3 only, where 93% of HTT mRNA remained relative to vehicle (see FIG. 13A-C), HTT mRNA levels in ssCTX from each AAV1-VOYHT1 -treated group averaged per animal after normalization to the vehicle control group are presented in Table 49.

TABLE 49
HTT mRNA knockdown in ssCTX punches across
infusion volumes averaged per animal

| | | | HTT mRNA |
|---|---|---|---|
| | | Number | relative to vehicle |
| Group | Description | of animals | (% ± stdev) |
| Group A1 | Low Vol; High Conc. | 3 | 96 ± 4 |
| Group A2 | Mid Vol; High Conc. | 3 | 97 ± 3 |
| Group A3 | High Vol; High Conc. | 3 | 94 ± 6 |
| Group A6 | Vehicle Control | 3 | 100 ± 2 |

[1182] When VG copies were analyzed in all ssCTX punches sampled from each of the the three groups, VG levels were detected at levels lower than observed in mCTX in all groups, and Group A3 had a relatively higher VG representation than Group A1 and Group A2 (see FIG. 13A-C). For VG levels, the average number of VG copies detected in mCTX punches from each group averaged per animal is presented in Table 50. VG copies were below the quantification limit (BLQ) for Group A6 (vehicle control).

TABLE 50
VG copies in ssCTX punches across infusion
volumes averaged per animal

| | | Sample | VG copies/cell |
|---|---|---|---|
| Group | Description | size | (mean ± stdev) |
| Group A1 | Low Vol; High Conc. | 3 | 0.61 ± 0.3 |
| Group A2 | Mid Vol; High Conc. | 3 | 0.67 ± 0.3 |
| Group A3 | High Vol; High Conc. | 3 | 1.13 ± 0.3 |
| Group A6 | Vehicle Control | 3 | BLQ |

[1183] Combined mCTX and ssCTX samples were also included in cortical punch analyses. When mCTX and ssCTX samples were combined, HTT mRNA remaining relative to vehicle was 95±3% (mean±stdev), 94±5%, and 90±5% for Group A1, Group A2 and Group A3, respectively. HTT mRNA remaining for the vehicle control Group A6 was 100±2% relative to control, Thus. HTT mRNA knockdown was about 5% for Group A1, 6% for Group A2, and 10% for Group A3, HTT mRNA levels in combined mCTX and ssCTX samples from each AAV1-VOYHT1-treated group averaged per animal after normalization to the vehicle control group are also presented in Table 51.

TABLE 51
HTT mRNA knockdown in combined mCTX and ssCTX punches
across infusion volumes averaged per animal

| | | | HTT mRNA |
|---|---|---|---|
| | | Number | relative to vehicle |
| Group | Description | of animals | (% ± stdev) |
| Group A1 | Low Vol; High Conc. | 3 | 95 ± 3 |
| Group A2 | Mid Vol, High Conc. | 3 | 94 ± 5 |
| Group A3 | High Vol; High Conc. | 3 | 90 ± 5 |
| Group A6 | Vehicle Control | 3 | 100 ± 2 |

[1184] For VG levels in combined mCTX and ssCTX punches, Group A3 showed 1.74±0.3 VG copies/cell (averaged per animal), a higher VG representation than observed in punches from Group A2 and Group A1, which contained 1.01±0.7 and 0.99±0.4 VG copies/cell, respectively. VG copies were below the quantification limit (BLQ) for Group A6 (vehicle control). For VG levels, the average number of VG copies detected in combined mCTX and ssCTX punches from each group averaged per animal is presented in Table 52.

TABLE 52
VG copies in combined mCTX and ssCTX punches
across infusion volumes averaged per animal

| | | Number | VG copies/cell |
|---|---|---|---|
| Group | Description | of animals | (mean ± stdev) |
| Group A1 | Low Vol; High Conc. | 3 | 0.99 ± 0.4 |
| Group A2 | Mid Vol; High Conc. | 3 | 1.01 ± 0.7 |
| Group A3 | High Vol; High Conc. | 3 | 1.74 ± 0.3 |
| Group A6 | Vehicle Control | 3 | BLQ |

[1185] Together, for mCTX and ssCTX combined samples, increasing infusion volume tracked with enhanced HTT knockdown and higher VG representation.

[1186] In the tCTX, no statistically significant HTT KD was seen for any of the three groups when all tCTX punches were included as individual datapoints in analyses (see FIG. 14A-C). When VG copies were similarly analyzed in all tCTX punches sampled from each of the three groups, lower VG representation was detected in all groups relative to other cortical areas, but Group A3 had a relatively higher VG representation than Groups A1 and A2 (see FIG. 14A-C). VG copies were below the quantification limit (BLQ) for Group A6 (vehicle control).

[1187] When VG copies were averaged across tissue punches from tCTX per animal, an average vector genome level of 0.54±0.31 VG copies/cell was observed at the low volume, 0.39±0.05 VG copies/cell at the middle volume, and 0.96±0.03 VG copies/cell at the highest volume. VG copies were below the quantification limit (BLQ) for Group A6 (vehicle control). The average number of VG copies detected in tCTX punches from each group averaged per animal is presented in Table 53.

TABLE 53
VG copies in tCTX punches across infusion
volumes averaged per animal

| | | Number | VG copies/cell |
|---|---|---|---|
| Group | Description | of animals | (mean ± stdev) |
| Group A1 | Low Vol; High Conc. | 3 | 0.54 ± 0.31 |
| Group A2 | Mid Vol; High Conc. | 3 | 0.39 ± 0.05 |
| Group A3 | High Vol; High Conc. | 3 | 0.96 ± 0.03 |
| Group A6 | Vehicle Control | 3 | BLQ |

[1188] Together, the high-volume group (Group A3) exhibited a greater number of VG copies per cell versus all other groups (p<0.05). There was no difference in VG copies per cell between low- and middle-volume groups (Groups A1 and A2, respectively).

[1189] In sum, VG was consistently detected in cortex, with the highest representation in mCTX, followed by ssCTX. Variability was observed between punches, cortical areas, and left and right hemispheres. Relatively greater HTT mRNA knockdown was observed in mCTX as compared to ssCTX and tCTX. Among the groups, Group A3 exhibited the highest VG representation and greatest HTT mRNA knockdown. A relationship between increasing VG levels and enhanced HTT mRNA knockdown was observed in cortex, as it was in the putamen and caudate.

[1190] In the thalamus, all groups demonstrated HTT mRNA knockdown with 35%, 38% and 30% HTT remaining relative to vehicle for Groups A1, A2, and A3, respectively. HTT mRNA levels in the thalamus from AAV1-VOYHT1-treated groups after normalization to the vehicle control group are presented in Table 54.

TABLE 54
HTT mRNA knockdown in thalamus punches across
infusion volumes averaged per animal

| | | | HTT mRNA |
|---|---|---|---|
| | | Number | relative to vehicle |
| Group | Description | of animals | (% ± stdev) |
| Group A1 | Low Vol; High Conc. | 3 | 35 ± 10 |
| Group A2 | Mid Vol; High Conc. | 3 | 38 ± 6 |
| Group A3 | High Vol; High Conc. | 3 | 30 ± 1 |
| Group A6 | Vehicle Control | 3 | 100 ± 2 |

[1191] For VG levels, the average number of VG copies detected in thalamus punches from each group averaged per animal is presented in Table 55. The thalamus exhibited the greatest VG representation with the largest infusion volume. Thus, Group A3 had a greater VG representation than Group A1 and A2. VG copies were below the quantification limit (BLQ) for Group A6 (vehicle control).

TABLE 55
VG copies in thalamus punches across
infusion volumes averaged per animal

| | | Sample | VG copies/cell |
|---|---|---|---|
| Group | Description | size | (mean ± stdev) |
| Group A1 | Low Vol; High Conc. | 3 | 849.9 ± 112.6 |
| Group A2 | Mid Vol; High Conc. | 3 | 773.0 ± 655.3 |
| Group A3 | High Vol; High Conc. | 3 | 1136.5 ± 270.8 |
| Group A6 | Vehicle Control | 3 | BLQ |

[1192] Overall, these observations demonstrated that vector volume affects vector bio-distribution in vivo, Among the tested areas, all groups displayed substantial HTT mRNA knockdown in putamen, while in caudate Group A3 led to substantial HTT knockdown. In cortex, mCTX (Groups A3 and A2) and ssCTX (Group A3) showed statistically significant HTT snRNA knockdown, which corresponded to high vector distribution. All groups demonstrated HTT mRNA knockdown in the thalamus, where VG representation was highest among all regions sampled. Lower VG representation was detected in the cortex as compared to the putamen, but relatively more VG copies were seen in mCTX than in other cortical areas. High VG levels were associated with enhanced HTT knockdown in putamen, caudate, cortex, and thalamus. Group A3 showed the highest VG distribution and demonstrated the greatest HTT mRNA knockdown of each of the four brain areas sampled. Lastly, AAV1-VOYHT1 reduced HTT mRNA levels in striatum and primary motor cortex in a volume-dependent manner.

[1193] To evaluate vector genome (VG) levels in the cortex, 18 tissue punches were harvested from each animal (9 punches per hemisphere) including 6 punches each from motor, somatosensory, and temporal regions of the cortex (mCTX, ssCTX, and tCTX, respectively). Fifty-four cortex punches in total were evaluated for vector genome (VG) biodistribution per group. The average number of VG copies per cell was calculated for all 18 cortex punches per animal, which were comprised of 6 punches each from mCTX, ssCTX, and tCTX. An average vector genome level of 1.48±0.18 VG copies/cell was observed in the cortex at the highest volume (Group A3), 0.80±0.45 VG copies/cell at the mid volume (Group A2), and 0.84±0.35 VG copies/cell at the low volume (Group A1).VG copies were below the quantification limit (BLQ) for Group A6 (vehicle control). The average number of VG copies per cell detected in combined mCTX, ssCTX, and tCTX punches from each group averaged per animal is presented in Table 56.

TABLE 56
Vector genome copies in combined mCTX, ssCTX, and tCTX
punches across infusion volumes averaged per animal

| | | Sample | VG copies/cell |
|---|---|---|---|
| Group | Description | size | (mean ± stdev) |
| Group A1 | Low Vol; High Conc. | 3 | 0.84 ± 0.35 |
| Group A2 | Mid Vol; High Conc. | 3 | 0.80 ± 0.45 |
| Group A3 | High Vol; High Conc. | 3 | 1.48 ± 0.18 |
| Group A6 | Vehicle Control | 3 | BLQ |

[1194] Together, each AAV1-VOYHT1 group (Groups A1, A2 and A3) exhibited a higher number of VG copies/cell as compared to the vehicle group (Group A6; p<0.05), but not from each other (p>0.05). The high-volume group (Group A3) exhibited a numerically greater number of VG copies/cell than the mid- and low-volume groups (Groups A2 and A1, respectively, whereas the mid- and low-volume groups showed similar VG copies/cell to each other.

[1195] v. HTT Knockdown and Vector Genome (VG) Measurement in Punches from NHP Striatum and Thalamus at Mid and Low Concentrations

[1196] This analysis was designed to evaluate the impact of mid dose concentration, which can also be referred to as medium dose concentration, and low dose concentration on vector distribution and coverage, Selected brain slabs containing the motor and somatosensory cortex and anterior putamen from Groups A4 (mid concentration), A5 (low concentration), and A6 (control) were used to collect 2 nun punches. Six cortex, 8 putamen, 2 caudate, and 5 thalamus punches were collected from each side of the brain (42 total per animal), with a total number of 504 punches collected from all four groups. Samples were homogenized in QuantiGene® homogenization buffer and subjected to protease K digest. Cleared cell lysates were generated and processed for both HTT mRNA measurement using a branched DNA (bDNA) assay and vector genome (VG) measurement using digital droplet PCR (ddPCR) after an additional DNA purification step (Qiagen, catalog#69506). The bDNA assay was carried out according to the QuantiGene® Plex Assay (ThermoFisher Scientific) protocol using a probe set specifically for rhesus HTT. Cell lysate was assayed in duplicate. HTT mRNA level was normalized to the geometric mean of three rhesus housekeeping genes, i.e. AARS, TBP, and XPNPEP1. Results were calibrated to the normalized mean of the vehicle group and presented as: mean of relative remaining HTT mRNA (%)±stdev. For ddPCR, whole cell DNA was prepared from same tissue homogenate used in the bDNA assay. The level of vector genome detected with probe set, CBA Promoter, was normalized to a Host probe set (RNase P). All samples were blinded during the analysis.

[1197] In the putamen, both Group A4 (mid concentration) and Group A5 (low concentration) showed HTT mRNA knockdown, with 63±9% (mean±stdev) and 73±9% HTT mRNA remaining relative to control, respectively. Thus, mRNA levels were reduced in a dose-associated manner, with an approximate 37% and 27% reduction in HTT mRNA for mid and low concentration groups, respectively. For VG levels, the average number of VG copies detected in putamen punches for Group A4 and Group A5 were 119.4±18.1 and 66.9±21.5 VG copies/cell, respectively.

[1198] HTT mRNA knockdown was also observed in the caudate, with 88±6% (mean±stdev) and 91±10% knockdown relative to control for Groups A4 and A5, respectively. Thus, mRNA levels were reduced in a dose-associated manner, with an approximate 12% and 9% reduction in HTT mRNA for mid and low concentration groups, respectively. HTT mRNA reduction was about 20% lower in the caudate versus the putamen for both Group A4 and Group A5. For VG levels, the average number of VG copies detected in caudate punches from Group A4 and Group A5 was 0.4±0.1 and 9.3±15.4 VG copies/cell, respectively. When a Grubbs' test (Q=0.1%) was applied to remove outliers, the average number of VG copies detected in caudate punches from Group A5 went from 9.3 to 0.3±0.2. Average VG for Group A4 remained unchanged after the Grubbs' test. VG copy representation was several-fold lower in the caudate than in the putamen at both medium (˜300-fold lower) and low (˜7-fold lower) dose concentrations.

[1199] Lastly, HTT mRNA knockdown was observed in the thalamus, with 59±20% (mean stdev) and 52±13% knockdown relative to control for Groups A4 and A5, respectively. HTT mRNA levels were reduced in the thalamus by approximately 41% and 48% for mid and low concentration groups, respectively. While an emerging relationship between HTT mRNA knockdown and dose concentration was observed in the striatum, this was not the case in thalamus, where the mid dose concentration was associated with lower mRNA knockdown levels than the low dose concentration. For VG levels, the average number of VG copies detected in thalamus punches from Group A4 and A5 was 416.0±149.3 and 246.7±87 VG copies/cell, respectively. VG representation was higher in the thalamus than in the striatum at both mid and low dose concentrations.

[1200] Together, mid and low AAV1-VOYHT1 concentrations were associated with reduced HTT mRNA levels in striatum (putamen and caudate) and thalamus. HTT mRNA knockdown was higher in the thalamus compared to both the putamen and caudate. In the striatum, HTT mRNA knockdown was approximately 20% greater in the putamen versus the caudate. The mid AAV1-VOYHT1dose was associated with greater HTT knockdown than the low AAV1-VOYHT1dose in the striatum, but not in the thalamus, where knockdown was about 45% regardless of dose. Of the three brain regions assessed, the number of VG copies per cell was highest in the thalamus and lowest in the caudate.

[1201] vi. HTT Knockdown and Vector Genome (VG) Measurement in Laser Captured (LC) Neurons from NHP Cortex

[1202] Selected brain slabs from Group A3 (high vol; high conc.) and Group A6 (vehicle control) were processed to isolate primary motor cortex (mCTX) and somatosensory cortex (ssCTX) samples. Samples were cut into 14 μm sections and stained with 1% cresyl violet. Cortical pyramidal neurons were captured using laser capture microdissection (LCM). For the 1^{st} LCM analysis, one mCTX and one ssCTX sample were collected from each side of the brain (4 samples per animal), with a total of 24 samples collected. Two sets of 750 pyramidal neurons in cortex layers V and VI were laser captured (LC) and homogenized in 50 μl lysis buffer, pooled to a total of 100 μl. For the 2^{nd} LCM analysis, two mCTX and four ssCTX sample were collected from each side of the brain (12 samples per animal), with a total of 72 samples collected. Nine-hundred pyramidal neurons were laser captured from cortical layers V and VI from each sample. Each sample was initially isolated using ARCTURUS® PicoPure® RNA Isolation Kit (Thermo Fisher Scientific, Cat. No. KIT0204) and subsequently processed for both HTT mRNA level using quantitative reverse transcription-PCR (RF-qPCR) and vector genome (VG) level using digital droplet PCR (ddPCR), after an additional DNA purification step (Qiagen, catalog#56304), For RT-gPCR, all samples were analyzed with TaqMan™ PreAmp Master Mix (Thermo Fisher Scientific, Cat. No. 4391128). Calculations across the data sets were carried out according to Vandesompele J et al., Genome Biol. 2002;3(7):RESEARCH0034. HTT mRNA level was normalized to the geometric mean of three rhesus housekeeping genes, i.e. AARS, TBP. and XPNPEPL Results were calculated as fold HTT mRNA relative to the average of all vehicle samples in a given tissue. For ddPCR, the level of vector genome detected with probe set, CBA Promoter, was normalized to a Host probe set (RNase P). All samples were blinded during the analysis.

[1203] From the 1^{st} LCM analysis, modest HTT mRNA knockdown (19% in mCTX and 23% in ssCTX) was achieved in Group A3 (highest volume and concentration) (see FIG. 15A). Approximately 3-7 VG copies per cell correlated with modest HTT mRNA KD in mCTX and ssCTX pyramidal neurons (see FIG. 15B). Compared to tissue punches from mCTX and ssCTX (see above), more HTT knockdown and vector genome copies were detected in LCM samples.

[1204] From the 2^{nd} LCM analysis, HTT mRNA levels and VG levels normalized to vehicle are presented in Tables 57-60, Data shown are mean±stdev for all mCTX or ssCTX samples from a group or accounted for individual animals in a group (3 NHPs per group). Combined mCTX and ssCTX pyramidal neuron samples were also assessed for individual animals in a group, as shown in Tables 57 and 59. Modest, but significant HTT mRNA knockdown (21% in mCTX and 23% in ssCTX) was achieved in Group A3. Average 2.79 and 1.36 VG copies per cell were detected in LC pyramidal neurons from mCTX and ssCIX, respectively. Better HTT mRNA knockdown was seen in LCM samples compared to the tissue punches (14% in mCTX and 6% in ssCTX). The readouts of HTT mRNA knockdown from 2nd LCM analysis was consistent with 1st LCM results, while VG copy number measured in the 2nd LCM was slightly lower than that in the 1st LCM analysis.

TABLE 57
HTT mRNA level in all LC neurons
of mCTX and ssCTX (2^{nd} LCM)

| | | Relative HTT mRNA level (% of | |
|---|---|---|---|
| | | vehicle) (mean ± stdev) | |
| Group | Description | mCTX (n = 12) | ssCTX (n = 24) |
| Group A3 | high vol; high conc. | 76 ± 11 | 77 ± 14 |
| Group A6 | vehicle control | 100 ± 37 | 100 ± 18 |

TABLE 58
HTT mRNA level in LC neurons of mCTX
and ssCTX of each animal (2^{nd} LCM)

| | | Relative HTT mRNA level (% of | | |
|---|---|---|---|---|
| | | vehicle) (mean ± stdev, N = 3) | | |
| | | | | mCTX + |
| Group | Description | mCTX | ssCTX | ssCTX |
| Group A3 | high vol; high conc. | 79 ± 11 | 77 ± 8 | 77 ± 13 |
| Group A6 | vehicle control | 100 ± 37 | 100 ± 17 | 100 ± 25 |

TABLE 59
VG level in all LC neurons of mCTX and ssCTX (2^{nd} LCM)

| | | VG copies/cell (mean ± stdev) | |
|---|---|---|---|
| Group | Description | mCTX (n = 12) | ssCTX (n = 24) |
| Group A3 | high vol; high conc. | 2.79 ± 1.55 | 1.36 ± 0.97 |
| Group A6 | vehicle control | 0.18 ± 0.11 | 0.46 ± 0.3 |

TABLE 60
VG level in LC neurons of mCTX and
ssCTX of each animal (2^{nd} LCM)

| | | VG copies/cell (mean ± | | |
|---|---|---|---|---|
| | | stdev, N = 3) | | |
| | | | | mCTX + |
| Group | Description | mCTX | ssCTX | ssCTX |
| Group A3 | high vol; high | 2.79 ± 0.08 | 1.36 ± 0.28 | 1.84 ± 0.17 |
| | conc. | | | |
| Group A6 | vehicle control | 0.17 ± 0.05 | 0.45 ± 0.17 | 0.37 ± 0.12 |

[1205] vii. In Situ Hybridization (ISH) for VG and HTT mRNA in NHP Motor and Somatosensory

[1206] Selected brain slices containing the motor and somatosensory cortex from Group A3 (high vol; high cone.) and Group A6 (vehicle control) animals were processed for in situ hybridization (ISH) using the BaseScope™ Assay to detect vector genome DNA and HTT mRNA. Five pm-thick formalin-fixed paraffin-embedded (FFPE) brain sections were incubated with BaseScope™ ISH target-specific probes for Macaca mRNA (GenBank Accession Number: XM_015137840.1) and the AAV1 vector genome. Three pairs of double Z probes were used for HTT mRNA, and these probes were designed against 3 exon junctions in the HTT gene. Four pairs were used for the vector genome, and these probes were designed against multiple non-pri-miRNA regions. Positive control probes, BA-Mmu-PPIB-3zz (Peptidylprolyl Isomerase B (Cyclophilin B), Cat. No. 708161), and a negative control probe, BA-dapB-3zz (Cat. No. 701011), were also added. Signal amplification and tissue staining were carried out using BaseScope™ Red Reagent Kit (Cat. No. 322910). Images were detected and analyzed under a microscope for vector genome and HTT mRNA levels.

[1207] Quantification of BaseScope™ ISH results was performed with Image) imaging analysis software. The scoring criteria used for evaluation of BaseScope™ staining is listed in Table 61, Scoring was performed at 40×magnification. Scoring was performed based on the number of dots per cell rather than the signal intensity, since dots correlate to the number of individual target molecules, whereas dot intensity reflects the number probe pairs bound to each molecule. AAV vector biodistribution was calculated as the percentage of cells with dots relative to the total number of cells in a specific cortex region. For vector genome readouts, only nuclear signals were counted.

TABLE 61
Scoring criteria for ISH staining

| Score | Criteria |
|---|---|
| 0 | No staining or <1 dot/10 cells |
| 1 | 1-3 dots/cell |
| 2 | 4-9 dots/cell, no or very few dot clusters |
| 3 | 10-15 dots/cell and <10% dots are in clusters |
| 4 | >15 dots/cell and >10% dots are in clusters |

[1208] For vector biodistribution, extensive vector genomes were detected at the injection sites (thalamus and putamen) in Group A3. In the cortex, an average of 18% mCTX and 9% ssCTX cells with detectable AAV vector in the nucleus was achieved in Group A3. More cells with detectable vector genome were observed in the mCTX than in the ssCTX, with a combined average of 12.48% vg+ cells in both the mCTX and ssCTX in NHPs. The results of vector biodistribution in NHP cortex based on vector genome ISH are presented in Tables 62 and 63.

TABLE 62
VG distribution per cortical region in mCTX and ssCTX

| | | % of cells with VG (mean ± stdev) | |
|---|---|---|---|
| Group | Description | mCTX (n = 18) | ssCTX (n = 30) |
| Group A3 | high vol; high conc. | 17.87 ± 7.04 | 9.35 ± 2.80 |
| Group A6 | vehicle control | 0.75 ± 1.51 | 0.72 ± 0.92 |

TABLE 63
VG distribution per animal in mCTX and ssCTX

| | | % of cells with VG (mean ± | |
|---|---|---|---|
| | | stdev, N = 3) | |
| Group | Description | mCTX | ssCTX |
| Group A3 | high vol; high conc. | 17.87 ± 2.94 | 9.36 ± 0.29 |
| Group A6 | vehicle control | 0.75 ± 1.12 | 0.72 ± 0.53 |

[1209] For VG levels, average vector genome scorings were ˜1 for cells in both mCTX and ssCTX in NHPs of Group A3 (high volume, high concentration) dosed with AAV1-VOYHT1 by bilateral thalamus and putamen infusion. The results of VG scoring in NHP cortex using the scoring criteria set forth above are presented in Tables 64 and 65.

TABLE 64
VG score per cortical region in mCTX and ssCTX

| | | VG score (mean ± stdev) | |
|---|---|---|---|
| Group | Description | mCTX (n = 18) | ssCTX (n = 31) |
| Group A3 | high vol; high conc. | 1.01 ± 0.02 | 1.08 ± 0.13 |
| Group A6 | vehicle control | 0 | 0 |

TABLE 65
VG score per animal in mCTX and ssCTX

| | | VG score (mean ± stdev, N = 3) | |
|---|---|---|---|
| Group | Description | mCTX | ssCTX |
| Group A3 | high vol; high conc. | 1.01 ± 0.01 | 1.08 ± 0.07 |
| Group A6 | vehicle control | 0 | 0 |

[1210] For HTT mRNA levels, HTT mRNA scores in both mCTX and ssCTX of the AAV1-VOYHT1-treated group showed significantly lower scores than that in the vehicle group, indicating a significant reduction of HTT mRNA level caused by AAV1-VOYHT1 treatment. The results of HTT mRNA scoring in NHP cortex using the scoring criteria set forth above are presented in Tables 66 and 67.

TABLE 66
HTT mRNA scores per cortical region in mCTX and ssCTX

| | | HTT mRNA scores (mean ± stdev) | |
|---|---|---|---|
| Group | Description | mCTX (n = 18) | ssCTX (n = 30) |
| Group A3 | high vol; high conc. | 1.51 ± 0.22 | 1.91 ± 0.28 |
| Group A6 | vehicle control | 2.24 ± 0.38 | 2.26 ± 0.28 |

TABLE 67
HTT mRNA scores per animal in mCTX and ssCTX

HTT mRNA score (mean ±
stdev, N = 3)

| Group | Description | mCTX | ssCTX |
|---|---|---|---|
| Group A3 | high vol; high conc. | 1.51 ± 0.15 | 1.91 ± 0.25 |
| Group A6 | vehicle control | 2.24 ± 0.28 | 2.26 ± 0.2 |

[1211] viii. Clinical Signs and Histopathology

[1212] Minimal to mild clinical signs were observed in 7 out of 18 test animals, including mild incoordination, inappetence, decreased feed, and overall weakness. Histopathology analysis overall showed safety at the tested doses. Low levels of mononuclear cell infiltrates were detected in the putamen and thalamus. The degree of infiltration of mononuclear cells corresponded proportionately to the infusion volume. Necrosis was most pronounced in the vehicle group. Minimal damage was observed in parietal cortex and occipital cortex.

[1213] ix. Summary

[1214] These data suggested that attaining the targeted levels of HTT knockdown in cortex via intrathalamic and/or intraputaminal infusion is achievable upon using optimal dosing paradigm. AAV1-VOYHT1 was well-tolerated based on clinical signs and histological assessment of the brain.

### Example 2

### Dose Optimization Study II

[1215] This study was carried out to further evaluate delivery parameters to optimize coverage of AAV1-VOYHT1 in NHP brain, and to extrapolate parameters to clinical dosing paradigm. This study utilized a total of 10 animals, which were assigned to 4 treatment groups as summarized in Table 68. Animals received bilateral parenchymal infusion (4 infusions) into the putamen and thalamus of AAV1-VOYHT1. with increased dosing compared to Example 1, Experimental procedures were similar to that described in Example 1. Animals were euthanized 5 weeks after dosing, and tissues were collected for post-mortem analysis.

TABLE 68
Study design

| | | Number of | Volume (μL/side) | | Dosing Titer | Total |
|---|---|---|---|---|---|---|
| Group | Description | animals | Putamen | Thalamus | (vg/ml) | dose (vg) |
| Group B1 | High vol. vehicle | 2 | 350 | 500 | 0 | 0 |
| Group B2 | Mid vol. Mid Conc. | 3 | 250 | 325 | 4e12 | 4.6e12 |
| Group B3 | Mid vol. High Conc. | 3 | 250 | 325 | 7.9e12 | 9.1e12 |
| Group B4 | Mid vol. Vehicle | 2 | 250 | 325 | 0 | 0 |

[1216] The calculated human equivalent dose corresponding to each dosing group from Table 67 is presented in Table 69.

TABLE 69
Human equivalent dose

| | | Human Equivalent Dose | | |
|---|---|---|---|---|
| | | Putamen | Thalamus | |
| Group | Description | (μL/side) | (μL/side) | dose (vg) |
| Group B1 | High vol. vehicle | 1225 | 3000 | 0 |
| Group B2 | Mid vol. Mid Conc. | 875 | 1950 | 2.3e13 |
| Group B3 | Mid vol. High Conc. | 875 | 1950 | 4.5e13 |
| Group B4 | Mid vol. Vehicle | 875 | 1950 | 0 |

[1217] Side effects were observed post-dosing, which were likely due to intolerance to large infusion volumes. Disuse of one or both hindlimbs was observed in the animals dosed with the high-volume vehicle control (Group B1), In two animals that received medium volume AAV1-VOYHT1 treatment (Groups B2, B3), clinical signs such as paresis in both legs, prone/ambulating slowing, head tilt were observed. MRI observations showed some reflux along both cannula tracts in three animals.

[1218] Histopathology analysis showed slight gliosis and necrosis in the putamen (unavoidable due to placement of catheter) in the vehicle group. In Group B2 animals, a notable increase was seen in mononuclear cell infiltrates at both putamen and thalamic infusion sites, but these were not expected to result in clinical signs. Slight increases in gliosis and necrosis in both structures were observed but neither finding was expected to result in any clinical signs. Edema was also observed. In Group B3 animals, slight increases in gliosis and necrosis were seen in both structures relative to control but were considered of no biologic relevance. Mononuclear infiltrates were increased compared to the vehicle group. An increase in edema was also observed, but this was not expected to cause any clinical signs.

### Example 3

### Dose Optimization Study III

[1219] i. Study Design

[1220] The primary goals of this study were to demonstrate HTT mRNA knockdown in NHP cortex with AAV1-VOYHT1 and to demonstrate safety for thalamic-only and combined thalamic and putaminal infusion paradigms. The secondary goals were to show a correlation between VG and HTT mRNA levels in laser captured (LC) pyramidal neurons from primary motor and somatosensory cortex; demonstrate a correlation between HTT mRNA and VG levels in tissue punches from the putamen, thalamus, and caudate; demonstrate a correlation between HTT protein and HTT mRNA levels in putamen; measure AAV1-VOYHT1 specific miRNA expression levels in tissue punches from putamen and caudate; demonstrate a correlation between vector genome (VG) and AAV1-VOYHT1 specific miRNA expression levels in tissue punches from putamen and caudate; and demonstrate a correlation between HTT mRNA and AAV1-VOYHT1 specific miRNA expression levels in tissue punches from putamen and caudate.

[1221] This study was implemented in two phases. A total of 15 male and female rhesus macaques were assigned to 5 groups with 3 animals per group (see Table 57). In Phase I, the first group of animals (Group C1a) were dosed with a vehicle control by intraparenchymal injection bilaterally into both the thalamus and putamen using MRI-guided convection enhanced delivery (CED) to establish infusion parameters (e.g., rate, volume and duration) before proceeding to Phase II of the study. A second group (Group C1b) was dosed with refined surgical procedures and served as the control group for the treatment groups. After the infusion parameters were established in Phase I, they were used for dosing the test article containing AAV1-VOYHT1 in the three treatment groups. The first treatment group (Group C2) received bilateral infusion of the test article into the thalamus only using MRI-guided CED. This group was dosed to demonstrate the safety and Huntingtin (HTT) mRNA knockdown (KD) in cortical pyramidal neurons in the primary motor and somatosensory cortex by laser capture microdissection (LCM) after thalamus infusion only. Next, in the other two treatment groups (Group C3 and Group C4), the test article was infused bilaterally into both the thalamus and putamen at 2 different dose levels for dose optimization.

[1222] The study schedule was as follows. In Phase I, the first vehicle group (Group C1a) was dosed using pre-selected infusion parameters, A Functional Observation Battery (FOB) evaluation focusing on neurological status was carried out 5±2 days post-infusion and 3±days prior to termination. An additional 3 animals (Group C1b) were dosed and then evaluated with FOB at 5±2 days after dosing and 3±days prior to termination, as per Group C1a. In Phase II, all animals (N=9) were dosed with the test article containing AAV1-VOYHT1 in accordance with the infusion parameters established in Phase I. Group C2 (thalamus only) was dosed first, followed by Group C3 at a medium dose and then Group C4 at a high dose. Except for Group C2 in which the animals received bilateral thalamic dosing only, each animal received bilateral intracranial infusion of vehicle or test article into the putamen and thalamus. An intraparenchymal dosing paradigm was employed in which 2-4 infusions (1infusion per structure) were given at a speed of up to 5 μL/min, A baseline neurological FOB evaluation was performed on each animal prior to dosing followed by a second FOB evaluation of each animal at 5±2 days after dosing. When the second FOB was satisfactory, the animal was euthanized at Dav 36±3 (˜5 weeks in-life duration) and a third FOB evaluation was performed 3±2 days prior to necropsy. Tissues were collected for post-mortem analysis.

[1223] A summary of the study design is shown in Table 70. For the high dose group (Group C4), the total dose of 1.8e13 vg was calculated based on the maximal titer (2.2e13 vg/ml) achieved.

TABLE 70
Study design

| | | | | | | | Total |
|---|---|---|---|---|---|---|---|
| | | Number of | | Volume (μL/side) | | Dosing Titer | dose |
| Phase | Group | animals | Description | Putamen | Thalamus | (vg/ml) | (vg) |
| I | Group C1 (a/b) | 3 + 3 | Vehicle | 150 | 250 | 0.0 | 0.0 |
| II | Group C2 | 3 | Thalamus only | — | 250 | 2.2e13 | 1.1e13 |
| | Group C3 | 3 | Medium dose | 150 | 250 | 1.0e13 | 8.0e12 |
| | Group C4 | 3 | High dose | 150 | 250 | 2.2e13 | 1.8e13 |

[1224] ii. Animal Care and Sample Collection

[1225] Eighteen (N=18) adult male or female rhesus macaques (4-11 years old) were selected based on anti-AAV1 neutralizing antibody (nAb) serum titers 15 days prior to the start of ambulation training. Selected candidates for Groups C2, C3 and C4 exhibited low AAV1 nAb in general. Animals weighed 5-14 kg. Ambulation training was carried out daily for up to 4 consecutive weeks before animal enrollment. Animals were weighed and assigned by nAb status to the study groups as summarized in Table 57, The 3 animals selected as backups were kept as spares until the completion of dosing. Animal husbandry conditions were similar as described in Example 1.

[1226] Blood samples were collected for clinical pathology evaluation and neutralizing antibody (nAb) analysis at Day 1 (Pre-dose), Day 15±2, and immediately prior to necropsy on Day 36±3. The clinical pathology evaluation included hematology (CBC), serum clinical chemistry (Chem), and coagulation (Coag) analysis. Cerebrospinal fluid (CSF) samples were collected for nAb analysis from the cervical region at Day 1 (Pre-dose), Day 15±2, and immediately prior to necropsy on Day 36±3. Following necropsy, the brain and selected peripheral organs were collected and then fresh frozen or 4% paraformaldehyde (PFA) post-fixed by immersion.

[1227] iii. Test Article Preparation and Dosing Procedures

[1228] The test article used in the study contained AAV1-VOYHT1 gene transfer vector formulated in Phosphate Buffered Saline with 5% sucrose and 0.001% Poloxamer 188 (Pluronic® F-68). The vehicle control contained the formulation buffer only. The samples were stored at -60 CC or below and were thawed to and maintained at 2-8° C. on day of dosing. ProHance® (Bracco Diagnostics, Inc), i.e. gadoteridol, was added at a 1:250 ratio (1 μL of ProHance per 250 μL of test article or control) and carefully mixed by inverting tubes prior to loading into the infusion system. The dosing solution contained the test article or control and a 2 mM concentration of gadoteridol.

[1229] Immediately prior to surgery, each animal was anesthetized with intramuscular (IM) ketamine (10 mg/kg) and IM dexmedetomidine (15 μg/kg), weighed, hair of head and neck shaved, intubated, and maintained on 1-5% isoflurane. The animal's head was secured onto a stereotaxic frame containing one MRI surface coil on each side of the ear bars and then transferred to the MRI to acquire a baseline scan. A T1- and T2-weighted MRI sequences were acquired and used to determine coordinates of the central sulcus. Next the animal was transferred back to the surgery suite and the head prepared for the neurosurgical implantation procedure. Using aseptic techniques, the wound site was opened in anatomical layers to expose the skull. Depending on which dose group, craniotomies were performed at entry sites located above the parietal and/or occipital lobe on each side. A skull mounted cannula guide ball array was temporarily secured to the skull over each burr hole using titanium screws. Immediately after implantation of ball arrays, the animal was transferred to the MRI suite. MR imaging was used to align cannula guides with putamen and/or thalamus targets ipsilateral to each cannula guide. Test article or control was administered with repeated MR imaging to visually monitor infusions within the brain as specified in Table 57 (above). Each animal received infusions (sites) of the test article or control using convection enhanced delivery (CED) in each putamen (except Group C2) and thalamus. A 16G cannula (Mill Interventions Inc.) was primed with dosing solution and guided into each target site through the skull mounted ball arrays. Each cannula was connected via microbore extension lines (Smiths Medical) to a 3-6cc syringe mounted on a syringe pump (Harvard Apparatus). Dose rates, durations and volumes administered into each putamen and thalamus using ascending infusion rates in 3 different stages of intraparenchymal infusion are listed in Table 71. “N/A” indicates data not applicable.

TABLE 71
Infusion parameters

| | Putamen | | | Thalamus | | |
|---|---|---|---|---|---|---|
| Stage of | Rate | Duration | Volume | Rate | Duration | Volume |
| infusion | (μl/min) | (min) | (μl) | (μl/min) | (min) | (μl) |
| 1 | 1 | 16 | 16 | 1 | 25 | 25 |
| 2 | 3 | 28 | 84 | 3 | 50 | 150 |
| 3 | 5 | 20 | 50 | 5 | 15 | 75 |
| Total | N/A | 64 | 150 | N/A | 90 | 250 |

[1230] Serial MRI scans were acquired to monitor infusate distribution within each target site and provide real-time monitoring of the dosing. In some cases, cannula was advanced deeper into the putamen or thalamus during the infusion to maximize infusate distribution within the putamen or thalamus. Distribution of infusate into CNS structures adjacent to the putamen and thalamus was anticipated and intended to occur due to the total volume to be delivered per site. Immediately after the MRI CED dosing procedure, the animal was transferred back to the surgery suite, the ball array system was explanted and the wound site closed in anatomical layers with absorbable vicryl suture using a simple interrupted suturing pattern. Pre- and post-operative medications included atipamezole (0.03 mL/kg, IM), buprenorphine (0.03 mg/kg, IM, b.i.d.), carprofen (2.2 mg/kg SQ, b.i.d.), ketoprofen (2 mg/kg, IM, s.i.d.), and cefazolin (100 mg IV, pre- and post-surgery, followed by 25 mg/kg, IM, b.i.d.) or ceftriaxone (50 mg/kg, IM, Animals were monitored for full recovery from anesthesia and returned to their home cages.

[1231] iv. HTT Knockdown and VG Measurement in LC Neurons from Combined NHP mCTX and ssCTX

[1232] Selected brain slabs from three groups (Group C1, Group C3 and Group C4) were processed to isolate primary motor cortex (mCTX) and somatosensory cortex (ssCTX) samples by laser capture microdissection (LCM). A total of 54 mCTX samples and 90 ssCTX LCM samples were collected. Each LCM sample contained 900 pyramidal neurons laser captured (LC) from cortical layers V and VI, with a total of 129,600 neurons captured. Samples were processed for both HTT mRNA level using RT-qPCR and vector genome (VG) level using ddPCR, as described in Example 1. All samples were blinded during the analysis.

[1233] For HTT mRNA knockdown, the relative HTT mRNA levels in LC neurons from combined mCTX and ssCTX of AAV1-VOYHT1-treated groups after normalization to the vehicle control group are presented in Table 71, The greatest HTT knockdown in combined samples of LC pyramidal neurons from mCTX and ssCTX (32%) was observed in Group C4 (high dose bilateral putamen+thalamus group), with less HTT knockdown (13%) in Group C3 (medium dose bilateral putamen thalamus group). An average of 30% HTT mRNA knockdown was observed in mCTX and 33% HTT mRNA knockdown in ssCTX in Group C4. HTT knockdown was approximately dose-proportional (2.25×greater dose resulted in 2.9×greater knockdown). The percentage of samples of LC cortical neurons that exhibited over 30% HTT knockdown is also shown in Table 72. In LC motor and somatosensory cortical neurons, 58% of samples showed ≥30% HTT knockdown and 27% of samples showed ≥40% HTT knockdown in Group C4 (high dose putamen+thalamus group), whereas 36% of samples showed ≥30% HTT knockdown and 7% of samples showed ≥40% HTT knockdown in Group C3 (medium dose putamen+thalamus group). Thus, HTT mRNA knockdown in motor and somatosensory cortical neurons is dependent on the concentration of AAV1-VOYHT1 infused into thalamus and putamen. In addition, over 40% of LCM mCTX samples showed ≥30% HTT mRNA knockdown in both medium and high dose groups, while 60% of LCM ssCTX samples in the high dose group showed ≥30% HTT mRNA knockdown.

TABLE 72
HTT knockdown in LC neurons from combined mCTX and ssCTX

| | | HTT mRNA | | |
|---|---|---|---|---|
| | | relative to | | |
| | | vehicle (% + | % LCMs ≥ | % LCMs ≥ |
| Group | Description | stdev, N = 3) | 30% KD | 40% KD |
| Group C1 | Vehicle | 100 ± 10 | 5 | 0 |
| Group C3 | Medium dose | 87 ± 26 | 36 | 7 |
| Group C4 | High dose | 68 ± 3 | 58 | 27 |

[1234] For VG levels, LC neuron samples from combined mCTX and ssCTX showed a dose-dependent increase in VG copies per cell, as shown in Table 73. The number of VG copies per cell was approximately 30 copies/cell in the high dose group. VG copies tracked with HTT mRNA knockdown such that a higher number of VG copies corresponded to greater HTT mRNA knockdown.

TABLE 73
VG levels in LC neurons from combined mCTX and ssCTX

| | | VG copies/cell |
|---|---|---|
| Group | Description | (mean ± stdev, N = 3) |
| Group C1 | Vehicle | 0.54 ± 0.55 |
| Group C3 | Medium dose | 8.00 ± 0.71 |
| Group C4 | High dose | 28.55 ± 23.16 |

[1235] v. HTT Knockdown and VG Measurement in LC Neurons from AHP mCTA7

[1236] Selected brain slabs from three groups (Group C1, Group C3 and Group C4) were processed to isolate primary motor cortex (mCTX) samples by laser capture microdissection (LCM), A total of 54 mCTX samples were collected. Each LCM sample contained 900 pyramidal neurons laser captured (LC) from cortical layers V and VI. Samples were processed for HTT mRNA level using RT-qPCR and vector genome (VG) level using ddPCR, as described in Example 1. All samples were blinded during the analysis.

[1237] For HTT mRNA knockdown, the relative HTT mRNA levels in LC neurons from mCTX of AAV1-VOYHT1-treated groups after normalization to vehicle control group are presented in Table 74. The greatest HTT knockdown in LC pyramidal neurons from mCTX (30%) was observed in Group C4 (high dose bilateral putamen+thalamus group), with less HTT knockdown (13%) in Group C3 (medium dose bilateral putamen+thalamus group).

TABLE 74
HTT knockdown in LC neurons from mCTX

| | | HTT mRNA |
|---|---|---|
| | | relative to vehicle |
| Group | Description | (mean ± stdev, N = 3) |
| Group C1 | Vehicle | 100 ± 11 |
| Group C3 | Medium dose | 87 ± 27 |
| Group C4 | High dose | 70 ± 7 |

[1238] For VG levels, LC neurons from mCTX showed a dose-associated increase in VG copies per cell, as shown in Table 75, The number of VG copies per cell reached approximately 20 copies/cell in Group C4 (high dose bilateral putamen+thalamus group), and 10 copies/cell in Group C3 (medium dose bilateral putamen-F-thalamus group). Thus, VG copies tracked with HTT mRNA knockdown such that a higher number of VG copies corresponded to greater HTT mRNA knockdown

TABLE 75
VG levels in LC neurons from mCTX

| | | VG copies/cell |
|---|---|---|
| Group | Description | (mean ± stdev, N = 3) |
| Group C1 | Vehicle | 0.15 ± 0.03 |
| Group C3 | Medium dose | 9.61 ± 1.59 |
| Group C4 | High dose | 21.6 ± 0.74 |

[1239] vi. HTT Knockdown and VG Measurement in LC Neurons from AUIP ssCTX

[1240] Selected brain slabs from three groups (Group C1, Group C3 and Group C4) were processed to isolate somatosensory cortex (ssCTX) samples by laser capture microdissection (LCM), A total of 90 ssCTX LCM samples were collected. Each LCM sample contained 900 pyramidal neurons laser captured (LC) from cortical layers V and VI. Samples were processed for HTT mRNA level using RI-qPCR and vector genome (VG) level using ddPCR, as described in Example 1. All samples were blinded during the analysis.

[1241] For HTT mRNA knockdown, the relative HTT mRNA levels in LC neurons from ssCTX of AAV1-VOYHT1-treated groups after normalization to vehicle control group are presented in Table 76. The greatest HTT knockdown in LC pyramidal neurons from ssCTX (33%) was observed in Group C4 (high dose bilateral putamen+thalamus group), with less HTT knockdown (13%) in Group C3 (medium dose bilateral putamen+thalamus group).

TABLE 76
HTT knockdown in LC neurons from ssCTX

| | | HTT mRNA |
|---|---|---|
| | | relative to vehicle |
| Group | Description | (mean ± stdev, N = 3) |
| Group C1 | Vehicle | 100 ± 8 |
| Group C3 | Medium dose | 86 ± 24 |
| Group C4 | High dose | 67 ± 11 |

[1242] For VG levels, LC neurons from ssCTX showed a dose-associated increase in VG copies per cell, as shown in Table 77. The number of VG copies per cell reached approximately 33 copies/cell in the Group C4 (high dose bilateral putamen-thalamus group), and 7 copies/cell in Group C3 (medium dose bilateral putamen+thalamus group). Thus, VG copies tracked with HTT mRNA knockdown such that a higher number of VG copies corresponded to greater HTT mRNA knockdown,

TABLE 77
VG levels in LC neurons from ssCTX

| | | VG copies/cell |
|---|---|---|
| Group | Description | (mean ± stdev, N = 3) |
| Group C1 | Vehicle | 0.77 ± 0.89 |
| Group C3 | Medium dose | 7.01 ± 2.98 |
| Group C4 | High dose | 32.72 ± 37.37 |

[1243] The LCM results demonstrated that combined bilateral putaminal and thalamic infusion of AAV1-VOYHT1 resulted in VG delivery and HTT mRNA knockdown in motor and somatosensory cortical pyramidal neurons in medium and high dose groups, with greater vector genome delivery and greater HTT mRNA knockdown in the high dose group.

[1244] vii. HTT Knockdown and VG Measurement in Punches from Combined NHP mCTX and ssCTX

[1245] Two selected brain slabs containing the motor and somatosensory cortex from all four groups were used to collect 2 mm primary motor cortex (mCTX) and somatosensory cortex (ssCTX) punches. Six mCTX and 6 ssCTX punches were collected per animal, with a total number of 144 punches collected. Equal numbers of punches were collected from each side of the cortex. Samples were processed and analyzed for HTT mRNA and vector genome (VG) using bDNA and ddPCR, respectively, bDNA and ddPCR were carried out as described in Example 1. All samples were blinded during the analysis.

[1246] For HTT mRNA knockdown, the relative HTT mRNA levels in LC neurons from combined mCTX and ssCTX in the AAV1-VOYHT1-treated groups after normalization to the vehicle control group are presented in Table 77. An average of 16% HTT knockdown was observed in cortical punches from Group C4 (high dose bilateral putamen+thalamus group). HTT knockdown was dose-proportional (2.25×greater dose resulted in 2.28×greater knockdown) based on Groups C3 and C4. The percentage of punches that exhibited over 20% HTT knockdown in each group is also shown in Table 78. 39% of combined mCTX and ssCTX punches showed ≥20% HTT knockdown, but 72% of mCTX punches showed ≥20% HTT knockdown. Greater HTT knockdown was observed in the high dose putamen+thalamus Group C4 than in the thalamus only Group C2, suggesting that putamen infusion of AAV1-VOYHT1 contributes to HTT knockdown in motor and somatosensory cortex. With thalamus only infusion of AAV1-VOYHT1 (Group C2), there was no significant HTT knockdown in motor and somatosensory cortex.

TABLE 78
HTT knockdown in combined mCTX and ssCTX punches

| | | HTT mRNA relative to | % Punches ≥ |
|---|---|---|---|
| Group | Description | vehicle (% ± stdev, N = 3) | 20% KD |
| Group C1 | Vehicle | 100 ± 8 | 0 |
| Group C2 | Thalamus Only | 93 ± 3 | 14 |
| Group C3 | Medium dose | 93 ± 13 | 11 |
| Group C4 | High dose | 84 ± 5 | 39 |

[1247] For VG levels, results are summarized in Table 79. VG levels were dose-dependent and dose-proportional (2.25×greater dose resulted in 3-fold higher vector genome level) for putamen+thalamus groups C3 and C4. Higher VG copies were detected in mCTX than in ssCTX in each group. Higher VG copies were detected in the Group C4 group (high dose putamen thalamus) than in the Group C2 group (thalamus only), suggesting that putamen infusion of AAV1-VOYHT1 contributes to VG copies in motor and somatosensory cortex. VG copies correlated with HTT mRNA knockdown in the punch analysis.

TABLE 79
VG levels in combined mCTX and ssCTX punches

| | | VG copies/cell |
|---|---|---|
| Group | Description | (mean ± stdev, N = 3) |
| Group C1 | Vehicle | 0.02 ± 0.04 |
| Group C2 | Thalamus only | 10.15 ± 4.14 |
| Group C3 | Medium dose | 10.98 ± 6.69 |
| Group C4 | High dose | 22.67 ± 10.69 |

[1248] viii. HTT Knockdown and VG Measurement in Punches from NHP mCTX

[1249] Two selected brain slabs containing the motor cortex from all four groups were used. to collect 2 mm primary motor cortex (mCTX) punches. Six mCTX punches were collected per animal, with a total number of 72 punches collected. Equal numbers of punches were collected from each side of the cortex. Samples were processed and analyzed for HTT mRNA and vector genome (VG) using bDNA and ddPCR, respectively. bDNA and ddPCR were carried out as described in Example 1. All samples were blinded during the analysis.

[1250] For HTT mRNA knockdown, the relative HTT mRNA levels in mCTX punches of AAV1-VOYHT1-treated groups after normalization to vehicle control group are presented in Table 80, The greatest HTT knockdown (28%) was observed in Group C4 (high dose bilateral putamen+thalamus group), with less HTT knockdown (9%) in Group C3 (medium dose bilateral putamen+thalamus group) and Group C2 (10%; thalamus only). While an approximate one-third reduction in HTT mRNA was observed with high dose infusion into bilateral putamen and thalamus, only about a 10% reduction was seen with medium dose infusion into bilateral putamen, as well as with thalamus only infusion.

TABLE 80
HTT knockdown in mCTX punches

| | | HTT mRNA |
|---|---|---|
| | | relative to vehicle |
| Group | Description | (mean ± stdev, N = 3) |
| Group C1 | Vehicle | 100 ± 11 |
| Group C2 | Thalamus only | 90 ± 2 |
| Group C3 | Medium dose | 91 ± 11 |
| Group C4 | High dose | 78 ± 7 |

[1251] For VG levels, mCTX punches showed a dose-associated increase in VG copies/cell, as shown in Table 81. The number of VG copies per cell was approximately 32 copies/cell in Group C4 (high dose bilateral putamen-F-thalamus group), and 14 copies/cell in Group C3 (medium dose bilateral putamen+thalamus group). Similar to Group C3, approximately 13 vg copies/cell were seen in Group C2 (thalamus only). In general, VG levels tracked with HTT mRNA knockdown in mCTX punches such that a higher number of VG copies corresponded to greater HTT mRNA knockdown.

TABLE 81
VG levels in mCTX punches

| | | VG copies/cell |
|---|---|---|
| Group | Description | (mean ± stdev, N = 3) |
| Group C1 | Vehicle | 0.0 ± 0.00 |
| Group C2 | Thalamus only | 12.5 ± 4.8 |
| Group C3 | Medium dose | 13.8 ± 7.1 |
| Group C4 | High dose | 31.8 ± 5.7 |

[1252] ix. HTT Knockdown and VG Measurement in Punches from NHP ssCTX

[1253] Two selected brain slabs containing the somatosensory cortex from all four groups were used to collect 2 mm somatosensory cortex (ssCTX) punches. Six ssCTX punches were collected per animal, with a total number of 72 punches collected. Equal numbers of punches were collected from each side of the cortex. Samples were processed and analyzed for both HTT mRNA and vector genome (VG) using bDNA and ddPCR, respectively. tDNA and ddPCR were carried out as described in Example 1. All samples were blinded during the analysis.

[1254] For mRNA knockdown, the relative HTT mRNA levels in ssCTX punches of AAV1-VOYHT1-treated groups after normalization to vehicle control group are presented in Table 82. The greatest HTT knockdown (9%) was observed in Group C4 (high dose bilateral putamen+thalamus group), with less HTT knockdown (5%) in Group C3 (medium dose bilateral putamen+thalamus group) and Group C2 (4%; thalamus only). HTT mRNA knockdown in Group C4 was approximately double that observed in Groups C3 and C2.

TABLE 82
HTT knockdown in ssCTX punches

| | | HTT mRNA |
|---|---|---|
| | | relative to vehicle |
| Group | Description | (mean ± stdev, N = 3) |
| Group C1 | Vehicle | 100 ± 7 |
| Group C2 | Thalamus only | 96 ± 6 |
| Group C3 | Medium dose | 95 ± 16 |
| Group C4 | High dose | 91 ± 6 |

[1255] For VG levels, mCTX punches showed a dose-associated increase in VG copies per cell, as shown in Table 83. The number of VG copies/cell was approximately 14 copies/cell in Group C4 (high dose bilateral putamen+thalamus group), and 8 copies/cell in Group C3 (medium dose bilateral putamen+thalamus group). Like Group C3, approximately 8 VG copies/cell were seen in Group C2 (thalamus only). VG levels generally tracked with HTT mRNA knockdown in mCTX punches such that a higher number of VG copies corresponded to greater mRNA knockdown.

TABLE 83
VG levels in ssCTX punches

| | | VG copies/cell |
|---|---|---|
| Group | Description | (mean ± stdev, N = 3) |
| Group C1 | Vehicle | 0.0 ± 0.15 |
| Group C2 | Thalamus only | 7.8 ± 1.8 |
| Group C3 | Medium dose | 8.1 ± 6.1 |
| Group C4 | High dose | 13.5 ± 1.5 |

[1256] x. In Situ Hybridization (ISH) for VG and HTT mRNA in NHP Motor and Somatosensory Cortex

[1257] Selected brain slabs containing the motor and somatosensory cortex from Group C1 (vehicle group) and Group C4 (high dose—putamen+thalamus group) animals were processed for in situ hybridization (ISH) using the BaseScope™ Assay to detect vector genome DNA and HTT mRNA as described in Example 1. Images were detected and analyzed under a microscope for vector genome and HTT mRNA levels.

[1258] Extensive VGs were detected in the nucleus of cells at infusion sites (thalamus). VGs were also detected in multiple different layers of motor and somatosensory cortex (mostly pyramidal neurons). Substantial VG signal was detected in the nucleus of motor and sensory cortical neurons layers I-VI after AAV1-VOYHT1 treatment.

[1259] Substantial HTT mRNA reduction was observed in cells at the infusion site (thalamus). Putamen was not significantly contained within the brain slices analyzed for ISH. ISH results demonstrated broad AAV1-VOYHT1 distribution in all NHP cortex layers and infusion sites and confirmed HTT mRNA reduction in these regions. NH results support HTT lowering in motor and somatosensory cortex and transduction of neurons in multiple layers of these regions.

[1260] xi. HTT Knockdown, VG Measurement and AAV1-VOYHT1 specific miRNA Expression in Punches from NHP Putamen

[1261] Two selected brain slabs containing the putamen from all four groups were used to collect 2 mm putamen punches. Five punches were collected from each side of one slab and 3 punches were collected from each side of the other slab, with a total of 16 punches collected from each animal. A total of 192 putamen punches were collected from all 12 animals. Samples were processed and analyzed for HTT mRNA levels and VG levels using bDNA and ddPCR, respectively. bDNA and ddPCR were carried out as described in Example 1. Samples were processed and analyzed for AAV1-VOYHT1 specific miRNA levels using deep sequencing and/or two-step stem-loop real-time quantitative PCR (RT-qPCR) approaches. For the stem-loop RT-qPCR, total RNA was purified (miRvana, catalog#AM1560, ThermoFisher Scientific) from the same punch lysate used to analyze HTT mRNA and VG, and a stem-loop oligonucleotide homologous to the AAV1-VOYHT1 specific miRNA guide strand was used to prime the reverse transcriptase reaction to generate cDNA. Then, forward and reverse primers homologous to AAV1-VOYHT1 specific miRNA and the stem-loop were used for a traditional qPCR reaction (second) step. Both the stem-loop primer and the qPCR probe set were custom-designed for the specific detection of the AAV1-VOYHT1 miRNA guide strand. All samples were blinded during the analysis. Statistical comparison of the data was performed using the one-way ANOVA with Tukey's multiple comparison test. A P value of less than 0.05 indicates a statistically significant difference.

[1262] For HTT mRNA knockdown, the relative HTT mRNA levels in all putamen punches from each AAV1-VOYHT1-treated group after normalization to the vehicle control group are presented in Table 84. Averages of 12%, 61% and 67% of HTT mRNA knockdown were achieved in putamen punches via bilateral thalamus only dosing (Group C2), and medium (Group C3) and high dose (Group C4) of bilateral putamen and thalamus dosing, respectively. Bilateral thalamus only dosing resulted in statistically significant HTT mRNA knockdown in the putamen. The percentage of punches that exhibited over 30% HTT knockdown in each group is also shown in Table 83. Both medium and high doses of bilateral putamen and thalamus dosing resulted in over 60% of putamen punches exhibiting over 30% HTT mRNA knockdown, with the high dose group having all punches exceeding 30% HTT mRNA knockdown.

TABLE 84
HTT knockdown in all putamen punches

| | | Sample | HTT mRNA relative | P value by one-way | % Punches ≥ |
|---|---|---|---|---|---|
| Group | Description | size | to vehicle (% ± stdev) | ANOVA (vs vehicle) | 30% KD |
| Group C1 | Vehicle | 48 | 100 ± 8 | — | 0 |
| Group C2 | Thalamus only | 48 | 88 ± 11 | <0.0001 | 6.3 |
| Group C3 | Medium dose | 48 | 39 ± 17 | <0.0001 | 89.6 |
| Group C4 | High dose | 48 | 33 ± 10 | <0.0001 | 100 |

[1263] The relative HTT mRNA levels analyzed from each animal in the AAV1-VOYHT1-treated groups after normalization to the vehicle control group are presented in Table 85.

TABLE 85
HTT knockdown in putamen punches averaged per animal

| | | | | P value by | P value by | P value by |
|---|---|---|---|---|---|---|
| | | | HTT mRNA | one-way | one-way | one-way |
| | | Sample | relative to vehicle | ANOVA | ANOVA | ANOVA |
| Group | Description | size | (% ± stdev) | (vs vehicle) | (vs Thalamus only) | (vs Medium dose) |
| Group C1 | Vehicle | 3 | 100 ± 6 | — | — | — |
| Group C2 | Thalamus only | 3 | 88 ± 3 | 0.1178 | — | — |
| Group C3 | Medium dose | 3 | 39 ± 8 | <0.0001 | <0.0001 | — |
| Group C4 | High dose | 3 | 33 ± 4 | <0.0001 | <0.0001 | 0.6295 |

[1264] For VG levels, the average number of vector genome copies detected in all putamen punches from each group is presented in Table 86. Averages of 21, 869, and 1211 VG copies per diploid cell were achieved in the putamen punches via bilateral thalamus only, and medium and high dose of bilateral putamen and thalamus dosing, respectively. Both medium and high doses of bilateral putamen and thalamus dosing resulted in significantly higher VG distribution to the putamen than bilateral thalamus only dosing.

TABLE 86
VG copies in all putamen punches

| | | Sample | VG copies/cell |
|---|---|---|---|
| Group | Description | size | (mean ± stdev) |
| Group C1 | Vehicle | 48 | 0.43 ± 1.33 |
| Group C2 | Thalamus only | 48 | 21.03 ± 9.05 |
| Group C3 | Medium dose | 48 | 869.3 ± 846.6 |
| Group C4 | High dose | 48 | 1211 ± 1047.0 |

[1265] The number of vector genome copies analyzed from each animal is presented in Table 87.

TABLE 87
VG copies in putamen punches averaged per animal

| | | Sample | VG copies/cell |
|---|---|---|---|
| Group | Description | size | (mean ± stdev) |
| Group C1 | Vehicle | 3 | 0.39 ± 0.53 |
| Group C2 | Thalamus only | 3 | 21.03 ± 3.72 |
| Group C3 | Medium dose | 3 | 869.3 ± 338.0 |
| Group C4 | High dose | 3 | 1211 ± 540.1 |

[1266] A Grubbs' test (Q=0.1%) was applied for removal of outliers and the VG copies/cell recalculated. Following this post-hoc statistical analysis, VG copies in putamen punches per animal were quantified as 21.0±6.5, 869.3±283.0 and 1210.8±387.3 for groups C2, C3 and C4, respectively.

[1267] The correlation of HTT mRNA knockdown versus vector genome levels in the putamen punches is shown in FIG. 16A. The correlation curve of all putamen punches from all dosing groups results in a dose-response curve with the vehicle group at the top, thalamus only group predominantly at the top shoulder, medium dose group evenly distributed along the slope and the base, and the high dose group predominantly at the base of the curve. The EC₅₀ for HTT knockdown was calculated (Graphpad Prism, nonlinear regression 4 parameter curve fit) at approximately 40 VG per diploid cell (the range is 20-50 VG per diploid cell).

[1268] For miRNA analyses, the average number of AAV1-VOYHT1 specific miRNA copies per cell and corresponding average VG copies per cell, HTT mRNA levels relative to control, and AAV1-VOYHT1 specific miRNA per VG calculation averaged per animal are presented in Table 88. These analyses were performed using a subset of putamen punches, and thus, values presented in Table 88 refer to data from 6 putamen punches per animal (3 per hemisphere) for a total of 72 total samples.

TABLE 88
AAV1-VOYHT1 specific miRNA expression in putamen punches averaged per animal

| | | | miRNA | | HTT mRNA | |
|---|---|---|---|---|---|---|
| | | Sample | copies/cell | VG copies/cell | relative to vehicle | HTT miRNA/VG |
| Group | Description | size | (mean ± stdev) | (mean ± stdev) | (% ± stdev) | (mean ± stdev) |
| Group C1 | Vehicle | 3 | 2.9 ± 4.44 | 0.08 ± 0.21 | 100 ± 9 | 15 ± 32 |
| Group C2 | Thalamus only | 3 | 2283 ± 1495 | 21 ± 7 | 91 ± 8 | 128 ± 107 |
| Group C3 | Medium dose | 3 | 8808 ± 7955 | 793 ± 773 | 44 ± 18 | 44 ± 55 |
| Group C4 | High dose | 3 | 8869 ± 7568 | 1258 ± 1118 | 35 ± 10 | 11 ± 7 |

[1269] The correlation of AAV1-VOYHT1 specific miRNA expression versus vector genome levels in all putamen punches from each treatment group (r=0.8606, p<0.001)) is shown in FIG. 16B. Enhanced VG biodistribution corresponded to increased AAV1-VOYHT1 specific miRNA expression in AAV1-VOYHT1-treated group.

[1270] The correlation of AAV1-VOYHT1 specific miRNA expression versus vector HTT mRNA lowering in all putamen punches from each treatment group (r=−0.6788, p<0.0001) is shown in FIG. 16C. Increased AAV1-VOYHT1 specific miRNA expression corresponded to enhanced HTT mRNA lowering AAV1-VOYHT1-treated group.

[1271] Together, thalamus-only dosing resulted in more modest VG biodistribution, AAV1-VOYHT1 specific miRNA expression, and HTT mRNA lowering in putamen. Combined putamen and thalamus dosing resulted in greater VG biodistribution. AAV1-VOYHT1 specific miRNA expression, and robust HTT mRNA lowering in putamen relative to thalamus only dosing. Finally, AAV1-VOYHT1 specific miRNA expression correlates with VG biodistribution and HTT mRNA lowering.

[1272] xii. HTT Knockdown, VG Measurement and AAV1-VOYHT1 Specific miRNA Expression in Punches from NHP Caudate

[1273] A selected brain slab containing the caudate from all four groups was used to collect 2 mm caudate punches. Two punches were collected from each side of the slab, with a total of 4 punches collected from each animal. A total of 48 caudate punches was collected from all 12 animals. Samples were processed and analyzed for HTT mRNA levels and VG levels using tDNA and ddPCR, respectively. hDNA and ddPCR were carried out as described in Example 1. Samples were processed and analyzed for AAV1-VOYHT1 specific miRNA levels using deep sequencing and/or two-step stein-loop real-time quantitative PCR (RT-qPCR) approaches. For the stem-loop RT-qPCR, total RNA was purified (miRvana, catalog#AM1560, ThermoFisher Scientific) from the same punch lysate used to analyze HTT mRNA and VG, and a stem-loop oligonucleotide homologous to the AAV1-VOYHT1 specific miRNA guide strand was used to prime the reverse transcriptase reaction to generate cDNA. Then, forward and reverse primers homologous to AAV1-VOYHT1 specific miRNA and the stem-loop were used fora traditional qPCR reaction (second) step. Both the stem-loop primer and the qPCR probe set were custom-designed for the specific detection of the AAV1-VOYHT1 miRNA guide strand. All samples were blinded during the analysis. Statistical comparison of the data was performed using the one-way ANOVA with Tukey's multiple comparison test. A P value of less than 0.05 indicates a statistically significant difference.

[1274] For HTT mRNA knockdown, the relative HTT mRNA levels in all caudate punches from each AAV1-ATOYHT1-treated group after normalization to the vehicle control group are presented in Table 89. Averages of 51%, 61% and 68% of HTT mRNA knockdown were achieved in caudate punches via bilateral thalamus only dosing (Group C2), and medium (Group C3) and high dose (Group C4) of bilateral putamen and thalamus dosing, respectively. Bilateral thalamus only dosing caused robust and significant HTT mRNA knockdown (by 51%) in the caudate punches. The percentage of punches that exhibited over 30% HTT knockdown in each group is also shown in Table 88. All three dosing groups (bilateral thalamus only dosing, medium and high dose of bilateral putamen and thalamus dosing) had 92% of caudate punches achieving at least 30% HTT mRNA knockdown.

TABLE 89
HTT knockdown in all caudate punches

| | | Sample | HTT mRNA Relative | P value by one-way | % Punches ≥ |
|---|---|---|---|---|---|
| Group | Description | size | to Vehicle (% ± stdev) | ANOVA (vs vehicle) | 30% KD |
| Group C1 | Vehicle | 12 | 100 ± 6 | — | 0 |
| Group C2 | Thalamus only | 12 | 49 ± 16 | <0.0001 | 92 |
| Group C3 | Medium dose | 12 | 39 ± 15 | <0.0001 | 92 |
| Group C4 | High dose | 12 | 32 ± 15 | <0.0001 | 92 |

[1275] The relative HTT mRNA levels analyzed from each animal in the AAV1-VOYHT1-treated groups after normalization to the vehicle control group are presented in Table 90.

TABLE 90
HTT knockdown in caudate punches averaged per animal

| | | | | P value by | P value by | P value by |
|---|---|---|---|---|---|---|
| | | | HTT mRNA | one-way | one-way | one-way |
| | | Sample | Relative to Vehicle | ANOVA | ANOVA | ANOVA |
| Group | Description | size | (% ± stdev) | (vs vehicle) | (vs Thalamus only) | (vs Medium dose) |
| Group C1 | Vehicle | 3 | 100 ± 6 | — | — | — |
| Group C2 | Thalamus only | 3 | 49 ± 13 | 0.0012 | — | — |
| Group C3 | Medium dose | 3 | 39 ± 11 | 0.0004 | 0.6889 | — |
| Group C4 | High dose | 3 | 32 ± 9 | 0.0002 | 0.2786 | 0.8347 |

[1276] For VG levels, the average number of vector genome copies detected in all caudate punches from each group is presented in Table 91. An average of 44, 146, and 99 vector genome copies per diploid cell was achieved in the caudate punches via bilateral thalamus-only dosing, medium and high doses of bilateral putamen and thalamus dosing, respectively.

TABLE 91
VG copies in all caudate punches

| | | Sample | VG copies/cell |
|---|---|---|---|
| Group | Description | size | (mean ± stdev) |
| Group C1 | Vehicle | 12 | 0.12 ± 0.15 |
| Group C2 | Thalamus only | 12 | 44.18 ± 22.86 |
| Group C3 | Medium dose | 12 | 146.2 ± 200.9 |
| Group C4 | High dose | 12 | 99.22 ± 45.01 |

[1277] The number of vector genome copies analyzed from each animal is presented in Table 92.

TABLE 92
VG copies in caudate punches per animal

| | | Sample | VG copies/cell |
|---|---|---|---|
| Group | Description | size | (mean ± stdev) |
| Group C1 | Vehicle | 3 | 0.10 ± 0.05 |
| Group C2 | Thalamus only | 3 | 44.18 ± 10.16 |
| Group C3 | Medium dose | 3 | 146.2 ± 182.9 |
| Group C4 | High dose | 3 | 99.22 ± 29.22 |

[1278] A Grubbs' test (Q=0.1%) was applied for removal of outliers and the VG copies/cell in caudate recalculated. Following this post-hoc statistical analysis, VG copies in caudate punches per animal were quantified as 44.2±10.2, 107.4±116.0 and 99.2±29.2 for groups C2, C3 and C4, respectively.

[1279] The correlation of HTT mRNA knockdown versus vector genome levels in the caudate punches is shown in FIG. 17A. The correlation curve of all caudate punches from all dosing groups results in a dose-response curve with the vehicle group at the top, and all other dosing groups dispersed along the slope and beginning of the base of the curve. The EC₅₀ for HTT knockdown was calculated (Graphpad Prism, nonlinear regression 4 parameter curve fit) at approximately 23 VG per diploid cell (the range is 20-50 VG per diploid cell).

[1280] For miRNA analyses, the average number of AAV1-VOYHT1 specific miRNA copies per cell and corresponding average VG copies per cell, HTT mRNA levels relative to control, and AAV1-VOYHT1 specific miRNA per VG calculation averaged per animal are presented in Table 93. These analyses were performed using a subset of caudate punches, and thus, values presented in Table 93 refer to data from 4 putamen punches per animal (2 per hemisphere) for a total of 48 total samples.

TABLE 93
AAV1-VOYHT1 specific miRNA expression in canduate punches averaged per animal

| | | | | | HTT mRNA | |
|---|---|---|---|---|---|---|
| | | | miRNA | | relative to | |
| | | Sample | copies/cell | VG copies/cell | vehicle | HTT miRNA/VG |
| Group | Description | size | (mean ± stdev) | (mean ± stdev) | (% ± stdev) | (mean ± stdev) |
| Group C1 | Vehicle | 3 | 1.5 ± 0.53 | 0.05 ± 0.11 | 100 ± 6 | 10 ± 19 |
| Group C2 | Thalamus only | 3 | 3535 ± 1050 | 44 ± 10 | 49 ± 13 | 90 ± 35 |
| Group C3 | Medium dose | 3 | 3730 ± 1944 | 146 ± 183 | 39 ± 11 | 62 ± 55 |
| Group C4 | High dose | 3 | 4468 ± 1356 | 99 ± 29 | 32 ± 9 | 51 ± 20 |

[1281] The correlation of AAV1-VOYHT1 specific miRNA expression versus vector genome levels in all caudate punches from each treatment group (r=0.6782, p<0.0001) is shown. in FIG. 17B, Enhanced VG biodistribution corresponded to increased AAV1-VOYHT1 specific miRNA expression in AAV1-VOYHT1-treated group. A Grubbs' test (Q=0.1%) was used to detect significant outliers when vector genome level data from animal groups in Dose Optimization Study III were combined with those from Dose Optimization Study I, as above. A positive relationship between AAV1-VOYHT1 specific miRNA expression versus vector genome levels in caudate punches from each treatment group remained following the removal of one outlier value from the correlation analysis shown in FIG. 17B (r=0.7452, p<0.001). Following removal of all outliers, VG copies/cell (mean±stdev) in caudate punches for Groups A2, A3, A5 and C3 to 1.8±0.5. 10.7±10.3, 0.3±0.2 and 107.4±116.0 VG copies/cell, respectively.

[1282] The correlation of AAV1-VOYHT1. specific miRNA expression versus vector HTT mRNA lowering in all caudate punches from each treatment group (r =−0.8798, p<0.0001) is shown in FIG. 17C. Increasing AAV1-VOYHT1 specific miRNA expression corresponded to enhanced HTT mRNA lowering AAV1-VOYHT1-treated group.

[1283] Together, thalamus-only dosing resulted in significant VG biodistribution, significant AAV1-VOYHT1 specific miRNA expression, and substantial HTT mRNA lowering in caudate. Combined putamen and thalamus dosing resulted in greater VG biodistribution, AAV1-VOYHT1 specific miRNA expression, and robust HTT mRNA lowering in caudate compared with thalamus-only dosing. Finally, AAV1-VOYHT1 specific miRNA expression correlates with VG biodistribution and HTT mRNA lowering.

[1284] xiii. HTT Knockdown and VG Measurement in Punches from NHP Thalamus

[1285] A selected brain slab containing the thalamus from all four groups was used to collect 2 mm thalamus punches, Five punches were collected from each side of the slab, with a total of 10 punches collected from each animal. A total number of 120 thalamus punches were collected from all 12 animals. Samples were processed and analyzed for HTT mRNA levels and VG levels using bDNA and ddPCR, respectively. bDNA and ddPCR were carried out as described in Example 1. All samples were blinded during the analysis. Statistical comparison of the data was performed using the one-way ANOVA with Tukey's multiple comparison test. A P value of less than 0.05 indicates a statistically significant difference.

[1286] For HTT mRNA knockdown, the relative HTT mRNA levels in all thalamus punches from the AAV1-VOYHT1-treated groups after normalization to the vehicle control group are presented in Table 94. Averages of 76%, 76% and 73% of HTT mRNA knockdown were achieved in the thalamus punches via bilateral thalamus only dosing (Group C2), and medium (Group C3) and high dose (Group C4) of bilateral putamen and thalamus dosing, respectively. The percentage of punches that exhibited over 30% HTT knockdown in each group is also shown in Table 94. 100% of the thalamus punches achieved at least 30% of HTT mRNA KD for all three dosing groups.

TABLE 94
HTT knockdown in all thalamus punches

| | | Sample | HTT mRNA relative | P value by one-wav | % Punches ≥ |
|---|---|---|---|---|---|
| Group | Description | size | to vehicle (% ± stdev) | ANOVA (vs vehicle) | 30% KD |
| Group C1 | Vehicle | 30 | 100 ± 8 | — | 0 |
| Group C2 | Thalamus only | 30 | 24 ± 5 | <0.0001 | 100 |
| Group C3 | Medium dose | 30 | 24 ± 9 | <0.0001 | 100 |
| Group C4 | High dose | 30 | 27 ± 5 | <0.0001 | 100 |

[1287] The relative HTT mRNA levels analyzed from each animal in the AAV1-VOYHT1-treated groups after normalization to the vehicle control group are presented in Table 95.

TABLE 95
HTT knockdown in thalamus punches averaged per animal

| | | | HTT mRNA | P value by | P value by | P value by |
|---|---|---|---|---|---|---|
| | | | Relative to | one-wav | one-way | one-way |
| | | Sample | Vehicle | ANOVA | ANOVA | ANOVA |
| Group | Description | size | (% ± stdev) | (vs vehicle) | (vs Thalamus only) | (vs Medium dose) |
| Group C1 | Vehicle | 3 | 100 ± 3 | — | — | — |
| Group C2 | Thalamus only | 3 | 24 ± 4 | <0.0001 | — | — |
| Group C3 | Medium dose | 3 | 24 ± 5 | <0.0001 | 0.9995 | — |
| Group C4 | High dose | 3 | 27 ± 2 | <0.0001 | 0.7505 | 0.8081 |

[1288] For VG levels, the average number of vector genome copies detected in all thalamus punches from each group is presented in Table 96. Similar levels of vector genome copies in all 3 treatment groups were observed. Averages of 2015, 1704, 2747 vector genome copies per diploid cell were achieved in the thalamus punches via bilateral thalamus-only dosing, medium and high dose of bilateral putamen and thalamus dosing, respectively.

TABLE 96
VG copies in all thalamus punches

| | | Sample | VG copies/cell |
|---|---|---|---|
| Group | Description | size | (mean ± stdev) |
| Group C1 | Vehicle | 30 | 0.13 ± 0.27 |
| Group C2 | Thalamus only | 30 | 2015 ± 1088 |
| Group C3 | Medium dose | 30 | 1704 ± 741.9 |
| Group C4 | High dose | 30 | 2747 ± 896.1 |

[1289] The number of vector genome copies analyzed from each animal is presented in Table 97.

TABLE 97
VG copies in thalamus punches averaged per animal

| | | Sample | VG copies/cell |
|---|---|---|---|
| Group | Description | size | (mean ± stdev) |
| Group C1 | Vehicle | 3 | 0.13 ± 0.07 |
| Group C2 | Thalamus only | 3 | 2015 ± 310.9 |
| Group C3 | Medium dose | 3 | 1704 ± 467.3 |
| Group C4 | High dose | 3 | 2747 ± 691.2 |

[1290] The correlation of HTT mRNA knockdown versus vector genome levels in the thalamus punches is shown in FIG. 18. All dosing groups achieved similar vector genome copies per cell and similar knockdown efficiency in punches from the thalamus. The correlation plot of all thalamus punches from all dosing groups shows the vehicle group in the top left and all other dosing groups mostly overlapping one another in the far right of the base. The EC₅₀ calculations were ambiguous due to the presence of predominantly fully positive and negative populations.

[1291] In summary, the punch analyses from the putamen, caudate, and thalamus reveal that substantial HTT mRNA knockdown was achieved at the infusion sites (putamen and thalamus) as well as in the caudate in all three dosing groups (thalamus-only dosing, and medium and high doses of bilateral putamen and thalamus dosing). Further, vector genome levels correlate well with HTT mRNA knockdown in the putamen, caudate and thalamus with evidence for a plateau in knockdown at high vector genome levels.

[1292] xiv. Clinical Signs and Histopathology

[1293] In 7 out of 9 NHPs that received AAV1-VOYHT1, no clinical signs or limb findings were observed post-infusion. In the other two NHPs, shortened steps and slight limb finding were observed. However, no histopathological changes were seen which would account for, or correlate with these clinical signs. Histopathologic findings associated with catheter tip and/or track were expected due to the surgical procedure, but none resulted in any specific clinical sign. Minimal findings at the thalamic sites of infusion were expected and included gliosis, neuronal degeneration, glial cell vacuolation and mononuclear cell infiltration that were slightly more widespread than in putamen. None was expected to result in any clinical signs. Edema was only observed adjacent to the catheter track, suggesting that volumes were well-tolerated. No evidence of detrimental effect on neurons of the somatosensory or motor cortices was seen in any group. These findings suggest that the no-observed-adverse-effect-level (NOAEL) is, at a minimum, AAV1-VOYHT1 administered at the high dose via putamen and thalamus infusion (see Group C4).

### Example 4

### Formulation Optimization

[1294] Initial formulation screening identified a Phosphate/Sucrose/NaCl formulation (2.7 mM Na Phosphate (dibasic), 1.54 mM K Phosphate (mono), 155 mM NaCl, and 5% (w/v) Sucrose at pH 7.2, 450 mOsm/kg) as an acceptably stable formulation for the AAV1-VOYHT1 vector. High salt formulations were also identified as stabilizing.

[1295] The formulation was further optimized for excipients, Na/K ratios, pH, and osmolality while adjusting for factors suitable for CNS administration. Three solutions that may be used to formulate the AAV1-VOYHT1 vector are presented in Table 98.

TABLE 98
Formulations for AAV1-VOYHT1 vector

| Formulation 1 | Formulation 2 | Formulation 3 |
|---|---|---|
| 10 mM Sodium Phosphate | 10 mM Tris Base | 10 mM Tris Base |
| 1.5 mM Potassium Phosphate | 6.25 mM HCl | 8.95 mM HCl |
| 95 mM Sodium Chloride | 1.5 mM Potassium Chloride | 1.5 mM Potassium Chloride |
| 7% (w/v) Sucrose | 100 mM Sodium Chloride | 100 mM Sodium Chloride |
| 0.001% (w/v) Pluronic ® F-68 | 7% (w/v) Sucrose | 7% (w/v) Sucrose |
| pH 7.4 ± 0.2 at 5° C. | 0.001% (w/v) Pluronic ® F-68 | 0.001% (w/v) Pluronic ® F-68 |
| | pH 8.0 ± 0.2 at 5° C. | pH 7.5 ± 0.2 at 5° C. |

[1296] The concentration of the AAV1-VOYHT1 vector to be formulated in the above identified solutions is about 2.7e13 vg/mL, but the concentration may be increased up to 5e13 vg/ml. High concentration AAV1-VOYHT1 vectors were shown to be difficult to stabilize in the absence of aggregation. Analysis of a formulation screen indicated that an increase in sucrose level generally improves vector stability and prevents aggregation. Sucrose levels from about 5% to 9% provided good stability for the AAV1-VOYHT1 vector, with the optimal concentration at about 7% sucrose for the tested vector and desired formulation. concentration. The level of sucrose use may be limited by physiological osmolality. Furthermore, higher osmolality and/or more NaCl were shown to be favorable for vector stability.

### Example 5

### Administration of AAV1-VOYHT1 to HD Patients

[1297] AAV1-VGYHT1 vectors formulated in an appropriate formulation identified in Example 4 are administered into a Stage 1 HD patient via bilateral parenchymal infusion to the putamen and thalamus using MRI-guided convection enhanced delivery (CED). The concentration of AAV1-VOYHT1 vectors in the formulated solution to be infused is between 2.7e12 to 2.7e13 vg/mL. The volumes of AAV1-VOYHT1 infused to the putamen and thalamus are 300-1500 μL/hemisphere and 1300-2500 μL/hemisphere, respectively. The doses administered to the putamen and the thalamus are 8e1l to 4e13 vg/hemisphere and 3.5e12 to 6.8e13 vg/hemisphere, respectively. The total dose administered to the patient is about 8.6e12 to 2e14 vg. The AAV1-VOYHT1 treatment results in significant reduction in HTT mRNA levels in the striatum and cortex of the patient.

### Example 6

### Minimal Effective Dose (MED) Study

[1298] i. Study design

[1299] As an extension of Example 1 (Dose Optimization Study I) above, this study interrogates the pharmacological activity profile of low doses of AAV1-VOYHT1; SEQ ID NO for VOYHT1: 1352 formulated in an aqueous solution containing 7% sucrose, within striatum, cortex, and thalamus of rhesus macaques, to identify a minimally effective dose or minimum efficacious dose (MED), or minimally effective concentration (MEC), fir extrapolation to a clinical dosing paradigm. MED/MEC safety margins are assessed toward specific development of a therapeutic for the treatment of early symptomatic and/or prodromal Huntington's disease (HD). Aims of the study include achieving target HTT lowering (mRNA knockdown) in brain regions, e.g. striatum, cortex, and thalamus and, in particular, cortical neurons with a MED.

[1300] To guide MED study parameters and to evaluate safety and biodistribution of VY-HTT01 a No Observed Adverse Effect Level (NOEFL) dose is evaluated and identified in adult rhesus macaques (Macaw mulatta). Animals (N=48) are pre-screened for inclusion in the NOEFL evaluation using capsid specific anti-AAV1 antibodies. Test article containing AAV1-VOYHT1, or a vehicle control is delivered by the intended route of administration for clinical trial, e.g., bilateral intraparenchymal infusions into the putamen (posterior) and thalamus (prefrontal), using magnetic resonance imaging (MRI)-guided convection-enhanced delivery (CED) and a stereotactic device. Doses of test article to be tested range from 0 vg/animal (vehicle) to 2.24×10¹³ vg/mL (AAV1-VOYHT1). Together, the three AAV1-VOYHT1 doses (low-, mid-, and high-dose) are 2.24×10¹² vg/animal (4.2×10¹¹ vg/putamen, 7.0×10¹¹ vg/thalamus), 6.44×10¹² vg/mL (1.22×10¹² vg/putamen, 2.0×10¹² vg/thalamus), and 2.24e13 vg/mL (4.2×10¹² vg/putamen, 7.0×10¹² vg/thalamus). The infusion parameters for putamen are: 1-5 μL/min (rate); 10-28 min (duration) for a sum of 54 min; and 16-84 μL (volume) for a sum of 150 μL. The infusion parameters for thalamus are: 1-5 μL/min (rate); 15-50 min (duration) for a sum of 90 min; and 25-150 μL for a sum of 250 μL. Clinical signs are periodically evaluated across the lifespan. Animals are euthanized 5, 13, 26, or 53 weeks after dosing, and nervous and other tissues are collected for post-mortem analysis. Biodistribution of viral genomes, micro RNA levels, reduction in HTT mRNA, reduction in HTT protein, and histology of the brain are evaluated across timepoints.

[1301] For the MED study, a total of 12 animals is used. Each animal is assigned to 1 of 4 treatment groups as summarized in Table 99, Animals receive bilateral intraparenchymal infusions of the test article containing AAV1-VOYHT1 or a vehicle control into the putamen (posterior) and thalamus (prefrontal) using magnetic resonance imaging (MRI)-guided convection-enhanced delivery (CED). A Functional Observation Battery (FOB) evaluation focusing on neurological status is carried out prior to dosing with test article or vehicle. The same FOB is performed at post-infusion time-points, e.g., 7 and 93 days, as well as weekly during the lifespan if warranted. Animals are euthanized 13 weeks after dosing, and tissues are collected for post-mortem analyses.

TABLE 99
Dilutions and dosing solutions

| | | | Target site | | |
|---|---|---|---|---|---|
| | | | per hemisphere | | |
| | Number | Dosing | (vol. and total vg) | | |
| | of | Titer | Putamen | Thalamus | Total dose |
| Test article | animals | (vg/ml) | (150 μL) | (250 μL) | (vg/animal) |
| Vehicle | 1 M/2 F | 0 | 0 | 0 | 0 |
| VY-HTT01 | 2 M/1 F | 1.9e11 | 2.85e10 | 4.75e10 | 1.5e11 |
| | 1 M/2 F | 5.7e11 | 8.6e10 | 1.4e11 | 4.5e11 |
| | 2 M/1 F | 2.8e12 | 4.2e11 | 7e11 | 2.2e12 |

[1302] For post-mortem analysis of tissue, biodistribution of vector genomes is assessed in 22 sections of brain, laser-captured cortical neurons, and in highly perfused tissues (e.g., heart, lung, liver, spleen, kidney, and draining lymph node). MicroRNA and mRNA are also assessed in 22 sections of brain including those sampled from striatum (caudate and putamen), thalamus, and cortex. mRNA is measured in laser-captured cortical neurons. HTT protein is measured in striatum, thalamus, cortex and biofluids, e.g., cerebrospinal fluid (CSF). Histology is performed in brain and highly perfused tissues possessing at least 50 copies/μg genomic DNA.

[1303] Human equivalent doses can be calculated based on the results of this study.

[1304] Detailed methods are as described above in Example 1.

### Example 7

### HTT Protein and mRNA Evaluation in NHP Putamen, Thalamus, and Caudate

[1305] i. Study Design

[1306] As an extension of Example I (Dose Optimization Study I) and of Example 3 (Dose Optimization Study III), described in detail above, this study was designed to measure HTT protein and mRNA levels in tissue punches from putamen, caudate and thalamus five weeks following bilateral combined intraputaminal and intrathalamic infusion of different doses of AAV1-VOYHT1 (herein referred to as AAV1-VOYHT1 or VY-HTT01, SEQ ID NO for VOYHT1: 1352) in non-human primate (NHP) rhesus macaque (Macaca mulatto).

[1307] This study involved five groups of animals selected from Examples 1. and 3 (above), in order to span an approximately 100-fold range of total VY-HTT01, with approximately 10-fold dose increments, Animal study groups, including detailed dosing parameters, are presented in Table 100.

TABLE 100
Study design

| | | | | | Dosing | Total |
|---|---|---|---|---|---|---|
| | Number of | | Volume μL/side) | | titer | dose |
| Group | animals | Description | Putamen | Thalamus | (VG/mL) | (VG) |
| Group A6 | 3 | Vehicle | Left: 100 | Left: 150 | 0.0 | 0.0 |
| | | | Right: 150 | Right: 250 | | |
| Group A5 | 3 | Mid vol, low conc | 100 | 150 | 2.7e11 | 1.35e11 |
| Group A2 | 3 | Mid vol, high conc | 100 | 150 | 2.7e12 | 1.35e12 |
| Group C1b | 3 | Vehicle | 150 | 250 | 0.0 | 0.0 |
| Group C4 | 3 | High vol, high conc | 150 | 250 | 2.2e13 | 1.78e13 |

[1308] Apart from quantitation of HTT protein by UPLC-MS/MS (Ultra performance liquid chromatography-mass spectrometry and liquid chromatography-tandem mass spectrometry), or LC-MS/MS, as outlined below, detailed methods are as described above in Example 1.

[1309] ii. LC-MS/MS for Quantitation of HTT Protein

[1310] Monkey brain tissue punches from putamen, caudate, and thalamus after bilateral, combined intraspinal and intrathalamic injection of VY-HTT01 doses, as described above in Example 1, were weighed and pulverized into a dry tissue powder for subsequent quantitation of HTT protein by UPLC-MS/MS, or LC-MS/MS. HTT protein levels were measured based on a representative HTT peptide derived from a trypsin digestion procedure, and normalized to the levels of actin. Briefly, pulverized brain tissue powders were homogenized in tissue protein extraction reagent. The homogenates were centrifuged and then supernatants (lysates) were reduced, denatured, and alkylated with iodoacetamide. The alkylated samples were treated with trypsin to generate a HTT peptide. Concentrations of the HTT peptide were measured in the digested samples by LC-MS/MS. The calibration curves of the LC-MS/MS method were prepared with synthetic peptides, Corresponding mass-shifted, stable isotope-labeled peptides were employed as internal standards. A high resolution SCIEX Triple TOF 6600 LC-MS/MS system with Analyst and MultiQuant software was used for quantitation. The signature peptide levels measured in the digested samples (ng/mL) were converted to protein concentrations by molecular weight. The HTT protein concentrations were corrected for sample work up and reported in ng/mg actin.

[1311] ii. Putamen HTT Protein and mRNA Levels

[1312] To evaluate HTT protein and mRNA levels in the putamen, 4 tissue punches were collected from the putamen in the right hemisphere, resulting in a total of 12 punches per VY-HTT01 group, and 24 punches for two vehicle groups. As described above, putamen tissue punch powders were used for HTT and actin protein analysis by LC-MS/MS. HTT protein levels were normalized to the levels of actin, and then further normalized to the vehicle group. The average relative remaining putamen HTT protein and relative putamen HTT protein knockdown (KD), expressed as a percentage of vehicle (veh), as well as p-values generated by one-way ANOVA with Tukey's multiple comparisons, are presented in Table 101.

TABLE 101
HTT protein lowering in NHP putamen

| | | | Relative | | P value by | P value by | P value by |
|---|---|---|---|---|---|---|---|
| | | Total | remaining | | one-way | one-way | one-way |
| | Number of | dose | HTT protein | HTT protein KD | ANOVA | ANOVA | ANOVA |
| Group | animals | (VG) | (% of veh ± stdev) | (% of veh ± stdev) | (vs Group A5) | (vs Group A2) | (vs Group C4) |
| Group A6 | 3 | 0.0 | 100 ± 6 | 0 ± 6 | 0.0265 | <0.0001 | <0.0001 |
| Group C1b | 3 | 0.0 | | | | | |
| Group A5 | 3 | 1.35e11 | 81 ± 12 | 19 ± 12 | — | 0.0002 | 0.0001 |
| Group A2 | 3 | 1.35e12 | 38 ± 2 | 62 ± 2 | — | — | 0.9966 |
| Group C4 | 3 | 1.78e13 | 37 ± 11 | 63 ± 11 | — | — | — |

[1313] A significant and dose-dependent HTT protein reduction was achieved in the putamen after bilateral intraputaminal and intrathalamic infusion of different total doses of VY-HTT01. Specifically, on average, there was 63%, 62%, and 19% HTT protein KD for group C4 (1.78×10¹³ VG, or VG per animal), group A2 (1.35×10¹² VG), and group A5 (1.35×10¹¹ VG), respectively, relative to the vehicle group (groups A6 and C1b).

[1314] HTT protein KD was statistically significant (P<0.05 by one-way ANOVA with Tukey's multiple comparisons test) at all doses of VY-HTT01. versus vehicle, with the highest dose of 1.78×10¹³ VG, or VG per animal (group C4), resulting in statistically greater HTT protein KD (P<0.001 by one-way ANOVA with Tukey's multiple comparisons test) than was achieved with a total dose of 1.35×10¹¹VG per animal (group A5). In addition, the second highest dose of 1.35×10¹² VG per animal (group A2) resulted in statistically greater HTT protein KD (P<0.001 by one-way ANOVA with Tukey's multiple comparisons test) than the lowest dose (1.35×10¹¹ VG per animal) evaluated. There was no statistically significant difference in HTT protein KD between the two highest total doses (1.78×10¹³ and 1.35×10¹² VG per animal) tested.

[1315] HTT mRNA levels in the putamen were also measured by the bDNA assay, as described in Example 1, in the same putamen punches used for HTT protein quantitation, using the specific probe set against rhesus HTT, TBP, AARS and XPNPEP1. HTT mRNA levels were normalized to the geometric mean of the three housekeeping genes TBP, AARS and XPNPEP1, and then further normalized to the vehicle group. The average relative remaining putamen HTT mRNA and relative putamen HTT mRNA knockdown (KD), expressed as a percentage of vehicle (veh), as well as p-values generated by one-way ANOVA with Tukey's multiple comparisons, are presented in Table 102.

TABLE 102
HTT mRNA lowering in NHP putamen

| | | | Relative | | P value by | P value by | P value by |
|---|---|---|---|---|---|---|---|
| | | Total | remaining | | one-way | one-way | one-way |
| | Number of | dose | HTT mRNA | HTT mRNA KD | ANOVA | ANOVA | ANOVA |
| Group | animals | (VG) | (% of veh ± stdev) | (% of veh ± stdev) | (vs Group A5) | (vs Group A2) | (vs Group C4) |
| Group A6 | 3 | 0.0 | 100 ± 4 | 0 ± 4 | 0.004 | <0.0001 | <0.0001 |
| Group C1b | 3 | 0.0 | | | | | |
| Group A5 | 3 | 1.35e11 | 77 ± 7 | 23 ± 7 | — | 0.0007 | 0.0006 |
| Group A2 | 3 | 1.35e12 | 43 ± 14 | 57 ± 14 | — | — | 0.9995 |
| Group C4 | 3 | 1.78e13 | 42 ± 3 | 58 ± 3 | — | — | — |

[1316] A significant and dose-dependent HTT mRNA reduction was achieved in the putamen after bilateral intraputaminal and intrathalamic infusion of different total doses of VY-HTT01. Specifically, on average, there was 58%, 57% and 23% HTT mRNA KD for group C4 (total 1.78×10¹³ VG per animal), group A2 (total 1.35×10¹² VG per animal) and group A5 (total 1.35×10¹¹ VG per animal), respectively, relative to the vehicle groups (groups A6 and C1b). The HTT mRNA KD was statistically significant (P<0.01 by one-way ANOVA with Tukey's multiple comparisons test) at all doses of VY-HTT01 versus vehicle, with the highest dose of 1.78×10¹³ VG per animal resulting in statistically greater HTT mRNA KD (P<0.001 by one-way ANOVA with Tukey's multiple comparisons test) than was achieved with a total dose of 1.35×10¹¹ VG per animal. In addition, the second highest dose of 1.35×10¹² VG per animal resulted in statistically greater HTT mRNA KD (P<0.001 by one-way ANOVA with Tukey's multiple comparisons test) than the lowest dose (1.35×10¹¹ VG per animal) evaluated. There was no statistically significant difference in HTT mRNA KD between the two highest total doses (1.35×10¹² and 1.78×10¹³ VG per animal) evaluated.

[1317] iv. Caudate HTT Protein and mRNA Levels

[1318] To evaluate HTT protein and mRNA levels in the caudate, 4 punches were collected from each animal (2 per hemisphere) for HTT and actin protein analysis by LC-MS/MS, resulting in a total of 12 punches per VY-HTT01 treatment group, and 24 punches for two vehicle groups. HTT protein levels were normalized to the levels of actin, and then further normalized to the vehicle group. The average relative remaining caudate HTT protein and relative caudate HTT protein knockdown (KD), expressed as a percentage of vehicle (veh), as well as p-values generated by one-way ANOVA with Tukey's multiple comparisons, are presented in Table 103.

TABLE 103
HTT protein lowering in NHP caudate

| | | | Relative | | P value by | P value by | P value by |
|---|---|---|---|---|---|---|---|
| | | Total | remaining | | one-way | one-way | one-way |
| | Number of | dose | HTT protein | HTT protein KD | ANOVA | ANOVA | ANOVA |
| Group | animals | (VG) | (% of veh ± stdev) | (% of veh ± stdev) | (vs Group A5) | (vs Group A2) | (vs Group C4) |
| Group A6 | 3 | 0.0 | 100 ± 8 | 0 ± 8 | 0.8702 | 0.204 | 0.0004 |
| Group C1b | 3 | 0.0 | | | | | |
| Group A5 | 3 | 1.35e11 | 94 ± 12 | 6 ± 12 | — | 0.649 | 0.0037 |
| Group A2 | 3 | 1.35e12 | 84 ± 16 | 16 ± 16 | — | — | 0.0256 |
| Group C4 | 3 | 1.78e13 | 54 ± 9 | 46 ± 9 | — | — | — |

[1319] A significant and dose-dependent T protein reduction was achieved in the caudate after bilateral intraputaminal and intrathalamic infusion of different total doses of VY-HTT01. Specifically, on average, there was 46%, 16% and 6% HTT protein KD for group C4 (total 1.78×10¹³ VG per animal), group A2 (total 1.35×10¹² VG per animal) and group 5A (total 1.35×10¹¹ VG per animal), respectively, relative to the vehicle group (groups A6 and C1b). HTT protein KD was statistically significant (P<0.001 by one-way ANOVA with Tukey's multiple comparisons test) at the highest dose of 1.78×10¹³ vg/animal versus vehicle. The highest dose of 1.78×10¹³ VG per animal exhibited statistically greater HTT protein KD than was achieved with total doses of 1.35×10¹¹ and 1.35×10¹² VG per animal, respectively (P<0.01 for 1.78×10¹³ VG per animal vs 1.35×10¹¹ VG per animal, P<0.05 for 1.78×10¹³ VG per animal vs 1.35×10¹² VG per animal by one-way ANOVA with Tukey's multiple comparisons test). In addition, there was no statistically significant difference in HTT protein KD between the two lowest total doses (1.35×10¹¹ and 1.35×10¹² VG per animal) or between each of two lowest doses (1.35×10¹¹ and 1.35×10¹² VG per animal) and vehicle group tested.

[1320] HTT mRNA levels in the caudate were also measured by the bDNA assay, as described in Example 1, in the same caudate punches used for HTT protein quantitation, using the specific probe set against rhesus HTT. TBP, AARS and XPNPEP1. HTT mRNA levels were normalized to the geometric mean of the three housekeeping genes TBP, AARS and XPNPEP1, and then further normalized to the vehicle group. The average relative remaining caudate HTT mRNA and relative caudate HTT mRNA knockdown (KD), expressed as a percentage of vehicle (veh), as well as p-values generated by one-way ANOVA with Tukey's multiple comparisons, are presented in Table 104.

TABLE 104
HTT mRNA lowering in NHP caudate

| | | | Relative | | P value by | P value by | P value by |
|---|---|---|---|---|---|---|---|
| | | Total | remaining | | one-way | one-way | one-way |
| | Number of | dose | HTT mRNA | HTT mRNA KD | ANOVA | ANOVA | ANOVA |
| Group | animals | (VG) | (% of veh ± stdev) | (% of veh ± stdev) | (vs Group A5) | (vs Group A2) | (vs Group C4) |
| Group A6 | 3 | 0.0 | 100 ± 6 | 0 ± 6 | 0.9121 | 0.7377 | <0.0001 |
| Group C1b | 3 | 0.0 | | | | | |
| Group A5 | 3 | 1.35e11 | 95 ± 11 | 5 ± 11 | — | 0.9877 | 0.0002 |
| Group A2 | 3 | 1.35e12 | 93 ± 9 | 7 ± 9 | — | — | 0.0003 |
| Group C4 | 3 | 1.78e13 | 41 ± 16 | 59 ± 16 | — | — | — |

[1321] A dose-dependent HTT mRNA reduction was achieved in the caudate after bilateral intraputaminal and intrathalamic infusion of different total doses of VY-HTT01. Specifically, on average, there was 59%, 7% and 5% HTT mRNA KD for group C4 (total 1.78×10¹³ VG per animal), group A2 (total 1.35×10¹² VG per animal) and group A5 (total 1.35×10¹¹ VG per animal), respectively, relative to the vehicle group (groups A6 and C1b). Caudate HTT mRNA KD was statistically significant (P<0.001 by one-way ANOVA with Tukey's multiple comparisons test) at the highest dose of 1.78×10¹³ VG per animal versus vehicle. The highest dose of 1.78×10¹³ VG per animal exhibited statistically greater HTT mRNA KD than was achieved with total doses of 1.35×10¹¹ and 1.35×10¹² VG per animal, respectively (P<0.001 for 1.78×10¹³ VG per animal vs 1.35×10¹¹ VG per animal, and 1.78×10¹³ VG per animal vs 1.35×10¹² VG per animal by one-way ANOVA with Tukey's multiple comparisons test). In addition, there was no statistically significant difference in HTT mRNA KD between the two lowest total doses (1.35×10¹¹ and 1.35×10¹² VG per animal) or between each of two lowest doses (1.35×10¹¹ and 1.35×10¹² VG per animal) and vehicle group tested (P>0.05 by one-way ANOVA with Tukey's multiple comparisons test).

[1322] v. Thalamus HTT Protein and mRNA Levels

[1323] To evaluate HTT protein and mRNA lowering in the thalamus, 4 punches were collected from each animal (2 per hemisphere) for HTT and actin protein analysis by LC-MS/MS, resulting in a total of 12 punches per VY-HTT01 treatment group (3 animals per group), and 24 punches for two vehicle groups (3 animals for each vehicle group). Thalamus HTT protein levels were normalized to the levels of actin, and then further normalized to the vehicle group. The average relative remaining thalamus HTT protein and relative thalamus HTT protein knockdown (KD), expressed as a percentage of vehicle (veh), as well as p-values generated by one-way ANOVA with Tukey's multiple comparisons, are presented in Table 105.

TABLE 105
HTT protein lowering in NHP thalamus

| | | | Relative | | P value by | P value by | P value by |
|---|---|---|---|---|---|---|---|
| | | Total | remaining | | one-way | one-way | one-way |
| | Number of | dose | HTT protein | HTT protein KD | ANOVA | ANOVA | ANOVA |
| Group | animals | (VG) | (% of veh ± stdev) | (% of veh ± stdev) | (vs Group A5) | (vs Group A2) | (vs Group C4) |
| Group A6 | 3 | 0.0 | 100 ± 12 | 0 ± 12 | 0.2319 | 0.0694 | <0.0001 |
| Group C1b | 3 | 0.0 | | | | | |
| Group A5 | 3 | 1.35e11 | 82 ± 20 | 18 ± 20 | — | 0.9068 | 0.0009 |
| Group A2 | 3 | 1.35e12 | 74 ± 12 | 26 ± 20 | — | — | 0.0026 |
| Group C4 | 3 | 1.78e13 | 24 ± 3 | 76 ± 3 | — | — | — |

[1324] A significant and dose-dependent HTT protein reduction was achieved in the thalamus after bilateral combined intraputaminal and intrathalamic infusion of different total doses of VY-HTT01. Specifically, on average, there was 76%, 26% and 18% HTT protein KD for group C4 (1.78×10¹³ VG per animal), group A2 (1.35×10¹² VG per animal) and group A5 (1.35×10¹¹ VG per animal), respectively, relative to vehicle (groups A6 and C1b). The HTT protein KD in the thalamus was statistically significant (P<0.0001 by one-way ANOVA with Tukey's multiple comparisons test) at the highest dose of 1.78×10¹³ valanimal versus vehicle. The highest dose of 1.78×10¹³ VG per animal exhibited statistically greater HTT protein KD than was achieved with total doses of 1.35×10¹¹ and 1.35×10¹² VG per animal, respectively (P<0.001 for 1.78×10¹³ VG per animal vs 1.35×10¹¹ VG per animal. P<0.01 for 1.78×10¹³ VG per animal vs 1.35×10¹² VG per animal by one-way ANOVA with Tukey's multiple comparisons test). In addition, there was no statistically significant difference in HTT protein KD between the two lowest total doses (1.35×10¹¹ and 1.35×10¹² VG per animal) or between each of two lowest doses (1.35×10¹¹ and 1.35×10¹² VG per animal) and vehicle group tested.

[1325] HTT mRNA levels in the thalamus were also measured by the bDNA assay, as described in Example 1, in the same thalamus punches used for HTT protein quantitation, using the specific probe set against rhesus HTT, TBP, AARS and XPNPEP1. HTT mRNA levels were normalized to the geometric mean of the three housekeeping genes TBP, AARS and XPNPEP1, and then further normalized to the vehicle group. The average relative remaining thalamus HTT mRNA and relative thalamus HTT mRNA knockdown (KD), expressed as a percentage of vehicle (veh), as well as p-values generated by one-way ANOVA with Tukey's multiple comparisons, are presented in Table 106.

TABLE 106
HTT mRNA lowering in NHP thalamus

| | | | Relative | | P value by | P value by | P value by |
|---|---|---|---|---|---|---|---|
| | | Total | remaining | | one-way | one-way | one-way |
| | Number of | dose | HTT mRNA | HTT mRNA KD | ANOVA | ANOVA | ANOVA |
| Group | animals | (VG) | (% of veh ± stdev) | (% of veh ± stdev) | (vs Group A5) | (vs Group A2) | (vs Group C4) |
| Group A6 | 3 | 0.0 | 100 ± 13 | 0 ± 13 | 0.0041 | 0.0002 | <0.0001 |
| Group C1b | 3 | 0.0 | | | | | |
| Group A5 | 3 | 1.35e11 | 59 ± 21 | 41 ± 21 | — | 0.3533 | 0.0611 |
| Group A2 | 3 | 1.35e12 | 41 ± 4 | 59 ± 4 | — | — | 0.6651 |
| Group C4 | 3 | 1.78e13 | 29 ± 6 | 71 ± 6 | — | — | — |

[1326] Significant thalamic HTT mRNA reduction was achieved in the thalamus after bilateral intraputaminal and intrathalamic infusion of different total doses of VY-HTT01. Specifically, on average. 71%, 59% and 41% HTT snRNA KD for group C4 (1.78×10¹³ VG per animal), group A2 (1.35×10¹² VG per animal) and group A5 (1.35×10¹¹ VG per animal), respectively, relative to vehicle (groups A6 and C1b). The HTT mRNA KD in the thalamus was statistically significant (P<0.01 by one-way ANOVA with Tukey's multiple comparisons test) at all doses of VY-HTT01 versus vehicle. There was a trend towards dose-dependence of HTT mRNA KD although there was no statistically significant difference in thalamus HTT mRNA KD between different doses of VY-HTT01 (P>0.05 by one-way ANOVA with Tukey's multiple comparisons test). Moreover, the levels of thalamus HTT mRNA measured corresponded well with HTT protein levels in the same thalamus samples in that higher doses of VY-HTT01 trended towards more HTT mRNA and protein KD than lower doses of VY-HTT01.

[1327] vi. Relationship between HTT Protein and mRNA Levels

[1328] The relationship between relative HTT protein levels and relative HTT mRNA levels in all samples from putamen, caudate and thalamus from group C4 (1,78×10¹³ VG per animal), group A2 (1.35×10²¹ VG per animal), group A5 (1.35×10¹¹ VG per animal), and the vehicle group (groups A6 and C1b) was assessed using a Pearson correlation method. The graph showing the correlation of relative remaining NHP HTT protein and mRNA levels in the putamen, caudate, and thalamus is shown in FIG. 19.

[1329] Relative HTT protein levels as measured by the LC-MS/MS assay correlated well with relative HTT mRNA levels as measured by the bDNA assay (Pearson r=0.8897, P<0.001). For example, 59% remaining; HTT mRNA levels relative to vehicle corresponded to 50% remaining HTT protein levels relative to vehicle.

[1330] Together, the results for bilateral combined intraputaminal and intrathalamic administration of VY-HTT01 in the NHP demonstrated at 5 weeks after dosing: dose-dependent HTT protein lowering in NHP putamen, caudate and thalamus; dose-dependent HTT mRNA KD in the putamen and caudate, with a trend toward dose-dependent HTT mRNA KD in the thalamus; and, a positive correlation between relative remaining NHP HTT protein and mRNA levels in the putamen, caudate and thalamus.

### Example 8

### In Vivo Study of VY-HTT01 Dose Response Pharmacolo in the YAC128 Mouse Model of Huntington's Disease.

[1331] i. Study Design

[1332] The primary objective of this study was to identify dose levels of an AAV1. packaged AAV1-miRNA expression vector resulting in dose-dependent lowering of human mutant HTT mRNA and protein after intrastriatal infusion in the YAC128 mouse model of Huntington's disease, which express human full-length mutant huntingtin (HTT). Viral genome VYHT1 (SEQ ID NO: 1352) was packaged into AAV1 capsids to generate VY-HTT01 particles (may also be referred to as AAV1-VOYHT1) and formulated for delivery. in this study, only brain tissues at the infusion site (striatum) were evaluated for human mutant HTT mRNA and protein levels 4 weeks after dosing. The 4-week timepoint was selected based on earlier studies indicating that maximum human mutant HTT mRNA lowering is attained in the YAC128 mouse striatum at approximately this time following intrastriatal dosing of VY-HTT01.

[1333] This study involved thirty mus musculus FVB/YAC Tg(+) mice (YAC128; as described in Slow et al., Hum Mol Genet. 12: 1555-1567 (2003), and in Van Raamsdonk et al. Hum Mol Genet. 14(24):3823-35 (2005), the contents of each of which are incorporated herein by reference in their entirety), 2-3 months of age, randomly assigned into groups by even distribution by gender and age. On Day 1 all animals received bilateral injections of either vehicle (Group 1) or VY-HTT01 (Groups 2-5) at 0.5 μL/minute into the left and right striata via a stereotaxically positioned silica catheter connected to a syringe for 10 minutes. Four dose levels were evaluated: 8.8×10⁹, 2.8×10¹⁰, 8.8×10¹⁰, and 2.8×10¹¹vector genomes (vg or VG) per animal (total dose). The 2.8×10¹¹ VG total dose was the maximum feasible dose (MFD). Animal study groups, including detailed dosing parameters, are presented in Table 107.

TABLE 107
Study design

| | | | Vector Dose | | | |
|---|---|---|---|---|---|---|
| | | | Volume | Dosing | | Total |
| | Number of | | injection | titer | | dose |
| Group | animals | Description | (μL/side) | (VG/mL) | VG/side | (VG) |
| Group 1 | 6 | Vehicle | 5 | 0.0 | 0.0 | 0.0 |
| Group 2 | 6 | VY-HTT01, | 5 | 8.8e11 | 4.4e9 | 8.8e9 |
| | | low dose | | | | |
| Group 3 | 6 | VY-HTT01, | 5 | 2.8e12 | 1.4e10 | 2.8e10 |
| | | mid dose | | | | |
| Group 4 | 6 | VY-HTT01, | 5 | 8.8e12 | 4.4e10 | 8.8e10 |
| | | high dose | | | | |
| Group 5 | 6 | VY-HTT01, | 5 | 2.8e13 | 1.4e11 | 2.8e11 |
| | | MFD | | | | |

[1334] ii. Test Article Preparation and Administration

[1335] The test article used in the study contained VY-HTT01 formulated in aqueous solution containing 10 mM sodium phosphate, 1.5 mM potassium phosphate, 100 mM sodium chloride, 7% (w/v) sucrose, 0.001% (w/v) Poloxamer 188, pH 7.5. The vehicle control contained the formulation buffer only. VY-HTT01 was removed from −65° C. or below and allowed to thaw at room temperature. After thawing, VY-HTT01 was then pipetted up and down to mix and then placed on wet ice until the time of dilution. VY-HTT01 was diluted with formulation buffer prepared as detailed above. After completion of dilution, all dosing solutions were stored at 2-8° C. until administration. Dosing solutions were allowed to warm up to room temperature prior to injection. After the completion of dosing procedures to all study animals, the dose retains were maintained at 2-8° C. The retain vectors were titered by droplet digital PCR (ddPCR).

[1336] Prior to surgery, animals were anesthetized using 3% isoflurane and placed into a stereotaxic frame. Intracranial injections were performed as follows: five microliters (5 μL) of recombinant viral vectors or vehicle were injected into the striatum (AP, +0.50; ML, ±2.2; DV, −3.0 from bregma and dura; incisor bar. 0.0) using a 10 μL Hamilton syringe at the rate of 0.5 μL/min. The needle was left in place for 1 min following the completion of infusion, before it was raised out of the brain. One hour before surgery and for 24 h following surgery, the mice were administered sustained release Buprenorphine SR-LAB (1.0 mg/kg) subcutaneously for analgesia.

[1337] iii. Cage-Side Observations and Body Weights

[1338] Cage side observations were conducted prior to injection and performed daily starting after surgery. All mice were monitored for general health and signs of pain and/or illness daily. Cage-side observations showed no abnormalities for all animals in all dose groups during the study.

[1339] For body weights, mice were weighed immediately prior to test article administration and once weekly after dosing. Body weight measurements indicated that vehicle and VY-HTT01-injected animals had normal weight gain over time and showed no difference in body weight changes at 1 or 2 weeks after dosing (p>0.05 by two-way ANOVA with Tukey's multiple comparisons test). However, the MFD group had more body weight gain than the middle or high dose group at 3 and 4 weeks after dosing (p<0.01 by two-way ANOVA with Tukey's multiple comparisons test).

[1340] iv. Tissue Collection

[1341] Mice received an intraperitoneal injection of phenytoin (Euthasol®) (270 mg/kg) and then were perfused transcardially with cold 1×PBS, and brains removed. Brains were cut along the coronal axis using a mouse brain matrix and striatal regions were dissected from a 2 mm brain slab using a 3 mm biopsy punch. The overlying cortical region was also collected. Brain tissue was then flash-frozen in liquid nitrogen and stored at −80° C. for subsequent processing and analyses.

[1342] A 0.4 cm tail snip sample was collected from each mouse and stored at −60° C. or lower until confirmatory genotyping analysis. Genotyping analysis of mouse tail snip samples confirmed that all animals in the study were positive for the human mutant HTT gene.

[1343] v. HTT mRNA Quantification

[1344] Human HTT mRNA level and mouse X-Prolyl Aminopeptidase 1 (XPNPEP1) mRNA levels were determined by a quantitative (real time) reverse transcription polymerase chain reaction (RT-qPCR) TaqMan assay. Briefly, total RNA was extracted from striatal tissue samples using the mirVana™ miRNA Isolation Kit according to the manufacturer's protocol (QIAGEN). Complementary DNA synthesis was performed by reverse transcription using the QuantiTect® Reverse Transcription Kit (QIAGEN). All TaqMan assays and master mixes were ordered from Life Technologies and used according to the manufacturer's recommendations. qPCR was performed using the CFX384 real-time PCR system (BIO-RAD) and data were analyzed with the 2^{-ΔΔCt} method. HTT mRNA levels were normalized to XPNPEP1 mRNA levels, and then further normalized to the vehicle control group.

[1345] vi. HTT Protein Quantification

[1346] The Meso Scale Discovery (MSD) assay was performed according to the protocol described previously (Macdonald et al., PLoS One. May 9; 9(5):e96854 (2014), the contents of which are incorporated herein by reference in their entirety). Briefly, tissue sample homogenates were generated using the FastPrep system (MP Biomedicals) by lysing the tissue in MSD assay buffer (Tris lysis buffer—Meso Scale Discovery, supplemented with Phosphatase inhibitor II (Sigma), Phosphatase inhibitor III (Sigma), 2 mM PMSF, protease inhibitors (Complete, EDTA-free; Roche Diagnostics), and 10 mM NaF). Lysates were centrifuged for 20 min at 20,000 g at 4° C. Supernatant was collected, aliquoted, quickly frozen on dry ice, stored at −80° C., and used within 3-4 days to limit any possible detrimental effects of storage time on these samples. Total protein concentration was determined using a bicinchoninic acid assay (BCA, Thermo Scientific) according to standard procedures.

[1347] The MSD plate (MSD product #L15XA) was coated overnight at 4° C. with affinity purified mouse monoclonal antibody 2B7 raised against amino acids 1-17 of human HTT. The plate was washed 3 times with wash buffer and then blocked with blocking solution for 60 minutes at room temperature with shaking. The blocking solution was removed by inversion and then 25 μL of human HTT protein standards, QC samples (separately prepared human HTT protein standard) and diluted mouse brain samples were loaded by reverse pipetting. The plate was incubated for 60 minutes at room temperature with shaking. The plate was then washed 4 times with wash buffer and incubated with biotinylated mouse monoclonal antibody MW1 against the expanded polyglutamine domain of HTT protein. The plate was incubated for 60 minutes at room temperature with shaking. The plate was then washed 3 times with wash buffer and 25 μL of the Sulfo-tag streptavidin conjugate was added. The plate was incubated for 60 minutes at room temperature with shaking. The plate was then washed 3 times with wash buffer and 150 μL of read buffer was added. The plate was read on an MSD reader. Light intensity was then measured to quantify analytes in the sample. Concentrations of human HTT protein in the study samples were determined by computer interpolation from the calibration curve.

[1348] vii. Acceptance Criteria

[1349] For qPCR reactions, the average Ct values in no template controls were typically equal to or greater than 35. Therefore, samples with Ct values equal to or greater than 35 were defined as negative and excluded from data analyses. Any potential DNA contamination was eliminated with the genomic DNA Wipeout reagent in the QuantiTect® Reverse Transcription kit before cDNA synthesis and qPCR. Any cDNA samples were considered to have no tissue genomic DNA contamination if the Ct values for the corresponding RNA samples used as no RT control in the qPCR reaction were equal to or greater than 35.

[1350] For the MSD assay, the standard curve was required to contain at least six non-zero standards, after removal of rejected standards. The standard relative error (observed concentration-theoretical concentration)/ theoretical concentration ×100) was within ±25% for working standards. The relative error for quality control samples was within ±25%. The % CV between replicate concentrations was 25% or lower. At least 67% of the QC samples were required to meet the acceptance criteria, with 50% accepted QC samples at each level. The % CV between study sample well concentrations was 25% or lower.

[1351] viii. Dose-Dependent Mutant Human HTT mRNA Knockdown by VY-HTT01

[1352] To evaluate the dose-dependence of human mutant HTT mRNA lowering after intrastriatal dosing of VY-HTT01, human HTT and mouse XPNPEP1 mRNA levels in striatum samples were measured by RT-qPCR. Average Ct values and standard deviations (SDs) were calculated for both HTT and XPNPEP1, and ΔCt (CtHTT-CtXPNPEP1) was determined for each sample. The ΔΔCt (ΔCt of VY-HTT01-injected samples-average vehicle ΔCT) was then calculated, Relative HTT mRNA levels were calculated for each sample by the 2^{-ΔΔCt} method and expressed as the percentage relative to the vehicle control group. VY-HTT01 administration resulted in human mutant HTT mRNA knockdown (KD) in the striatum at 4 weeks after intrastriatal injection in YAC128 mice. The average relative remaining HTT mRNA and relative HTT mRNA knockdown (KD) in YAC128 mouse striatum after administration with VY-HTT01 at different dose levels, as well as p-values generated by statistical analyses, are presented in Table 108.

TABLE 108
HTT mRNA lowering in YAC128 striatum

| | | | Relative | | | | | |
|---|---|---|---|---|---|---|---|---|
| | | | remaining | | P value by | P value by | P value by | P value by |
| | | Total | HTT mRNA | HTT mRNA KD | one-way | one-way | one-way | one-way |
| | | dose | (% of veh; | (% of veh; | ANOVA | ANOVA | ANOVA | ANOVA |
| Group | Dose | (VG) | mean ± SD) | mean ± SD) | (vs Group 2) | (vs Group 3) | (vs Group 4) | (vs Group 5) |
| Group 1 | Veh | 0.0 | 100 ± 9 | 0 ± 9 | 0.0008 | <0.0001 | <0.0001 | <0.0001 |
| Group 2 | Low | 8.8e9 | 64 ± 18 | 36 ± 18 | — | 0.3827 | 0.0195 | 0.0023 |
| Group 3 | Mid | 2.8e10 | 49 ± 18 | 51 ± 18 | — | — | 0.5527 | 0.1469 |
| Group 4 | High | 8.8e10 | 37 ± 13 | 63 ± 13 | — | — | — | 0.9038 |
| Group 5 | MFD | 2.8e11 | 30 ± 5 | 70 ± 5 | — | — | — | — |

[1353] On average, 70±5% human HTT mRNA KD was observed at the maximal feasible dose (p<0.0001 relative to vehicle group), 63±13% human HTT mRNA KD at the high dose (p<0.0001 relative to vehicle group), 51±18% human HTT mRNA KD at the middle dose (p<0.0001 relative to vehicle group) and 36±18% human HTT mRNA KD at the low dose (p<0.001 relative to vehicle group). Different human HTT mRNA KD was seen between the low dose and high dose groups, and between the low dose and maximal feasible dose groups. These data demonstrate that VY-HTT01 suppressed striatal human HTT snRNA levels in a dose-dependent manner in the YAC128 mouse model of HD.

[1354] ix. Dose-Dependent Mutant Human HTT Protein Knockdown by YT-HTT01

[1355] To evaluate the dose-dependence of human mutant HTT protein lowering after intrastriatal dosing of VY-HTT01, the MSD assay was performed to quantitatively measure human mutant HTT protein in striatum tissue punches, VY-HTT01 administration resulted in human mutant HTT protein KD in the striatum at 4 weeks after intrastriatal injection in YAC128 mice.

[1356] The average relative remaining HTT protein and relative HTT protein knockdown (KD) in YAC128 mouse striatum after administration of VY-HTT01 at different dose levels, as well as p-values generated by statistical analyses, are presented in Table 109.

TABLE 109
HTT protein lowering in YAC128 striatum

| | | | Relative | HTT | P value by | P value by | P value by | P value by |
|---|---|---|---|---|---|---|---|---|
| | | Total | HTT protein | protein KD | one-way | one-way | one-way | one-way |
| | | dose | (% of veh; | (% of veh; | ANOVA | ANOVA | ANOVA | ANOVA |
| Group | Dose | (VG) | mean ± SD) | mean ± SD) | (vs Group 2) | (vs Group 3) | (vs Group 4) | (vs Group 5) |
| Group 1 | Veh | 0.0 | 100 ± 20 | 0 ± 20 | 0.0554 | 0.0282 | <0.0001 | <0.0001 |
| Group 2 | Low | 8.8e9 | 73 ± 21 | 27 ± 21 | — | 0.9980 | 0.0145 | 0.0038 |
| Group 3 | Mid | 2.8e10 | 70 ± 14 | 30 ± 14 | — | — | 0.0294 | 0.0079 |
| Group 4 | High | 8.8e10 | 41 ± 15 | 59 ± 15 | — | — | — | 0.9801 |
| Group 5 | MFD | 2.8e11 | 36 ± 7 | 64 ± 7 | — | — | — | — |

[1357] On average, 64±7% human HTT protein KD was observed at the maximal feasible dose (p<0.0001 relative to vehicle group), 59±15% human HTT protein KD at the high dose (p<0.0001 relative to vehicle group), 30±14% human HTT protein KD at the middle dose (p<0.05 relative to vehicle group) and 27±21% human HTT protein KD at the low dose (p<0.0554 relative to vehicle group). Different human HTT protein KD was seen between the maximal feasible dose and middle dose groups, maximal feasible dose and low dose group, high and middle dose groups, and high and low dose groups. These data demonstrate that VY-HTT01 suppressed human HTT protein levels in the striatum in a dose-dependent manner in the YAC128 mouse model of HD.

[1358] This study demonstrated that intrastriatal injection of VY-HTT01 resulted in striatal human mutant HTT mRNA and protein KD in a dose-dependent manner, ranging from 70% HTT mRNA KD at the maximal feasible dose to 36% HTT mRNA KD at the low dose, on average, and 64% human HTT protein KD at the maximal feasible dose to 27% HTT protein KD at the low dose, on average. No abnormal cage-side observations were detected for all animals in the study and comparable body weight gain was seen for all groups of animals. These data demonstrated that VY-HTT01 intrastriatal doses ranging from 8.8×10⁹ VG to 2.8×10¹¹ VG per animal suppressed human mutant HTT mRNA and protein expression in the striatum in the YAC128 mouse model of HD in a dose-dependent manner, with maximal human mutant HTT protein lowering attained at a dose of 8.8×10¹⁰ VG per animal.

### Example 9

### In Vivo Study of VY-HTT01 Efficacy in the YAC128 Mouse Model of Huntington's Disease

[1359] i. Study Design

[1360] The primary objective of this study was to investigate the efficacy of an AAV1 packaged viral genome VOYHT1 (SEQ ID NO: 1352; hereinafter together referred to as AAV1-VOYHT1 or VY-HTT01)) on motor function following bilateral intrastriatal infusion in the YAC128 mouse, a model of Huntington's disease expressing human full-length mutant huntingtin (HTT). Further, this study was designed to evaluate the relationship between efficacy of VY-HTT01 administration on motor function and VY-HTT01 dose, as well as HTT mRNA and protein lowering. Immunohistochemical analyses using various cellular and biochemical markers were performed, providing insight into nervous system tissue integrity. Cage-side observations, and body and brain weight data, were also recorded.

[1361] On the basis of data obtained from dose response pharmacology experiments described in Example 8 (above), and in an effort to provide maximal and graded reduction of human mutant HTT protein, three dose levels of VY-HTT01 were selected for evaluation in the present study, as follows: 8.8×10¹⁰ VG/animal (high dose), 2.8×10¹⁰ VG/animal (middle or mid dose), and 8.8×10⁹ VG/animal (low dose). Briefly, data from Example 8 demonstrated 59%, 30% and 27% human mutant HTT protein lowering, respectively, at these dose levels at 4 weeks after bilateral intrastriatal administration of VY-HTT01. In this study, brain tissues at the infusion site (striatum) were evaluated for human mutant HTT mRNA and protein levels at 16 weeks and at 24 weeks after administration (post-dosing).

[1362] This study involved fifty-two (52) male and forty-four (44) female mils musculus FVB/YAC Ts(+) mice (YAC128; as described in Slow et al., Hum Mol Genet.12:1555-1567 (2003), and in Van Raamsdonk et al. Hum Mol Genet. 14(24):3823-35 (2005), the contents of each of which are incorporated herein by reference in their entirety), as well as thirteen (13) male and eleven (11) female C57BL/6 (WT) mice (2-3 months old), randomly assigned into groups by even distribution of gender, age, and body weight, and results from baseline behavioral tests. On Day 1, animals received bilateral injections of 5 μL each of either vehicle (Groups 1 and 2) or VY-HTT01 (Groups 3-5) at 0.5 μL/minute over 10 minutes into the left and right striata via a stereotaxically positioned silica catheter connected to a syringe. The first cohort of mice comprising six (6) males and six (6) females in each of Groups 1-5 for this study were euthanized 24 weeks post-dosing and used for histological evaluation, as well as in-life observations (e.g., cage-side and body weight) and behavioral testing. The second cohort of mice comprising 7 males and 5 females in each of Groups 1-5 for this study were euthanized 16 weeks post-dosing and used for in-life observations, behavioral testing and pharmacological evaluation. The details for groups, animal genotype, test articles and dosing paradigm are presented in Table 110.

TABLE 110
Study design

| | | | | Vector Dose | | | | |
|---|---|---|---|---|---|---|---|---|
| | | | | Volume | Dosing | | Total | |
| | | Number of | | injection | titer | | dose | In-life |
| Group | Genotype | animals | Description | (μL/side) | (VG/mL) | VG/side | (VG) | (Weeks) |
| Group 1 | WT | 24 | Vehicle | 5 | 0.0 | 0.0 | 0.0 | 16, 24 |
| Group 2 | YAC128 | 24 | Vehicle | 5 | 0.0 | 0.0 | 0.0 | 16, 24 |
| Group 3 | YAC128 | 24 | VY-HTT01, | 5 | 8.8e11 | 4.4e9 | 8.8e9 | 16, 24 |
| | | | low dose | | | | | |
| Group 4 | YAC128 | 24 | VY-HTT01, | 5 | 2.8e12 | 1.4e10 | 2.8e10 | 16, 24 |
| | | | mid dose | | | | | |
| Group 5 | YAC128 | 24 | VY-HTT01, | 5 | 8.8e12 | 4.4e10 | 8.8e10 | 16, 24 |
| | | | high dose | | | | | |

[1363] ii. Test Article Preparation and Administration

[1364] The test article used in the study contained VY-HTT01 formulated in aqueous solution containing 10 mM sodium phosphate, 1.5 mM potassium phosphate, 100 mM sodium chloride, 7% (w/v) sucrose. 0.001% (w/v) Poloxamer 188, pH 7.5. The vehicle control contained the formulation buffer only. VY-HTT01 was removed from -65° C. or below and allowed to thaw at room temperature. After thawing, VY-HTT01 was then pipetted up and down to mix and then placed on wet ice until the time of dilution. VY-HTT01 was diluted with formulation buffer prepared as detailed above. After completion of dilution, all dosing solutions were stored at 2-8° C. until administration. Dosing solutions were allowed to warm up to room temperature prior to injection. After the completion of dosing procedures to all study animals, the dose retains were maintained at 2-8° C. The retain vectors were titered by droplet digital PCR (ddPCR).

[1365] Animals were anesthetized by injection with ketamine (10 mg/mL), xylazine (1 mg/mL) and acepromazine (0.3 mg/mL) solution (160-200 μL/20 g) and placed into a stereotaxic frame. Intracranial injections were performed as follows: five microliters (5 μL) of recombinant viral vectors or vehicle were injected into the striatum (AP, +0.5; ML, ±2.0, DV, −3.8) from bregma and dura; incisor bar, 0.0) using a 10 μL Hamilton syringe at the rate of 0.5 μL/min. The needle was left in place for 3 minutes following the completion of infusion, before it was raised out of the brain. Acetaminophen was provided in the drinking water 3 days before surgery and 3 days after surgery as pre- and post-operative analgesic.

[1366] iii. Cage-Side Observations, Body Weight, and Brain Weight

[1367] Cage-side observations were conducted prior to injection and performed daily starting after surgery. All mice were monitored for general health and signs of pain and/or illness daily. Cage-side observations showed no abnormalities for all animals in all dose groups during the study, except one female WT mouse found dead at 13 weeks post injection.

[1368] For body weights, mice were weighed immediately prior to test article administration and weekly after dosing. Brain weights were recorded after removal from the animal. Body weight measurements from 0- to 16-weeks post dosing indicated that, in general, YAC128 mice gained more weight over time than their WT littermates. However, there were no differences in body weight changes between YAC128 groups administered vehicle or any doses of VY-HTTO by one-way ANOVA with Tukey's post hoc test (p>0.05). At 16 weeks post dosing, 11-12 mice in each group were euthanized for pharmacological analysis. The weekly body weight measurements were continued on the remaining mice, which showed similar changes of body weight and body weight gain across groups. Brain weight measurements also showed no differences between groups at 16- or 24-weeks post-dosing by one-way ANOVA with Tukey's post hoc test.

[1369] iv. In-Life Behavioral Test

[1370] The accelerating rotarod test was performed to assess the effects of VY-HTT01 on mouse motor function and motor coordination. YAC128 mice were trained on the rotarod for two consecutive days (day 1 and 2) and tested on day 3. On the first training day, the rotarod was set to a constant speed of 5 RPM for 300 seconds. Mice that fell off the rod before completion of the 300-second time period were placed back on the rod until the full 300-second period expired. On the second day of training, the rotarod was set to accelerate from 5 to 40 rpm over 300 seconds. Mice that fell off the rod were placed back on the rod until it completed the 300-second training period. On day 3 (test day), the mice were placed on the rotarod set to accelerate from 5 to 40 rpm over 300 seconds. The latency to fall, defined by the time elapsed until the animal falls from the rotarod, was recorded over three trials. The rotarod test was carried out at pre-dosing for baseline measurement and was repeated every 4 weeks after until necropsy. All animals went through the rotarod tests performed at pre-dosing, and 4-, 8-, 12- and 16-weeks post-doing (n=23-24 per group), and a subset of them continued the rotarod test at 20- and 24-weeks post-doing (n=12 per group).

[1371] v. Tissue Collection

[1372] At sixteen weeks post VY-HTT01 administration, a subset of 11-12 animals from each group (6-7 males and 5 females) received an intraperitoneal injection of ketamine (10 mg/mL), xylazine (1 mg/mL) and acepromazine (0.3 mg/mL) solution (160˜200 μL/20 g), Once under anesthesia, mice were weighed and body weights were recorded. The toe pinch-response method was used to determine depth of anesthesia. Once unresponsive, mice were perfused transcardially with cold 1×PBS, and brains were carefully removed. Brain weights were recorded and then brains were cut along the coronal axis using a mouse brain matrix, Tissue samples were collected from the left and right striatum of a 2 mm-thick brain slab using a 3 mm biopsy punch. The overlying cortical region was also collected for potential biochemical analysis. These striatal and cortical samples were then flash-frozen in liquid nitrogen and stored at −80° C. for processing and mRNA or protein analyses.

[1373] The remaining 12 animals (6 males and 6 females) from each group were euthanized at 24 weeks after dosing. Striatum tissue punches from 6 mice (3 males and 3 females) in each group were collected as above (dissected and snap-frozen) for HTT mRNA measurement by qRT-PCR and HTT protein measurement by MSD. The brains from the remaining 6 animals (3 males and 3 females) per group were dissected and post-fixed with 4% paraformaldehyde (PFA) after perfusion with 1×PBS and 4% PFA for immunohistochemical analyses.

[1374] A 0.4 cm sample of tail from each mouse was collected and stored at −60° C. or lower until confirmatory genotyping analysis. Genotyping analysis of mouse tail snip samples confirmed that all 96 YAC128 animals in the study were positive and all 24 WT mice were negative for the human mutant HTT gene, as expected.

[1375] vi. HTT mRNA Quantification

[1376] Human HTT mRNA levels were determined in accordance with procedures described in Example 8 (above).

[1377] vii. HTT Protein Quantification

[1378] Human HTT protein levels were determined in accordance with procedures described in Example 8 (above).

[1379] viii. Immunohistochemical Analyses

[1380] Immunohistochemistry (IHC) staining for HTT aggregates (EM48), neurodegeneration (Fluoro-Jade C). striatal medium spiny neurons (DARPP32), neuronal (NeuN) and glial-specific markers (GFAP for astrocytes and Iba1 for microglia), were conducted on mouse brains using standard protocols.

[1381] ix. Acceptance Criteria

[1382] Acceptance criteria for qPCR reactions and for the MSD assay used in this study were identical to those described in Example 8 (above).

[1383] x. Effects of VY-HTT01 on YAC128 Mouse Motor Function and Motor Coordination

[1384] The rotarod test was performed at pre-dosing and repeated every 4 weeks post-dosing, up to 16 weeks post-dosing (n=23-24 mice per group). Thereafter, the rotarod test was continued with a subset of mice (n=12 mice per group) at 20- and 24-weeks post-dosing. The latency to fall of each animal was recorded and percent (%) change of latency to fall (post-dosing latencylpre-doing latency×100%) was calculated. YAC128 mice had impaired motor function compared with WT littermates. Based on the absolute latency to fall, YAC128 mice showed a shorter latency to fall than WT littermates at baseline (p<0.0001, two-way ANOVA with Dunnett's post hoc test). At 16 weeks post-dosing, VY-HTT01 high and low dose groups improved the absolute latency to fall in YAC128 mice (p=0.025 and 0.034, respectively, versus vehicle), while the VY-HTT01 middle dose group showed a trend (p=0.052 versus vehicle) towards improved latency to fall. Rotarod test absolute latency to fall (seconds) data are presented in Table 111.

TABLE 111
Latency to fall (seconds) in the rotarod test

| | | Pre-dose | 4-week | 8-week | 12-week | 16-week |
|---|---|---|---|---|---|---|
| | | baseline | post-dose | post-dose | post-dose | post-dose |
| | | (mean ± SD, | (mean ± SD, | (mean ± SD, | (mean ± SD, | (mean ± SD, |
| Genotype | Description | n = 24/group) | n = 24/group) | n = 24/group) | n = 24/group | n = 23-24/group |
| WT | Vehicle | 264 ± 59 | 224 ± 65 | 247 ± 47 | 239 ± 61 | 239 ± 62 |
| YAC128 | Vehicle | 124 ± 80 | 138 ± 55 | 127 ± 44 | 108 ± 44 | 113 ± 38 |
| YAC128 | VY-HTT01, | 121 ± 72 | 133 ± 60 | 157 ± 49 | 147 ± 55 | 155 ± 64 |
| | high dose | | | | | |
| YAC128 | VY-HTT01, | 120 ± 86 | 133 ± 70 | 141 ± 84 | 134 ± 73 | 154 ± 72 |
| | mid dose | | | | | |
| YAC128 | VY-HTT01, | 122 ± 67 | 118 ± 63 | 125 ± 63 | 130 ± 62 | 151 ± 61 |
| | low dose | | | | | |

[1385] As assessed by the percent change in the latency to fall, VY-HTT01 high dose (8.8×10¹³ VG per animal) increased the latency to fall by ˜21% at 12 weeks (p=0.023) and by ˜27% at 16 weeks (p=0.021) post-dosing versus vehicle (one-way ANOVA with Dunnett's post hoc test), indicating a rescue of motor deficits. VY-HTT01 middle- and low-dose groups also showed increases in the latency to fall by 28% (p=0.037) and 24% (p=0.033), respectively, at 16 weeks post-dosing versus vehicle (one-way ANOVA with Dunnett's post hoc test). Rotarod test percent (%) latency to fall data are presented in Table 112.

TABLE 112
Percent (%) change in latency to fall in the rotarod test

| | | Pre-dose | 4-week | 8-week | 12-week | 16-week |
|---|---|---|---|---|---|---|
| | | baseline | post-dose | post-dose | post-dose | post-dose |
| | | (mean ± SD, | (mean ± SD, | (mean ± SD, | (mean ± SD, | (mean ± SD, |
| Genotype | Description | n = 24/group) | n = 24/group) | n = 24/group) | n = 24/group | n = 23-24/group |
| WT | Vehicle | 100 ± 22 | 85 ± 25 | 94 ± 18 | 90 ± 23 | 91 ± 23 |
| YAC128 | Vehicle | 100 ± 65 | 112 ± 44 | 103 ± 36 | 87 ± 35 | 91 ± 31 |
| YAC128 | VY-HTT01, | 100 ± 59 | 110 ± 49 | 129 ± 41 | 121 ± 46 | 127 ± 53 |
| | high dose | | | | | |
| YAC128 | VY-HTT01, | 100 ± 72 | 111 ± 58 | 118 ± 70 | 112 ± 61 | 128 ± 60 |
| | mid dose | | | | | |
| YAC128 | VY-HTT01, | 100 ± 55 | 96 ± 51 | 102 ± 52 | 106 ± 50 | 124 ± 50 |
| | low dose | | | | | |

[1386] These results suggest that motor function was improved at 16 weeks after administration with all three doses of VY-HTT01, and that there was faster onset of motor improvement in the high dose group. In addition, the rotarod test was continued with a subset of mice (12 mice per group) at 20- and 24-weeks post-dosing, and VY-HTT01 efficacy was maintained.

[1387] xi. Dose-Dependent Human Mutant HU mRATA Knockdown by VY-HTT01

[1388] After completion of behavioral assessment as described above, the dose-dependence of human HTT mRNA lowering was assessed in striatum samples from the left hemisphere of 11-12 animals or 6 animals per group at 16 or 24 weeks, respectively, following intrastriatal dosing of VY-HTT01. Human HTT and mouse XPNPEP1 mRNA (as an internal control) levels were measured by RI qPCR. All samples were run in duplicate for qPCR. Average Ct values and standard deviations (SD) were calculated for both HTT and XPNPEP, and ΔCt (CtHTT-CtXPNPEP1) was determined for each sample. The ΔΔCt (ΔCt of VY-HTT01-injected samples-average vehicle ΔCT) was then calculated. Relative human HTT mRNA levels were calculated for each sample by the 2 ΔΔCt method and expressed as the percentage relative to the vehicle control group. VY-HTT01. administration resulted in human HTT mRNA KD in the striatum at 16 and 24 weeks after intrastriatal injection in YAC128 mice.

[1389] At 16 weeks post-dosing, 48±19% human HTT mRNA KD was observed at the high dose (p<0.0001 relative to vehicle group), 57±24% human HTT mRNA KD at the middle dose (p<0.0001 relative to vehicle group) and 64±6% human HTT mRNA KD at the low dose (p<0.0001 relative to vehicle group). There was no difference in HTT mRNA levels among high, middle and low dose groups at 16 weeks post-dosing. Human HTT mRNA levels in YAC128 mouse striatum at 16 weeks after VY-HTT01. administration at different dose levels, as well as p-values generated by statistical analyses, are presented in Table 113.

TABLE 113
HTT mRNA lowering in YAC128 striatum at 16 weeks post dose

| | | 16 weeks post dose | | | | | |
|---|---|---|---|---|---|---|---|
| | | (% of Veh; mean ± SD, | | | | | |
| | | n = 11-12/group) | | P value by | P value by | P value by | P value by |
| | | Relative | | one-way | one-way | one-way | one-way |
| | | remaining | HTT | ANOVA | ANOVA | ANOVA | ANOVA |
| Genotype | Dose | HTT mRNA | mRNA KD | (vs Veh) | (vs High) | (vs Mid | (vs Low) |
| YAC128 | Vehicle | 100 ± 12 | 0 ± 12 | — | <0.0001 | <0.0001 | <0.0001 |
| YAC128 | VY-HTT01, | 52 ± 19 | 48 ± 19 | — | — | 0.599 | 0.113 |
| | high dose | | | | | | |
| YAC128 | VY-HTI01, | 43 ± 24 | 57 ± 24 | — | — | — | 0.719 |
| | mid dose | | | | | | |
| YAC128 | VY-HTT01, | 36 ± 6 | 64 ±6 | — | — | — | — |
| | low dose | | | | | | |

[1390] At 24 weeks post-dosing, VY-HTT01 high-, middle- and low-dose administration resulted in human HTT mRNA KD by 67±4%, 61±4%, and 53±11%, respectively, in YAC128 mouse striatum, relative to the vehicle group. There was no difference in HTT mRNA levels among high, middle and low dose groups at 24 weeks post-dosing. Human HTT mRNA levels in YAC128 mouse striatum at 24 weeks after VY-HTT01 administration at different dose levels, as well as p-values generated by statistical analyses, are presented in Table 114.

TABLE 114
HTT mRNA lowering in YAC128 striatum at 24 weeks post dose

| | | 24 weeks post dose | | | | | |
|---|---|---|---|---|---|---|---|
| | | (% of Veh; mean ± SD, | | | | | |
| | | n = 6/group) | | P value by | P value by | P value by | P value by |
| | | Relative | | one-way | one-way | one-way | one-way |
| | | remaining | HTT | ANOVA | ANOVA | ANOVA | ANOVA |
| Genotype | Dose | HTT mRNA | mRNA KD | (vs Veh) | (vs High) | (vs Mid | (vs Low) |
| YAC128 | Vehicle | 100 ± 17 | 0 ± 17 | — | <0.0001 | <0.0001 | <0.0001 |
| YAC128 | VY-HTT01, | 33 ± 4 | 67 ± 4 | — | — | 0.749 | 0.104 |
| | high dose | | | | | | |
| YAC128 | VY-HTT01, | 39 ± 4 | 61 ± 4 | — | — | — | 0.502 |
| | mid dose | | | | | | |
| YAC128 | VY-HTT01, | 47 ± 11 | 53 ± 11 | — | — | — | — |
| | low dose | | | | | | |

[1391] Overall, intrastriatal administration of VY-HTT01 at 8.8×10⁹ to 8.8×10¹⁰ vg per animal resulted in similar 48-64% striatal human HTT mRNA suppression at 16 weeks post-dosing, and 53-67% striatal human HTT mRNA suppression at 24 weeks post-dosing in YAC128 mice.

[1392] xii. Dose-Dependent Human Mutant HTT Protein Knockdown by VY-HTT01

[1393] After completion of behavioral assessments as described above, human mutant HTT protein lowering was assessed in the striatum samples from the right hemisphere of 11-12 animals or 6 animals per group at 16 weeks or 24 weeks, respectively, following intrastriatal dosing of VY-HTT01. VY-HTT01 injection resulted in human mutant HTT protein KD in the striatum. On average, human mutant HTT protein levels were suppressed by 65±10% at the high dose (p<0.0001), 52±13% at the middle dose (p<0.0001) and 38±13% at the low dose (p<0.0001), at 16-week post-dosing, wherein the significance was assessed using a one way ANOVA with Tukey post-hoc test. This human mutant HTT protein lowering was dose dependent, with differences between the high versus middle dose (p<0.05), high versus low dose (p<0.0001) and middle versus low dose (p<0.05) groups. Human HTT protein levels in YAC128 mouse striatum at 16 weeks after VY-HTT01 administration at different dose levels, as well as p-values generated by statistical analyses, are presented in Table 115.

TABLE 115
HTT protein lowering in YAC128 striatnm at 16 weeks post dose

| | | 16 weeks post dose | | | | | |
|---|---|---|---|---|---|---|---|
| | | (% of Veh; mean ± SD), | | | | | |
| | | n = 11-12/group) | | P value by | P value by | P value by | P value by |
| | | Relative | | one-way | one-way | one-way | one-way |
| | | remaining | HTT | ANOVA | ANOVA | ANOVA | ANOVA |
| Genotype | Dose | HTT protein | protein KD | (vs Veh) | (vs High) | (vs Mid | (vs Low) |
| YAC128 | Vehicle | 100 ± 11 | 0 ± 11 | — | <0.0001 | <0.0001 | <0.0001 |
| YAC128 | VY-HTT01, | 35 ± 10 | 65 ± 10 | — | — | 0.043 | <0.0001 |
| | high dose | | | | | | |
| YAC128 | VY-HTT01, | 48 ± 13 | 52 ± 13 | — | — | — | 0.025 |
| | mid dose | | | | | | |
| YAC128 | VY-HTT01, | 62 ± 13 | 38 ± 13 | — | — | — | — |
| | low dose | | | | | | |

[1394] At 24 weeks post-dosing, human mutant HTT protein levels were suppressed by 71±8% at the high dose (p<0.0001), 50±15% at the middle dose (p<0.0001) and 47±9% at the low dose (p<0.0001), wherein the significance was assessed using one-way ANOVA with Tukey post-hoc test. The human HTT protein lowering at 24 weeks post-dosing was also dose-dependent, with differences between the high-versus middle-dose (p<0.05) and high versus low dose (p<0.01), but not between the middle- and low-dose groups. Human HTT protein levels in YAC128 mouse striatum at 24 weeks after VY-HTT01 administration at different dose levels, as well as p-values generated by statistical analyses, are presented in Table 116.

TABLE 116
HTT protein lowering in YAC128 striatnm at 24 weeks post dose

| | | 24 weeks post dose | | | | | |
|---|---|---|---|---|---|---|---|
| | | (% of Veh; mean ± SD, | | | | | |
| | | n = 6/group) | | P value by | P value by | P value by | P value by |
| | | Relative | | one-way | one-way | one-way | one-way |
| | | remaining | HTT | ANOVA | ANOVA | ANOVA | ANOVA |
| Genotype | Dose | HTT protein | protein KD | (vs Veh) | (vs High) | (vs Mid | (vs Low) |
| YAC128 | Vehicle | 100 ± 13 | 0 ± 13 | — | <0.0001 | <0.0001 | <0.0001 |
| YAC128 | VY-HTT01, | 29 ± 8 | 71 ± 8 | — | — | 0.027 | 0.009 |
| | high dose | | | | | | |
| YAC128 | VY-HTT01, | 50 ± 15 | 50 ± 15 | — | — | — | 0.962 |
| | mid dose | | | | | | |
| YAC128 | VY-HTT01, | 53 ± 9 | 47 ± 9 | — | — | — | — |
| | low dose | | | | | | |

[1395] Together, these results demonstrate that intrastriatal dosing of VY-HTT01 lowers human mutant HTT protein expression in the striatum in a similar dose-dependent manner in the YAC128 mouse model of HD at 16- and 24-weeks post-dosing.

[1396] xiii. Immunohistochemical Analyses of HTT Aggregates and Cellular Markers Following Intrastriatal Dosing with VY-HTT01

[1397] At 24 weeks following intrastriatal dosing with VY-HTT01, the striatum from 6 animals per group were evaluated by immunohistochemical (IHC) analyses of markers for HTT aggregates (EM48), neuronal nuclear antigen (NeuN), neuronal degeneration (Fluoro-Jade C), astrocytes (glial fibrillary acidic protein; GFAP), microglia (ionized calcium binding adaptor molecule 1; Iba1) and medium-size spiny neurons (DARPP32).

[1398] No differences in immunoreactivity were observed across vehicle- and VY-HTT01-injected YAC128 mouse groups for any marker. IHC using EM48 showed diffuse nuclear staining in the striatum of YAC128 mice; however, nuclear aggregates were not observed, which is consistent with the published literature (Slow et al., Proc. Natl Acad. Sci. USA 102:11402-11407 (2005), the contents of which are incorporated herein by reference in their entirety). The density of NeuN-positive cells in the striatum was similar across all groups, showing no change in NeuN-positive neuron density. Neuronal degeneration was not identified in any group, based on Fluoro-Jade C immunoreactivity. No changes in Iba1-positive microglial density or GFAP positive astrocyte proliferations were identified. Medium-size spiny neurons were detected in all groups, with no significant differences in immunoreactivity, based on DARPP32 staining.

[1399] In this study, no treatment-related differences in neuronal cell density, gliosis, or body weight were identified in YAC128 mice.

[1400] This study demonstrated that intrastriatal injection of VY-HTT01 (8.8×10⁹ to 8.8×10¹⁰ VG per animal) resulted in striatal human HTT mRNA lowering ranging from 48% to 64%, accompanied by dose-dependent striatal human mutant HTT protein lowering by 38-65% at 16 weeks post-dosing in YAC128 mice. In addition, intrastriatal injection of VY-HTT01 (8.8×10⁹ to 8.8×10¹⁰ VG per animal) resulted in striatal human HTT mRNA lowering ranging from 53% to 67%. accompanied by dose-dependent striatal human mutant HTT protein lowering by 47-71% at 24 weeks post-dosing in YAC128 mice. VY-HTT01 at all three doses ameliorated motor coordination deficits in the rotarod test at 16 weeks post-dosing in YAC128 mice, as well as at 12 weeks post-dosing with VY-HTT01 at the high dose. The high dose (8.8×10¹⁰ VG per animal) of VY-HTT01 resulted in human mutant HTT protein lowering by 65% and 71% in striatum at 16- and 24-weeks post-dosing. The middle dose (2.8×10¹⁰ VG per animal) of VY-HTT01 reduced human mutant HTT protein by 52% and 50% in striatum at 16- and 24-weeks post-dosing in YAC128 mice, corresponding to improvement of motor function at 16 weeks post-dosing. The low dose (8.8×10⁹ VG per animal) of VY-HTT01 resulted in human mutant HTT protein reduction by 38% and 47% in the striatum at 16- and 24-weeks post-dosing in YAC128 mice, and improved motor function at 16 weeks post-dosing. No abnormal cage-side observations were found in any animals in the study. Comparable body weight gain was seen for all groups over 16 weeks, and there were no differences in brain weight at 16- or 24-weeks post-dosing. Together, these data demonstrate that: (1) intrastriatal infusion of VY-HTT01 lowers human HTT mRNA and human mutant HTT protein expression in the YAC128 mouse striatum in a dose-dependent manner; (2) commensurate with human mutant HTT protein lowering, VY-HTT01 improves motor function in YAC128 mice; and (3) VY-HTT01 injection was not associated with any changes in general health of the animals or neuronal injury.

### Example 10

### In Vivo Study of VY-HTT01 Dose Response Pharmacology in the BACHD Mouse Model of Huntington's Disease

[1401] i. Study Design

[1402] The primary objective of this study was to identify dose levels of an AAV1 packaged viral genome, VOYHT1 (SEQ ID NO: 1352), (hereinafter referred to as AAV1-VOYHT1 or VY-HTT01) resulting in dose-dependent lowering of human mutant HTT mRNA and protein after intrastriatal infusion in the BACHD mouse model of Huntington's disease, which expresses human full-length mutant huntingtin (HTT). In this study, only brain tissues at the infusion site (striatum) were evaluated for human mutant HTT mRNA and protein levels 4 weeks after dosing. The 4-week timepoint was selected based on earlier studies indicating that maximum human mutant HTT mRNA lowering is attained in the YAC128 mouse striatum at approximately this time following intrastriatal dosing of VY-HTT01. Experimental procedures were similar to that described in Example 8.

[1403] This study involved forty-five (45) female inns museums C57BL/6-Tg(HTT*97Q)IXwy/J (BACHD) mice, 2-3 months of age, randomly assigned into groups by even distribution of age and body weight. On Day 1 all animals received bilateral injections of either vehicle or VY-HTT01 at 0.5 μL/minute into the left and right striata via a stereotaxically positioned silica catheter connected to a syringe. The maximum feasible does (MFD) was determined by the maximum achievable vector titer and the maximum volume (5 μL/side) for intrastriatal injection in the mouse. Animal study groups, including detailed dosing parameters, are presented in Table 117.

TABLE 117
Study design

| | | | Vector Dose | | | |
|---|---|---|---|---|---|---|
| | | | Volume | | | Total |
| | Number of | | injection | Dosing titer | | dose |
| Group | animals | Dose | (μL/side) | (VG/mL) | VG/side | (VG) |
| Group 1 | 9 | Vehicle | 5 | 0.0 | 0.0 | 0.0 |
| Group 2 | 9 | VY-HTT01, | 5 | 8.8e11 | 4.4e9 | 8.8e9 |
| | | low dose | | | | |
| Group 3 | 9 | VY-HTT01, | 5 | 2.8e12 | 1.4e10 | 2.8e10 |
| | | mid dose | | | | |
| Group 4 | 9 | VY-HTTOL | 5 | 8.8e12 | 4.4e10 | 8.8e10 |
| | | high dose | | | | |
| Group 5 | 9 | VY-HTT01, | 5 | 2.8e13 | 1.4e11 | 2.8e11 |
| | | MFD | | | | |

[1404] ii. Test Article Preparation and Administration

[1405] The test article preparation procedure was similar to that described in Example 8.

[1406] Prior to surgery, animals were anesthetized by injection with ketamine (10 mg/mL), xylazine (1 mg/mL) and acepromazine (0.3 mg/mL) solution (160-200 μL/20 g) and placed into a stereotaxic frame. Intracranial injections were performed as follows: five microliters (5 μL) of recombinant viral vectors or vehicle were injected into the striatum (A/P +0.5, M/L ±2.0, DV −3.8 from bregma and dura; incisor bar, 0.0) using a 10 μL Hamilton syringe at the rate of 0.5 μL/min. The needle was left in place for 3 minutes following the completion of infusion, before it was raised out of the brain. Acetaminophen was provided in the drinking water 3 days before surgery and 3 days after surgery as pre- and post-operative analgesic.

[1407] iii. Cage-Side Observations, Body Weight, and Brain Weight

[1408] Cage-side observations were conducted prior to injection and performed daily starting after surgery. All mice were monitored daily for general health and signs of pain and/or illness. Cage-side observations showed no abnormalities for all animals in all dose groups during the study.

[1409] For body weights, mice were weighed immediately prior to test article administration and weekly after dosing. Brain weights were recorded after removal from the animal. Body weight measurements indicated that animals injected with vehicle or VY-HTT01 had normal weight gain over time and showed no difference in body weight changes. Brain weight measurement showed no differences across vehicle and VY-HTT01 groups.

[1410] iv. Tissue Collection

[1411] Mice received an intraperitoneal injection of ketamine (10 mg/mL), xylazine (1 mg/mL) and acepromazine (0.3 mg/mL) solution (160-200 μL/20 g). Once under anesthesia, mice were weighed and body weights were recorded. The toe pinch-response method was used to determine depth of anesthesia. Once unresponsive, mice were perfused transcardially with cold 1×PBS, and brains removed carefully and brain weight was recorded. Brains were cut along the coronal axis using a mouse brain matrix and striatal regions were dissected from a 2 mm-thick brain slab using a 3 mm biopsy punch. The overlying cortical region was also collected, Brain tissue was then flash-frozen in liquid nitrogen and stored at -80° C. for processing and analyses.

[1412] Mouse tail snips were used for DNA purification and genotyping analysis. In brief, for genotyping, the reaction mixture contained 900 mM of forward and reverse primers, 250 mM probe, and 50-100 ng/μL of DNA. After an initial activation/denaturation step at 50° C. for 2 min and then 95° C. for 10 min, amplification was performed during 40 cycles of 95° C.—15 seconds followed by 60° C.—1 minute. All mice in this study were confirmed to be HTT*Q97 carriers.

[1413] v. HTT mRNA Quantification

[1414] HTT mRNA quantification procedures were similar to those described in Example 8.

[1415] vi. HTT Protein Quantification

[1416] HTT protein quantification procedures were similar to those described in Example 8.

[1417] vii. Acceptance Criteria

[1418] Acceptance criteria were similar to those described in Example 8.

[1419] viii. Dose-Dependent Mutant Human HTT snRNA Knockdown by VY-HTT01

[1420] To evaluate the dose dependence of HTT mRNA lowering after intrastriatal dosing of VY-HTT01, human HTT and mouse XPNPEP1 mRNA (as an internal control) levels in striatum samples (a 3-mm punch from left hemibrain) were measured by RT-qPCR. All samples were run in duplicate for qPCR. Average Ct values and standard deviations (SD) were calculated for both HTT and XPNPEP1, and ΔCt (CtHTT-CtXPNPEP1) was determined for each sample. The ΔΔCt (ΔCt of VY-HTT01-injected samples-average vehicle ΔCT) was then calculated. Relative HTT mRNA levels were calculated for each sample by the 2−ΔΔCt method and expressed as the percentage relative to the vehicle control group. VY-HTT01 resulted in human HTT mRNA knockdown (KD) in the striatum at 4 weeks after intrastriatal injection in BACHD mice.

[1421] The average relative remaining HTT mRNA and relative HTT mRNA knockdown (KD) in YAC128 mouse striatum after administration with VY -HTT01 at different dose levels, as well as p-values generated by statistical analyses, are presented in Table 118.

TABLE 118
HTT mRNA lowering in BACHD striatum

| | | | Relative | | | | | |
|---|---|---|---|---|---|---|---|---|
| | | | remaining | | P value by | P value by | P value by | P value by |
| | | Total | HTT mRNA | HTT mRNA | one-way | one-way | one-way | one-way |
| | | dose | (% of veh; | KD (% of veh; | ANOVA | ANOVA | ANOVA | ANOVA |
| Group | Dose | (VG) | mean ± SD) | mean ± SD) | (vs Group 2) | (vs Group 3) | (vs Group 4) | (vs Group 5) |
| Group 1 | Veh | 0.0 | 100 ± 5 | 0 ± 5 | <0.0001 | <0.0001 | <0.0001 | <0.0001 |
| Group 2 | Low | 8.8e9 | 62 ± 13 | 38 ± 13 | — | <0.0001 | <0.0001 | <0.0001 |
| Group 3 | Mid | 2.8e10 | 42 ± 4 | 58 ± 4 | — | — | 0.0005 | 0.1686 |
| Group 4 | High | 8.8e10 | 28 ± 6 | 72 ± 6 | — | — | — | 0.1892 |
| Group 5 | MFD | 2.8e11 | 62 ± 13 | 65 ± 3 | — | — | — | — |

[1422] On average, 65±3% human HTT mRNA KD was observed at the maximal. feasible dose (p<0.0001 relative to vehicle group), 72±6% human HTT mRNA KD at the high dose (p<0.0001 relative to vehicle group), 58±4% human HTT mRNA KD at the middle dose (p<0.0001 relative to vehicle group) and 38±13% human HTT mRNA KD at the low dose (p<0.0001 relative to vehicle group). Dose-dependent human HTT mRNA KD was found with differences between HTT mRNA levels in the low-, middle- and high-dose groups, and in the low dose versus maximal feasible dose group. However, there was no difference in HTT mRNA levels between the MFD and high dose, nor between the. MFD and middle dose.

[1423] Together, these data demonstrated that VY-HTT01 suppressed striatal human HTT mRNA levels in a dose dependent manner in the BACHD mouse model of HD, and that maximal HTT mRNA lowering was attained at the high close (8.8×10¹⁰ VG per animal).

[1424] ix. Dose-Dependent Mutant Human HTT Protein Knockdown by VY-HTT01

[1425] To evaluate the dose dependence of HTT protein lowering after intrastriatal dosing of VY-HTT01, human HTT protein levels in right striatum tissue punches were measured by MSD. All samples were run in duplicate for MSD with the capture antibody 2B7 (a mouse monoclonal antibody against human HTT), and the detection antibody MW1 (an anti-polyQ specific antibody). Human HTT protein levels were calculated as human HTT protein concentration per mg of total protein (fmol/mg of protein) according to the standard curve. Relative HTT protein knockdown in each VY-HTT01-injected group was expressed as percentage of HTT protein in the vehicle control group. VY-HTT01 administration resulted in human mutant HTT protein KD in the striatum.

[1426] The average relative remaining HTT protein and relative HTT protein knockdown (KD) in BACHD mouse striatum after administration with VY-HTT01 at different dose levels, as well as p-values generated by statistical analyses, are presented in Table 119.

TABLE 119
HTT protein lowering in BACHD striatum

| | | | Relative | | | | | |
|---|---|---|---|---|---|---|---|---|
| | | | remaining | | P value by | P value by | P value by | P value by |
| | | Total | HTT protein | HTT protein | one-way | one-way | one-way | one-way |
| | | dose | (% of veh; | KD (% of veh; | ANOVA | ANOVA | ANOVA | ANOVA |
| Group | Dose | (VG) | mean ± SD) | mean ± SD) | (vs Group 2) | (vs Group 3) | (vs Group 4) | (vs Group 5) |
| Group 1 | Veh | 0.0 | 100 ± 6 | 0 ± 6 | p < 0.0001 | p < 0.0001 | p < 0.0001 | p < 0.0001 |
| Group 2 | Low | 8.8e9 | 55 ± 8 | 45 ± 8 | — | 0.3737 | p < 0.0001 | p < 0.0001 |
| Group 3 | Mid | 2.8e10 | 48 ± 13 | 52 ± 13 | — | — | 0.0006 | p < 0.0001 |
| Group 4 | High | 8.8e10 | 30 ± 7 | 70 ± 7 | — | — | — | 0.316 |
| Group 5 | MFD | 2.8e11 | 22 ± 5 | 78 ± 5 | — | — | — | — |

[1427] On average, human mutant HTT protein levels were suppressed by 78±5% at the AHD (p<0.0001), 70±7% at the high dose (p<0.0001), 52±13% at the middle dose (p<0.000) and 45±8% at the low dose (p<0.0001), at 4 weeks post dosing. This human HTT protein lowering was dose dependent, with differences in human HTT protein levels between the MFD versus middle (p<0.0001) or low dose (p<0.0001) groups, and high dose versus middle (p=0.0006) or low dose (p<0.0001) groups. There was no difference in human HTT protein levels between the MFD and high dose.

[1428] Together, these results demonstrated that -HTT01 suppressed human mutant HTT protein expression in a dose dependent manner in the BACHD mouse model of HD, and that at 4 weeks post-dose, maximal human HTT protein lowering in the striatum was attained at a dose of 8.8×10¹⁰ VG per animal.

[1429] This study demonstrated that intrastriatal injection of VY-HTT01 resulted in striatal human mutant HTT mRNA and protein KD in a dose dependent manner, ranging from 65-72% HTT mRNA and 70-78% HTT protein KD at the maximal feasible or high dose to 38% HTT mRNA and 45% protein KD at the low dose, at 4 weeks following injection. No abnormal cage side observations were detected in any animal in the study, Comparable body weight gain was seen for all groups and there were no differences in brain weight between vehicle- and VY HTT01-injected groups. These data demonstrated that VY-HTT01, administered by intrastriatal infusion, suppressed human mutant HTT mRNA and human mutant HTT protein levels in the BACHD mouse striatum in a dose dependent manner over 4 weeks, with maximal human mutant HTT protein lowering attained at a dose of 8.8×10¹⁰ VG per animal.

### Example 11

### In Vivo Study of VY-HTT01 Efficacy in the BACHD Mouse Model of Huntington's Disease

[1430] i. Test Article Preparation and Administration

[1431] The primary objective of this study was to investigate the efficacy of an AAV1 packaged viral genome, VOYHT1 (SEQ ID NO: 1352;hereinafter together referred to as AAV1-VOYHT1 or VY-HTT01) on motor function, general locomotion, and anxiety-like behavior over a 16-week period following bilateral intrastriatal infusion in the BACHD mouse, a model of Huntington's disease expressing human full-length mutant huntingtin (HTT). Further, this study was designed to evaluate the relationship between efficacy of VY-HTT01. administration on the above behavioral indices and VY-HTT01 dose, as well as HTT mRNA and protein lowering. Cage-side observations, and body and brain weight data, were also recorded.

[1432] On the basis of data obtained from dose response pharmacology experiments described in Example 10 (above), and in an effort to provide maximal and graded reduction of human mutant HTT protein, three dose levels of VY-HTT01 were selected for evaluation in the present study, as follows: 8.8×10¹⁰ VG/animal (high dose), 2.8×10¹⁰ VG/animal (middle or mid dose), and 8.8×10⁹ VG/animal (low dose). Briefly, data from Example 10 demonstrated 70%, 52%, and 45% human mutant HTT protein lowering, respectively, at these dose levels at 4 weeks after bilateral intrastriatal administration of VY-HTT01. In this study, brain tissues at the infusion site (striatum) were evaluated for human mutant HTT mRNA and protein levels at 16 weeks after administration (post-dosing).

[1433] This study involved forty-eight (48) female mils musculus FVB/N-Tg(HTT*97Q)IXwy/J-C57BL/6J (BACHD) mice and twelve (12) FVB/N-C57BL/6 (WT) mice (2-3 months old), randomly assigned into experimental groups by even distribution of age, body weight, and results from the baseline behavioral tests. On Day 1 all animals received bilateral injections of either vehicle (Groups 1 and 2) or VY-HTT01 (Groups 3-5) at 0.5 μL/minute into the left and right striata via a stereotaxically positioned silica catheter connected to a syringe. The details for groups, animal genotype, test articles and dosing paradigm are presented in Table 120.

TABLE 120
Study design

| | | | | Vector Dose | | | | |
|---|---|---|---|---|---|---|---|---|
| | | | | Volume | Dosing | | Total | |
| | | Number of | | injection | titer | | dose | In-life |
| Group | Genotype | animals | Dose | (μL/side) | (VG/mL) | VG/side | (VG) | (Weeks) |
| Group 1 | WT | 12 | Vehicle | 5 | 0.0 | 0.0 | 0.0 | 16 |
| Group 2 | BACHD | 12 | Vehicle | 5 | 0.0 | 0.0 | 0.0 | 16 |
| Group 3 | BACHD | 12 | VY-HTT01, | 5 | 8.8e11 | 4.4e9 | 8.8e9 | 16 |
| | | | low dose | | | | | |
| Group 4 | BACHD | 12 | VY-HTT01, | 5 | 2.8e12 | 1.4e10 | 2.8e10 | 16 |
| | | | mid dose | | | | | |
| Group 5 | BACHD | 12 | VY-HTT01, | 5 | 8.8e12 | 4.4e10 | 8.8e10 | 16 |
| | | | high dose | | | | | |

[1434] ii. Test Article Preparation and Administration

[1435] The test article preparation procedure was similar to that described in Example 8.

[1436] Animals were anesthetized by injection with ketamine (10 mg/mL) xylazine (1 mg/mL) and acepromazine (0.3 ma/mL) solution (160-200 μL/20 g) and placed into a stereotaxic frame. Intracranial injections were performed as follows: five microliters (5 μL) of recombinant viral vectors or vehicle were injected into the striatum (A/P +0.5, M/L ±2.0, DV −3.8 from bregma and dura; incisor bar, 0.0) using a 10 μL Hamilton syringe at the rate of 0.5 μL/min. The needle was left in place for 3 minutes following the completion of infusion, before it was raised out of the brain. Acetaminophen was provided in the drinking water 3 days before surgery and 3 days after surgery as pre- and post-operative analgesic.

[1437] iii. Cage-Side Observations, Body Weights, and Brain Weights

[1438] Cage-side observations were conducted prior to injection and performed daily starting after surgery. All mice were monitored for general health and signs of pain and/or illness daily.

[1439] For body weights, mice were weighed immediately prior to test article administration and weekly after dosing. Body weight measurements indicated that BACHD mice gain more weight over time than their WT littermates, However, there were no differences in body weight changes between BACHD groups dosed with vehicle or any dose of VY-HTT01 by one-way ANOVA with Tukey's post hoc test.

[1440] Brain weights were recorded after removal from the animal. Cage-side observations showed no abnormalities for all animals in all dose groups during the study. Brain weight measurements also showed no differences between BACHD groups dosed with vehicle or any dose of VY-HTT01 by one-way ANOVA.

[1441] Based on cage side observations, body weight gain, and brain weight, all doses of VY-HTT01 were well-tolerated over the 16-week in-life period of the study.

[1442] iv. In-Life Behavioral Tests

[1443] Four (4) behavioral tests were performed to collectively assess the effects of VY-HTT01 on BACHD mouse motor function and coordination, balance, locomotor activity, and anxiety-like behavior. These tests, described in detail below, were as follows: the accelerating rotarod test; the balance beam test; the open field test; and the light/dark box test.

[1444] The accelerating rotarod test was performed to assess the effects of VY-HTT01 on mouse motor function and motor coordination. BACHD mice were trained on the rotarod for two consecutive days (day 1 and 2) and tested on day 3. On the first training day, the rotarod was set to a constant speed of 5 RPM for 300 seconds, Mice that fell off the rod before completion of the 300-second time period were placed back on the rod until the full 300-second period expired. On the second day of training, the rotarod was set to accelerate from 5 to 40 rpm over 300 seconds. Mice that fell off the rod were placed back on the rod until it completed the 300-second training period. On day 3 (test day), the mice were placed on the rotarod set to accelerate from 5 to 40 rpm over 300 seconds. The latency to fall, defined by the time elapsed until the animal fell from the rotarod, was recorded over three trials. The rotarod test was carried out at pre-dosing for baseline measurement and was repeated every 4 weeks after dosing (day 28, 56, 84 and 113) until necropsy.

[1445] The balance beam test was performed to assess the effects of VY-HTT01 on mouse subtle motor coordination and balance. Before dosing, BACHD mice were trained on an elevated beam (1-meter long, 21-mm wide) on day 1, and were tested on a 1-meter long, 9-mm wide beam on day 2 for baseline measurement. The test was repeated on the 1-meter long, 9-nm wide beam at 8 weeks (day 57) and 16 weeks (day 114) after dosing. In each test, the latencies to traverse the beam (cross time) of two successful trials in which the mouse did not stall on the beam were averaged. The number of slips and falls were also recorded.

[1446] The open field test was performed at day 112 after dosing to assess locomotor activity and anxiety-like behavior. The test was carried out in a 27.3×27.3×20.3 cm white-base chamber. Mice were placed into the center of the test chamber and allowed to explore freely for 60 minutes. Locomotor activities including walking path and vertical movements were traced and measured using an overhead camera with a computer-assisted infra-red tracking system that computed total distance traveled (cm) and vertical counts. The percentage of time spent, and distance traveled in the center of the open field chamber, were also assessed for anxiety-like behavior.

[1447] The light/dark box test was conducted to assess the anxiety-like behavior at 8 weeks (day 58) and 16 weeks (day 115) after dosing. The apparatus used for the light/dark transition test consisted of the open field chamber with a black plastic insert to separate a dark compartment (dark zone) and a transparent compartment (light zone). Mice were placed in the center of the open field chamber, facing the dark compartment entrance and allowed to move freely between the dark and light compartments with the connecting gate open for 10 min. The distance traveled in each chamber, the total number of transitions, the time spent in each chamber, and the latency to enter the light chamber were recorded by a computer-assisted image program. The anxiety-like behavior was assessed by calculating the percentage of distance traveled in light zone (% distance travelled in light box) and the percentage of time spent in light zone (% time spent in light box).

[1448] Behavioral results were unblinded after the data had been collected and analyzed.

[1449] v. Tissue Collection

[1450] Sixteen weeks post VY-HTT01 dosing, mice received an intraperitoneal injection of ketamine (10 mg/mL), xylazine (1 mg/mL) and acepromazine (0.3 mg/mL) solution (160˜200 μL/20 g). Once under anesthesia, mice were weighed and body weights were recorded. The toe pinch-response method was used to determine depth of anesthesia. Once unresponsive, a subset of 8 mice per group were perfused transcardially with cold 1×PBS, and brains were carefully removed. Brain weights were recorded and then brains were cut along the coronal axis using a mouse brain matrix (Harvard Apparatus, Holliston, Mass.). Tissue samples were collected from the left and right striatum of a 2 mm-thick brain slab using a 3 mm biopsy punch. The overlying cortical region was also collected for potential biochemical analysis. These striatal and cortical samples were then flash-frozen in liquid nitrogen and stored at −80° C. for processing and mRNA or protein analysis.

[1451] The brains from the remaining 4 animals per group were immediately fixed with 4% paraformaldehyde after perfusion with 1×PBS for immunohistochemical analyses.

[1452] In addition, a 0.4 cm sample of tail from each mouse was collected and stored at −60° C. or lower until confirmatory genotyping analysis. In brief, for genotyping, the reaction mixture contained 900 mM of forward and reverse primers, 250 mM of probe, and 50-100 ng/uL of DNA. After an initial activation/denaturation step at 50° C. for 2 minutes and then 95° C. for 10 minutes, amplification was performed during 40 cycles of 95° C. for 15 seconds followed with 60° C. for 1 minute. Genotyping analysis of mouse tail snip samples confirmed that all 48 BACHD animals in the study were positive and all 12 WT mice were negative for the human mutant HTT gene, as expected.

[1453] vi. HTT mRNA Quantification by RT-qPCR

[1454] Striatal tissue punch processing, total RNA extraction and quantitative real-time PCR (RT-qPCR) were conducted using tissue punches collected from the left striatum. Human HTT and mouse X-Prolyl Aminopeptidase 1 (XPNPEP1)mRNA levels were determined by a RT-qPCR TaqMan assay, using procedures similar to those described in Example 8. HTT mRNA levels were normalized to XPNPEP1. mRNA levels, and then further normalized to the vehicle control group. RT-qPCR, results were unblinded after the data were analyzed.

[1455] vii. HTT Protein Quantification

[1456] HTT protein quantification procedures were similar to those described in Example 8.

[1457] viii. Immunohistochemical Analyses

[1458] Immunohistochemistry (IHC) staining for NeuN, GFAP, Iba1, DARPP32 and Fluoro-Jade C was conducted on mouse brains using standard procedures.

[1459] ix. Acceptance Criteria

[1460] Acceptance criteria were similar to those described in Example 8.

[1461] x. Effects of VY-HTT01 on BACHD Mouse Motor Function and Motor Coordination

[1462] As previously described, the accelerating rotarod test was performed to assess the effects of VY-HTT01 on motor function and motor coordination, while the balance beam test was performed to assess the effects of VY-HTT01 subtle motor coordination and balance. Data corresponding to these behavioral indices are presented in detail below.

[1463] The rotarod test was performed at pre-dosing and repeated every 4 weeks post-dosing up to 16 weeks post-dosing. The absolute latency to fall of each animal was recorded. Rotarod test absolute latency to fall (seconds) data are presented in Table 121.

TABLE 121
Latency to fall (seconds) in the rotarod test

| | | Pre-dose | 4-week | 8-week | 12-week | 16-week |
|---|---|---|---|---|---|---|
| | | baseline | post-dose | post-dose | post-dose | post-dose |
| | | (mean ± SD, | (mean ± SD, | (mean ± SD, | (mean ± SD, | (mean ± SD, |
| Genotype | Dose | n = 12/group) | n = 12/group) | n = 12/group) | n = 12/group | n = 23-12/group |
| WT | Vehicle | 277 ± 51 | 281 ± 16 | 242 ± 47 | 238 ± 46 | 236 ± 42 |
| BACHD | Vehicle | 182 ± 73 | 139 ± 41 | 105 ± 38 | 98 ± 34 | 90 ± 33 |
| BACHD | VY-HTT01, | 199 ± 67 | 113 ± 72 | 63 ± 35 | 50 ± 30 | 44 ± 31 |
| | high dose | | | | | |
| BACHD | VY-HTT01, | 181 ± 50 | 118 ± 36 | 85 ± 27 | 80 ± 29 | 73 ± 25 |
| | mid dose | | | | | |
| BACHD | VY-HTT01, | 189 ± 68 | 136 ± 32 | 107 ± 38 | 84 ± 33 | 86 ± 31 |
| | low dose | | | | | |

[1464] Latency to fall data were also expressed as percent (%) of pre-dose baseline (post-dosing latency/pre-doing latency×100%), or percent change in latency to fall. Rotarod test percent (%) latency to fall data are presented in Table 122.

TABLE 122
Percent (%) change in latency to fall in the rotarod test

| | | Pre-dose | 4-week | 8-week | 12-week | 16-week |
|---|---|---|---|---|---|---|
| | | baseline | post-dose | post-dose | post-dose | post-dose |
| | | (mean ± SD, | (mean ± SD, | (mean ± SD, | (mean ± SD, | (mean ± SD, |
| Genotype | Dose | n = 12/group) | n = 12/group) | n = 12/group) | n = 12/group | n = 23-12/group |
| WT | Vehicle | 100 ± 22 | 85 ± 25 | 94 ± 18 | 90 ± 23 | 91 ± 23 |
| BACHD | Vehicle | 100 ± 65 | 112 ± 44 | 103 ± 36 | 87 ± 35 | 91 ± 31 |
| BACHD | VY-HTT01, | 100 ± 59 | 110 ± 49 | 129 ± 41 | 121 ± 46 | 127 ± 53 |
| | high dose | | | | | |
| BACHD | VY-HTT01, | 100 ± 72 | 111 ± 58 | 118 ± 70 | 112 ± 61 | 128 ± 60 |
| | mid dose | | | | | |
| BACHD | VY-HTT01, | 100 ± 55 | 96 ± 51 | 102 ± 52 | 106 ± 50 | 124 ± 50 |
| | low dose | | | | | |

[1465] Together, BACHD mice had impaired motor function compared with WT littermates as indicated by a shorter latency to fall. No beneficial effects of VY-HTT01 at any dose were observed up to 16 weeks post-dosing, though VY-HTT01 high dose (8.8×10¹⁰ VG per animal) BACHD mice showed greater reduction in latency to fall versus vehicle-, VY-HTT01 middle- or low dose-BACHD mice by two-way ANOVA analysis with Tukey's multiple comparisons test. P values corresponding to statistical analyses performed on latency (% of pre-dose baseline), or percent change in latency to fall, rotarod data are presented in Table 123.

TABLE 123
Statistical analyses of percent (%) change in latency to fall in the rotarod test

| One-way ANOVA with | Pre-dose | 4-week | 8-week | 12-week | 16-week |
|---|---|---|---|---|---|
| Tukey's multiple comparisons | baseline | post-dose | post-dose | post-dose | post-dose |
| test (veh = vehicle; High = high | (mean ± | (mean ± | (mean ± | (mean ± | (mean ± |
| dose, Mid = mid dose, Low = | SD, n = | SD, n = | SD, n = | SD, n = | SD, n = |
| low dose VY-HTT01) | 12/group) | 12/group) | 12/group) | 12/group | 12/group |
| WT-Veh vs. BACHD-Veh | 0.016 | 0.044 | 0.032 | 0.067 | 0.004 |
| BACHD-Veh vs. BACHD-High | >0.999 | 0.408 | 0.017 | 0.003 | 0.004 |
| BACHD-Veh vs. BACHD-Mid | >0.999 | 0.595 | 0.457 | 0.561 | 0.545 |
| BACHD-Veh vs. BACHD-Low | >0.999 | 0.950 | 0.999 | 0.592 | 0.953 |
| BACHD-High vs. BACHD-Mid | >0.999 | 0.886 | 0.140 | 0.033 | 0.029 |
| BACHD-High vs. BACHD-Low | >0.999 | 0.565 | 0.020 | 0.047 | 0.009 |
| BACHD-Mid vs. BACHD-Low | >0.999 | 0.817 | 0.528 | >0.999 | 0.841 |

[1466] The balance beam test was performed at pre-dosing and then repeated at 8- and 16-weeks post-dosing to assess the effects of VY-HTT01 on subtle motor coordination and balance in BACHD mice. In each balance beam test, animals traversed an elevated 1-meter-long, 9-mm-wide beam for three trials. The absolute cross time (seconds) required to traverse the beam was recorded. The cross time as percent (%) of pre-dose baseline was calculated as post-dosing cross time/pre-dosing cross time×100%. Data on time spent to cross the balance beam, expressed as absolute cross time (seconds) are presented in Table 124.

TABLE 124
Time spent (seconds) to cross beam in the balance beam test

| | | Pre-dose | 8-week | 16-week |
|---|---|---|---|---|
| | | baseline | post-dose | post-dose |
| | | (mean ± | (mean ± | (mean ± |
| | | SD, n = | SD, n = | SD, n = |
| Genotype | Dose | 12/group) | 12/group) | 12/group) |
| WT | Vehicle | 10 ± 3 | 8 ± 2 | 7 ± 3 |
| BACHD | Vehicle | 16 ± 5 | 20 ± 8 | 18 ± 7 |
| BACHD | VY-HTT01, | 19 ± 7 | 19 ± 6 | 16 ± 7 |
| | high dose | | | |
| BACHD | VY-HTT01, | 22 ± 11 | 24 ± 17 | 14 ± 8 |
| | mid dose | | | |
| BACHD | VY-HTT01, | 17 ± 8 | 21 ± 9 | 15 ± 6 |
| | low dose | | | |

[1467] Data on time spent to cross the balance beam, expressed as a percent (%) of pre-dose baseline are presented in Table 125.

TABLE 125
Percent (%) change in time spent to
cross beam in the balance beam test

| | | Pre-dose | 8-week | 16-week |
|---|---|---|---|---|
| | | baseline | post-dose | post-dose |
| | | (mean ± | (mean ± | (mean ± |
| | | SD, n = | SD, n = | SD, n = |
| Genotype | Dose | 12/group) | 12/group) | 12/group) |
| WT | Vehicle | 100 ± 29 | 79 ± 21 | 70 ± 28 |
| BACHD | Vehicle | 100 ± 34 | 123 ± 50 | 113 ± 42 |
| BACHD | VY-HTT01, | 100 ± 34 | 101 ± 33 | 84 ± 39 |
| | high dose | | | |
| BACHD | VY-HTT01, | 100 ± 49 | 107 ± 75 | 65 ± 37 |
| | mid dose | | | |
| BACHD | VY-HTT01, | 100 ± 49 | 120 ± 54 | 87 ± 34 |
| | low dose | | | |

[1468] Together, BACHD mice injected with vehicle required more time to cross the balance beam at 16 weeks post-dosing versus WT mice, suggesting deficits in subtle motor coordination (p<0.05 by two-way ANOVA with Tukey's multiple comparisons test). In BACHD mice, mid-dose VY-HTT01 (2.8×10¹⁰ VG per animal) injection shortened cross time versus vehicle at 16 weeks post-dosing, providing support for VY-HTT01-associated improvement of subtle motor function and balance (p<0.05 by two-way ANOVA with Tukey's multiple comparisons test). However, cross time was unchanged with high-dose or low-dose VY-HTT01 (p>0.05).

[1469] The number of limb slips during transversal of the balance beam was also recorded. There were no changes in number of slips with any tested dose of VY-HTT01 by one-way ANOVA with Tukey's multiple comparisons test. Data on the number of slips in the balance beam test are presented in Table 126.

TABLE 126
Number of slips in the balance beam test

| | | Pre-dose | 8-week | 16-week |
|---|---|---|---|---|
| | | baseline | post-dose | post-dose |
| | | (mean ± | (mean ± | (mean ± |
| | | SD, n = | SD, n = | SD, n = |
| Genotype | Dose | 12/group) | 12/group) | 12/group) |
| WT | Vehicle | 0.2 ± 0.3 | 0.1 ± 0.2 | 0.1 ± 0.3 |
| BACHD | Vehicle | 0.3 ± 0.6 | 4.0 ± 4.8 | 3.2 ± 3.7 |
| BACHD | VY-HTT01, | 1.3 ± 2.8 | 6.1 ± 6.6 | 4.3 ± 5.2 |
| | high dose | | | |
| BACHD | VY-HTT01, | 0.3 ± 0.5 | 7.1 ± 7.6 | 6.0 ± 7.1 |
| | mid dose | | | |
| BACHD | VY-HTT01, | 0.6 ± 0.8 | 4.6 ± 3.6 | 4.6 ± 6.4 |
| | low dose | | | |

[1470] xi. Effects of VY-HTT01 on BACHD Mouse Locomotor Activity and Anxiety-Like Behavior

[1471] As previously described, the open field test was performed to assess locomotor activity and anxiety-like behavior. The light/dark box test was performed as an additional metric of anxiety-like behavior. Data corresponding to these behavioral indices are presented in detail below.

[1472] To measure general locomotor activity, the open field test was performed on BACHD mice and WT littermates at 16 weeks post-dosing (˜6.5 month of age). Briefly, each mouse was placed in the center of the open field chamber and allowed to freely explore the chamber for 60 minutes. Mouse locomotor activity was assessed by total distance (cm) travelled during 1-hour free exploration. Anxiety-like behavior was assessed by percent (%) time spent in the center zone of the open field and % distance travelled in the center zone of the open field. Data on the total distance travelled (cm), percent (%) time in center zone, and percent (%) distance traveled in the center zone of the open field test are presented in Table 127.

TABLE 127
Open field test locomotor activity and anxiety

| | | | Anxiety | |
|---|---|---|---|---|
| | | Locomotion | % center | |
| | | Total distance | distance | % center |
| | | (cm; mean ± | (mean ± | time (mean ± |
| | | SD, n = | SD, n = | SD, n = |
| Genotype | Dose | 12/group) | 12/group) | 12/group) |
| WT | Vehicle | 6054 ± 2248 | 44 ± 6 | 22 ± 9 |
| BACHD | Vehicle | 2385 ± 762 | 35 ± 10 | 13 ± 9 |
| BACHD | VY-HTT01, | 2486 ± 836 | 24 ± 14 | 7 ± 7 |
| | high dose | | | |
| BACHD | VY-HTT01, | 2965 ± 1597 | 30 ± 12 | 10 ± 6 |
| | mid dose | | | |
| BACHD | VY-HTT01, | 2096 ± 444 | 25 ± 11 | 10 ± 6 |
| | low dose | | | |

[1473] Together, vehicle-injected BACHD mice were hypoactive compared with WT littermates, as measured by the total distance travelled (p<0.0001, one-way ANOVA with Tukey's multiple comparisons test). Intrastriatal injection of VY-HTT01 had no effect at any dose on the total distance travelled in the open field test. Further, vehicle-injected BACHD mice showed increased anxiety versus WT littermates in the open field test at 16 weeks post-dosing as assessed by percent time spent in the center zone (p<0.05, one-way ANOVA with Tukey's multiple comparisons test), Intrastriatal injection of VY-HTT01 had no effect on open field test anxiety indices at 8- or 16-weeks post-dosing.

[1474] Anxiety-like phenotype was additionally assessed in the light/dark box test at 8 and 16 weeks post-dosing by evaluating percent (%) of total distance traveled (cm) in the light box, as well as percent (%) of total time spent in the light box. Data on percent (%) of total distance traveled (cm) in the light box, as well as percent (%) of total time spent in the light box for the light/dark box test are presented in Table 128.

TABLE 128
Percent (%) distance travelled and time in the light box in the light/dark box test

| | | 8 weeks post-dose | | 16 weeks post-dose | |
|---|---|---|---|---|---|
| | | % distance in | % time in | % distance | % time in |
| | | light box | light box | in light box | light box |
| | | (mean ± SD, | (mean ± SD, | (mean ± SD, | (mean ± SD, |
| Genotype | Dose | 12/group) | 12/group) | 12/group) | 12/group) |
| WT | Vehicle | 32.4 ± 3.8 | 35.7 ± 7.8 | 33.5 ± 5.8 | 36.4 ± 9.7 |
| BACHD | Vehicle | 22.3 ± 7.2 | 24.2 ± 11.5 | 25.1 ± 6.1 | 23.9 ± 10.1 |
| BACHD | VY-HTT01, | 18.7 ± 7.0 | 17.9 ± 11.1 | 27.8 ± 4.6 | 22.7 ± 6.7 |
| | high dose | | | | |
| BACHD | VY-HTT01, | 18.3 ± 6.7 | 18.4 ± 13.8 | 23.5 ± 7.3 | 19.1 ± 7.6 |
| | mid dose | | | | |
| BACHD | VY-HTT01, | 19.0 ± 6.3 | 17.3 ± 8.8 | 26.1 ± 6.9 | 21.7 ± 8.7 |
| | low dose | | | | |

[1475] Together, vehicle-injected BACHD mice showed increased anxiety in the light/dark box test at 8 and 16 weeks post-dosing as assessed by percent (%) of total distance traveled (cm) in the light box, as well as percent (%) of total time spent in the light box when compared with vehicle-injected SVT mice (p<0.05, one-way ANOVA with Tukey's multiple comparisons test). Intrastriatal injection of VY-HTT01 had no effect on these endpoints in the light/dark box test at 8- or 16-weeks post-dosing. Further, VY-HTT01 at the high-dose (8.8×10¹⁰ VG per animal) and low-dose (8.8×10⁹ VG per animal) increased % distance travelled in light box by 48.0% (p<0.01, two-way ANOVA Sidak's multiple comparisons test) and 36.5% (p<0.05, two-way ANOVA Sidak's multiple comparisons test), respectively, at 16 weeks versus 8 weeks post-dosing, suggesting that VY-HTT01 reduced anxiety over time.

[1476] xii. Dose-Dependent Human HTT n,RNA Knockdown by VY-HTT01

[1477] After completion of behavioral assessments at 16 weeks following intrastriatal dosing of VY-HTT01, the dose-dependence of human mutant HTT mRNA lowering was assessed in striatum samples from the left hemisphere of 8 animals per BACHD group. Human HTT and mouse XPNPEP1 mRNA (as an internal control) levels were measured by RT-qPCR. All samples were run in duplicate for qPCR. Average Ct values and standard deviations (SD) were calculated for both HTT and XPNPEP1, and ΔCt (CtHTT-CtXPNPEP1) was determined for each sample. The ΔΔCt (ΔCt of VY-HTT01-injected samples-average vehicle ΔCT) was then calculated. Relative human mutant HTT mRNA levels were calculated for each sample by the 2-ΔΔCt method and expressed as the percentage relative to the vehicle control BACHD group. All doses of VY-HTT01 resulted in human mutant HTT mRNA KD in the striatum at 16 weeks after intrastriatal injection in BACHD mice. Human HTT mRNA levels in BACHD mouse striatum at 16 weeks after VY-HTT01 administration at different dose levels, as well as p-values generated by statistical analyses, are presented in Table 129.

TABLE 129
HTT mRNA lowering in BACHD striatum at 16 weeks post dose

| | | 16 weeks post dose | | | | | |
|---|---|---|---|---|---|---|---|
| | | (% of Veh; mean ± SD, | | | | | |
| | | n = 8/group) | | P value by | P value by | P value by | P value by |
| | | Relative | | one-way | one-way | one-way | one-way |
| | | remaining | HTT | ANOVA | ANOVA | ANOVA | ANOVA |
| Genotype | Dose | HTT mRNA | mRNA KD | (vs Veh) | (vs High) | (vs Mid | (vs Low) |
| BACHD | Vehicle | 100 ± 26 | 0 ± 26 | — | <0.0001 | <0.0001 | <0.0001 |
| BACHD | VY-HTT01, | 55 ± 10 | 45 ± 10 | — | — | 0.9992 | 0.4248 |
| | high dose | | | | | | |
| BACHD | VY-HTT01, | 54 ± 10 | 46 ± 10 | — | — | — | 0.4994 |
| | mid dose | | | | | | |
| BACHD | VY-HTT01, | 43 ± 7 | 57 ± 7 | — | — | — | — |
| | low dose | | | | | | |

[1478] On average, there was 45±10% human mutant HTT mRNA KD at the high dose (p<0.0001 relative to the BACHD vehicle group), 46±10% human mutant HTT mRNA KD at the middle dose (p<0.0001 relative to the RACED vehicle group) and 57±7% human mutant HTT mRNA KD at the low dose (p<0.0001 relative to the BACHD vehicle group). There was no difference in HTT mRNA levels across high, middle and low dose BACHD groups at 16 weeks post-dose. Thus, intrastriatal administration of VY-HTT01 at 8.8×10⁹, 2.8×10¹⁰ and 8.8×10¹⁰ VG per animal results in similar 45-57% striatal human mutant HTT mRNA suppression in BACHD mice at 16 weeks post-dose.

[1479] After completion of behavioral assessments at 16 weeks following intrastriatal dosing of VY-HTT01, the dose-dependence of human mutant HTT protein lowering was assessed in striatum samples from the right hemisphere of 8 animals per group using the MSD assay. All doses of VY-HTT01 resulted in human mutant HTT protein KD in the striatum. Human HTT protein levels in BACHD mouse striatum at 16 weeks after VY-HTT01 administration at different dose levels, as well as p-values generated by statistical analyses, are presented in Table 130.

TABLE 130
HTT protein lowering in BACHD striatum at 16 weeks post dose

| | | 16 weeks post dose | | | | | |
|---|---|---|---|---|---|---|---|
| | | (% of Veh; mean ± SD, | | | | | |
| | | n = 8/group) | | P value by | P value by | P value by | P value by |
| | | Relative | | one-way | one-way | one-way | one-way |
| | | remaining | HTT | ANOVA | ANOVA | ANOVA | ANOVA |
| Genotype | Dose | HTT protein | protein KD | (vs Veh) | (vs High) | (vs Mid | (vs Low) |
| BACHD | Vehicle | 100 ± 23 | 0 ± 23 | — | <0.0001 | <0.0001 | <0.0001 |
| BACHD | VY-HTT01, | 23 ± 3 | 77 ± 3 | — | — | 0.2745 | 0.0003 |
| | high dose | | | | | | |
| BACHD | VY-HTT01, | 34 ± 7 | 66 ± 7 | — | — | — | 0.0295 |
| | mid dose | | | | | | |
| BACHD | VY-HTT01, | 53 ± 8 | 47 ± 8 | — | — | — | — |
| | low dose | | | | | | |

[1480] On average, human mutant HTT protein levels were suppressed by 77±3% at the high dose (p<0.0001), 66±7% at the middle dose (p<0.0001) and 47±8% at the low dose (p<0.0001), at 16 weeks post-dosing using a one-way ANOVA with Tukey's post-hoc test. This human mutant HTT protein lowering was dose-dependent, with differences in human HTT protein levels between the high versus low dose (p<0.001) and middle versus low dose (p<0.05) groups. There was no difference in human mutant HTT protein level between the high and middle dose VY-HTT01 groups, These results demonstrated that intrastriatal dosing of VY-HTT01 suppressed human mutant HTT protein expression in the striatum in a dose-dependent manner in the BACHD mouse model of HD, and that maximal human mutant HTT protein lowering in the striatum was attained at 2.8×10¹⁰ VG per animal at 16 weeks post-dose.

[1481] xiii. Immunohistochemical Analyses of Cellular Markers Following Intrastriatal Dosing with VY-HTT01

[1482] After completion of behavioral assessments at 16 weeks following intrastriatal dosing of VY-HTT01, the brains from 4 animals per group were used for immunohistochemistry. Immunohistochemical (IHC) analyses were performed to investigate whether VY-HTT01 affects NeuN, DARPP32, Fluoro-Jade C, GFAP and Iba1 staining in the BACHD mouse striatum.

[1483] There were no differences in striatal density of NeuN-positive cells between vehicle BACHD and WT mice, or across vehicle and VY-HTT01 BACHD mice. Further, there were no differences in DARPP32, Iba1, or GFAP immunoreactivity in the striatum between vehicle-injected BACHD and WI mice, nor across vehicle and VY-HTT01 BACHD mice. Neuronal degeneration was not identified in any group, based on Fluoro-Jade C immunoreactivity. s.

[1484] In this study, no treatment-related differences in neuronal cell density, gliosis, or body weight were identified in BACHD mice.

[1485] This study demonstrated that intrastriatal injection of VY-HTT01 (8.8×10⁹, 2.8×10¹⁰ or 8.8×10¹⁰ VG per animal) resulted in striatal human mutant HTT mRNA KD ranging from 45% to 57%, accompanied by striatal human mutant HTT protein KD by 47-77% that was dose-dependent at 16 weeks post-dose in BACHD mice. VY-HTT01 (2.8×10¹⁰ VG per animal) improved motor coordination deficits in the balance beam test at 16 weeks post-dose in BACHD mice. VY-HTT01 (8.8×10⁹ and 8.8×10¹⁰ VG per animal) improved anxiety in the light/dark box test between 8- and 16-weeks post-dose in BACHD mice.

[1486] The high dose of VY-HTT01 (8.8×10¹⁰ VG per animal) resulted in HTT protein KD by 77% in the striatum; a reduced latency to fall in the rotarod test at 16 weeks post-dose; and, improved anxiety in the light/dark box test from test 8 to 16 weeks post-dose in BACHD mice compared with BACHD mice administered vehicle. The middle (mid) dose of VY-HTT01 (2.8×10¹⁰ VG per animal) resulted in HTT protein KD by 66% in the striatum, as well as improved subtle motor coordination in the balance beam test at 16 weeks post-dose compared with BACHD administered vehicle. The low dose of VY-HTT01 (8.8×10⁹ VG per animal) resulted in human mutant HTT protein KD by 47% in the striatum accompanied by improved anxiety-like behavior in the light/dark box test from 8 to 16 weeks post-dose compared with BACHD mice administered vehicle VY-HTT01 had no apparent effects on neuronal or glial markers.

[1487] These data demonstrate that VY-HTT01 administered by intrastriatal infusion lowers human mutant HTT expression in the BACHD mouse striatum in a dose-dependent manner, and improved subtle motor coordination as assessed by the balance beam test at the middle (2.8×10¹⁰ VG per animal) dose of VY-HTT01, and improved anxiety in BACHD mice, as assessed by the light/dark box test at the low (8.8×10⁹ VG per animal) and high (8.8×10¹⁰ VG per animal) doses of VY-HTT01.

### Example 12

### HTT Protein Evaluation in NHP Putamen, Caudate, and Thalamus after Intraputaminal and Intrathalamic Infusion of VY-HTT01 With Different Delivery Parameters

[1488] I. Study Design

[1489] As an extension of Example 1 (Dose Optimization Study I), described in detail above, the overarching goal of this study was to measure HTT protein levels in tissue punches from the putamen, caudate and thalamus 5 weeks after bilateral combined intraputaminal and intrathalamic infusion of AAV1-VOYHT1 in non-human. primate (NHP) rhesus macaque (Macaca mulatto), toward characterizing the effects of varying AAV1-VOYHT1 delivery parameters (e.g., volume of infusion and concentration) on HTT protein levels, and as a basis for establishing; future dosing parameters. NHP HTT mRNA was also measured from the same tissue samples in order to interrogate the relationship between relative HTT protein and relative HTT mRNA levels from the same sample. General aspects of study implementation, including animal care/groups, test article preparation, and dosing schedules, were the same as described in Example 1 (above). The study design summarized in Table 40 similarly reflects that of the present study.

[1490] ii. Tissue Sample Collection and Preparation

[1491] Approximately twenty-two coronal brain slices (3 mm thick) were collected for each animal using a monkey brain matrix. Brain slices were then fresh frozen and stored at −60° C. for potential pharmacology analysis or were fixed for histopathology evaluation.

[1492] Procedures for brain tissue sample collection for subsequent quantitation of HTT protein were similar to those described in Example 7 (above). Briefly, frozen brain slices were warmed at room temperature (for ˜1 min), and then tissue samples were rapidly collected using a 2 mm biopsy punch outfitted with a plunger, and immediately transferred to a pre-cooled collection tube on dry ice. All tissue punches were maintained on dry ice during collection and then stored at −80° C. until tissue analysis.

[1493] Procedures for tissue sample preparation for subsequent quantitation of HTT protein were as described in Example 7 (above). Briefly, brain tissue punches were weighed, pulverized using a tissue impactor, transferred into pre-chilled collection bottle, and stored on dry ice. The pulverized dry tissue powder was aliquoted into two parts: one quarter of the tissue powder was transferred to a new pre-chilled tube for HTT mRNA measurement by the branched DNA (bDNA) assay, and the remaining three-quarters of tissue powder was transferred into another pre-chilled tube for HTT protein quantification by LC-MS/MS.

[1494] iii. Branched DNA Assay for Quantitation HTT mRNA

[1495] Methods for quantitation of HTT mRNA by branched DNA (bDNA) assay were as described above in Example 1 (above).

[1496] iv. LC-MS/MS for Quantitation of HTT Protein

[1497] Methods for quantitation of HTT protein by UPLC-MS/MS (Ultra performance liquid chromatography-mass spectrometry and liquid chromatography-tandem mass spectrometry), or LC-MS/MS, were as described above in Example 7 (above). All samples were run at the same time for HTT protein quantification by LC-MS/MS.

[1498] v. Putamen HTT Protein and mRNA Levels

[1499] To evaluate HTT protein and mRNA lowering in the putamen, 4 punches were collected from the putamen in the right hemisphere of all animals from all groups, resulting in a total of 12 punches per group. Aliquots of pulverized putamen punch powder were used for HTT and beta-actin protein analysis by LC-MS/MS. HTT protein levels were normalized to levels of beta-actin (internal control), and then further normalized to the vehicle group. The average relative remaining putamen HTT protein and relative putamen HTT protein knockdown (KD) across total VG doses (VG/animal, or VG) and expressed as a percentage of vehicle (veh), corresponding standard deviation (stdev) values, as well as P-values generated by one-way ANOVA with. Tukey's multiple comparisons, are presented in Table 131. Note that each group (grp) of animals listed in in the below Table 131 consisted of 3 animals per group, with the exception of group A3, which had only 2 animals per group.

TABLE 131
Dose-dependent HTT protein lowering in the NHP putamen after bilateral
intraputaminal and intrathalamic infusion of AAV1-VOYHT1

| | | Relative | Relative | P value by | P value by | P value by | P value by | P value by |
|---|---|---|---|---|---|---|---|---|
| | Total | remaining | HTT | one-way | one-way | one-way | one-way | one-way |
| Group | dose | HTT protein | protein KD | ANOVA | ANOVA | ANOVA | ANOVA | ANOVA |
| (Grp) | (VG) | (% veh ± stdev) | (% veh ± stdev) | (vs Grp A1) | (vs Grp A2) | (vs Grp A3) | (vs Grp A4) | (vs Grp A5) |
| Grp A6 | 0.00 | 100 ± 4 | 0 ± 4 | 0.2951 | 0.0006 | 0.0023 | 0.2259 | 0.8209 |
| Grp A5 | 1.35e11 | 90 ± 8 | 10 ± 8 | 0.9014 | 0.0033 | 0.012 | 0.8217 | — |
| Grp A4 | 4.50e11 | 79 ± 19 | 21 ± 19 | >0.9999 | 0.0221 | 0.068 | — | — |
| Grp A1 | 6.75e11 | 81 ± 11 | 19 ± 11 | — | 0.0162 | 0.0516 | — | — |
| Grp A2 | 1.35e12 | 46 ± 4 | 54 ± 4 | — | — | 0.9997 | — | — |
| Grp A3 | 2.16e12 | 48 ± 4 | 52 ± 4 | — | — | — | — | — |

[1500] Significant and dose-dependent HTT protein reduction was achieved in the putamen after bilateral intraputaminal and intrathalamic infusion of different total doses of AAV1-VOYHT1. Specifically, on average, there was 10%, 21%, 19%, 54% and 52% HTT protein KD for group A5 (1.35×10¹¹ VG per animal), group A4 (4.50×10¹¹ VG per animal), group A1 (6.75×10¹¹ VG per animal), group A2 (1.35×10¹² VG per animal) and group A3 (2.16×10¹² VG per animal), respectively, relative to the vehicle (veh) group (group A6), At the two highest doses of 1.35×10¹² and 2.16×10¹² VG per animal, HTT protein KD was statistically significant (P<0.01 by one-way ANOVA with Tukey's multiple comparisons test) relative to vehicle (group A6) and statistically greater (P<0.05 by one-way ANOVA with Tukey's multiple comparisons test) than the lowest dose group (1.35×10¹¹ VG per animal). The two highest doses (1.35×10¹² and 2.16×10¹² VG per animal) also resulted in HTT protein KD that was statistically greater (P<0.05 by one-way ANOVA with Tukey's multiple comparisons test) than the HTT protein KD resulting from the 4.50×10¹¹ and 6.75×10¹¹ VG per animal doses. There was no statistical difference between the HTT protein KD at the two highest doses (1.35×10¹² and 2.16×10¹² VG per animal) (P=0.9997 by one-way ANOVA with Tukey's multiple comparisons test).

[1501] The effect of infusion volume on HTT protein lowering in the putamen was then evaluated at the highest vector concentration (2.7×10¹² vg/mL) for groups A1 (putamen/50 μL, thalamus/75 μL), A2 (putamen/100 μL, thalamus/150 μL), and A3 (putamen/150 thalamus/250 μL). The average relative remaining putamen HTT protein and relative putamen HTT protein knockdown (KD) across infusion volumes and expressed as a percentage of vehicle (veh), corresponding standard deviation (stdev) values, as well as P-values generated by one-way ANOVA with Tukey's multiple comparisons, are presented in Table 132. Note that each group (grp) of animals listed in Table 132 consisted of 3 animals per group, with the exception of group A3, which had only 2 animals per group.

TABLE 132
Volume-dependent HTT protein lowering in the NHP putamen after bilateral
intraputaminal and intrathalamic infusion of AAV1-VOYHT1

| | | Relative | Relative | P value by | P value by | P value by |
|---|---|---|---|---|---|---|
| | Total | remaining | HTT | one-way | one-way | one-way |
| Group | dose | HTT protein | protein KD | ANOVA | ANOVA | ANOVA |
| (Grp) | (VG) | (% veh ± stdev) | (% veh ± stdev) | (vs Grp A1) | (vs Grp A2) | (vs Grp A3) |
| Grp A6 | 0.00 | 100 ± 4 | 0 ± 4 | 0.0454 | 0.0001 | 0.0004 |
| Grp Al | 6.75e11 | 81 ± 11 | 19 ± 11 | — | 0.0019 | 0.0057 |
| Grp A2 | 1.35e12 | 46 ± 4 | 54 ± 4 | — | — | 0.9707 |
| Grp A3 | 2.16e12 | 48 ± 4 | 52 ± 4 | — | — | — |

[1502] Bilateral combined intraputaminal and intrathalamic infusion of AAV1-VOYHT1 resulted in substantial HTT protein KD in the putamen in a volume-dependent manner at the highest vector concentration (2.7×10¹² vg/mL). An average HTT protein KD of 52%, 54% and 19% was achieved in the putamen for group A3 (putamen/150 μL, thalamus/250 μL), group A2 (putamen/100 μL, thalamus/150 μL) and group A1 (putamen/50 μl, thalamus/75 μL), respectively, that was statistically significant (P<0.05) versus vehicle (group A6), with higher volumes of infusion used for groups A2 and A3 resulting in greater HTT protein KD (P<0.05) than the lowest volume in group A1. There was no statistically significant difference (P=0.9707) between the volumes of infusion used for groups A2 (putamen/100 μL, thalamus/150 μL) and A3 (putamen/150 μL, thalamus/250 μL).

[1503] The effect of vector concentration on HTT protein KD in the putamen of NHP after bilateral intraputaminal and intrathalamic administration of AAV1-VOYHT1 at the same dosing volume (putamen/100 μL, thalamus/150 μL) was also evaluated for group A5 (2.7×10¹¹ vg/mL), group A4 (9.0×10¹¹ vg/mL) and group A2 (2.7×10¹² vg/mL) versus the vehicle control group (group A6). The average relative remaining putamen HTT protein and relative putamen HTT protein knockdown (KD) across vector concentrations and expressed as a percentage of vehicle (veh), corresponding standard deviation (stdev) values, as well as P-values generated by one-way ANOVA with Tukey's multiple comparisons, are presented in Table 133. Note that each group (grp) of animals listed in Table 132 consisted of 3 animals per group.

TABLE 133
Concentration-dependent HTT protein lowering in the NHP putamen after
bilateral intraputaminal and intrathalamic infusion of AAV1-VOYHT1

| | | Relative | Relative | P value by | P value by | P value by |
|---|---|---|---|---|---|---|
| | Total | remaining | HTT | one-way | one-way | one-way |
| | dose | HTT protein | protein KD | ANOVA | ANOVA | ANOVA |
| Group | (VG) | (% veh ± stdev) | (% veh ± stdev) | (vs Grp A5) | (vs Grp A4) | (vs Grp A2) |
| Grp A6 | 0.00 | 100 ± 4 | 0 ± 4 | 0.6537 | 0.1626 | 0.0012 |
| Grp A5 | 1.35e11 | 90 ± 8 | 10 ± 8 | — | 0.6545 | 0.0047 |
| Grp A4 | 4.50e11 | 79 ± 19 | 21 ± 19 | — | — | 0.0215 |
| Grp A2 | 1.4e12 | 46 ± 4 | 54 ± 4 | — | — | — |

[1504] These results show that at the same dosing volume (putamen/100 μL, thalamus/150 μL), an average of 54%, 21% and 10% HTT protein KD was achieved in the putamen for group A2 (2.7×10¹² vg/mL), group A4 (9.0×10¹¹ vg/mL) and group A5 (2.7×10¹¹ vg/mL), respectively. Further, the highest HTT protein KD was achieved in group A2 at the highest AAV1-VOYHT1 concentration 2.7×1.0¹² vg/mL), which was statistically significant (P<0.05) relative to vehicle and relative to the two lower AAV1-VOYHT1 concentrations of 9.0×10¹¹ vg/mL and 2.7×10¹¹ vg/mL.

[1505] NHP HTT mRNA levels in the putamen were also measured by the bDNA assay, as described in Example 1 (above), in the same putamen punches used for HTT protein quantitation, using a specific probe set against rhesus HTT, TBP, AARS and XPNPEP1. HTT mRNA levels were normalized to the geometric mean of the three housekeeping genes TBP, AARS and XPNPEP1, and then further normalized to the vehicle group. The average relative remaining putamen HTT mRNA and relative putamen HTT mRNA knockdown (KD), across VG doses (VG/animal, or VG) and expressed as a percentage of vehicle (veh), corresponding standard deviation (stdev) values, as well as P-values generated by one-way ANOVA with Tukey's multiple comparisons, are presented in Table 134. Note that each group (grp) of animals listed in Table 134 consisted of 3 animals per group, with the exception of group A3, which had only 2 animals per group.

TABLE 134
Dose-dependent HTT mRNA lowering in the NHP putamen after bilateral
intraputaminal and intrathalamic infusion of AAV1-VOYHT1

| | | Relative | Relative | P value by | P value by | P value by | P value by | P value by |
|---|---|---|---|---|---|---|---|---|
| | Total | remaining | HTT | one-way | one-way | one-way | one-way | one-way |
| Group | dose | mRNA protein | mRNA KD | ANOVA | ANOVA | ANOVA | ANOVA | ANOVA |
| (Grp) | (VG) | (% veh ± stdev) | (% veh ± stdev) | (vs Grp A1) | (vs Grp A2) | (vs Grp A3) | (vs Grp A4) | (vs Grp A5) |
| Grp A6 | 0.00 | 100 ± 6 | 0 ± 6 | 0.0928 | 0.0013 | 0.0011 | 0.0217 | 0.2672 |
| Grp A5 | 1.35e11 | 77 ± 7 | 23 ± 7 | 0.9766 | 0.0454 | 0.0251 | 0.6037 | — |
| Grp A4 | 4.50e11 | 61 ± 21 | 39 ± 21 | 0.9363 | 0.4755 | 0.2386 | — | — |
| Grp A1 | 6.75e11 | 70 ± 10 | 30 ± 10 | — | 0.1391 | 0.0695 | — | — |
| Grp A2 | 1.35e12 | 43 ± 14 | 57 ± 14 | — | — | 0.9728 | — | — |
| Grp A3 | 2.16e12 | 34 ± 3 | 66 ± 3 | — | — | — | — | — |

[1506] A significant and dose-dependent HTT mRNA reduction was achieved in the putamen after bilateral intraputaminal and intrathalamic infusion of different total doses of AAV1-VOYHT1. Specifically, on average, there was 23%, 39%, 30%, 57% and 66% HTT mRNA. KD for group A5 (1.35×10¹¹ VG per animal), group A4 (4.50×10¹¹ VG per animal), group A1 (6.75×10¹¹ VG per animal), group A2 (1.35×10¹² VG per animal) and group A3 (2.16×10¹² VG per animal), respectively, relative to the vehicle group (group A6). At the two highest doses of 1.35×10¹² VG per animal and 2.16×10¹² VG per animal and at the dose of 4.50×10¹¹ VG per animal HTT mRNA KD was statistically significant (P<0.05 by one-way ANOVA with Tukey's multiple comparisons test) relative to vehicle (group A6). In addition, the two highest doses resulted in HTT mRNA KD that was statistically greater (P<0.05 by one-way ANOVA. with Tukey's multiple comparisons test) than the lowest dose group (1.35×10¹¹ VG per animal). There was no statistical difference between the HTT mRNA KD at the two highest doses (1.35×10¹² and 2.16×10¹² VG per animal) (P=0.9728 by one-way ANOVA with Tukey's multiple comparisons test).

[1507] The effect of vector volume on HTT mRNA lowering in the putamen was then evaluated at the highest vector concentration (2.7×10¹² vg/mL) for groups A1 (putamen/50 μL, thalamus/75 μL), A2 (putamen/100 μL, thalamus/150 μL), and A3 (putamen/150 μL, thalamus/250 μL). The average relative remaining putamen HTT mRNA and relative putamen HTT mRNA knockdown (KD) across infusion volumes and expressed as a percentage of vehicle, corresponding standard deviation (stdev) values, as well as P-values generated by one-way ANOVA with Tukey's multiple comparisons, are presented in Table 135. Note that each group (grp) of animals listed in Table 135 consisted of 3 animals per group, with the exception of group A3, which had only 2 animals per group.

TABLE 135
Volume-dependent HTT mRNA lowering in the NHP putamen after bilateral
intraputaminal and intrathalamic infusion of AAV1-VOYHT1

| | | Relative | Relative | P value by | P value by | P value by |
|---|---|---|---|---|---|---|
| | Total | remaining | HTT | one-way | one-way | one-way |
| Group | dose | HTT mRNA | mRNA KD | ANOVA | ANOVA | ANOVA |
| (Grp) | (VG) | (% veh ± stdev) | (% veh ± stdev) | (vs Grp A1) | (vs Grp A2) | (vs Grp A3) |
| Grp A6 | 0.00 | 100 ± 6 | 0 ± 6 | 0.0303 | 0.0009 | 0.0007 |
| Grp A1 | 6.75e11 | 70 ± 10 | 30 ± 10 | — | 0.0456 | 0.0229 |
| Grp A2 | 1.35e12 | 43 ± 14 | 57 ± 14 | — | — | 0.8043 |
| Grp A3 | 2.16e12 | 34 ± 3 | 66 ± 3 | — | — | — |

[1508] An average HTT mRNA KD of 66%, 57% and 30% was achieved in the putamen for group A3 (putamen/150 μL. thalamus/250 μL), group A2 (putamen/100 μL, thalamus/150 μL) and group A1 (putamen/50 μL, thalamus/75 μL), respectively, that was statistically significant (P<0.05 by one-way ANOVA with Tukey's multiple comparison test) versus vehicle (group A6), with the higher volumes of infusion in groups A2 and A3 resulting in statistically greater HTT mRNA KD (P<0.05 by one-way ANOVA with Tukey's multiple comparison test) than the lowest volume in group A1. There is no statistical difference between HTT mRNA KD in groups A2 and A3 (P =0.8043 by one-way ANOVA with Tukey's multiple comparison test). There was no statistical difference between HTT mRNA KD in groups A2 and A3 (P=0.8043 by one-way ANOVA with Tukey's multiple comparison test).

[1509] The effect of vector concentration on HTT mRNA KD in the putamen of NHP after bilateral intraputaminal and intrathalamic administration of AAV1-VOYHT1 at the same dosing volume (putamen/100 μL, thalamus/150 μL) was also evaluated for group A5 (2.7×10¹¹ vg/mL), group A4 (9.0×10¹¹ vg/mL) and group A2 (2.7×10¹² vg/mL) versus the vehicle control group (group A6). The average relative remaining putamen HTT mRNA and relative putamen HTT mRNA knockdown (KD) across vector concentrations and expressed as a percentage of vehicle (veh), corresponding standard deviation (stdev) values, as well as P-values generated by one-way ANOVA with Tukey's multiple comparisons, are presented in Table 136, Note that each group (grp) of animals listed in in the below Table 136 consisted of 3 animals per group.

TABLE 136
Concentration-dependent HTT mRNA lowering in the NHP putamen after
bilateral intraputaminal and intrathalamic infusion of AAV1-VOYHT1

| | | Relative | Relative | P value by | P value by | P value by |
|---|---|---|---|---|---|---|
| | Total | remaining | HTT | one-way | one-way | one-way |
| | dose | mRNA protein | mRNA KD | ANOVA | ANOVA | ANOVA |
| Group | (VG) | (% veh ± stdev) | (% veh ± stdev) | (vs Grp A5) | (vs Grp A4) | (vs Grp A2) |
| Grp A6 | 0.00 | 100 ± 6 | 0 ± 6 | 0.2284 | 0.0291 | 0.0033 |
| Grp A5 | 1.35e11 | 77 ± 7 | 23 ± 7 | — | 0.4906 | 0.0523 |
| Grp A4 | 4.50e11 | 61 ± 21 | 39 ± 21 | — | — | 0.3871 |
| Grp A2 | 1.4e12 | 43 ± 14 | 57 ± 14 | — | — | — |

[1510] These results show that at the same dosing volume (putamen/100 μL, thalamus/150 μL), an average of 57%, 39% and 23% HTT protein KD was achieved in the putamen for group A2 (2.7×10¹² vg/mL), group A4 (9.0×10¹¹ vg/mL) and group A5 (2.7×10¹¹ vg/mL), respectively. The highest HTT mRNA KD was achieved at the two highest concentrations (2.7×10¹² vg/mL, group A2 and 4.50×10¹¹ vg/mL, group A4), which were statistically significant (P<0.05 by one-way ANOVA with Tukey's multiple comparison test) relative to vehicle (group A6). There was no statistically significant difference in HTT snRNA KD between different AAV1-VOYHT1 concentrations, although the lowest (2.7×10¹¹ vg/mL) and highest (2.7×10¹² vg/mL) concentrations trended toward different (P=0.0523 by one-way ANOVA with Tukey's multiple comparison test).

[1511] vi. Caudate NTT Protein and mRNA Levels

[1512] To evaluate HTT protein and mRNA lowering in the caudate, 4 punches were collected from the caudate from each animal (2 per hemisphere), resulting in a total of 12 punches per group. Aliquots of pulverized caudate punch powder were used for HTT and beta-actin protein analysis by LC-MS/MS. HTT protein levels were normalized to levels of beta-actin (internal control), and then further normalized to the vehicle group. The average relative remaining caudate HTT protein and relative caudate HTT protein knockdown (KD) across total VG doses (VG/animal, or VG) and expressed as a percentage of vehicle (veh), corresponding standard deviation (stdev) values, as well as P-values generated by one-way ANOVA with Tukey's multiple comparisons, are presented in Table 137. Note that each group (grp) of animals listed in Table 137 consisted of 3 animals per group.

TABLE 137
HTT protein levels in the NHP caudate after bilateral intraputaminal and intrathalamic infusion of AAV1-VOYHT1

| | | Relative | Relative | P value by | P value by | P value by | P value by | P value by |
|---|---|---|---|---|---|---|---|---|
| | Total | remaining | HTT | one-way | one-way | one-way | one-way | one-way |
| Group | dose | HTT protein | protein KD | ANOVA | ANOVA | ANOVA | ANOVA | ANOVA |
| (Grp) | (VG) | (% veh ± stdev) | (% veh ± stdev) | (vs Grp A1) | (vs Grp A2) | (vs Grp A3) | (vs Grp A4) | (vs Grp A5) |
| Grp A6 | 0.00 | 100 ± 4 | 0 ± 4 | 0.8607 | 0.4446 | 0.1858 | 0.502 | 0.9995 |
| Grp A5 | 1.35e11 | 98 ± 11 | 2 ± 11 | 0.9587 | 0.6179 | 0.2914 | 0.679 | — |
| Grp A4 | 4.50e11 | 87 ± 11 | 13 ± 11 | 0.9823 | >0.9999 | 0.9714 | — | — |
| Grp A1 | 6.75e11 | 92 ± 2 | 8 ± 2 | — | 0.9667 | 0.718 | — | — |
| Grp A2 | 1.35e12 | 86 ± 9 | 14 ± 9 | — | — | 0.9853 | — | — |
| Grp A3 | 2.16e12 | 82 ± 11 | 18 ± 11 | — | — | — | — | — |

[1513] On average, there was 2%, 13%, 8%, 14% and 18% HTT protein KD for group A5 (1.35×10¹¹ VG per animal), group A4 (4.5×10¹¹ VG per animal), group A1 (total 6.75×10¹¹ VG per animal), group A2 (total 1.35×10¹² VG per animal) and group A3 (2.16×10¹² VG per animal), respectively, relative to the vehicle group (group A6). These reductions in HTT protein were not statistically significant (P>0.05 by one-way ANOVA with Tukey's multiple comparisons test).

[1514] NHP HTT mRNA levels in the caudate were also measured by the bDNA assay, as described in Example 1 (above), in the same caudate punches used for HTT protein quantitation, using a specific probe set against rhesus HTT, TBP, AARS and XPNPEP1. HTT mRNA levels were normalized to the geometric mean of the three housekeeping genes TBP, AARS and XPNPEP1, and then further normalized to the vehicle group. The average relative remaining caudate HTT mRNA and relative caudate HTT mRNA knockdown (KD), across VG doses (VG/animal, or VG) and expressed as a percentage of vehicle (veh), corresponding standard deviation (stdev) values, as well as P-values generated by one-way ANOVA with Tukey's multiple comparisons, are presented in Table 138. Note that each group (grp) of animals listed in Table 138 consisted of 3 animals per group.

TABLE 138
HTT mRNA levels in the NHP caudate after bilateral intraputaminal and intrathalamic infusion of AAV1-VOYHT1

| | | Relative | Relative | P value by | P value by | P value by | P value by | P value by |
|---|---|---|---|---|---|---|---|---|
| | Total | remaining | HTT | one-way | one-way | one-way | one-way | one-way |
| Group | dose | mRNA protein | mRNA KD | ANOVA | ANOVA | ANOVA | ANOVA | ANOVA |
| (Grp) | (VG) | (% veh ± stdev) | (% veh ± stdev) | (vs Grp A1) | (vs Grp A2) | (vs Grp A3) | (vs Grp A4) | (vs Grp A5) |
| Grp A6 | 0.00 | 100 ± 2 | 0 ± 2 | 0.9984 | 0.9861 | 0.6234 | 0.9997 | 0.9984 |
| Grp A5 | 1.35e11 | 96 ± 10 | 4 ± 10 | 0.9638 | 0.9999 | 0.8348 | 0.9811 | — |
| Grp A4 | 4.50e11 | 103 ± 7 | −3 ± 7 | >0.9999 | 0.9349 | 0.4644 | — | — |
| Grp A1 | 6.75e11 | 104 ± 3 | −4 ± 3 | — | 0.8993 | 0.4062 | — | — |
| Grp A2 | 1.35e12 | 93 ± 8 | 7 ± 8 | — | — | 0.9252 | — | — |
| Grp A3 | 2.16e12 | 83 ± 29 | 17 ± 29 | — | — | — | — | — |

[1515] On average, there was 17%, 7%, −4%, −3% and 4% HTT mRNA KD for group A3 (2.16×10¹² VG per animal), group A2 (1.35×10¹² VG per animal), group A1 (6.75×10¹¹ VG per animal), group A4 (4.50×10¹¹ VG per animal), and group A5 (1.35×10¹¹ VG per animal), respectively, relative to the vehicle group (group A6).

[1516] vii. Thalamus HTT Protein and MRNA Levels

[1517] To evaluate HTT protein and mRNA lowering in the thalamus, 4 punches were collected from the thalamus from each animal (2 per hemisphere), resulting in a total of 12 punches per group. Aliquots of pulverized thalamus punch powder were used for HTT and beta-actin protein analysis by LC-MS/MS. HTT protein levels were normalized to levels of beta-actin (internal control), and then further normalized to the vehicle group. The average relative remaining thalamus HTT protein and relative thalamus HTT protein knockdown (KD) across total VG doses (VG/animal, or VG) and expressed as a percentage of vehicle (veh), corresponding standard deviation (stdev) values, as well as P-values generated by one-way ANOVA with Tukey's multiple comparisons, are presented in Table 139, Note that each group (grp) of animals listed in Table 139 consisted of 3 animals per group.

TABLE 139
Dose-dependent HTT protein lowering in the NHP thalamus after bilateral
intraputaminal and intrathalamic infusion of AAV1-VOYHT1

| | | Relative | Relative | P value by | P value by | P value by | P value by | P value by |
|---|---|---|---|---|---|---|---|---|
| | Total | remaining | HTT | one-way | one-way | one-way | one-way | one-way |
| Group | dose | HTT protein | protein KD | ANOVA | ANOVA | ANOVA | ANOVA | ANOVA |
| (Grp) | (VG) | (% veh ± stdev) | (% veh ± stdev) | (vs Grp A1) | (vs Grp A2) | (vs Grp A3) | (vs Grp A4) | (vs Grp A5) |
| Grp A6 | 0.00 | 100 ± 12 | 0 ± 12 | 0.7683 | 0.2119 | 0.0247 | 0.9982 | 0.3459 |
| Grp A5 | 1.35e11 | 74 ± 13 | 26 ± 13 | 0.9654 | 0.9991 | 0.5714 | 0.556 | — |
| Grp A4 | 4.50e11 | 95 ± 10 | 5 ± 10 | 0.9345 | 0.3709 | 0.0488 | — | — |
| Grp A1 | 6.75e11 | 84 ± 27 | 16 ± 27 | — | 0.8584 | 0.2119 | — | — |
| Grp A2 | 1.35e12 | 69 ± 12 | 31 ± 12 | — | — | 0.7683 | — | — |
| Grp A3 | 2.16e12 | 53 ± 9 | 47 ± 9 | — | — | — | — | — |

[1518] Dose-dependent HTT protein reduction was achieved in the thalamus after bilateral combined intraputaminal and intrathalamic infusion of different total doses of A,AV1-VOYHT1. Specifically, on average, there was 47%, 31%, 16%, 5% and 26% HTT protein KD for group A3 (2.16×10¹² VG per animal), group A2 (1.35×10¹² VG per animal), group A1 (6.75×10¹¹ VG per animal), group A4 (4.50×10¹¹ VG per animal) and group A5 (1.35×10¹¹ VG per animal), respectively, relative to the vehicle group (group A6). The HTT protein KD in the thalamus was statistically significant (P<0.05 by one-way ANOVA with Tukey's multiple comparisons test) at the highest dose of 2.16×10¹² VG/animal (group A3) relative to vehicle (group A6), as well as relative to the 2nd lowest dose of 4.50×10¹¹ VG per animal (group A4).

[1519] NHP HTT mRNA levels in the thalamus were also measured by the bDNA assay, as described in Example 1 (above), in the same thalamus punches used for HTT protein quantitation, using a specific probe set against rhesus HTT, TBP. AARS and XPNPEP1. HTT mRNA levels were normalized to the geometric mean of the three housekeeping genes TBP, AARS and XPNPEP1, and then further normalized to the vehicle group. The average relative remaining thalamus HTT mRNA and relative thalamus HTT mRNA knockdown (KD), across VG doses (VG/animal, or VG) and expressed as a percentage of vehicle (veh), corresponding standard deviation (stdev) values, as well as P-values generated by one-way ANOVA with Tukey's multiple comparisons, are presented in Table 140. Note that each group (grp) of animals listed in Table 140 consisted of 3 animals per group.

TABLE 140
HTT mRNA lowering in the NHP thalamus after bilateral intraputaminal and intrathalamic infusion of AAV1-VOYHT1

| | | Relative | Relative | P value by | P value by | P value by | P value by | P value by |
|---|---|---|---|---|---|---|---|---|
| | Total | remaining | HTT | one-way | one-way | one-way | one-way | one-way |
| Group | dose | mRNA protein | mRNA KD | ANOVA | ANOVA | ANOVA | ANOVA | ANOVA |
| (Grp) | (VG) | (% veh ± stdev) | (% veh ± stdev) | (vs Grp A1) | (vs Grp A2) | (vs Grp A3) | (vs Grp A4) | (vs Grp A5) |
| Grp A6 | 0.00 | 100 ± 10 | 0 ± 10 | 0.0062 | 0.0015 | 0.0003 | 0.0249 | 0.0171 |
| Grp A5 | 1.35e11 | 55 ± 19 | 45 ± 19 | 0.988 | 0.674 | 0.162 | >0.9999 | — |
| Grp A4 | 4.50e11 | 57 ± 16 | 43 ± 16 | 0.9555 | 0.5482 | 0.1147 | — | — |
| Grp A1 | 6.75e11 | 48 ± 21 | 52 ± 21 | — | 0.9439 | 0.3849 | — | — |
| Grp A2 | 1.35e12 | 38 ± 4 | 62 ± 4 | — | — | 0.8558 | — | — |
| Grp A3 | 2.16e12 | 25 ± 3 | 75 ± 3 | — | — | — | — | — |

[1520] Significant thalamic HTT mRNA reduction was achieved in the thalamus after bilateral intraputaminal and intrathalamic infusion of different total doses of AAV1-VOYHT1. Specifically, on average, there was 75%, 62%, 52%, 43% and 45% HTT mRNA KD for group A3 (2.16×10¹² VG per animal), group A2 (1.35×10¹² VG per animal), group A1 (6.75×10¹¹ VG per animal), group M (4.50×10¹¹ VG per animal), and group A5 (1.35×10¹¹ VG per animal), respectively, relative to the vehicle group (group A6). The HTT mRNA KD in the thalamus was statistically significant (P<0.05 by one-way ANOVA with Tukey's multiple comparisons test) at all doses of AAV1-VOYHT1 versus vehicle. There was a trend (P<0.2 by one-way ANOVA with Tukey's multiple comparisons test) towards dose-dependence of HTT mRNA KD with the highest dose group versus the two lowest dose groups, although there was no statistically significant difference in thalamus mRNA KD between different doses of AAV1-VOYHT1 (P>0.05 by one-way ANOVA with Tukey's multiple comparisons test).

[1521] The effect of vector volume on HTT mRNA lowering in the thalamus was then evaluated at the highest vector concentration (2.7×10¹² vg/mL) for groups A1 (putamen/50 μL, thalamus/75 μL), A2 (putamen/100 μL, thalamus/150 μL), and A3 (putamen/150 μL thalamus/250 μL). The average relative remaining thalamus HTT mRNA and relative thalamus HTT mRNA knockdown (KD) across infusion volumes and expressed as a percentage of vehicle, corresponding standard deviation (stdev) values, as well as P-values generated by one-way ANOVA with Tukey's multiple comparisons, are presented in Table 141. Note that each group (grp) of animals listed in Table 141 consisted of 3 animals per group.

TABLE 141
HTT mRNA levels in the NHP thalamus after bilateral intraputaminal and intrathalamic
infusion of different volumes of AAV1-VOYHT1 at the same concentration

| | | Relative | Relative | P value by | P value by | P value by |
|---|---|---|---|---|---|---|
| | Total | remaining | HTT | one-way | one-way | one-way |
| Group | dose | HTT mRNA | mRNA KD | ANOVA | ANOVA | ANOVA |
| (Grp) | (VG) | (% veh ± stdev) | (% veh ± stdev) | (vs Grp A1) | (vs Grp A2) | (vs Grp A3) |
| Grp A6 | 0.00 | 100 ± 10 | 0 ± 10 | 0.0029 | 0.0009 | 0.0003 |
| Grp A1 | 6.75e11 | 48 ± 21 | 52 ± 21 | — | 0.7367 | 0.1618 |
| Grp A2 | 1.35e12 | 38 ± 4 | 62 ± 4 | — | — | 0.569 |
| Grp A3 | 2.16e12 | 25 ± 3 | 75 ± 3 | — | — | — |

[1522] Average HTT mRNA KDs of 75%, 62% and 52% were achieved in the thalamus for group A3 (putamen/150 μL, thalamus/250 μL), group A2 (putamen/100 μL, thalamus/150 μL) and group A1 (putamen/50 μL, thalamus/75 μL), respectively, that were statistically significant (P<0.01 by one-way ANOVA with Tukey's multiple comparisons test) versus vehicle (group A6). There was no statistical difference in HTT mRNA KD across different volumes of AAV1-VOYHT1 treatment at the highest vector concentration (P>0.05 by one-way ANOVA with Tukey's multiple comparisons test).

[1523] The effect of vector concentration on HTT mRNA KD in the thalamus of NHP after bilateral intraputaminal and intrathalamic administration of AAV1-VOYHT1 at the same dosing volume (putamen/100 μL, thalamus/150 μL) was also evaluated for group A5 (2.7×10¹¹ vg/mL), group A4 (9.0×10¹¹ vg/mL) and group A2 (2.7×10¹² vg/mL) versus the vehicle control group (group A6). The average relative remaining thalamus HTT mRNA and relative thalamus HTT mRNA knockdown (KD) across vector concentrations and expressed as a percentage of vehicle (veh), corresponding standard deviation (stdev) values, as well as P-values generated by one-way ANOVA with Tukey's multiple comparisons, are presented in Table 142. Note that each group (grp) of animals listed in in the below Table 142 consisted of 3 animals per group.

TABLE 142
HTT mRNA levels in the NHP thalamus after bilateral intraputaminal and intrathalamic
infusion of different concentrations of AAV1-VOYHT1 at the same volume

| | | Relative | Relative | P value by | P value by | P value by |
|---|---|---|---|---|---|---|
| | Total | remaining | HTT | one-way | one-way | one-way |
| Group | dose | mRNA protein | mRNA KD | ANOVA | ANOVA | ANOVA |
| (Grp) | (VG) | (% veh ± stdev) | (% veh ± stdev) | (vs Grp A5) | (vs Grp A4) | (vs Grp A2) |
| Grp A6 | 0.00 | 100 ± 10 | 0 ± 10 | 0.0134 | 0.0182 | 0.002 |
| Grp A5 | 1.35e11 | 55 ± 19 | 45 ± 19 | — | 0.9954 | 0.4507 |
| Grp A4 | 4.50e11 | 57 ± 16 | 43 ± 16 | — | — | 0.3452 |
| Grp A2 | 1.4e12 | 38 ± 4 | 62 ± 4 | — | — | — |

[1524] These results show that at the same dosing volume (putamen/100 μL, thalamus/150 μL), an average of 62%, 43% and 45% HTT mRNA KD was achieved in the thalamus for group A2 (2.7×10¹² vg/mL), group A4 (9.0×10¹¹ vg/mL) and group A5 (2.7×10¹¹ vg/mL), respectively. Statistically significant HTT mRNA KDs were achieved at all concentrations of AAN1-VOYHT1 (2.7×10¹² vg/mL for group A2, 9.0×10¹¹ vg/mL, for group A4, and 2.7×10¹¹ vg/mL, for group A5) versus vehicle (P<0.05 by one-way ANOVA with Tukey's multiple comparisons test). There was no statistical significance in HTT mRNA KD across different concentrations of AAV1-VOYET1 administered with the same volume (P>0.05 by one-way ANOVA with Tukey's multiple comparison test),

[1525] viii. Relationship Between Relative HTT Protein and Relative mRNA Levels

[1526] The relationship between relative HTT protein levels and relative HTT mRNA levels in all samples from putamen, caudate and thalamus from all AAV1-VOYHT1 treatment groups was assessed using a Pearson correlation method. Relative HTT protein levels as measured by the LC-MS/MS assay correlated with relative HTT mRNA levels as measured by the bDNA assay (Pearson r=0.7863, P<0.001).

[1527] Together, this study demonstrates that at 5 weeks after bilateral combined intraputaminal and intrathalamic administration of AAV1-VOYHT1, there was significant and dose-dependent HTT protein KD in the putamen. HTT protein KD in the putamen was maximal at a dose of 1.35×10¹² VG per animal, whereas in the thalamus, the highest dose resulted in significant HTT protein KD. HTT protein KD was less apparent than HTT mRNA KD in both putamen and thalamus at all dose levels. There was no significant HTT protein KD observed in the caudate at all doses tested in this study. Remaining HTT protein levels after AAV1-VOYHT1 administration, relative to vehicle, correlated with relative remaining HTT mRNA levels for all samples from putamen, caudate and thalamus.

### Example 13

### HTT Protein Evaluation in NHP Putamen, Caudate, and Thalamus after Intraputaminal and Intrathalamic Infusion of VY-HTT01 with Different Doses

[1528] i. Study Design

[1529] As an extension of Example 3 (Dose Optimization Study III), described in detail above, the primary goal of this study was to measure HTT protein levels in tissue punches from the putamen, caudate and thalamus 5 weeks following bilateral infusion, either intrathalamic-only or combined intraputaminal and intrathalamic, of different doses of AAV1-VOYHT1, in non-human primate (NHP) rhesus macaque (Macaca mulatta). As a secondary goal, HTT mRNA levels were measured in the same tissue samples in order to assess the potential relationship between relative HTT protein and relative HTT mRNA levels from the same tissue. General aspects of study implementation, including animal care/groups, test article preparation, and dosing schedules, are the same as described in Example 3 (above). The study design summarized in Table 70 similarly reflects that of the present study, apart from the omission of group C la here. Group C1b only (dosed with refined surgical procedures, as noted above) served as the control group for the treatment groups in this study.

[1530] ii. Tissue Sample Collection and Preparation

[1531] Approximately twenty-two coronal brain slices (3 mm thick) were collected for each animal using a monkey brain matrix. Brain slices were then fresh frozen and stored at −60° C. for potential pharmacology analysis or were fixed for histopathology studies.

[1532] Procedures for brain tissue sample collection for subsequent quantitation of HTT protein were similar to those described in Example 7 (above). Briefly, frozen brain slices were warmed at room temperature (for ˜1 min), and then tissue samples were rapidly collected using a 2 mm biopsy punch outfitted with a plunger, and immediately transferred to a pre-cooled collection tube on dry ice. All tissue punches were maintained on dry ice during collection and then stored at −80° C. until tissue analysis.

[1533] Procedures for tissue sample preparation for subsequent quantitation of HTT protein were as described in Example 7 (above). Briefly, brain tissue punches were weighed, pulverized using a tissue impactor, transferred into pre-chilled collection bottle, and stored on dry ice. The pulverized dry tissue powder was aliquoted into two parts: one quarter of the tissue powder was transferred to a new pre-chilled tube for HTT mRNA measurement by the branched DNA (nDNA) assay, and the remaining three-quarters of tissue powder was transferred into another pre-chilled tube for HTT protein quantification by LC-MS/MS.

[1534] iii. Branched DNA Assay for Quantitation of HTT mRNA.

[1535] Methods for quantitation of HTT mRNA by branched DNA (bDNA) assay were as described above in Example 1 (above).

[1536] iv. LC-MS/MS for Quantitation of HTT Protein

[1537] Methods for quantitation of HTT protein by UPLC-MS/MS (Ultra performance liquid chromatography-mass spectrometry and liquid chromatography-tandem mass spectrometry), or LC-MS/MS, were as described above in Example 7 (above). All samples were run at the same time for HTT protein quantification by LC-MS/MS.

[1538] v. Putamen HTT Protein and mRNA Levels

[1539] To evaluate HTT protein and mRNA levels in the putamen. 4 tissue punches were collected from the putamen in the right hemisphere, resulting in a total of 12 punches group. As described above, aliquoted pulverized putamen tissue punch powders were used for HTT and actin protein analysis by LC-MS/MS. HTT protein levels were normalized to the levels of beta-actin, and then further normalized to the vehicle (veh) group, The average relative remaining putamen HTT protein and relative putamen HTT protein knockdown (KD) across total VG doses (VG/animal, or VG) and expressed as a percentage of vehicle (veh), corresponding standard deviation (stdev) values, as well as P-values generated by one-way ANOVA with Tukey's multiple comparisons, are presented in Table 143. Note that each group (grp) of animals listed in Table 143 consisted of 3 animals per group.

TABLE 143
HTT protein lowering in NHP putamen

| | | Relative | Relative | P value by | P value by | P value by |
|---|---|---|---|---|---|---|
| | Total | remaining | HTT | one-way | one-way | one-way |
| Group | dose | HTT protein | protein KD | ANOVA | ANOVA | ANOVA |
| (Grp) | (VG) | (% veh ± stdev) | (% veh ± stdev) | (vs Grp C2) | (vs Grp C3) | (vs Grp C4) |
| Grp C1b | 0.0 | 100 ± 5 | 0 ± 5 | 0.9001 | <0.0001 | <0.0001 |
| Grp C2 | 1.11e13 | 96 ± 8 | 4 ± 8 | — | <0.0001 | <0.0001 |
| Grp C3 | 8.00e12 | 35 ± 8 | 65 ± 8 | — | — | 0.9447 |
| Grp C4 | 1.78e13 | 39 ± 9 | 61 ± 9 | — | — | — |

[1540] Significant HTT protein reduction was achieved in the putamen after bilateral intraputaminal and intrathalamic infusion of different doses of AAV l-VOYHT1. Specifically, on average, there was 65% and 61% HTT protein KD at combined intraputaminal and intrathalamic doses of 8.00×10¹² VG per animal (group C3) and 1.78×10¹³ VG per animal (group C4), respectively, relative to the vehicle group (group C1b), which did not exhibit HTT protein KD (P<0.0001 by one-way ANOVA with Tukey's multiple comparisons test). HTT protein KD after combined intraputaminal and intrathalamic doses of 8,00×10¹² and 1.78×10¹³ VG per animal was also greater (P<0.0001 by one-way ANOVA Tukey's multiple comparisons test) than after intrathalamic dosing only (group 2C, 1.11×10¹³ VG per animal). There was no significant difference between HTT protein KD at a bilateral intraputaminal and intrathalamic dose of 8.00×10¹² versus 1,78×10¹³ VG per animal. In addition, no significant HTT protein KD was observed after intrathalamic dosing only (group C2) relative to vehicle (group C1b) (P>0.05 by one-way ANOVA with Tukey's multiple comparisons test).

[1541] HTT mRNA levels in the putamen were also measured by the hDNA assay, as described in Example 1, in the same putamen punches used for HTT protein quantitation, using the specific probe set against rhesus HTT, TBP, AARS and XPNPEP1. HTT mRNA levels were normalized to the geometric mean of the three housekeeping genes TBP, AARS and XPNPEP1 and then further normalized to the vehicle group. The average relative remaining putamen HTT mRNA and relative putamen HTT mRNA knockdown (KD) across total VG doses (VG/animal, or VG) and expressed as a percentage of vehicle (veh), corresponding standard deviation (stdev) values, as well as P-values generated by one-way ANOVA with Tukey's multiple comparisons, are presented in Table 144. Note that each group (grp) of animals listed in Table 144 consisted of 3 animals per group.

TABLE 144
HTT mRNA lowering in NHP putamen

| | | Relative | Relative | P value by | P value by | P value by |
|---|---|---|---|---|---|---|
| | Total | remaining | HTT | one-way | one-way | one-way |
| Group | dose | HTT mRNA | mRNA KD | ANOVA | ANOVA | ANOVA |
| (Grp) | (VG) | (% veh ± stdev) | (% veh ± stdev) | (vs Grp C2) | (vs Grp C3) | (vs Grp C4) |
| Grp C1b | 0.0 | 100 ± 5 | 0 ± 5 | 0.0109 | <0.0001 | <0.0001 |
| Grp C2 | 1.11e13 | 83 ± 7 | 17 ± 7 | — | <0.0001 | <0.0001 |
| Grp C3 | 8.00e12 | 34 ± 2 | 66 ± 2 | — | — | 0.213 |
| Grp C4 | 1.78e13 | 42 ± 3 | 58 ± 3 | — | — | — |

[1542] Significant HTT mRNA reduction was achieved in the putamen after bilateral intrathalamic or bilateral combined intraputaminal and intrathalamic infusion of different total doses of AAV1-VOYHT1. Specifically, on average, there was 17% 66% and 58% HTT mRNA KD for group C2 (thalamus only: 1.11×10¹³ VG per animal), group C3 (combined intraputaminal and intrathalamic dosing: 8.00×10¹² VG per animal) and group C4 (combined intraputaminal and intrathalamic dosing: 1.78×10¹³ VG per animal), respectively, relative to the vehicle group (group C1b) that was statistically significant (P<0.05 by one-way ANOVA with Tukey's multiple comparisons test). HTT mRNA KD after combined intraputaminal and intrathalamic doses of 8.00×10¹² VG per animal and 1.78×10¹³ VG per animal was also greater (P<0.0001 by one-way ANOVA with Tukey's multiple comparisons test) than after intrathalamic dosing only (group C2, 1.11×10¹³ VG per animal). There was no significant difference between HTT mRNA KD at a bilateral intraputaminal and intrathalamic dose of 8.00×10¹² versus 1.78×10¹³ VG per animal (P>0.05 by one-way ANOVA with Tukey's multiple comparisons test)

[1543] vi. Caudate HTT Protein and mRNA Levels

[1544] To evaluate HTT protein and mRNA lowering in the caudate, 4 punches were collected from each animal (2 per hemisphere) for HTT and actin protein analysis by LC-MS/MS, resulting in a total of 12 punches per group. HTT protein levels were normalized to level of actin (internal control), and then further normalized to the vehicle group. The average relative remaining caudate HTT protein and relative caudate HTT protein knockdown (KD) across total VG doses (VG/animal, or VG) and expressed as a percentage of vehicle (veh), corresponding standard deviation (stdev) values, as well as P-values generated by one-way ANOVA with Tukey's multiple comparisons, are presented in Table 145. Note that each group (grp) of animals listed in Table 145 consisted of 3 animals per group.

TABLE 145
HTT protein lowering in NHP caudate

| | | Relative | Relative | P value by | P value by | P value by |
|---|---|---|---|---|---|---|
| | Total | remaining | HTT | one-way | one-way | one-way |
| Group | dose | HTT protein | protein KD | ANOVA | ANOVA | ANOVA |
| (Grp) | (VG) | (% veh ± stdev) | (% veh ± stdev) | (vs Grp C2) | (vs Grp C3) | (vs Grp C4) |
| Grp C1b | 0.0 | 100 ± 6 | 0 ± 6 | 0.015 | 0.0011 | 0.0006 |
| Grp C2 | 1.11e13 | 74 ± 7 | 26 ± 7 | — | 0.2025 | 0.1024 |
| Grp C3 | 8.00e12 | 60 ± 9 | 40 ± 9 | — | — | 0.9584 |
| Grp C4 | 1.78e13 | 56 ± 9 | 44 ± 9 | — | — | — |

[1545] Significant HTT protein reduction was achieved in the caudate after bilateral intrathalamic or bilateral combined intraputaminal and intrathalamic infusion of different total doses of AAV1-VOYHT1. Specifically, on average, there was 26%, 40% and 44% HTT protein KD for group C2 (thalamus dosing only, 1.11×10¹³ VG per animal), group C3 (combined intraputaminal and intrathalamic dosing, 8.00×10¹² VG per animal) and group C4 (combined intraputaminal and intrathalamic dosing, 1.78×10¹³ VG per animal), respectively, relative to the vehicle group (group C1b) that was statistically significant (P<0.05 by one-way ANOVA with Tukey's multiple comparisons test). There was no difference in HTT protein KD across all AAV1-VOYHT1 treatment groups (P>0.05 by one-way ANOVA with Tukey's multiple comparisons test)

[1546] NHP caudate HTT mRNA levels were also measured by the bDNA assay in the same caudate punches used for HTT protein quantitation, using the specific probe set against rhesus HTT, TBP, AARS and XPNPEP1. HTT mRNA levels were normalized to the geometric mean of the three housekeeping genes TBP, AARS and XPNPEP1, and then further normalized to the vehicle group. The average relative remaining caudate HTT mRNA and relative caudate HTT mRNA knockdown (KD) across total VG doses (VG/animal, or VG) and expressed as a percentage of vehicle (veh), corresponding standard deviation (stdev) values, as well as P-values generated by one-way ANOVA with Tukey's multiple comparisons, are presented in Table 146. Note that each group (grp) of animals listed in Table 146 consisted of 3 animals per group.

TABLE 146
HTT mRNA lowering in NHP caudate

| | | Relative | Relative | P value by | P value by | P value by |
|---|---|---|---|---|---|---|
| | Total | remaining | HTT | one-way | one-way | one-way |
| Group | dose | HTT mRNA | mRNA KD | ANOVA | ANOVA | ANOVA |
| (Grp) | (VG) | (% veh ± stdev) | (% veh ± stdev) | (vs Grp C2) | (vs Grp C3) | (vs Grp C4) |
| Grp C1b | 0.0 | 100 ± 8 | 0 ± 8 | 0.027 | 0.0024 | 0.0018 |
| Grp C2 | 1.11e13 | 63 ± 13 | 37 ± 13 | — | 0.296 | 0.2152 |
| Grp C3 | 8.00e12 | 43 ± 12 | 57 ± 12 | — | — | 0.9944 |
| Grp C4 | 1.78e13 | 41 ± 16 | 59 ± 16 | — | — | — |

[1547] Significant HTT mRNA reduction was observed in the caudate after bilateral intrathalamic or bilateral combined intraputaminal and intrathalamic infusion of different doses of AAV1-VOYHT1. Specifically, on average, there was 37%, 57% and 59% HTT mRNA KD for group C2 (thalamus dosing only, 1.11×10¹³ VG per animal), group C3 (combined intraputaminal and intrathalamic infusion, 8.00×10¹² VG per animal) and group C 4 (combined intraputaminal and intrathalamic infusion, 1.78×10¹³ VG per animal), respectively, relative to the vehicle group (group C1b) that was statistically significant (P<0.05 by one-way ANOVA with Tukey's multiple comparisons test). There was no significant difference in caudate HTT mRNA KD across AAV1-VOYHT1 treatment groups (P>0.05 by one-way ANOVA with Tukey's multiple comparisons test)

[1548] vii. Thalamus HTT Protein and mRNA Levels

[1549] To evaluate HTT protein and mRNA lowering in the thalamus, 4 punches were collected from each animal (2 per hemisphere) for HTT and actin protein analysis by LC-MS/MS, resulting in a total of 12 punches per group (3 animals per group), Thalamus HTT protein levels were normalized to the levels of actin (internal control), and then fluffier normalized to the vehicle group. The average relative remaining thalamus HTT protein and relative thalamus HTT protein knockdown (KD) across total VG doses (VG/animal, or VG) and expressed as a percentage of vehicle (veh), corresponding standard deviation (stdev) values, as well as P-values generated by one-way ANOVA with Tukey's multiple comparisons, are presented in Table 147. Note that each group (grp) of animals listed in Table 147 consisted of 3 animals per group.

TABLE 147
HTT protein lowering in NHP thalamus

| | | Relative | Relative | P value by | P value by | P value by |
|---|---|---|---|---|---|---|
| | Total | remaining | HTT | one-way | one-way | one-way |
| Group | dose | HTT protein | protein KD | ANOVA | ANOVA | ANOVA |
| (Grp) | (VG) | (% veh ± stdev) | (% veh ± stdev) | (vs Grp C2) | (vs Grp C3) | (vs Grp C4) |
| Grp C1b | 0.0 | 100 ± 1 | 0 ± 1 | <0.0001 | <0.0001 | <0.0001 |
| Grp C2 | 1.11e13 | 46 ± 4 | 54 ± 4 | — | 0.4428 | 0.0072 |
| Grp C3 | 8.00e12 | 52 ± 9 | 48 ± 9 | — | — | 0.0012 |
| Grp C4 | 1.78e13 | 26 ± 3 | 74 ± 3 | — | — | — |

[1550] Dose-dependent HTT protein reduction was achieved in the thalamus after bilateral combined intraputaminal and intrathalamic infusion of different total doses of AAV1-VOYHT1. Specifically, on average, there was 54%, 48% and 74% HTT protein KD for group C2 (thalamus dosing only, 1.11×10¹³ VG per animal), group C3 (combined intraputaminal and intrathalamic infusion 8.00×10¹² VG per animal) and group C4 (combined intraputaminal and intrathalamic infusion, 1.78×10¹³ VG per animal), respectively, relative to the vehicle group (group C1b that was statistically significant (P<0.0001 by one-way ANOVA with Tukey's multiple comparisons test). HTT protein KD in the thalamus was greater (P<0.05 by one-way ANOVA with Tukey's multiple comparisons test) after combined intraputaminal and intrathalamic administration of AAV1-VOYHT1 at a dose of 1.78×10¹³ VG per animal (group C4) versus thalamus administration only at a dose of 1.11×10¹³ VG per animal (group C2). HTT protein KD in the thalamus was dose-dependent, with significantly greater KD (P<0.01 by one-way ANOVA with Tukey's multiple comparisons test) after combined intraputaminal and intrathalamic administration of AAV1-VOYHT1 at a dose of 1.78×10¹³ (group C4) versus 8.00×10¹² (group C3) VG per animal.

[1551] NHP thalamic HTT mRNA levels were also measured by bDNA assay in the same thalamus punches used for HTT protein quantitation, using the specific probe set against rhesus HTT, TBP, AARS and XPNPEP1. Thalamic HTT mRNA levels were normalized to the geometric mean of the three housekeeping genes TBP, AARS and XPNPEP1, and then further normalized to the vehicle group. The average relative remaining thalamus HTT mRNA and relative thalamus HTT mRNA knockdown (KD) across total VG doses (VG/animal, or VG) and expressed as a percentage of vehicle (veh), corresponding standard deviation (stdev) values, as well as P-values generated by one-way ANOVA with Tukey's multiple comparisons, are presented in Table 148. Note that each group (grp) of animals listed in Table 148 consisted of 3 animals per group.

TABLE 148
HTT mRNA lowering in NHP thalamus

| | | Relative | Relative | P value by | P value by | P value by |
|---|---|---|---|---|---|---|
| | Total | remaining | HTT | one-way | one-way | one-way |
| Group | dose | HTT mRNA | mRNA KD | ANOVA | ANOVA | ANOVA |
| (Grp) | (VG) | (% veh ± stdev) | (% veh ± stdev) | (vs Grp C2) | (vs Grp C3) | (vs Grp C4) |
| Grp C1b | 0.0 | 100 ± 3 | 0 ± 3 | <0.0001 | <0.0001 | <0.0001 |
| Grp C2 | 1.11e13 | 29 ± 3 | 71 ± 3 | — | 0.9988 | 0.8485 |
| Grp C3 | 8.00e12 | 29 ± 6 | 71 ± 6 | — | — | 0.7768 |
| Grp C4 | 1.78e13 | 32 ± 7 | 68 ± 7 | — | — | — |

[1552] Significant thalamic HTT mRNA reduction was achieved in the thalamus after bilateral intrathalamic or bilateral combined intraputaminal and intrathalamic infusion of different total doses of AAV1-VOYHT1. Specifically, on average, 71%, 71% and 68% HTT mRNA KD for group C2 (thalamus dosing only, 1.11×10¹³ VG per animal), group C3 (combined intraputaminal and intrathalamic dosing, 8.00×10¹² VG per animal), and group C4 (combined intraputaminal and intrathalamic dosing, 1.78×10¹³ VG per animal), respectively, relative to vehicle (group C1b) that was statistically significant (P<0.0001 by one-way ANOVA with Tukey's multiple comparisons test). There was no statistically significant difference in thalamus HTT mRNA KD across AAV1-VOYHT1 treatment groups (P>0.05 by one-way ANOVA with Tukey's multiple comparisons test).

[1553] viii. Relationship Between Relative HTT Protein and Relative mRNA Levels

[1554] The relationship between relative HTT protein levels and relative HTT mRNA levels in all samples from putamen, caudate and thalamus from group C2 (1.11×10¹³ VG per animal), group C3 (8.00×10¹² VG per animal), group C4 (1.78×10¹³ VG per animal), and the vehicle group (group C1b was assessed using a Pearson correlation method. Relative HTT protein levels as measured by the LC-MS/MS assay correlated with relative HTT mRNA levels as measured by the bDNA assay (Pearson r=0.9334, P<0.0001).

[1555] Together, this study demonstrated that at 5 weeks after bilateral combined intraputaminal and intrathalamic administration of VY-AAV1-VOYHT1, there was significant HTT protein KD in the putamen, caudate and thalamus. HTT protein KD in the putamen and caudate was maximal at 8.00×10¹² VG per animal tested in this study. Combined intrathalamic and intraputaminal infusion of VY-HTT01. resulted in greater HTT protein KD in the putamen and thalamus than administration via thalamus only. In the caudate, HTT protein KD was similar with combined intrathalamic and intraputaminal infusion of VY-HTT01 vs intrathalamic dosing only. Relative remaining HTT protein levels correlated with relative remaining HTT mRNA levels for all samples tested from putamen, caudate and thalamus.

### Example 14

### VY-HTT01-Mediated HTT mRNA and Protein Knockdown in FRhK-4 Cells

[1556] This study was designed to measure HTT mRNA and protein knockdown in FRhK-4 rhesus macaque (Macaca mulatta) kidney cells transduced with AAV1-VOYHT1 For AAV vector transduction, cells were seeded at a density of 5e6 cells/well in P150 dishes and subsequently transfected via bath (i.e., culture medium) application of AAV1-VOYHT1 at the following vector doses (expressed as multiplicity of infection, or MOI, in vg/cell): 0, 5.0e2, 1.6e3, 5.0e3, 1.6e4, 5.0e4, 1.6e5 and 5.0e5 vg/cell. After 48 hours, AAV1-VOYHT1-transduced cells were harvested and subdivided into three cell pellets for measurement of relative HTT mRNA by qRT-PCR, and for measurement of relative HTT protein by LC-MS/MS and western blot.

[1557] HTT mRNA quantification procedures were similar to those described in Example 8. Briefly, relative HTT mRNA expression was obtained by normalizing the HTT mRNA level to housekeeping gene mRNA level; this normalized HTT mRNA level was then expressed relative to the normalized HTT mRNA level in treated and/or untreated cells, as determined by qRT-PCR. The average relative remaining FRhK-4 cell HTT mRNA and relative FRhK-4 cell HTT mRNA knockdown (KD) expressed as a percentage of vehicle (veh) across AAV1-VOYHT1 doses (MOI), and as determined by qRT-PCR, are provided in Table 149.

TABLE 149
HTT mRNA knockdown by AAV1-VOYHT1 in FRhK-4 cells

| | Relative remaining |
|---|---|
| Dose | HTT mRNA |
| (MOI) | (% veh ± stdev) |
| 5.0e5 | 13.2 ± 0.0 |
| 1.6e5 | 15.1 ± 2.0 |
| 5.0e4 | 20.7 ± 7.6 |
| 1.6e4 | 40.6 ± 0.0 |
| 5.0e3 | 46.3 ± 6.8 |
| 1.6e3 | 88.0 ± 38.2 |
| 5.0e2 | 109.3 ± 3.2 |
| 0 | 100.0 ± 30.1 |

[1558] These findings demonstrate dose-dependent FRhK-4 HTT mRNA knockdown, with 87% of HTT mRNA knockdown achieved at MO1 5e5.

[1559] Procedures for HTT protein quantification by LC-MS/MS were similar to those described in Example 7. HTT protein levels were also assessed by standard western blotting methodology known and performed by a person skilled in the art. The relative remaining FRhK-4 cell HTT protein and relative FRhK-4 cell HTT protein knockdown (KD), expressed as a percentage of vehicle (veh) across AAV1-VOYHT1 doses (MOI), as determined by LC-MS and western blot approaches, are presented in Table 150. For LC-MS analyses, the concentration (cone) of HTT protein (ng/mg total protein) measured in FRhK-4 cells is also included in Table 150 for clarity and completeness.

TABLE 150
HTT protein knockdown by AAV1-VOYHT1 in FRhK-4 cells

| | LC-MS/MS | | |
|---|---|---|---|
| | Conc of HTT | | Western Blot |
| | protein in | Relative | Relative |
| | homogenate | remaining | remaining |
| Dose | (ng/mg total | HTT protein | HTT protein |
| (MOI) | protein) | (% veh) | (% veh) |
| 5.0e5 | 14.1 | 12.5 | 31.9 |
| 1.6e5 | 21.7 | 19.1 | 46.0 |
| 5.0e4 | 30.6 | 27.0 | 55.2 |
| 1.6e4 | 46.2 | 40.7 | 84.6 |
| 5.0e3 | 60.7 | 53.5 | 143.3 |
| 1.6e3 | 85.2 | 75.1 | 197.7 |
| 5.0e2 | 100.8 | 88.8 | 234.8 |
| 0 | 113.5 | 100.0 | 100.0 |

[1560] Together, HTT protein quantification analyses revealed dose-dependent knockdown of HTT protein by AAV1-VOYHT1 in FRhK-4 cells regardless of protein quantification methodology, i.e., when protein was quantified by LC-MS/MS or by western blot.

[1561] The relationship between relative remaining HTT protein and mRNA levels in FRhK-4 HTT was confirmed using a Pearson correlation analysis. When HTT protein levels were measured by LC-MS/MS, a positive linear relationship emerged between relative remaining HTT protein and mRNA levels (Pearson r=0.96, P<0.0001). Similarly, a positive linear relationship also emerged between relative HTT protein and mRNA levels (Pearson r=0.55, P<0.05) when HTT protein levels were measured by western blot. Thus, regardless of protein quantification methodology applied, higher HTT protein levels corresponded to higher HTT mRNA levels.

[1562] This study revealed dose-dependent relative HTT mRNA and protein knockdown in FRhK-4 rhesus macaque (Macaca mulatta) kidney cells transduced with AAV1-VOYHT1, with nearly 90% of HTT mRNA knockdown achieved at the highest dose (MOI 5e5 vg/cell). Protein knockdown was observed when measured by both LC-MS/MS and western blot and a strong positive relationship emerged between HTT protein and HTT mRNA levels regardless of protein quantification methodology applied.

### Equivalents and Scope

[1563] Those skilled in the art will recognize or be able to ascertain using no more than routine experimentation, many equivalents to the specific embodiments in accordance with the AAV particles described herein. The scope of the present disclosure is not intended to be limited to the above Description, but rather is as set forth in the appended claims,

[1564] In the claims, articles such as “a,” “an,” and “the” may mean one or more than one unless indicated to the contrary or otherwise evident from the context. Claims or descriptions that include “or” between one or more members of a group are considered satisfied if one, more than one, or all of the group members are present in, employed in, or otherwise relevant to a given product or process unless indicated to the contrary or otherwise evident from the context. The disclosure includes embodiments in which exactly one member of the group is present in, employed in, or otherwise relevant to a given product or process. The disclosure includes embodiments in which more than one, or the entire group members are present in, employed in, or otherwise relevant to a given product or process.

[1565] It is also noted that the term “comprising” is intended to be open and permits but does not require the inclusion of additional elements or steps. When the term “comprising” is used. herein, the term “consisting of” is thus also encompassed and disclosed.

[1566] Where ranges are given, endpoints are included. Furthermore, it is to be understood that unless otherwise indicated or otherwise evident from the context and understanding of one of ordinary skill in the art, values that are expressed as ranges can assume any specific value or subrange within the stated ranges in different embodiments of the disclosure, to the tenth of the unit of the lower limit of the range, unless the context clearly dictates otherwise.

[1567] In addition, it is to be understood that any particular embodiment of the present disclosure that falls within the prior art may be explicitly excluded from any one or more of the claims. Since such embodiments are deemed to be known to one of ordinary skill in the art, they may be excluded even if the exclusion is not set forth explicitly herein, Any particular embodiment of the compositions of the disclosure (e.g., any antibiotic, therapeutic or active ingredient; any method of production; any method of use; etc.) can be excluded from any one or more claims, for any reason, whether or not related to the existence of prior art.

[1568] It is to be understood that the words which have been used are words of description rather than limitation, and that changes may be made within the purview of the appended claims without departing from the true scope and spirit of the disclosure in its broader aspects.

[1569] While the present disclosure has been described at some length and with some particularity with respect to the several described embodiments, it is not intended that it should be limited to any such particulars or embodiments or any particular embodiment, but it is to he construed with references to the appended claims so as to provide the broadest possible interpretation of such claims in view of the prior art and, therefore, to effectively encompass the intended scope of the disclosure.

The application's sequence listing, which the Patent Office published only in electronic form, follows.

SEQUENCE LISTING (2262 sequences)

SEQ ID NO: 1 - DNA, 2211 bp, Adeno-associated virus 1
atggctgccgatggttatcttccagattggctcgaggacaacctctctgagggcattcgcgagtggtgggacttgaaacctggagccccgaagcccaaagccaaccagcaaaagcaggacgacggccggggtctggtgcttcctggctacaagtacctcggacccttcaacggactcgacaagggggagcccgtcaacgcggcggacgcagcggccctcgagcacgacaaggcctacgaccagcagctcaaagcgggtgacaatccgtacctgcggtataaccacgccgacgccgagtttcaggagcgtctgcaagaagatacgtcttttgggggcaacctcgggcgagcagtcttccaggccaagaagcgggttctcgaacctctcggtctggttgaggaaggcgctaagacggctcctggaaagaaacgtccggtagagcagtcgccacaagagccagactcctcctcgggcatcggcaagacaggccagcagcccgctaaaaagagactcaattttggtcagactggcgactcagagtcagtccccgatccacaacctctcggagaacctccagcaacccccgctgctgtgggacctactacaatggcttcaggcggtggcgcaccaatggcagacaataacgaaggcgccgacggagtgggtaatgcctcaggaaattggcattgcgattccacatggctgggcgacagagtcatcaccaccagcacccgcacctgggccttgcccacctacaataaccacctctacaagcaaatctccagtgcttcaacgggggccagcaacgacaaccactacttcggctacagcaccccctgggggtattttgatttcaacagattccactgccacttttcaccacgtgactggcagcgactcatcaacaacaattggggattccggcccaagagactcaacttcaaactcttcaacatccaagtcaaggaggtcacgacgaatgatggcgtcacaaccatcgctaataaccttaccagcacggttcaagtcttctcggactcggagtaccagcttccgtacgtcctcggctctgcgcaccagggctgcctccctccgttcccggcggacgtgttcatgattccgcaatacggctacctgacgctcaacaatggcagccaagccgtgggacgttcatccttttactgcctggaatatttcccttctcagatgctgagaacgggcaacaactttaccttcagctacacctttgaggaagtgcctttccacagcagctacgcgcacagccagagcctggaccggctgatgaatcctctcatcgaccaatacctgtattacctgaacagaactcaaaatcagtccggaagtgcccaaaacaaggacttgctgtttagccgtgggtctccagctggcatgtctgttcagcccaaaaactggctacctggaccctgttatcggcagcagcgcgtttctaaaacaaaaacagacaacaacaacagcaattttacctggactggtgcttcaaaatataacctcaatgggcgtgaatccatcatcaaccctggcactgctatggcctcacacaaagacgacgaagacaagttctttcccatgagcggtgtcatgatttttggaaaagagagcgccggagcttcaaacactgcattggacaatgtcatgattacagacgaagaggaaattaaagccactaaccctgtggccaccgaaagatttgggaccgtggcagtcaatttccagagcagcagcacagaccctgcgaccggagatgtgcatgctatgggagcattacctggcatggtgtggcaagatagagacgtgtacctgcagggtcccatttgggccaaaattcctcacacagatggacactttcacccgtctcctcttatgggcggctttggactcaagaacccgcctcctcagatcctcatcaaaaacacgcctgttcctgcgaatcctccggcggagttttcagctacaaagtttgcttcattcatcacccaatactccacaggacaagtgagtgtggaaattgaatgggagctgcagaaagaaaacagcaagcgctggaatcccgaagtgcagtacacatccaattatgcaaaatctgccaacgttgattttactgtggacaacaatggactttatactgagcctcgccccattggcacccgttaccttacccgtcccctgtaa

SEQ ID NO: 2 - protein, 736 aa, Adeno-associated virus 1
MAADGYLPDWLEDNLSEGIREWWDLKPGAPKPKANQQKQDDGRGLVLPGYKYLGPFNGLDKGEPVNAADAAALEHDKAYDQQLKAGDNPYLRYNHADAEFQERLQEDTSFGGNLGRAVFQAKKRVLEPLGLVEEGAKTAPGKKRPVEQSPQEPDSSSGIGKTGQQPAKKRLNFGQTGDSESVPDPQPLGEPPATPAAVGPTTMASGGGAPMADNNEGADGVGNASGNWHCDSTWLGDRVITTSTRTWALPTYNNHLYKQISSASTGASNDNHYFGYSTPWGYFDFNRFHCHFSPRDWQRLINNNWGFRPKRLNFKLFNIQVKEVTTNDGVTTIANNLTSTVQVFSDSEYQLPYVLGSAHQGCLPPFPADVFMIPQYGYLTLNNGSQAVGRSSFYCLEYFPSQMLRTGNNFTFSYTFEEVPFHSSYAHSQSLDRLMNPLIDQYLYYLNRTQNQSGSAQNKDLLFSRGSPAGMSVQPKNWLPGPCYRQQRVSKTKTDNNNSNFTWTGASKYNLNGRESIINPGTAMASHKDDEDKFFPMSGVMIFGKESAGASNTALDNVMITDEEEIKATNPVATERFGTVAVNFQSSSTDPATGDVHAMGALPGMVWQDRDVYLQGPIWAKIPHTDGHFHPSPLMGGFGLKNPPPQILIKNTPVPANPPAEFSATKFASFITQYSTGQVSVEIEWELQKENSKRWNPEVQYTSNYAKSANVDFTVDNNGLYTEPRPIGTRYLTRPL

SEQ ID NO: 3 - DNA, 4718 bp, Adeno-associated virus 1
ttgcccactccctctctgcgcgctcgctcgctcggtggggcctgcggaccaaaggtccgcagacggcagagctctgctctgccggccccaccgagcgagcgagcgcgcagagagggagtgggcaactccatcactaggggtaatcgcgaagcgcctcccacgctgccgcgtcagcgctgacgtaaattacgtcataggggagtggtcctgtattagctgtcacgtgagtgcttttgcgacattttgcgacaccacgtggccatttagggtatatatggccgagtgagcgagcaggatctccattttgaccgcgaaatttgaacgagcagcagccatgccgggcttctacgagatcgtgatcaaggtgccgagcgacctggacgagcacctgccgggcatttctgactcgtttgtgagctgggtggccgagaaggaatgggagctgcccccggattctgacatggatctgaatctgattgagcaggcacccctgaccgtggccgagaagctgcagcgcgacttcctggtccaatggcgccgcgtgagtaaggccccggaggccctcttctttgttcagttcgagaagggcgagtcctacttccacctccatattctggtggagaccacgggggtcaaatccatggtgctgggccgcttcctgagtcagattagggacaagctggtgcagaccatctaccgcgggatcgagccgaccctgcccaactggttcgcggtgaccaagacgcgtaatggcgccggaggggggaacaaggtggtggacgagtgctacatccccaactacctcctgcccaagactcagcccgagctgcagtgggcgtggactaacatggaggagtatataagcgcctgtttgaacctggccgagcgcaaacggctcgtggcgcagcacctgacccacgtcagccagacccaggagcagaacaaggagaatctgaaccccaattctgacgcgcctgtcatccggtcaaaaacctccgcgcgctacatggagctggtcgggtggctggtggaccggggcatcacctccgagaagcagtggatccaggaggaccaggcctcgtacatctccttcaacgccgcttccaactcgcggtcccagatcaaggccgctctggacaatgccggcaagatcatggcgctgaccaaatccgcgcccgactacctggtaggccccgctccgcccgcggacattaaaaccaaccgcatctaccgcatcctggagctgaacggctacgaacctgcctacgccggctccgtctttctcggctgggcccagaaaaggttcgggaagcgcaacaccatctggctgtttgggccggccaccacgggcaagaccaacatcgcggaagccatcgcccacgccgtgcccttctacggctgcgtcaactggaccaatgagaactttcccttcaatgattgcgtcgacaagatggtgatctggtgggaggagggcaagatgacggccaaggtcgtggagtccgccaaggccattctcggcggcagcaaggtgcgcgtggaccaaaagtgcaagtcgtccgcccagatcgaccccacccccgtgatcgtcacctccaacaccaacatgtgcgccgtgattgacgggaacagcaccaccttcgagcaccagcagccgttgcaggaccggatgttcaaatttgaactcacccgccgtctggagcatgactttggcaaggtgacaaagcaggaagtcaaagagttcttccgctgggcgcaggatcacgtgaccgaggtggcgcatgagttctacgtcagaaagggtggagccaacaaaagacccgcccccgatgacgcggataaaagcgagcccaagcgggcctgcccctcagtcgcggatccatcgacgtcagacgcggaaggagctccggtggactttgccgacaggtaccaaaacaaatgttctcgtcacgcgggcatgcttcagatgctgtttccctgcaagacatgcgagagaatgaatcagaatttcaacatttgcttcacgcacgggacgagagactgttcagagtgcttccccggcgtgtcagaatctcaaccggtcgtcagaaagaggacgtatcggaaactctgtgccattcatcatctgctggggcgggctcccgagattgcttgctcggcctgcgatctggtcaacgtggacctggatgactgtgtttctgagcaataaatgacttaaaccaggtatggctgccgatggttatcttccagattggctcgaggacaacctctctgagggcattcgcgagtggtgggacttgaaacctggagccccgaagcccaaagccaaccagcaaaagcaggacgacggccggggtctggtgcttcctggctacaagtacctcggacccttcaacggactcgacaagggggagcccgtcaacgcggcggacgcagcggccctcgagcacgacaaggcctacgaccagcagctcaaagcgggtgacaatccgtacctgcggtataaccacgccgacgccgagtttcaggagcgtctgcaagaagatacgtcttttgggggcaacctcgggcgagcagtcttccaggccaagaagcgggttctcgaacctctcggtctggttgaggaaggcgctaagacggctcctggaaagaaacgtccggtagagcagtcgccacaagagccagactcctcctcgggcatcggcaagacaggccagcagcccgctaaaaagagactcaattttggtcagactggcgactcagagtcagtccccgatccacaacctctcggagaacctccagcaacccccgctgctgtgggacctactacaatggcttcaggcggtggcgcaccaatggcagacaataacgaaggcgccgacggagtgggtaatgcctcaggaaattggcattgcgattccacatggctgggcgacagagtcatcaccaccagcacccgcacctgggccttgcccacctacaataaccacctctacaagcaaatctccagtgcttcaacgggggccagcaacgacaaccactacttcggctacagcaccccctgggggtattttgatttcaacagattccactgccacttttcaccacgtgactggcagcgactcatcaacaacaattggggattccggcccaagagactcaacttcaaactcttcaacatccaagtcaaggaggtcacgacgaatgatggcgtcacaaccatcgctaataaccttaccagcacggttcaagtcttctcggactcggagtaccagcttccgtacgtcctcggctctgcgcaccagggctgcctccctccgttcccggcggacgtgttcatgattccgcaatacggctacctgacgctcaacaatggcagccaagccgtgggacgttcatccttttactgcctggaatatttcccttctcagatgctgagaacgggcaacaactttaccttcagctacacctttgaggaagtgcctttccacagcagctacgcgcacagccagagcctggaccggctgatgaatcctctcatcgaccaatacctgtattacctgaacagaactcaaaatcagtccggaagtgcccaaaacaaggacttgctgtttagccgtgggtctccagctggcatgtctgttcagcccaaaaactggctacctggaccctgttatcggcagcagcgcgtttctaaaacaaaaacagacaacaacaacagcaattttacctggactggtgcttcaaaatataacctcaatgggcgtgaatccatcatcaaccctggcactgctatggcctcacacaaagacgacgaagacaagttctttcccatgagcggtgtcatgatttttggaaaagagagcgccggagcttcaaacactgcattggacaatgtcatgattacagacgaagaggaaattaaagccactaaccctgtggccaccgaaagatttgggaccgtggcagtcaatttccagagcagcagcacagaccctgcgaccggagatgtgcatgctatgggagcattacctggcatggtgtggcaagatagagacgtgtacctgcagggtcccatttgggccaaaattcctcacacagatggacactttcacccgtctcctcttatgggcggctttggactcaagaacccgcctcctcagatcctcatcaaaaacacgcctgttcctgcgaatcctccggcggagttttcagctacaaagtttgcttcattcatcacccaatactccacaggacaagtgagtgtggaaattgaatgggagctgcagaaagaaaacagcaagcgctggaatcccgaagtgcagtacacatccaattatgcaaaatctgccaacgttgattttactgtggacaacaatggactttatactgagcctcgccccattggcacccgttaccttacccgtcccctgtaattacgtgttaatcaataaaccggttgattcgtttcagttgaactttggtctcctgtccttcttatcttatcggttaccatggttatagcttacacattaactgcttggttgcgcttcgcgataaaagacttacgtcatcgggttacccctagtgatggagttgcccactccctctctgcgcgctcgctcgctcggtggggcctgcggaccaaaggtccgcagacggcagagctctgctctgccggccccaccgagcgagcgagcgcgcagagagggagtgggcaa

SEQ ID NO: 4 - DNA, 3131 bp, Adeno-associated virus
gcggccgcgaattcgcccttggctgcgtcaactggaccaatgagaactttcccttcaatgattgcgtcgacaagatggtgatctggtgggaggagggcaagatgacggccaaggtcgtggagtccgccaaggccattctcggcggcagcaaggtgcgcgtggaccaaaagtgcaagtcgtccgcccagatcgaccccacccccgtgatcgtcacctccaacaccaacatgtgcgccgtgattgacgggaacagcaccaccttcgagcaccagcagcctctccaggaccggatgtttaagttcgaactcacccgccgtctggagcacgactttggcaaggtgacaaagcaggaagtcaaagagttcttccgctgggccagtgatcacgtgaccgaggtggcgcatgagttttacgtcagaaagggcggagccagcaaaagacccgcccccgatgacgcggataaaagcgagcccaagcgggcctgcccctcagtcgcggatccatcgacgtcagacgcggaaggagctccggtggactttgccgacaggtaccaaaacaaatgttctcgtcacgcgggcatgcttcagatgctgtttccctgcaaaacgtgcgagagaatgaatcggaatttcaacatttgcttcacacacggggtcagagactgctcagagtgtttccccggcgtgtcagaatctcaaccggtcgtcagaaagaggacgtatcggaaactccgtgcgattcatcatctgctggggcgggctcccgagattgcttgctcggcctgcgatctggtcaacgtggacctggatgactgtgtttctgagcaataaatgacttaaaccaggtatggctgccgatggttatcttccagattggctcgaggacaacctctctgagggcattcgcgagtggtgggcgctgaaacctggagccccgaagcccaaagccaaccagcaaaagcaggacgacggccggggtctggtgcttcctggctacaagtacctcggacccttcaacggactcgacaagggggagcccgtcaacgcggcggacgcagcggccctcgagcacgacaaggcttacgaccagcagctgcaggcgggtgacaatccgtacctgcggtataaccacgccgacgccgagtttcaggagcgtctgcaagaagatacgtcttttgggggcaacctcgggcgagcagtcttccaggccaagaagcgggttctcgaacctctcggtctggttgaggaaggcgctaagacggctcctggaaagaagagaccggtagagccatcaccccagcgttctccagactcctctacgggcatcggcaagaaaggccaacagcccgccagaaaaagactcaattttggtcagactggcgactcagagtcagttccagaccctcaacctctcggagaacctccagcagcgccctctggtgtgggacctaatacaatggctgcaggcggtggcgcaccaatggcagacaataacgaaggcgccgacggagtgggtagttcctcgggaaattggcattgcgattccacatggctgggcgacagagtcatcaccaccagcacccgaacctgggccctgcccacctacaacaaccacctctacaagcaaatctccaacgggacatcgggaggagccaccaacgacaacacctacttcggctacagcaccccctgggggtattttgactttaacagattccactgccacctttcaccacgtgactggcagcgactcatcaacaacaactggggattccgacccaagagactcagcttcaagctcttcaacatccaggtcaaggaggtcacgcagaatgaaggcaccaagaccatcgccaataacctcaccagcaccatccaggtgtttacggactcggagtaccagctgccgtacgttctcggctctgtccaccagggctgcctgcctccgttcccggcggacgtgttcatgattccccagtacggctacctaacactcaacaacggtagtcaggccgtgggacgctcctccttctactgcctggaatactttccttcgcagatgctgagaaccggcaacaacttccagtttacttacaccttcgaggacgtgcctttccacagcagctacgcccacagctagagcttggaccggctgatgaatcctctgattgaccagtacctgtactacttgtctcggactcaaacaacaggaggcacggcaaatacgcagactctgggcttcagccaaggtgggcctaatacaatggccaatcaggcaaagaactggctgccaggaccctgttaccgccaacaacgcgtctcaacgacaaccgggcaaaacaacaatagcaactttgcctggactgctgggaccaaataccatctgaatggaagaaattcattggctaatcctggcatcgctatggcaacacacaaagacgacgaggagcgtttttttcccagtaacgggatcctgatttttggcaaacaaaatgctgccagagacaatgcggattacagcgatgtcatgctcaccagcgaggaagaaatcaaaaccactaaccctgtggctacagaggaatacggtatcgtggcagataacttgcagcagcaaaacacggctcctcaaattggaactgtcaacagccagggggccttacccggtatggtctggcagaaccgggacgtgtacctgcagggtcccatctgggccaagattcctcacacggacggcaacttccacccgtctccgctgatgggcggctttggcctgaaacatcctccgcctcagatcctgatcaagaacacgcctgtacctgcggatcctccgaccaccttcaaccagtcaaagctgaactctttcatcacgcaatacagcaccggacaggtcagcgtggaaattgaatgggagctgcagaaggaaaacagcaagcgctggaaccccgagatccagtacacctccaactactacaaatctataagtgtggactttgctgttaatacagaaggcgtgtactctgaaccccgccccattggcacccgttacctcacccgtaatctgtaattgcctgttaatcaataaaccggttgattcgtttcagttgaactttggtctctgcgaagggcgaattc

SEQ ID NO: 5 - DNA, 255 bp, Adeno-associated virus 10
ggtaattcctccggaaattggcattgcgattccacatggctgggcgacagagtcatcaccaccagcacccgaacctgggtcctgcccacctacaacaaccacatctacaagcaaatctccagcgagacaggagccaccaacgacaaccactacttcggctacagcaccccctgggggtattttgactttaacagattccactgccacttttcaccacgtgactggcagcgactcatcaacaacaactggggattc

SEQ ID NO: 6 - protein, 738 aa, Adeno-associated virus 10
MAADGYLPDWLEDNLSEGIREWWDLKPGAPKPKANQQKQDDGRGLVLPGYKYLGPFNGLDKGEPVNAADAAALEHDKAYDQQLKAGDNPYLRYNHADAEFQERLQEDTSFGGNLGRAVFQAKKRVLEPLGLVEEAAKTAPGKKRPVEPSPQRSPDSSTGIGKKGQQPAKKRLNFGQTGESESVPDPQPIGEPPAGPSGLGSGTMAAGGGAPMADNNEGADGVGSSSGNWHCDSTWLGDRVITTSTRTWALPTYNNHLYKQISNGTSGGSTNDNTYFGYSTPWGYFDFNRFHCHFSPRDWQRLINNNWGFRPKRLSFKLFNIQVKEVTQNEGTKTIANNLTSTIQVFTDSEYQLPYVLGSAHQGCLPPFPADVFMIPQYGYLTLNNGSQAVGRSSFYCLEYFPSQMLRTGNNFEFSYTFEDVPFHSSYAHSQSLDRLMNPLIDQYLYYLSRTQSTGGTQGTQQLLFSQAGPANMSAQAKNWLPGPCYRQQRVSTTLSQNNNSNFAWTGATKYHLNGRDSLVNPGVAMATHKDDEERFFPSSGVLMFGKQGAGRDNVDYSSVMLTSEEEIKTTNPVATEQYGVVADNLQQANTGPIVGNVNSQGALPGMVWQNRDVYLQGPIWAKIPHTDGNFHPSPLMGGFGLKHPPPQILIKNTPVPADPPTTFSQAKLASFITQYSTGQVSVEIEWELQKENSKRWNPEIQYTSNYYKSTNVDFAVNTEGTYSEPRPIGTRYLTRNL

SEQ ID NO: 7 - protein, 738 aa, Adeno-associated virus 10
MAADGYLPDWLEDNLSEGIREWWDLKPGAPKPKANQQKQDDGRGLVLPGYKYLGPFNGLDKGEPVNAADAAALEHDKAYDQQLKAGDNPYLRYNHADAEFQERLQEDTSFGGNLGRAVFQAKKRVLEPLGLVEEGAKTAPGKKRPVEPSPQRSPDSSTGIGKKGQQPAKKRLNFGQTGDSESVPDPQPIGEPPAGPSGLGSGTMAAGGGAPMADNNEGADGVGSSSGNWHCDSTWLGDRVITTSTRTWALPTYNNHLYKQISNGTSGGSTNDNTYFGYSTPWGYFDFNRFHCHFSPRDWQRLINNNWGFRPKRLNFKLFNIQVKEVTQNEGTKTIANNLTSTIQVFTDSEYQLPYVLGSAHQGCLPPFPADVFMIPQYGYLTLNNGSQAVGRSSFYCLEYFPSQMLRTGNNFEFSYQFEDVPFHSSYAHSQSLDRLMNPLIDQYLYYLSRTQSTGGTAGTQQLLFSQAGPNNMSAQAKNWLPGPCYRQQRVSTTLSQNNNSNFAWTGATKYHLNGRDSLVNPGVAMATHKDDEERFFPSSGVLMFGKQGAGKDNVDYSSVMLTSEEEIKTTNPVATEQYGVVADNLQQQNAAPIVGAVNSQGALPGMVWQNRDVYLQGPIWAKIPHTDGNFHPSPLMGGFGLKHPPPQILIKNTPVPADPPTTFSQAKLASFITQYSTGQVSVEIEWELQKENSKRWNPEIQYTSNYYKSTNVDFAVNTDGTYSEPRPIGTRYLTRNL

SEQ ID NO: 8 - DNA, 258 bp, Adeno-associated virus 11
ggtaattcctccggaaattggcattgcgattccacatggctgggcgacagagtcatcaccaccagcacccgaacctgggccctgccaacctacaacaaccacctctacaaacaaatctccagcgcttcaacgggggccagcaacgacaaccactactttggctacagcaccccctgggggtattttgactttaacagattccactgccacttctcaccacgtgactggcagcgactcatcaacaacaactggggattc

SEQ ID NO: 9 - DNA, 255 bp, Adeno-associated virus 12
ggtaattcctccggaaattggcattgcgattccacatggctgggcgaccgagtcattaccaccagcacccggacttgggccctgcccacctacaacaaccacctctacaagcaaatctccagccaatcgggtgccaccaacgacaaccactacttcggctacagcaccccttgggggtattttgatttcaacagattccactgccatttctcaccacgtgactggcagcgactcatcaacaacaactggggattc

SEQ ID NO: 10 - DNA, 2208 bp, Adeno-associated virus 2
atggctgccgatggttatcttccagattggctcgaggacactctctctgaaggaataagacagtggtggaagctcaaacctggcccaccaccaccaaagcccgcagagcggcataaggacgacagcaggggtcttgtgcttcctgggtacaagtacctcggacccttcaacggactcgacaagggagagccggtcaacgaggcagacgccgcggccctcgagcacgacaaagcctacgaccggcagctcgacagcggagacaacccgtacctcaagtacaaccacgccgacgcggagtttcaggagcgccttaaagaagatacgtcttttgggggcaacctcggacgagcagtcttccaggcgaaaaagagggttcttgaacctctgggcctggttgaggaacctgttaagacggctccgggaaaaaagaggccggtagagcactctcctgtggagccagactcctcctcgggaaccggaaaggcgggccagcagcctgcaagaaaaagattgaattttggtcagactggagacgcagactcagtacctgacccccagcctctcggacagccaccagcagccccctctggtctgggaactaatacgatggctacaggcagtggcgcaccaatggcagacaataacgagggcgccgacggagtgggtaattcctcgggaaattggcattgcgattccacatggatgggcgacagagtcatcaccaccagcacccgaacctgggccctgcccacctacaacaaccacctctacaaacaaatttccagccaatcaggagcctcgaacgacaatcactactttggctacagcaccccttgggggtattttgacttcaacagattccactgccacttttcaccacgtgactggcaaagactcatcaacaacaactggggattccgacccaagagactcaacttcaagctctttaacattcaagtcaaagaggtcacgcagaatgacggtacgacgacgattgccaataaccttaccagcacggttcaggtgtttactgactcggagtaccagctcccgtacgtcctcggctcggcgcatcaaggatgcctcccgccgttcccagcagacgtcttcatggtgccacagtatggatacctcaccctgaacaacgggagtcaggcagtaggacgctcttcattttactgcctggagtactttccttctcagatgctgcgtaccggaaacaactttaccttcagctacacttttgaggacgttcctttccacagcagctacgctcacagccagagtctggaccgtctcatgaatcctctcatcgaccagtacctgtattacttgagcagaacaaacactccaagtggaaccaccacgcagtcaaggcttcagttttctcaggccggagcgagtgacattcgggaccagtctaggaactggcttcctggaccctgttaccgccagcagcgagtatcaaagacatctgcggataacaacaacagtgaatactcgtggactggagctaccaagtaccacctcaatggcagagactctctggtgaatccgggcccggccatggcaagccacaaggacgatgaagaaaagttttttcctcagagcggggttctcatctttgggaagcaaggctcagagaaaacaaatgtggacattgaaaaggtcatgattacagacgaagaggaaatcaggacaaccaatcccgtggctacggagcagtatggttctgtatctaccaacctccagagaggcaacagacaagcagctaccgcagatgtcaacacacaaggcgttcttccaggcatggtctggcaggacagagatgtgtaccttcaggggcccatctgggcaaagattccacacacggacggacattttcacccctctcccctcatgggtggattcggacttaaacaccctcctccacagattctcatcaagaacaccccggtacctgcgaatccttcgaccaccttcagtgcggcaaagtttgcttccttcatcacacagtactccacgggacaggtcagcgtggagatcgagtgggagctgcagaaggaaaacagcaaacgctggaatcccgaaattcagtacacttccaactacaacaagtctgttaatgtggactttactgtggacactaatggcgtgtattcagagcctcgccccattggcaccagatacctgactcgtaatctgtaa

SEQ ID NO: 11 - protein, 735 aa, Adeno-associated virus 2 [sequence omitted]

SEQ ID NO: 12 - protein, 621 aa, Adeno-associated virus 2
MPGFYEIVIKVPSDLDGHLPGISDSFVNWVAEKEWELPPDSDMDLNLIEQAPLTVAEKLQRDFLTEWRRVSKAPEALFFVQFEKGESYFHMHVLVETTGVKSMVLGRFLSQIREKLIQRIYRGIEPTLPNWFAVTKTRNGAGGGNKVVDECYIPNYLLPKTQPELQWAWTNMEQYLSACLNLTERKRLVAQHLTHVSQTQEQNKENQNPNSDAPVIRSKTSARYMELVGWLVDKGITSEKQWIQEDQASYISFNAASNSRSQIKAALDNAGKIMSLTKTAPDYLVGQQPVEDISSNRIYKILELNGYDPQYAASVFLGWATKKFGKRNTIWLFGPATTGKTNIAEAIAHTVPFYGCVNWTNENFPFNDCVDKMVIWWEEGKMTAKVVESAKAILGGSKVRVDQKCKSSAQIDPTPVIVTSNTNMCAVIDGNSTTFEHQQPLQDRMFKFELTRRLDHDFGKVTKQEVKDFFRWAKDHVVEVEHEFYVKKGGAKKRPAPSDADISEPKRVRESVAQPSTSDAEASINYADRYQNKCSRHVGMNLMLFPCRQCERMNQNSNICFTHGQKDCLECFPVSESQPVSVVKKAYQKLCYIHHIMGKVPDACTACDLVNVDLDDCIFEQ

SEQ ID NO: 13 - DNA, 4675 bp, Adeno-associated virus 2
ttggccactccctctctgcgcgctcgctcgctcactgaggccgggcgaccaaaggtcgcccgacgcccgggctttgcccgggcggcctcagtgagcgagcgagcgcgcagagagggagtggccaactccatcactaggggttcctggaggggtggagtcgtgacgtgaattacgtcatagggttagggaggtcctgtattagaggtcacgtgagtgttttgcgacattttgcgacaccatgtggtcacgctgggtatttaagcccgagtgagcacgcagggtctccattttgaagcgggaggtttgaacgcgcagccgccatgccggggttttacgagattgtgattaaggtccccagcgaccttgacgggcatctgcccggcatttctgacagctttgtgaactgggtggccgagaaggaatgggagttgccgccagattctgacatggatctgaatctgattgagcaggcacccctgaccgtggccgagaagctgcagcgcgactttctgacggaatggcgccgtgtgagtaaggccccggaggcccttttctttgtgcaatttgagaagggagagagctacttccacatgcacgtgctcgtggaaaccaccggggtgaaatccatggttttgggacgtttcctgagtcagattcgcgaaaaactgattcagagaatttaccgcgggatcgagccgactttgccaaactggttcgcggtcacaaagaccagaaatggcgccggaggcgggaacaaggtggtggatgagtgctacatccccaattacttgctccccaaaacccagcctgagctccagtgggcgtggactaatatggaacagtatttaagcgcctgtttgaatctcacggagcgtaaacggttggtggcgcagcatctgacgcacgtgtcgcagacgcaggagcagaacaaagagaatcagaatcccaattctgatgcgccggtgatcagatcaaaaacttcagccaggtacatggagctggtcgggtggctcgtggacaaggggattacctcggagaagcagtggatccaggaggaccaggcctcatacatctccttcaatgcggcctccaactcgcggtcccaaatcaaggctgccttggacaatgcgggaaagattatgagcctgactaaaaccgcccccgactacctggtgggccagcagcccgtggaggacatttccagcaatcggatttataaaattttggaactaaacgggtacgatccccaatatgcggcttccgtctttctgggatgggccacgaaaaagttcggcaagaggaacaccatctggctgtttgggcctgcaactaccgggaagaccaacatcgcggaggccatagcccacactgtgcccttctacgggtgcgtaaactggaccaatgagaactttcccttcaacgactgtgtcgacaagatggtgatctggtgggaggaggggaagatgaccgccaaggtcgtggagtcggccaaagccattctcggaggaagcaaggtgcgcgtggaccagaaatgcaagtcctcggcccagatagacccgactcccgtgatcgtcacctccaacaccaacatgtgcgccgtgattgacgggaactcaacgaccttcgaacaccagcagccgttgcaagaccggatgttcaaatttgaactcacccgccgtctggatcatgactttgggaaggtcaccaagcaggaagtcaaagactttttccggtgggcaaaggatcacgtggttgaggtggagcatgaattctacgtcaaaaagggtggagccaagaaaagacccgcccccagtgacgcagatataagtgagcccaaacgggtgcgcgagtcagttgcgcagccatcgacgtcagacgcggaagcttcgatcaactacgcagacaggtaccaaaacaaatgttctcgtcacgtgggcatgaatctgatgctgtttccctgcagacaatgcgagagaatgaatcagaattcaaatatctgcttcactcacggacagaaagactgtttagagtgctttcccgtgtcagaatctcaacccgtttctgtcgtcaaaaaggcgtatcagaaactgtgctacattcatcatatcatgggaaaggtgccagacgcttgcactgcctgcgatctggtcaatgtggatttggatgactgcatctttgaacaataaatgatttaaatcaggtatggctgccgatggttatcttccagattggctcgaggacactctctctgaaggaataagacagtggtggaagctcaaacctggcccaccaccaccaaagcccgcagagcggcataaggacgacagcaggggtcttgtgcttcctgggtacaagtacctcggacccttcaacggactcgacaagggagagccggtcaacgaggcagacgccgcggccctcgagcacgtacaaagcctacgaccggcagctcgacagcggagacaacccgtacctcaagtacaaccacgccgacgcggagtttcaggagcgccttaaagaagatacgtcttttgggggcaacctcggacgagcagtcttccaggcgaaaaagagggttcttgaacctctgggcctggttgaggaacctgttaagacggctccgggaaaaaagaggccggtagagcactctcctgtggagccagactcctcctcgggaaccggaaaggcgggccagcagcctgcaagaaaaagattgaattttggtcagactggagacgcagactcagtacctgacccccagcctctcggacagccaccagcagccccctctggtctgggaactaatacgatggctacaggcagtggcgcaccaatggcagacaataacgagggcgccgacggagtgggtaattcctccggaaattggcattgcgattccacatggatgggcgacagagtcatcaccaccagcacccgaacctgggccctgcccacctacaacaaccacctctacaaacaaatttccagccaatcaggagcctcgaacgacaatcactactttggctacagcaccccttgggggtattttgacttcaacagattccactgccacttttcaccacgtgactggcaaagactcatcaacaacaactggggattccgacccaagagactcaacttcaagctctttaacattcaagtcaaagaggtcacgcagaatgacggtacgacgacgattgccaataaccttaccagcacggttcaggtgtttactgactcggagtaccagctcccgtacgtcctcggctcggcgcatcaaggatgcctcccgccgttcccagcagacgtcttcatggtgccacagtatggatacctcaccctgaacaacgggagtcaggcagtaggacgctcttcattttactgcctggagtactttccttctcagatgctgcgtaccggaaacaactttaccttcagctacacttttgaggacgttcctttccacagcagctacgctcacagccagagtctggaccgtctcatgaatcctctcatcgaccagtacctgtattacttgagcagaacaaacactccaagtggaaccaccacgcagtcaaggcttcagttttctcaggccggagcgagtgacattcgggaccagtctaggaactggcttcctggaccctgttaccgccagcagcgagtatcaaagacatctgcggataacaacaacagtgaatactcgtggactggagctaccaagtaccacctcaatggcagagactctctggtgaatccggccatggcaagccacaaggacgatgaagaaaagttttttcctcagagcggggttctcatctttgggaagcaaggctcagagaaaacaaatgtgaacattgaaaaggtcatgattacagacgaagaggaaatcggaacaaccaatcccgtggctacggagcagtatggttctgtatctaccaacctccagagaggcaacagacaagcagctaccgcagatgtcaacacacaaggcgttcttccaggcatggtctggcaggacagagatgtgtaccttcaggggcccatctgggcaaagattccacacacggacggacattttcacccctctcccctcatgggtggattcggacttaaacaccctcctccacagattctcatcaagaacaccccggtacctgcgaatccttcgaccaccttcagtgcggcaaagtttgcttccttcatcacacagtactccacgggacacggtcagcgtggagatcgagtgggagctgcagaaggaaaacagcaaacgctggaatcccgaaattcagtacacttccaactacaacaagtctgttaatcgtggacttaccgtggatactaatggcgtgtattcagagcctcgccccattggcaccagatacctgactcgtaatctgtaattgcttgttaatcaataaaccgtttaattcgtttcagttgaactttggtctctgcgtatttctttcttatctagtttccatggctacgtagataagtagcatggcgggttaatcattaactacaaggaacccctagtgatggagttggccactccctctctgcgcgctcgctcgctcactgaggccgggcgaccaaaggtcgcccgacgcccgggctttgcccgggcggcctcagtgagcgagcgagcgcgcagagagggagtggccaa

SEQ ID NO: 14 - DNA, 4679 bp, Adeno-associated virus 2
ttggccactccctctctgcgcgctcgctcgctcactgaggccgggcgaccaaaggtcgcccgacgcccgggctttgcccgggcggcctcagtgagcgagcgagcgcgcagagagggagtggccaactccatcactaggggttcctggaggggtggagtcgtgacgtgaattacgtcatagggttagggaggtcctgtattagaggtcacgtgagtgttttgcgacattttgcgacaccatgtggtcacgctgggtatttaagcccgagtgagcacgcagggtctccattttgaagcgggaggtttgaacgcgcagccgccatgccggggttttacgagattgtgattaaggtccccagcgaccttgacgggcatctgcccggcatttctgacagctttgtgaactgggtggccgagaaggaatgggagttgccgccagattctgacatggatctgaatctgattgagcaggcacccctgaccgtggccgagaagctgcagcgcgactttctgacggaatggcgccgtgtgagtaaggccccggaggcccttttctttgtgcaatttgagaagggagagagctacttccacatgcacgtgctcgtggaaaccaccggggtgaaatccatggttttgggacgtttcctgagtcagattcgcgaaaaactgattcagagaatttaccgcgggatcgagccgactttgccaaactggttcgcggtcacaaagaccagaaatggcgccggaggcgggaacaaggtggtggatgagtgctacatccccaattacttgctccccaaaacccagcctgagctccagtgggcgtggactaatatggaacagtatttaagcgcctgtttgaatctcacggagcgtaaacggttggtggcgcagcatctgacgcacgtgtcgcagacgcaggagcagaacaaagagaatcagaatcccaattctgatgcgccggtgatcagatcaaaaacttcagccaggtacatggagctggtcgggtggctcgtggacaaggggattacctcggagaagcagtggatccaggaggaccaggcctcatacatctccttcaatgcggcctccaactcgcggtcccaaatcaaggctgccttggacaatgcgggaaagattatgagcctgactaaaaccgcccccgactacctggtgggccagcagcccgtggaggacatttccagcaatcggatttataaaattttggaactaaacgggtacgatccccaatatgcggcttccgtctttctgggatgggccacgaaaaagttcggcaagaggaacaccatctggctgtttgggcctgcaactaccgggaagaccaacatcgcggaggccatagcccacactgtgcccttctacgggtgcgtaaactggaccaatgagaactttcccttcaacgactgtgtcgacaagatggtgatctggtgggaggaggggaagatgaccgccaaggtcgtggagtcggccaaagccattctcggaggaagcaaggtgcgcgtggaccagaaatgcaagtcctcggcccagatagacccgactcccgtgatcgtcacctccaacaccaacatgtgcgccgtgattgacgggaactcaacgaccttcgaacaccagcagccgttgcaagaccggatgttcaaatttgaactcacccgccgtctggatcatgactttgggaaggtcaccaagcaggaagtcaaagactttttccggtgggcaaaggatcacgtggttgaggtggagcatgaattctacgtcaaaaagggtggagccaagaaaagacccgcccccagtgacgcagatataagtgagcccaaacgggtgcgcgagtcagttgcgcagccatcgacgtcagacgcggaagcttcgatcaactacgcagacaggtaccaaaacaaatgttctcgtcacgtgggcatgaatctgatgctgtttccctgcagacaatgcgagagaatgaatcagaattcaaatatctgcttcactcacggacagaaagactgtttagagtgctttcccgtgtcagaatctcaacccgtttctgtcgtcaaaaaggcgtatcagaaactgtgctacattcatcatatcatgggaaaggtgccagacgcttgcactgcctgcgatctggtcaatgtggatttggatgactgcatctttgaacaataaatgatttaaatcaggtatggctgccgatggttatcttccagattggctcgaggacactctctctgaaggaataagacagtggtggaagctcaaacctggcccaccaccaccaaagcccgcagagcggcataaggacgacagcaggggtcttgtgcttcctgggtacaagtacctcggacccttcaacggactcgacaagggagagccggtcaacgaggcagacgccgcggccctcgagcacgacaaagcctacgaccggcagctcgacagcggagacaacccgtacctcaagtacaaccacgccgacgcggagtttcaggagcgccttaaagaagatacgtcttttgggggcaacctcggacgagcagtcttccaggcgaaaaagagggttcttgaacctctgggcctggttgaggaacctgttaagacggctccgggaaaaaagaggccggtagagcactctcctgtggagccagactcctcctcgggaaccggaaaggcgggccagcagcctgcaagaaaaagattgaattttggtcagactggagacgcagactcagtacctgacccccagcctctcggacagccaccagcagccccctctggtctgggaactaatacgatggctacaggcagtggcgcaccaatggcagacaataacgagggcgccgacggagtgggtaattcctccggaaattggcattgcgattccacatggatgggcgacagagtcatcaccaccagcacccgaacctgggccctgcccacctacaacaaccacctctacaaacaaatttccagccaatcaggagcctcgaacgacaatcactactttggctacagcaccccttgggggtattttgacttcaacagattccactgccacttttcaccacgtgactggcaaagactcatcaacaacaactggggattccgacccaagagactcaacttcaagctctttaacattcaagtcaaagaggtcacgcagaatgacggtacgacgacgattgccaataaccttaccagcacggttcaggtgtttactgactcggagtaccagctcccgtacgtcctcggctcggcgcatcaaggatgcctcccgccgttcccagcagacgtcttcatggtgccacagtatggatacctcaccctgaacaacgggagtcaggcagtaggacgctcttcattttactgcctggagtactttccttctcagatgctgcgtaccggaaacaactttaccttcagctacacttttgaggacgttcctttccacagcagctacgctcacagccagagtctggaccgtctcatgaatcctctcatcgaccagtacctgtattacttgagcagaacaaacactccaagtggaaccaccacgcagtcaaggcttcagttttctcaggccggagcgagtgacattcgggaccagtctaggaactggcttcctggaccctgttaccgccagcagcgagtatcaaagacatctgcggataacaacaacagtgaatactcgtggactggagctaccaagtaccacctcaatggcagagactctctggtgaatccgggcccggccatggcaagccacaaggacgatgaagaaaagttttttcctcagagcggggttctcatctttgggaagcaaggctcagagaaaacaaatgtggacattgaaaaggtcatgattacagacgaagaggaaatcaggacaaccaatcccgtggctacggagcagtatggttctgtatctaccaacctccagagaggcaacagacaagcagctaccgcagatgtcaacacacaaggcgttcttccaggcatggtctggcaggacagagatgtgtaccttcaggggcccatctgggcaaagattccacacacggacggacattttcacccctctcccctcatgggtggattcggacttaaacaccctcctccacagattctcatcaagaacaccccggtacctgcgaatccttcgaccaccttcagtgcggcaaagtttgcttccttcatcacacagtactccacgggacaggtcagcgtggagatcgagtgggagctgcagaaggaaaacagcaaacgctggaatcccgaaattcagtacacttccaactacaacaagtctgttaatgtggactttactgtggacactaatggcgtgtattcagagcctcgccccattggcaccagatacctgactcgtaatctgtaattgcttgttaatcaataaaccgtttaattcgtttcagttgaactttggtctctgcgtatttctttcttatctagtttccatggctacgtagataagtagcatggcgggttaatcattaactacaaggaacccctagtgatggagttggccactccctctctgcgcgctcgctcgctcactgaggccgggcgaccaaaggtcgcccgacgcccgggctttgcccgggcggcctcagtgagcgagcgagcgcgcagagagggagtggccaa

SEQ ID NO: 15 - protein, 725 aa, Adeno-associated virus 5
MAADGYLPDWLEDTLSEGIRQWWKLKPGPPPPKPAERHKDDSRGLVLPGYKYLGPFNGLDKGEPVNEADAAALEHDKAYDRQLDSGDNPYLKYNHADAEFQERLKEDTSFGGNLGRAVFQAKKRVLEPFGLVEEGAKTAPTGKRIDDHFPKRKKARTEEDSKPSTSSDAEAGPSGSQQLQIPAQPASSLGADTMSAGGGGPLGDNNQGADGVGNASGDWHCDSTWMGDRVVTKSTRTWVLPSYNNHQYREIKSGSVDGSNANAYFGYSTPWGYFDFNRFHSHWSPRDWQRLINNYWGFRPRSLRVKIFNIQVKEVTVQDSTTTIANNLTSTVQVFTDDDYQLPYVVGNGTEGCLPAFPPQVFTLPQYGYATLNRDNTENPTERSSFFCLEYFPSKMLRTGNNFEFTYNFEEVPFHSSFAPSQNLFKLANPLVDQYLYRFVSTNNTGGVQFNKNLAGRYANTYKNWFPGPMGRTQGWNLGSGVNRASVSAFATTNRMELEGASYQVPPQPNGMTNNLQGSNTYALENTMIFNSQPANPGTTATYLEGNMLITSESETQPVNRVAYNVGGQMATNNQSSTTAPTTGTYNLQEIVPGSVWMERDVYLQGPIWAKIPETGAHFHPSPAMGGFGLKHPPPMMLIKNTPVPGNITSFSDVPVSSFITQYSTGQVTVEMEWELKKENSKRWNPEIQYTNNYNDPQFVDFAPDSTGEYRTTRPIGTRYLTRPL

SEQ ID NO: 16 - protein, 644 aa, Artificial Sequence
  source: /note="Description of Artificial Sequence: Synthetic polypeptide"
  MOD_RES (434)..(434): Any amino acid
KAYDQQLKAGDNPYLRYNHADAEFQERLQEDTSFGGNLGRAVFQAKKRVLEPLGLVETPAKTAPGKKRPVDSPDSTSGIGKKGQQPAKKRLNFGQTGDSESVPDPQPIGEPPAGPSGLGSGTMAAGGGAPMADNNEGADGVGNASGNWHCDSTWLGDRVITTSTRTWALPTYNNHLYKQISSQSAGSTNDNVYFGYSTPWGYFDFNRFHCHFSPRDWQRLINNNWGFRPKKLNFKLFNIQVKEVTTNDGVTTIANNLTSTVQVFSDSEYQLPYVLGSAHQGCLPPFPADVFMIPQYGYLTLNNGSQSVGRSSFYCLEYFPSQMLRTGNNFTFSYTFEDVPFHSSYAHSQSLDRLMNPLIDQYLYYLARTQSNAGGTAGNRELQFYQGGPTTMAEQAKNWLPGPCFRQQRVSKTLDQNNNSNFAWTGATKYHLNXRNSLVNPGVAMATHKDDEERFFPSSGVLIFGKTGAANKTTLENVLMTNEEEIRPTNPVATEEYGIVSSNLQAASTAAQTQVVNNQGALPGMVWQNRDVYLQGPIWAKIPHTDGNFHPSPLMGGFGLKHPPPQILIKNTPVPANPPEVFTPAKFASFITQYSTGQVSVEIEWELQKENSKRWNPEIQYTSNFDKQTGVDFAVDSQGVYSEP

SEQ ID NO: 17 - DNA, 1933 bp, Adeno-associated virus
caaggcctacgaccagcagctcaaagcgggtgacaatccgtacctgcggtataaccacgccgacgccgagtttcaggagtgtcttcaagaagatacgtcttttgggggcaacctcgggcgagcagtcttccaggccaaaaagcgggttctcgaacctcttggtctggttgagacgccagctaagacggcacctggaaagaagcgaccggtagactcgccagactccacctcgggcatcggcaagaaaggccagcagcccgcgaaaaagagactcaactttgggcagactggcgactcagagtcagtccccgaccctcaaccaatcggagaaccaccagcaggcccctctggtctgggatctggtacaatggttgcaggcggtggcgcaccaatggctgacaataacgagggcgccgacggagtgggtaatgcctcaggaaattggcattgcgattccacatggctgggcgacagagtcatcaccaccagcacccgaacctgggccctgcccacctacaacaaccacctctacaagcaaatctccagtcagtcagcagggagcaccaacgataacgtctatttcggctacagcaccccctgggggtattttgacttcaacagattccattgccacttctcaccacgtgactggcagcgacttatcaacaacaactggggattccggcccaagaagctcaacttcaagctcttcaacatccaggtcaaggaggtcacgacgaatgacggtgtcacaaccatcgctaataaccttaccagcacggttcaggtcttttcggactcggaatatcaactgccgtacgtcctcggctccgcgcaccagggctgcctgcctccgttcccggcagacgtgttcatgattccgcagtacggatacctgactctgaacaatggcagccaatcggtaggccgttcctccttctactgcctggagtactttccttctcagatgctgagaacgggcaacaacttcacctttagctacaccttcgaggacgtgcctttccacagcagctacgcgcacagccagagtctggaccggctgatgaatcccctcatcgaccagtacctgtactacttggccagaacacagagcaacgcaggaggtactgctggcaatcgggaactgcagttttatcagggcggacctaccaccatggccgaacaagcaaagaactggctgcccggaccttgcttccggcaacagagagtatccaagacgctggatcaaaataacaacagcaactttgcctggactggtgccacaaaataccatttaaatggaagaaattcattggttaatcccggtgtcgccatggcaacccacaaggacgacgaggaacgcttctccccttcgagcggagttctaatttttggcaaaactggagcagctaataaaactacattagaaaacgtgctcatgacaaatgaagaagaaattcgtcctaccaacccggtagctaccgaggaatacgggattgtaagcagcaacttgcaggcggctagcaccgcagcccagacacaagttgttaacaaccagggagccttacctggcatggtctggcagaaccgggacgtgtacctgcaaggtcccatttgggccaagattcctcacacggacggcaactttcacccgtctcctctaatgggtggctttggactgaaacacccgcctccccagatcctgatcaaaaacacgccggtacctgctaatcctccagaagtgtttactcctgccaagtttgcttccttcatcacgcagtacagcaccgggcaagtcagcgttgagatcgagtgggagctgcagaaagagaacagcaagcgctggaacccagagattcagtacacctccaactttgacaaacagactggagtggactttgctgttgacagccagggtgtttactctgagcct

SEQ ID NO: 18 - protein, 644 aa, Artificial Sequence
  source: /note="Description of Artificial Sequence: Synthetic polypeptide"
KAYDQQLKAGDNPYLRYNHADAEFQECLQEDTSFGGNLGRAVFQAKKRVLEPLGLVETPAKTAPGKKRPVDSPDSTSGIGKKGQQPAKKRLNFGQTGDSESVPDPQPIGEPPAGPSGLGSGTMVAGGGAPMADNNEGADGVGNASGNWHCDSTWLGDRVITTSTRTWALPTYNNHLYKQISSQSAGSTNDNVYFGYSTPWGYFDFNRFHCHFSPRDWQRLINNNWGFRPKKLNFKLFNIQVKEVTTNDGVTTIANNLTSTVQVFSDSEYQLPYVLGSAHQGCLPPFPADVFMIPQYGYLTLNNGSQSVGRSSFYCLEYFPSQMLRTGNNFTFSYTFEDVPFHSSYAHSQSLDRLMNPLIDQYLYYLARTQSNAGGTAGNRELQFYQGGPTTMAEQAKNWLPGPCFRQQRVSKTLDQNNNSNFAWTGATKYHLNGRNSLVNPGVAMATHKDDEERFSPSSGVLIFGKTGAANKTTLENVLMTNEEEIRPTNPVATEEYGIVSSNLQAASTAAQTQVVNNQGALPGMVWQNRDVYLQGPIWAKIPHTDGNFHPSPLMGGFGLKHPPPQILIKNTPVPANPPEVFTPAKFASFITQYSTGQVSVEIEWELQKENSKRWNPEIQYTSNFDKQTGVDFAVDSQGVYSEP

SEQ ID NO: 19 - DNA, 1933 bp, Adeno-associated virus
caaggcctacgaccagcagctcaaagcgggtgacaatccgtacctgcggtataaccacgccgacgccgagtttcaggagcgtcttcaagaagatacgtcttttgggggcaacctcgggcgagcagtcttccaggccaaaaagcgggttctcgaacctcttggtctggttgagacgccagctaagacggcacctggaaagaagcgaccggtagactcgccagactccacctcgggcatcggcaagaaaggccagcagcccgcgaaaaagagactcaactttgggcagactggcgactcagagccagtccccgaccctcaaccaatcggagaaccaccagcaggcccctctggtctgggatctggtacaatggctgcaggcggtggcgcaccaatggctgacaataacgagggcgccgacggagtgggtaatgcctcaggaaattggcattgcgattccacacggctgggcgacagagtcatcaccaccagcacccgaacctgggccctgcccacctacaacaaccacctctacaagcaaatctccagtcagtcagcagggagcaccaacgataacgtctatttcggctacagcaccccctgggggtattttgacttcaacagattccattgccacttctcaccacgtgactggcagcgacttatcaacaacaactggggattccggcccaagaagctcaacttcaagctcttcaacatccaggtcaaggaggtcacgacgaatgacggcgtcacaaccatcgctaataaccttaccagcacggttcaggtcttttcggactcggaatatcaactgccgtacgtcctcggctccgcgcaccagggctgcctgcctccgttcccggcagacgtgttcatgattccgcagtacggatacctgactctgaacaatggcagccaatcggtaggccgttcctccttctactgcctggagtactttccttctcagatgctgagaacgggcaacaacttcacctttagctacaccttcgaggacgtgcctttccacagcagctacgcgcacagccagagtctgggccggctgatgaatcccctcatcgaccagtacctgtactacttggccagaacacagagcaacgcaggaggtactgctggcaatcgggaactgcagttttatcagggcggacctaccaccatggccgaacaagcaaagaactggctgcccggaccttgcttccggcaacagagagtatccaagacgctggatcaaaataacaacagcaactttgcctggactggtgccacaaaataccatttaaatggaagaaattcattggttaatcccggtgtcgccatggcaacccacaaggacgacgaggaacgcttcttcccttcgagcggagttctaatttttggcaaaactggagcagctaataaaactacattagaaaacgtgctcatgacaaatgaagaagaaattcgtcctaccaacccggtagctaccgaggaatacgggattgtaagcagcaacttgcaggcggctagcaccgcagcccagacacaagttgttaacaaccagggagccttacctggcatggtctggcagaaccgggacgtgtacctgcaaggtcccatttgggccaagattcctcacacggacggcaactttcacccgtctcctctaatgggtggctttggactgaaacacccgcctccccagatcctgatcaaaaacacaccggtacctgctaatcctccagaagtgtttactcctgccaagtttgcttccttcatcacgcagtacagcaccgggcaagtcagcgttgagatcgaatgggagctgcagaaagagaacagcaagcgctggaacccagagattcagtacacctccaactttgacaaacagactggagtggactttgctgttgacagccagggtgtttactctgagcct

SEQ ID NO: 20 - protein, 644 aa, Artificial Sequence
  source: /note="Description of Artificial Sequence: Synthetic polypeptide"
KAYDQQLKAGDNPYLRYNHADAEFQERLQEDTSFGGNLGRAVFQAKKRVLEPLGLVETPAKTAPGKKRPVDSPDSTSGIGKKGQQPAKKRLNFGQTGDSEPVPDPQPIGEPPAGPSGLGSGTMAAGGGAPMADNNEGADGVGNASGNWHCDSTRLGDRVITTSTRTWALPTYNNHLYKQISSQSAGSTNDNVYFGYSTPWGYFDFNRFHCHFSPRDWQRLINNNWGFRPKKLNFKLFNIQVKEVTTNDGVTTIANNLTSTVQVFSDSEYQLPYVLGSAHQGCLPPFPADVFMIPQYGYLTLNNGSQSVGRSSFYCLEYFPSQMLRTGNNFTFSYTFEDVPFHSSYAHSQSLGRLMNPLIDQYLYYLARTQSNAGGTAGNRELQFYQGGPTTMAEQAKNWLPGPCFRQQRVSKTLDQNNNSNFAWTGATKYHLNGRNSLVNPGVAMATHKDDEERFFPSSGVLIFGKTGAANKTTLENVLMTNEEEIRPTNPVATEEYGIVSSNLQAASTAAQTQVVNNQGALPGMVWQNRDVYLQGPIWAKIPHTDGNFHPSPLMGGFGLKHPPPQILIKNTPVPANPPEVFTPAKFASFITQYSTGQVSVEIEWELQKENSKRWNPEIQYTSNFDKQTGVDFAVDSQGVYSEP

SEQ ID NO: 21 - DNA, 1933 bp, Adeno-associated virus; identical to SEQ ID NO: 19

SEQ ID NO: 22 - protein, 644 aa, Artificial Sequence; identical to SEQ ID NO: 20
  source: /note="Description of Artificial Sequence: Synthetic polypeptide"

SEQ ID NO: 23 - DNA, 1933 bp, Adeno-associated virus
caaggcctacgaccagcagctcaaagcgggtgacaatccgtacctgcggtataaccacgccgacgccgagtttcaggagcgtcttcaagaagatacgtcttttgggggcaacctcgggcgagcagtcttccaggccaaaaagcgggttctcgaacctcttggtctggttgagacgccagctaagacggcacctggaaagaagcgaccggtagactcgccagactccacctcgggcatcggcaagaaaggccagcagcccgcgaaaaagagactcaactttgggcagactggcgactcagagtcagtccccgaccctcaaccaatcggagaaccaccagcaggcccctctggtctgggatctggtacaatggctgcaggcggtggcgcaccaatggctgacaatagcgagggcgccgacggagtgggtaatgcctcaggaaattggcattgcgattccacatggctgggcgacagagtcatcaccaccagcacccgaacctgggccctgcccacctacaacaaccacctctacaagcaaatctccagtcagtcagcagggagcaccaacgataacgtctatttcggctacagcaccccctgggggtattttgacttcaacagattccattgccacttctcaccacgtgactggcagcgacttatcaacaacaactggggattccggcccaagaagctcaacttcaagctcttcaacatccaggtcaaggaggtcacgacgaatgacggtgtcacaaccatcgctaataaccttaccagcacggttcaggtcttttcggactcggaatatcaactgccgtacgtcctcggctccgcgcaccagggctgcctgcctccgttcccggcagacgtgttcatgattccgcagtacggatacctgactctgaacaatggcagccaatcggtaggccgttcctccttctactgcctggagtactttccttctcagatgctgagaacgggcaacaacttcacctttagctacaccttcgaggacgtgcctttccacagcagctacgcgcacagccagagtctggaccggctgatgaatcccctcatcgaccagtacctgtactacttggccagaacacagagcaacgcaggaggtactgctggcaatcgggaactgcagttttatcagggcggacctaccaccatggccgaacaagcaaagaactggctgcccggaccttgcttccggcaacagagagtatccaagacgctggatcaaaataacaacagcaactttgcctggactggtgccacaaaataccatttaaatggaagaaattcattggttaatcccggtgtcgccatggcaacccacaaggacgacgaggaacgcttcttcccttcgagcggagttctaatttttggcaaaactggagcagctaataaaactacattagaaaacgtgctcatgacaaatgaagaagaaattcgtcctaccaacccggtagctaccgaggaatacgggattgtaagcagcaacttgcaggcggctagcaccgcagcccagacacaagttgttaacaaccagggagccttacctggcatggtctggcagaaccgggacgtgtacctgcaaggtcccatttgggccaagattcctcacacggacggcaactttcacccgtctcctctaatgggtggctttggactgaaacacccgcctccccagatcctgatcaaaaacacaccggtacctgctaatcctccagaagtgtttactcctgccaagcttgcttccttcatcacgcagtacagcaccgggcaagtcagcgttgagatcgagtgggagctgcagaaagagaacagcaagcgctggaacccagagattcagtacacctccaactttgacaaacagactggagtggactttgctgttgacagccagggtgtttactctgagcct

SEQ ID NO: 24 - protein, 644 aa, Artificial Sequence
  source: /note="Description of Artificial Sequence: Synthetic polypeptide"
KAYDQQLKAGDNPYLRYNHADAEFQERLQEDTSFGGNLGRAVFQAKKRVLEPLGLVETPAKTAPGKKRPVDSPDSTSGIGKKGQQPAKKRLNFGQTGDSESVPDPQPIGEPPAGPSGLGSGTMAAGGGAPMADNSEGADGVGNASGNWHCDSTWLGDRVITTSTRTWALPTYNNHLYKQISSQSAGSTNDNVYFGYSTPWGYFDFNRFHCHFSPRDWQRLINNNWGFRPKKLNFKLFNIQVKEVTTNDGVTTIANNLTSTVQVFSDSEYQLPYVLGSAHQGCLPPFPADVFMIPQYGYLTLNNGSQSVGRSSFYCLEYFPSQMLRTGNNFTFSYTFEDVPFHSSYAHSQSLDRLMNPLIDQYLYYLARTQSNAGGTAGNRELQFYQGGPTTMAEQAKNWLPGPCFRQQRVSKTLDQNNNSNFAWTGATKYHLNGRNSLVNPGVAMATHKDDEERFFPSSGVLIFGKTGAANKTTLENVLMTNEEEIRPTNPVATEEYGIVSSNLQAASTAAQTQVVNNQGALPGMVWQNRDVYLQGPIWAKIPHTDGNFHPSPLMGGFGLKHPPPQILIKNTPVPANPPEVFTPAKLASFITQYSTGQVSVEIEWELQKENSKRWNPEIQYTSNFDKQTGVDFAVDSQGVYSEP

SEQ ID NO: 25 - DNA, 1933 bp, Adeno-associated virus
caaggcctacgaccagcagctcaaagcgggtgacaatccgtacctgcggtataaccacgccgacgccgagtttcaggagcgtcttcaagaagatacgtcttttgggggcaacctcgggcgagcagtcttccaggccaaaaagcgggttctcgaacctcttggtctggttgagacgccagctaagacggcacctggaaagaagcgaccggtagactcgccagactccacctcgggcatcggcaagaaaggccagcagcccgcgaaaaagagactcaactttgggcagactggcgactcagagtcagtccccgaccctcaaccaatcggagaaccaccagcaggcccctctggtctgggatctggtacaatggctgcaggcggtggcgcaccaatggctgacaataacgagggcgccgacggagtgggtaatgcctcaggaaattggcattgcgattccacatggctgggcgacagagtcatcaccaccagcacccgaacctgggccctgcccacctacaacaaccacctctacaagcaaatctccagtcagtcagcagggagcaccaacgataacgtctatttcggctacagcaccccctgggggtattttgacttcaacagattccattgccacttctcaccacgtgactggcagcgacttatcaacaacaactggggattccggcccaagaagctcaacttcaagctcttcaacatccaggtcaaggaggtcacgacgaatgacggcgtcacaaccatcgctaataaccttaccagcacggttcaggtcttttcggacccggaatatcaactgccgtacgtcctcggctccgcgcaccagggctgcctgcctccgttcccggcagacgtgttcatgattccgcagtacggatacctgactctgaacaatggcagccaatcggtaggccgttcctccttctactgcctggagtactttccttctcagatgctgagaacgggcaacaacttcacctttagctacaccttcgaggacgtgcctttccacagcagctacgcgcacagccagagtctggaccggctgatgaatcccctcatcgaccagtacctgtactacttggccagaacacagagcaacgcaggaggtactgctggcaatcgggaactgcagttttatcagggcggacctaccaccatggccgaacaagcaaagaactggctgcccggaccttgcttccggcaacagagagtatccaagacgctggatcaaaataacaacagcaactttgcctggactggtgccacaaaataccatttaaatggaagaaattcattggttaatcccggtgtcgccatggcaacccacaaggacgacgaggaacgcttcttcccttcgagcggagttctaatttttggcaaaactggagcagctaataaaactacattagaaaacgtgctcatgacaaatgaagaagaaattcgtcctaccaacccggtagctaccgaggaatacgggattgtaagcagcaacttgcaggcggctagcaccgcagcccagacacaagttgttaacaaccagggagccttacctggcatggtctggcagaaccgggacgtgtacctgcaaggtcccatttgggccaagattcctcacacggacggcaactttcacccgtctcctctaatgggtggctttggactgaaacacccgcctccccagatcctgatcaaaaacacaccggtacctgctaatcctccagaagtgtttactcctgccaagattgcttccttcatcacgcagtacagcaccgggcaagtcagcgttgagatcgagtgggagctgcagaaagagaacagcaagcgctggaacccagagattcagtacacctccaactttgacaaacagactggagtggactttgctgttgacagccagggtgtttactctgagcct

SEQ ID NO: 26 - protein, 644 aa, Artificial Sequence
  source: /note="Description of Artificial Sequence: Synthetic polypeptide"
KAYDQQLKAGDNPYLRYNHADAEFQERLQEDTSFGGNLGRAVFQAKKRVLEPLGLVETPAKTAPGKKRPVDSPDSTSGIGKKGQQPAKKRLNFGQTGDSESVPDPQPIGEPPAGPSGLGSGTMAAGGGAPMADNNEGADGVGNASGNWHCDSTWLGDRVITTSTRTWALPTYNNHLYKQISSQSAGSTNDNVYFGYSTPWGYFDFNRFHCHFSPRDWQRLINNNWGFRPKKLNFKLFNIQVKEVTTNDGVTTIANNLTSTVQVFSDPEYQLPYVLGSAHQGCLPPFPADVFMIPQYGYLTLNNGSQSVGRSSFYCLEYFPSQMLRTGNNFTFSYTFEDVPFHSSYAHSQSLDRLMNPLIDQYLYYLARTQSNAGGTAGNRELQFYQGGPTTMAEQAKNWLPGPCFRQQRVSKTLDQNNNSNFAWTGATKYHLNGRNSLVNPGVAMATHKDDEERFFPSSGVLIFGKTGAANKTTLENVLMTNEEEIRPTNPVATEEYGIVSSNLQAASTAAQTQVVNNQGALPGMVWQNRDVYLQGPIWAKIPHTDGNFHPSPLMGGFGLKHPPPQILIKNTPVPANPPEVFTPAKIASFITQYSTGQVSVEIEWELQKENSKRWNPEIQYTSNFDKQTGVDFAVDSQGVYSEP

SEQ ID NO: 27 - protein, 738 aa, Artificial Sequence
  source: /note="Description of Artificial Sequence: Synthetic polypeptide"
MAADGYLPDWLEDNLSEGIREWWALKPGAPKPKANQQKQDDGRGLVLPGYKYLGPFNGLDKGEPVNAADAAALEHDKAYDQQLKAGDNPYLRYNHADAEFQERLQEDTSFGGNLGRAVFQAKKRVLEPLGLVEEGAKTAPGKKRPVEPSPQRSPDSTTGIGKKGQQPAKKRLNFGQTGDSESVPDPQPIGEPPAGPSGLGSGTMAAGGGAPMADNNEGADGVGSSSGNWHCDSTWLGDRVITTSTRTWALPTYNNHLYKQISNGTSGGSTNDNTYFGYSTPWGYFDFNRFHCHFSPRDWQRLINNNWGFRPKRLNFKLFNIQVKEVTQNEGTKTIANNLTSTIQVFTDSEYQLPYVLGSARQGCLPPFPADVFMIPQYGYLTLNNGSQAVGRSSFYCLEYFPSQMLRTGNNFEFSYQFEDVPFHSSYAHSQSLDRLMNPLIDQYLYYLSRTQSTGGTAGTQQLLFSQAGPNNMSAQAKNWLPGPCYRQQRVSTTLSQNNNSNFAWTGATKYHLNGRDSLVNPGVAMATHKDDEERFFPSSGVLMFGKQGAGKGNVDYSSVMLTSEEEIKTTNPVATEQYGVVADNLQQQNAAPIVGAVNSQGALPGMVWQNRDVYLQGPIWAKIPHTDGNFHPSPLMGGFGLKHPPPQILIKNTPVPADPPTTFSQAKLASFITQYSTGQVSVEIEWELQKENSKRWNPEIQYTSNYYKSTNVDFAVNTDGTYSEPRPIGTRYLTRNL

SEQ ID NO: 28 - DNA, 3121 bp, Adeno-associated virus
gaattcgcccttctacggctgcgtcaactggaccaatgagaactttcccttcaacgactgtgtcgacaagatggtgatctggtgggaggaggggaagatgaccgccaaggtcgtggagtcggccaaagccattctcggaggaagcaaggtgcgcgtggaccagaaatgcaagtcctcggcccagatagacccgactcccgtgatcgtcacctccaacaccaacatgtgcgccgtgattgacgggaactcaacgaccttcgaacaccagcagccgttgcaagaccggatgttcaaatttgaactcacccgccgtctggatcatgactttgggaaggtcaccaagcaggaagtcaaagactttttccggtgggcaaaggatcacgtggttgaggtggagcacgaattctacgtcaaaaagggtggagccaagaaaagacccgcccccagtgacgcagatataagtgagcccaaacgggtgcgcgagtcagttgcgcagccatcgacgtcagacgcggaagcttcgatcaactacgcagacaggtaccaaaacaaatgttctcgtcacgcgggcatgaatctgatgctgtttccctgcagacaatgcgagagaatgaatcagaattcaaatatctgcttcactcacggacagaaagactgtttagagtgctttcccgtgtcagaatctcaacccgtttctgtcgtcaaaaaggcgtatcagaaactgtgctacattcatcatatcatgggaaaggtgccagacgcttgcactgcctgcgatctggtcgatgtggatttggatgactgcatctttgaacaataaatgatttaaatcaggtatggctgccgatggttatcttccagattggctcgaggacaacctctctgagggcattcgcgagtggtgggcgctgaaacctggagccccgaagcccaaagccaaccagcaaaagcaggacggcggccggggtctggtgcttcctggctacaagtacctcggacccttcaacggactcgacaagggggagcccgtcaacgcggcggacgcagcggccctcgagcacgacaaggcctacgaccagcagctcaaagcgggtgacaatccgtacctgcggtataaccacgccgacgccgagtttcaggagcgtctgcaagaagatacgtcttttgggggcaacctcgggcgagcagtcttccaggccaagaagcgggttctcgaacctctcggtctggttgaggaaggcgctaagacggctcctggaaagaagagaccggtagagccatcaccccagcgttctccagactcctctacgggcatcggcaagaaaggccagcagcccgcgaaaaagagactcaactttgggcagactggcgactcagagtcagtgcccgaccctcaaccaatcggagaaccccccgcaggcccctctggtctgggatctggtacaatggctgcaggcggtggcgctccaatggcagacaataacgaaggcgccgacggagtgggtagttcctcaggaaattggcattgcgattccacatggctgggcgactgagtcatcaccaccagcacccgaacctgggccctccccacctacaacaaccacctctacaagcaaatctccaacgggacttcgggaggaagcaccaacgacaacacctacttcggctacagcaccccctgggggtattttgactttaacagattccactgccacttctcaccacgtgactggcagcgactcatcaacaacaactggggattccggcccaagagactcaacttcaagctcttcaacatccaggtcaaggaggtcacgcagaatgaaggcaccaagaccatcgccaataaccttaccagcacgattcaggtctttacggactcggaataccagctcccgtacgtcctcggctctgcgcaccagggctgcctgcctccgttcccggcggacgtcttcatgattcctcagtacgggtacctgactctgaacaatggcagtcaggccgtgggccgttcctccttctactgcctggagtactttccttctcaaatgctgagaacgggcaacaactttgagttcagctaccagtttgaggacgtgccttttcacagcagctacgcgcacagccaaagcctggaccggctgatgaaccccctcatcgaccagtacctgtactacctgtctcggactcagtccacgggaggtaccgcaggaactcagcagttgctattttctcaggccgggcctaataacatgtcggctcaggccaaaaactggctacccgggccctgctaccggcagtaacgcgtctccacgacactgtcgcaaaataacaacagcaactttgtctggaccggtgccaccaagtatcatctgaatggcagagactctctggtagatcccggtgtcgctatggcaacccacaaggacgacgaagagcgattttttccgtccagcggagtcataatgtttgggaaacagggagctggaaaagacaacgtggactatagcagcgtcatgctaaccagtgaggaagaaattaaaaccaccaacccagtggccacagaacagtacggcgtggtggccgataacctgcaacagcaaaacgccgctcctattgtaggggccgtcaacagtcaaggagccttacctggcatggtctggcagaaccgggacgtgtacctgcagggtcctacctgggccaagattcctcacacggacggaaactttcatccctcgccgctgatgggaggctttggactgaaacacccgcctcctcagatcctgattaagaatacacctgttcccgcggatcctccaactaccttcagtcaagctaagctggcgtcgttcatcacgcagtacagcaccggacaggtcagcgtggaaattgaatgggagctgcaggaagaaaacagcaaacgctggaacccagagattcaatacacttccaactactacaaatctacaaatgtggactttgctgttaacacagatggcacttattctgagcctcgccccatcggcacccgttacctcacccgtaatctgtaattgcttgttaatcaataaaccggttgattcgtttcagttgaactttggtctctgcgaagggcgaattc

SEQ ID NO: 29 - protein, 738 aa, Artificial Sequence
  source: /note="Description of Artificial Sequence: Synthetic polypeptide"
MAADGYLPDWLEDNLSEGIREWWALKPGAPKPKANQQKQDDGRGLVLPGYKYLGPFNGLDKGEPVNAADAAALEHDKAYDQQLKAGDNPYLRYNHADAEFQERLQEDTSFGGNLGRAVFQAKKRVLEPLGLVEEGAKTAPGKKRPVEPSPQRSPDSSTGIGKKGQQPAKKRLNFGQTGDSESVPDPQPIGEPPAGPSGLGSGTMAAGGGAPMADNNEGADGVGSSSGNWHCDSTWLGDGVITTSTRTWALPTYNNHLYKQISNGTSGGSTNDNTYFGYSTPWGYFDFNRFHCHFSPRDWQRLINNNWGFRPKSLNFKLFNIQVKEVTQNEGTKTIANNLTSTIQVFTDSEYQLPYVLGSAHQGCLPPFPADVFMIPQYGYLTLNNGSQAVGRSSFYCLEYFPSQMLRTGNNFEFSYQFEDVPFHSSYAHSQSLDRLMNPLIDQYLYYLSRTQSTGGTAGTQQLLFSQAGPNNMSAQAKNWLPGPCYRQQRVSTTLSQNDNSNFAWTGATKYHLNGRDSLVNPGVAMATHKDDEERFFPSSGVLMFGKQGAGKDNVDYSSVMLTSEEEIKTTNPVATEQYGVVADNLQQQNAAPIVGAVNSQGALPGMVWQNRDVYLQGPIWAKIPHTDGNFHPSPLMGGFGLKHPPPQILIKNTPVPADPPTTFSQAKLASFITQYSTGQVSVEIEWELQKENSKRWNPEIQYTSNYYKSTNVDFAVNTDGTYSEPRPIGTRYLTRNL

SEQ ID NO: 30 - DNA, 3121 bp, Adeno-associated virus
gaattcgcccttcgcgagaccaaagttcaactgaaacgaatcaaccggtttattgattaacaagcaattacagattacgggtgaggtaacgggtgccgatggggcgaggctcagaataagtgccatctgtgttaacagcaaagtccacatttgtagatttgtagtagttggaagtgtattgaatctctgggttccagcgtttgctgttttctttctgcagctcccattcaatttccacgctgacctgtccggtgctgtactgcgtgatgaacgacgccagcttagcttgactgaaggtagttggaggatccgcgggaacaggtgtattcttaatcaggatctgaggaggcgggtgtttcagtccaaagcctcccatcagcggcgagggatgaaagtttccgtccgtgtgaggaatcttggcccagataggaccctgcaggtacacgtcccggttctgccagaccatgccaggtaaggctccttgactgttgacggcccctacaataggagcggcgttttgctgttgcaggttatcggccaccacgccgtactgttctgtggccactgggttggtggttttaatttcttcctcactggttagcataacgctgctatagtccacgttgtcttttccagctccctgtttcccaaacattaagactccgctggacggaaaaaatcgctcttcgtcgtccttgtgggttgccatagcgacaccgggatttaccagagagtctctgccattcagatgatacttggtggcaccggtccaggcaaagttgctgttgtcattttgcgacagtgtcgtggagacgcgttgctgccggtagcagggcccgggtagccagtttttggcctgagccgacatgttattaggcccggcctgagaaaatagcaactgctgagttcctgcggtacctcccgtggactgagtccgagacaggtagtacaggtactggtcgatgagggggttcatcagccggtccaggctttggctgtgcgcgtagctgctgtgaaaaggcacgtcctcaaactggtagctgaactcaaagttgttgcccgttctcagcatttgagaaggaaagtactccaggcagtagaaggaggaacggcccacggcctgactgccattgttcagagtcaggtacccgtactgaggaatcatgaagacgtccgccgggaacggaggcaggcagccctggtgcgcagagccgaggacgtacgggagctggtattccgagtccgtaaagacctgaatcgtgctggtaaggttattggcgatggtcttggtgccttcattctgcgtgacctccttgacctggatgttgaagagcttgaagttgaggctcttgggccggaatccccagttgttgttgatgagtcgctgccagtcacgtggtgagaagtggcagtggaatctgttaaagtcaaaatacccccagggggtgctgtagccgaagtaggtgttgtcgttggtgcttcctcccgaagtcccgttggagatttgcttgtagaggtggttgttgtaggtggggagggcccaggttcgggtgctggtggtgatgactccgtcgcccagccatgtggaatcgcaatgccaatttcctgaggaactacccactccgtcggcgccttcgttattgtctgccattggagcgccaccgcctgcagccattgtaccagatcccagaccagaggggcctgcggggggttctccgattggttgagggtcgggcactgactctgagtcgccagtctgcccaaagttgagtctctttttcgcgggctgctggcctttcttgccgatgcccgtagaggagtctggagaacgctggggtgatggctctaccggtctcttctttccaggagccgtcttagcgccttcctcaaccagaccgagaggttcgagaacccgcttcttggcctggaagactgctcgcccgaggttgcccccaaaagacgtatcttcttgcagacgctcctgaaactcggcgtcggcgtggttataccgcaggtacggattgtcacccgctttgagctgctggtcgtaggccttgtcgtgctcgagggccgctgcgtccgccgcgttgacgggctcccccttgtcgagtccgttgaagggtccgaggtacttgtagccaggaagcaccagaccccggccgtcgtcctgcttttgctggttggctttgggcttcggggctccaggtttcagcgcccaccactcgcgaatgccctcagagaggttgtcctcgagccaatctggaagataaccatcggcagccatacctgatttaaatcatttattgttcaaagatgcagtcatccaaatccacattgaccagatcgcaggcagtgcaagcgtctggcacctttcccatgatatgatgaatgtagcacagtttctgatacgcctttttgacgacagaaacgggttgagattctgacacgggaaagcactctaaacagtctttctgtccgtgagtgaagcagatatttgaattctgattcattctctcgcattgtctgcagggaaacagcatcagattcatgcccacgtgacgagaacatttgttttggtacctgtctgcgtagttgatcgaagcttccgcgtctgacgtcgatggctgcgcaactgactcgcgcacccgtttgggctcacttatatctgcgtcactgggggcgggtcttttcttggctccaccctttttgacgtagaattcatgctccacctcaaccacgtgatcctttgcccaccggaaaaagtctttgacttcctgcttggtgaccttcccaaagtcatgatccagacggcgggtgagttcaaatttgaacatccggtcttgcaacggctgctggtgttcgaaggtcgttgagttcccgtcaatcacggcgcacatgttggtgttggaggtgacgatcacgggagtcgggtctatctgggccgaggacttgcatttctggtccacgcgcaccttgcttcctccgagaatggctttggccgactccacgaccttggcggtcatcttcccctcctcccaccagatcaccatcttgtcgacacagtcgttgaagggaaagttctcattggtccagttgacgcagccgtagaaagggcgaattc

SEQ ID NO: 31 - DNA, 2211 bp, Adeno-associated virus
atggctgctgacggttatcttccagattggctcgaggacaacctttctgaaggcattcgtgagtggtgggctctgaaacctggagtccctcaacccaaagcgaaccaacaacaccaggacaaccgtcggggtcttgtgcttccgggttacaaatacctcggacccggtaacggactcgacaaaggagagccggtcaacgaggcggacgcggcagccctcgaacacgacaaagcttacgaccagcagctcaaggccggtgacaacccgtacctcaagtacaaccacgccgacgccgagtttcaggagcgtcttcaagaagatacgtcttttgggggcaaccttggcagagcagtcttccaggccaaaaagaggatccttgagcctcttggtctggttgaggaagcagctaaaacggctcctggaaagaagggggctgtagatcagtctcctcaggaaccggactcatcatctggtgttggcaaatcgggcaaacagcctgccagaaaaagactaaatttcggtcagactggagactcagagtcagtcccagaccctcaacctctcggagaaccaccagcagcccccacaagtttgggatctaatacaatggcttcaggcggtggcgcaccaatggcagacaataacgagggtgccgatggagtgggtaattcctcaggaaattggcattgcgattcccaatggctgggcgacagagtcatcaccaccagcaccagaacctgggccctgcccacttacaacaaccatctctacaagcaaatctccagccaatcaggagcttcaaacgacaaccactactttggctacagcaccccttgggggtattttgactttaacagattccactgccacttctcaccacgtgactggcagcgactcattaacaacaactggggattccggcccaagaaactcagcttcaagctcttcaacatccaagttagaggggtcacgcagaacgatggcacgacgactattgccaataaccttaccagcacggttcaagtgtttacggactcggagtatcagctcccgtacgtgctcgggtcggcgcaccaaggctgtctcccgccgtttccagcggacgtcttcatggtccctcagtatggatacctcaccctgaacaacggaagtcaagcggtgggacgctcatccttttactgcctggagtacttcccttcgcagatgctaaggactggaaataacttccaattcagctataccttcgaggatgtaccttttcacagcagctacgctcacagccagagtttggatcgcttgatgaatcctcttattgatcagtatctgtactacctgaacagaacgcaaggaacaacctctggaacaaccaaccaatcacggctgctttttagccaggctgggcctcagtctatgtctttgcaggccagaaattggctacctgggccctgctaccggcaacagagactttcaaagactgctaacgacaacaacaacagtaactttccttggacagcggccagcaaatatcatctcaatggccgcgactcgctggtgaatccaggaccagctatggccagtcacaaggacgatgaagaaaaatttttccctatgcacggcaatctaatatttggcaaagaagggacaacggcaagtaacgcagaattagataatgtaatgattacggatgaagaagagattcgtaccaccaatcctgtggcaacagagcagtatggaactgtggcaaataacttgcagagctcaaatacagctcccacgactggaactgtcaatcatcagggggccttacctggcatggtgtggcaagatcgtgacgtgtaccttcaaggacctatctgggcaaagattcctcacacggatggacactttcatccttctcctctgatgggaggctttggactgaaacatccgcctcctcaaatcatgatcaaaaatactccggtaccggcaaatcctccgacgactttcagcccggccaagtttgcttcatttatcactcagtactccactggacaggtcagcgtggaaattgagtgggagctacagaaagaaaacagcaaacgttggaatccagagattcagtacacttccaactacaacaagtctgttaatgtggactttactgtagacactaatggtgtttatagtgaacctcgccctattggaacccggtatctcacacgaaacttgtga

SEQ ID NO: 32 - protein, 736 aa, Adeno-associated virus 3
MAADGYLPDWLEDNLSEGIREWWALKPGVPQPKANQQHQDNRRGLVLPGYKYLGPGNGLDKGEPVNEADAAALEHDKAYDQQLKAGDNPYLKYNHADAEFQERLQEDTSFGGNLGRAVFQAKKRILEPLGLVEEAAKTAPGKKGAVDQSPQEPDSSSGVGKSGKQPARKRLNFGQTGDSESVPDPQPLGEPPAAPTSLGSNTMASGGGAPMADNNEGADGVGNSSGNWHCDSQWLGDRVITTSTRTWALPTYNNHLYKQISSQSGASNDNHYFGYSTPWGYFDFNRFHCHFSPRDWQRLINNNWGFRPKKLSFKLFNIQVRGVTQNDGTTTIANNLTSTVQVFTDSEYQLPYVLGSAHQGCLPPFPADVFMVPQYGYLTLNNGSQAVGRSSFYCLEYFPSQMLRTGNNFQFSYTFEDVPFHSSYAHSQSLDRLMNPLIDQYLYYLNRTQGTTSGTTNQSRLLFSQAGPQSMSLQARNWLPGPCYRQQRLSKTANDNNNSNFPWTAASKYHLNGRDSLVNPGPAMASHKDDEEKFFPMHGNLIFGKEGTTASNAELDNVMITDEEEIRTTNPVATEQYGTVANNLQSSNTAPTTGTVNHQGALPGMVWQDRDVYLQGPIWAKIPHTDGHFHPSPLMGGFGLKHPPPQIMIKNTPVPANPPTTFSPAKFASFITQYSTGQVSVEIEWELQKENSKRWNPEIQYTSNYNKSVNVDFTVDTNGVYSEPRPIGTRYLTRNL

SEQ ID NO: 33 - DNA, 4726 bp, Adeno-associated virus 3
ttggccactccctctatgcgcactcgctcgctcggtggggcctggcgaccaaaggtcgccagacggacgtgctttgcacgtccggccccaccgagcgagcgagtgcgcatagagggagtggccaactccatcactagaggtatggcagtgacgtaacgcgaagcgcgcgaagcgagaccacgcctaccagctgcgtcagcagtcaggtgacccttttgcgacagtttgcgacaccacgtggccgctgagggtatatattctcgagtgagcgaaccaggagctccattttgaccgcgaaatttgaacgagcagcagccatgccggggttctacgagattgtcctgaaggtcccgagtgacctggacgagcgcctgccgggcatttctaactcgtttgttaactgggtggccgagaaggaatgggacgtgccgccggattctgacatggatccgaatctgattgagcaggcacccctgaccgtggccgaaaagcttcagcgcgagttcctggtggagtggcgccgcgtgagtaaggccccggaggccctcttttttgtccagttcgaaaagggggagacctacttccacctgcacgtgctgattgagaccatcggggtcaaatccatggtggtcggccgctacgtgagccagattaaagagaagctggtgacccgcatctaccgcggggtcgagccgcagcttccgaactggttcgcggtgaccaaaacgcgaaatggcgccgggggcgggaacaaggtggtggacgactgctacatccccaactacctgctccccaagacccagcccgagctccagtgggcgtggactaacatggaccagtatttaagcgcctgtttgaatctcgcggagcgtaaacggctggtggcgcagcatctgacgcacgtgtcgcagacgcaggagcagaacaaagagaatcagaaccccaattctgacgcgccggtcatcaggtcaaaaacctcagccaggtacatggagctggtcgggtggctggtggaccgcgggatcacgtcagaaaagcaatggattcaggaggaccaggcctcgtacatctccttcaacgccgcctccaactcgcggtcccagatcaaggccgcgctggacaatgcctccaagatcatgagcctgacaaagacggctccggactacctggtgggcagcaacccgccggaggacattaccaaaaatcggatctaccaaatcctggagctgaacgggtacgatccgcagtacgcggcctccgtcttcctgggctgggcgcaaaagaagttcgggaagaggaacaccatctggctctttgggccggccacgacgggtaaaaccaacatcgcggaagccatcgcccacgccgtgcccttctacggctgcgtaaactggaccaatgagaactttcccttcaacgattgcgtcgacaagatggtgatctggtgggaggagggcaagatgacggccaaggtcgtggagagcgccaaggccattctgggcggaagcaaggtgcgcgtggaccaaaagtgcaagtcatcggcccagatcgaacccactcccgtgatcgtcacctccaacaccaacatgtgcgccgtgattgacgggaacagcaccaccttcgagcatcagcagccgctgcaggaccggatgtttgaatttgaacttacccgccgtttggaccatgactttgggaaggtcaccaaacaggaagtaaaggactttttccggtgggcttccgatcacgtgactgacgtggctcatgagttctacgtcagaaagggtggagctaagaaacgccccgcctccaatgacgcggatgtaagcgagccaaaacgggagtgcacgtcacttgcgcagccgacaacgtcagacgcggaagcaccggcggactacgcggacaggtaccaaaacaaatgttctcgtcacgtgggcatgaatctgatgctttttccctgtaaaacatgcgagagaatgaatcaaatttccaatgtctgttttacgcatggtcaaagagactgtggggaatgcttccctggaatgtcagaatctcaacccgtttctgtcgtcaaaaagaagacttatcagaaactgtgtccaattcatcatatcctgggaagggcacccgagattgcctgttcggcctgcgatttggccaatgtggacttggatgactgtgtttctgagcaataaatgacttaaaccaggtatggctgctgacggttatcttccagattggctcgaggacaacctttctgaaggcattcgtgagtggtgggctctgaaacctggagtccctcaacccaaagcgaaccaacaacaccaggacaaccgtcggggtcttgtgcttccgggttacaaatacctcggacccggtaacggactcgacaaaggagagccggtcaacgaggcggacgcggcagccctcgaacacgacaaagcttacgaccagcagctcaaggccggtgacaacccgtacctcaagtacaaccacgccgacgccgagtttcaggagcgtcttcaagaagatacgtcttttgggggcaaccttggcagagcagtcttccaggccaaaaagaggatccttgagcctcttggtctggttgaggaagcagctaaaacggctcctggaaagaagggggctgtagatcagtctcctcaggaaccggactcatcatctggtgttggcaaatcgggcaaacagcctgccagaaaaagactaaatttcggtcagactggagactcagagtcagtcccagaccctcaacctctcggagaaccaccagcagcccccacaagtttgggatctaatacaatggcttcaggcggtggcgcaccaatggcagacaataacgagggtgccgatggagtgggtaattcctcaggaaattggcattgcgattcccaatggctgggcgacagagtcatcaccaccagcaccagaacctgggccctgcccacttacaacaaccatctctacaagcaaatctccagccaatcaggagcttcaaacgacaaccactactttggctacagcaccccttgggggtattttgactttaacagattccactgccacttctcaccacgtgactggcagcgactcattaacaacaactggggattccggcccaagaaactcagcttcaagctcttcaacatccaagttagaggggtcacgcagaacgatggcacgacgactattgccaataaccttaccagcacggttcaagtgtttacggactcggagtatcagctcccgtacgtgctcgggtcggcgcaccaaggctgtctcccgccgtttccagcggacgtcttcatggtccctcagtatggatacctcaccctgaacaacggaagtcaagcggtgggacgctcatccttttactgcctggagtacttcccttcgcagatgctaaggactggaaataacttccaattcagctataccttcgaggatgtaccttttcacagcagctacgctcacagccagagtttggatcgcttgatgaatcctcttattgatcagtatctgtactacctgaacagaacgcaaggaacaacctctggaacaaccaaccaatcacggctgctttttagccaggctgggcctcagtctatgtctttgcaggccagaaattggctacctgggccctgctaccggcaacagagactttcaaagactgctaacgacaacaacaacagtaactttccttggacagcggccagcaaatatcatctcaatggccgcgactcgctggtgaatccaggaccagctatggccagtcacaaggacgatgaagaaaaatttttccctatgcacggcaatctaatatttggcaaagaagggacaacggcaagtaacgcagaattagataatgtaatgattacggatgaagaagagattcgtaccaccaatcctgtggcaacagagcagtatggaactgtggcaaataacttgcagagctcaaatacagctcccacgactggaactgtcaatcatcagggggccttacctggcatggtgtggcaagatcgtgacgtgtaccttcaaggacctatctgggcaaagattcctcacacggatggacactttcatccttctcctctgatgggaggctttggactgaaacatccgcctcctcaaatcatgatcaaaaatactccggtaccggcaaatcctccgacgactttcagcccggccaagtttgcttcatttatcactcagtactccactggacaggtcagcgtggaaattgagtgggagctacagaaagaaaacagcaaacgttggaatccagagattcagtacacttccaactacaacaagtctgttaatgtggactttactgtagacactaatggtgtttatagtgaacctcgccctattggaacccggtatctcacacgaaacttgtgaatcctggttaatcaataaaccgtttaattcgtttcagttgaactttggctcttgtgcacttctttatctttatcttgtttccatggctactgcgtagataagcagcggcctgcggcgcttgcgcttcgcggtttacaactgctggttaatatttaactctcgccatacctctagtgatggagttggccactccctctatgcgcactcgctcgctcggtggggcctggcgaccaaaggtcgccagacggacgtgctttgcacgtccggccccaccgagcgagcgagtgcgcatagagggagtggccaa

SEQ ID NO: 34 - protein, 737 aa, Artificial Sequence
  source: /note="Description of Artificial Sequence: Synthetic polypeptide"
MAADGYLPDWLEDNLSEGIREWWDLKPGAPKPKANQQKQDNGRGLVLPGYKYLGPFNGLDKGEPVNAADAAALEHDKAYDQQLNAGDNPYLRYNHADAEFQERLQEDTSFGGNLGRAVFQAKKRVLEPLGLVEEGAKTAPAKKRPVEPSPQRSPDSSTGIGKKGQQPARKRLNFGQTGDSESVPDPQPLGEPPAAPSSVGSGTVAAGGGAPMADNNEGADGVGNASGNWHCDSTWLGDRVITTSTRTWALPTYNNHLYEQISSETAGSTNDNTYFGYSTPWGYFDFNRFHCHFSPRDWQRLINNNWGFRPKKLRFKLFNIQVKEVTTNDGVTTIANNLTSTIQVFSDSEYQLPYVLGSAHQGCLPPFPADVFMIPQYGYLTLNNGSQSVGRSSFYCLEYFPSQMLRTGNNFEFSYSFEDVPFHSSYAHSQSLDRLMNPLIDQYLYYLARTQSDPGGTAGNRELQFYQGGPSTMAEQAKNWLPGPCFRQQRVSKTLDQNNNSNFAWTGATKYHLNGRNSLVNPGVAMATHKDDEDRFFPSSGVLIFGKTGATNKTTLENVLMTNEEEIRPTNPVATEEYGIVSSNLQAANTAAQTQVVNNQGALPGMVWQNRDVYLQGPIWAKIPHTDGNFHPSPLMGGFGLKHPPPQILIKNTPVPANPPEVFTPAKFASFITQYSTGQVSVEIEWELQKENSKRWDPEIQYTSNFEKQTGVDFAVDSQGVYSEPRPIGTRYLTRNL

SEQ ID NO: 35 - DNA, 2211 bp, Adeno-associated virus
atggctgctgacggttatcttccagattggctcgaggacaacctttctgaaggcattcgtgagtggtgggctctgaaacctggagtccctcaacccaaagcgaaccaacaacaccaggacaaccgtcggggtcttgtgcttccgggttacaaatacctcggacccggtaacggactcgacaaaggagagccggtcaacgaggcggacgcggcagccctcgaacacgacaaagcttacgaccagcagctcaaggccggtgacaacccgtacctcaagtacaaccacgccgacgccgagtttcaggagcgtcttcaagaagatacgtcttttgggggcaaccttggcagagcagtcttccaggccaaaaagaggatccttgagcctcttggtctggttgaggaagcagctaaaacggctcctggaaagaagggggctgtagatcagtctcctcaggaaccggactcatcatctggtgttggcaaatcgggcaaacagcctgccagaaaaagactaaatttcggtcagactggagactcagagtcagtcccagaccctcaacctctcggagaaccaccagcagcccccacaagtttgggatctaatacaatggcttcaggcggtggcgcaccaatggcagacaataacgagggtgccgatggagtgggtaattcctcaggaaattggcattgcgattcccaatggctgggcgacagagtcatcaccaccagcaccagaacctgggccctgcccacttacaacaaccatctctacaagcaaatctccagccaatcaggagcttcaaacgacaaccactactttggctacagcaccccttgggggtattttgactttaacagattccactgccacttctcaccacgtgactggcagcgactcattaacaacaactggggattccggcccaagaaactcagcttcaagctcttcaacatccaagttagaggggtcacgcagaacgatggcacgacgactattgccaataaccttaccagcacggttcaagtgtttacggactcggagtatcagctcccgtacgtgctcgggtcggcgcaccaaggctgtctcccgccgtttccagcggacgtcttcatggtccctcagtatggatacctcaccctgaacaacggaagtcaagcggtgggacgctcatccttttactgcctggagtacttcccttcgcagatgctaaggactggaaataacttccaattcagctataccttcgaggatgtaccttttcacagcagctacgctcacagccagagtttggatcgcttgatgaatcctcttattgatcagtatctgtactacctgaacagaacgcaaggaacaacctctggaacaaccaaccaatcacggctgctttttagccaggctgggcctcagtctatgtctttgcaggccagaaattggctacctgggccctgctaccggcaacagagactttcaaagactgctaacgacaacaacaacagtaactttccttggacagcggccagcaaatatcatctcaatggccgcgactcgctggtgaatccaggaccagctatggccagtcacaaggacgatgaagaaaaatttttccctatgcacggcaatctaatatttggcaaagaagggacaacggcaagtaacgcagaattagataatgtaatgattacggatgaagaagagattcgtaccaccaatcctgtggcaacagagcagtatggaactgtggcaaataacttgcagagctcaaatacagctcccacgactggaactgtcaatcatcagggggccttacctggcatggtgtggcaagatcgtgacgtgtaccttcaaggacctatctgggcaaagattcctcacacggatggacactttcatccttctcctctgatgggaggctttggactgaaacatccgcctcctcaaatcatgatcaaaaatactccggtaccggcaaatcctccgacgactttcagcccggccaagtttgcttcatttatcactcagtactccactggacaggtcagcgtggaaattgagtgggagctacagaaagaaaacagcaaacgttggaatccagagattcagtacacttccaactacaacaagtctgttaatgtggactttactgtagacactaatggtgtttatagtgaacctcgccctattggaacccggtatctcacacgaaacttgtaa

SEQ ID NO: 36 - protein, 736 aa, Adeno-associated virus; identical to SEQ ID NO: 32

SEQ ID NO: 37 - protein, 736 aa, Adeno-associated virus 3A; identical to SEQ ID NO: 32

SEQ ID NO: 38 - protein, 624 aa, Adeno-associated virus 3A
MPGFYEIVLKVPSDLDERLPGISNSFVNWVAEKEWDVPPDSDMDPNLIEQAPLTVAEKLQREFLVEWRRVSKAPEALFFVQFEKGETYFHLHVLIETIGVKSMVVGRYVSQIKEKLVTRIYRGVEPQLPNWFAVTKTRNGAGGGNKVVDDCYIPNYLLPKTQPELQWAWTNMDQYLSACLNLAERKRLVAQHLTHVSQTQEQNKENQNPNSDAPVIRSKTSARYMELVGWLVDRGITSEKQWIQEDQASYISFNAASNSRSQIKAALDNASKIMSLTKTAPDYLVGSNPPEDITKNRIYQILELNGYDPQYAASVFLGWAQKKFGKRNTIWLFGPATTGKTNIAEAIAHAVPFYGCVNWTNENFPFNDCVDKMVIWWEEGKMTAKVVESAKAILGGSKVRVDQKCKSSAQIEPTPVIVTSNTNMCAVIDGNSTTFEHQQPLQDRMFEFELTRRLDHDFGKVTKQEVKDFFRWASDHVTDVAHEFYVRKGGAKKRPASNDADVSEPKRECTSLAQPTTSDAEAPADYADRYQNKCSRHVGMNLMLFPCKTCERMNQISNVCFTHGQRDCGECFPGMSESQPVSVVKKKTYQKLCPIHHILGRAPEIACSACDLANVDLDDCVSEQ

SEQ ID NO: 39 - protein, 736 aa, Adeno-associated virus 3B
MAADGYLPDWLEDNLSEGIREWWALKPGVPQPKANQQHQDNRRGLVLPGYKYLGPGNGLDKGEPVNEADAAALEHDKAYDQQLKAGDNPYLKYNHADAEFQERLQEDTSFGGNLGRAVFQAKKRILEPLGLVEEAAKTAPGKKRPVDQSPQEPDSSSGVGKSGKQPARKRLNFGQTGDSESVPDPQPLGEPPAAPTSLGSNTMASGGGAPMADNNEGADGVGNSSGNWHCDSQWLGDRVITTSTRTWALPTYNNHLYKQISSQSGASNDNHYFGYSTPWGYFDFNRFHCHFSPRDWQRLINNNWGFRPKKLSFKLFNIQVKEVTQNDGTTTIANNLTSTVQVFTDSEYQLPYVLGSAHQGCLPPFPADVFMVPQYGYLTLNNGSQAVGRSSFYCLEYFPSQMLRTGNNFQFSYTFEDVPFHSSYAHSQSLDRLMNPLIDQYLYYLNRTQGTTSGTTNQSRLLFSQAGPQSMSLQARNWLPGPCYRQQRLSKTANDNNNSNFPWTAASKYHLNGRDSLVNPGPAMASHKDDEEKFFPMHGNLIFGKEGTTASNAELDNVMITDEEEIRTTNPVATEQYGTVANNLQSSNTAPTTRTVNDQGALPGMVWQDRDVYLQGPIWAKIPHTDGHFHPSPLMGGFGLKHPPPQIMIKNTPVPANPPTTFSPAKFASFITQYSTGQVSVEIEWELQKENSKRWNPEIQYTSNYNKSVNVDFTVDTNGVYSEPRPIGTRYLTRNL

SEQ ID NO: 40 - protein, 624 aa, Adeno-associated virus 3B
MPGFYEIVLKVPSDLDEHLPGISNSFVNWVAEKEWELPPDSDMDPNLIEQAPLTVAEKLQREFLVEWRRVSKAPEALFFVQFEKGETYFHLHVLIETIGVKSMVVGRYVSQIKEKLVTRIYRGVEPQLPNWFAVTKTRNGAGGGNKVVDDCYIPNYLLPKTQPELQWAWTNMDQYLSACLNLAERKRLVAQHLTHVSQTQEQNKENQNPNSDAPVIRSKTSARYMELVGWLVDRGITSEKQWIQEDQASYISFNAASNSRSQIKAALDNASKIMSLTKTAPDYLVGSNPPEDITKNRIYQILELNGYDPQYAASVFLGWAQKKFGKRNTIWLFGPATTGKTNIAEAIAHAVPFYGCVNWTNENFPFNDCVDKMVIWWEEGKMTAKVVESAKAILGGSKVRVDQKCKSSAQIEPTPVIVTSNTNMCAVIDGNSTTFEHQQPLQDRMFKFELTRRLDHDFGKVTKQEVKDFFRWASDHVTDVAHEFYVRKGGAKKRPASNDADVSEPKRQCTSLAQPTTSDAEAPADYADRYQNKCSRHVGMNLMLFPCKTCERMNQISNVCFTHGQRDCGECFPGMSESQPVSVVKKKTYQKLCPIHHILGRAPEIACSACDLANVDLDDCVSEQ

SEQ ID NO: 41 - DNA, 4722 bp, Adeno-associated virus 3B
tggccactccctctatgcgcactcgctcgctcggtggggcctggcgaccaaaggtcgccagacggacgtgctttgcacgtccggccccaccgagcgagcgagtgcgcatagagggagtggccaactccatcactagaggtatggcagtgacgtaacgcgaagcgcgcgaagcgagaccacgcctaccagctgcgtcagcagtcaggtgacccttttgcgacagtttgcgacaccacgtggccgctgagggtatatattctcgagtgagcgaaccaggagctccattttgaccgcgaaatttgaacgagcagcagccatgccggggttctacgagattgtcctgaaggtcccgagtgacctggacgagcacctgccgggcatttctaactcgtttgttaactgggtggccgagaaggaatgggagctgccgccggattctgacatggatccgaatctgattgagcaggcacccctgaccgtggccgaaaagcttcagcgcgagttcctggtggagtggcgccgcgtgagtaaggccccggaggccctcttttttgtccagttcgaaaagggggagacctacttccacctgcacgtgctgattgagaccatcggggtcaaatccatggtggtcggccgctacgtgagccagattaaagagaagctggtgacccgcatctaccgcggggtcgagccgcagcttccgaactggttcgcggtgaccaaaacgcgaaatggcgccgggggcgggaacaaggtggtggacgactgctacatccccaactacctgctccccaagacccagcccgagctccagtgggcgtggactaacatggaccagtatttaagcgcctgtttgaatctcgcggagcgtaaacggctggtggcgcagcatctgacgcacgtgtcgcagacgcaggagcagaacaaagagaatcagaaccccaattctgacgcgccggtcatcaggtcaaaaacctcagccaggtacatggagctggtcgggtggctggtggaccgcgggatcacgtcagaaaagcaatggattcaggaggaccaggcctcgtacatctccttcaacgccgcctccaactcgcggtcccagatcaaggccgcgctggacaatgcctccaagatcatgagcctgacaaagacggctccggactacctggtgggcagcaacccgccggaggacattaccaaaaatcggatctaccaaatcctggagctgaacgggtacgatccgcagtacgcggcctccgtcttcctgggctgggcgcaaaagaagttcgggaagaggaacaccatctggctctttgggccggccacgacgggtaaaaccaacatcgcggaagccatcgcccacgccgtgcccttctacggctgcgtaaactggaccaatgagaactttcccttcaacgattgcgtcgacaagatggtgatctggtgggaggagggcaagatgacggccaaggtcgtggagagcgccaaggccattctgggcggaagcaaggtgcgcgtggaccaaaagtgcaagtcatcggcccagatcgaacccactcccgtgatcgtcacctccaacaccaacatgtgcgccgtgattgacgggaacagcaccaccttcgagcatcagcagccgctgcaggaccggatgtttaaatttgaacttacccgccgtttggaccatgactttgggaaggtcaccaaacaggaagtaaaggactttttccggtgggcttccgatcacgtgactgacgtggctcatgagttctacgtcagaaagggtggagctaagaaacgccccgcctccaatgacgcggatgtaagcgagccaaaacggcagtgcacgtcacttgcgcagccgacaacgtcagacgcggaagcaccggcggactacgcggacaggtaccaaaacaaatgttctcgtcacgtgggcatgaatctgatgctttttccctgtaaaacatgcgagagaatgaatcaaatttccaatgtctgttttacgcatggtcaaagagactgtggggaatgcttccctggaatgtcagaatctcaacccgtttctgtcgtcaaaaagaagacttatcagaaactgtgtccaattcatcatatcctgggaagggcacccgagattgcctgttcggcctgcgatttggccaatgtggacttggatgactgtgtttctgagcaataaatgacttaaaccaggtatggctgctgacggttatcttccagattggctcgaggacaacctttctgaaggcattcgtgagtggtgggctctgaaacctggagtccctcaacccaaagcgaaccaacaacaccaggacaaccgtcggggtcttgtgcttccgggttacaaatacctcggacccggtaacggactcgacaaaggagagccggtcaacgaggcggacgcggcagccctcgaacacgacaaagcttacgaccagcagctcaaggccggtgacaacccgtacctcaagtacaaccacgccgacgccgagtttcaggagcgtcttcaagaagatacgtcttttgggggcaaccttggcagagcagtcttccaggccaaaaagaggatccttgagcctcttggtctggttgaggaagcagctaaaacggctcctggaaagaagaggcctgtagatcagtctcctcaggaaccggactcatcatctggtgttggcaaatcgggcaaacagcctgccagaaaaagactaaatttcggtcagactggcgactcagagtcagtcccagaccctcaacctctcggagaaccaccagcagcccccacaagtttgggatctaatacaatggcttcaggcggtggcgcaccaatggcagacaataacgagggtgccgatggagtgggtaattcctcaggaaattggcattgcgattcccaatggctgggcgacagagtcatcaccaccagcaccagaacctgggccctgcccacttacaacaaccatctctacaagcaaatctccagccaatcaggagcttcaaacgacaaccactactttggctacagcaccccttgggggtattttgactttaacagattccactgccacttctcaccacgtgactggcagcgactcattaacaacaactggggattccggcccaagaaactcagcttcaagctcttcaacatccaagttaaagaggtcacgcagaacgatggcacgacgactattgccaataaccttaccagcacggttcaagtgtttacggactcggagtatcagctcccgtacgtgctcgggtcggcgcaccaaggctgtctcccgccgtttccagcggacgtcttcatggtccctcagtatggatacctcaccctgaacaacggaagtcaagcggtgggacgctcatccttttactgcctggagtacttcccttcgcagatgctaaggactggaaataacttccaattcagctataccttcgaggatgtaccttttcacagcagctacgctcacagccagagtttggatcgcttgatgaatcctcttattgatcagtatctgtactacctgaacagaacgcaaggaacaacctctggaacaaccaaccaatcacggctgctttttagccaggctgggcctcagtctatgtctttgcaggccagaaattggctacctgggccctgctaccggcaacagagactttcaaagactgctaacgacaacaacaacagtaactttccttggacagcggccagcaaatatcatctcaatggccgcgactcgctggtgaatccaggaccagctatggccagtcacaaggacgatgaagaaaaatttttccctatgcacggcaatctaatatttggcaaagaagggacaacggcaagtaacgcagaattagataatgtaatgattacggatgaagaagagattcgtaccaccaatcctgtggcaacagagcagtatggaactgtggcaaataacttgcagagctcaaatacagctcccacgactagaactgtcaatgatcagggggccttacctggcatggtgtggcaagatcgtgacgtgtaccttcaaggacctatctgggcaaagattcctcacacggatggacactttcatccttctcctctgatgggaggctttggactgaaacatccgcctcctcaaatcatgatcaaaaatactccggtaccggcaaatcctccgacgactttcagcccggccaagtttgcttcatttatcactcagtactccactggacaggtcagcgtggaaattgagtgggagctacagaaagaaaacagcaaacgttggaatccagagattcagtacacttccaactacaacaagtctgttaatgtggactttactgtagacactaatggtgtttatagtgaacctcgccctattggaacccggtatctcacacgaaacttgtaatcctggttaatcaataaaccgtttaattcgtttcagttgaactttggctcttgtgcacttcttatcttatcttgtttccatggctactgcgtagataagcagcggcctgcggcgcttgcgcttcgcggtttacaactgctggttaatatttaactctcgccatacctctagtgatggagttggccactccctctatgcgcactcgctcgctcggtggggccggacgtgcaaagcacgtccgtctggcgacctttggtcgccaggccccaccgagcgagcgagtgcgcatagagggagtggccaa

SEQ ID NO: 42 - DNA, 1800 bp, Adeno-associated virus 4
  modified_base (342)..(342): a, c, t, or g
acggctcctggaaagaagagaccgttgattgaatccccccagcagcccgactcctccacgggtatcggcaaaaaaggcaagcagccggctaaaaagaagctcgttttcgaagacgaaactggagcaggcgacggaccccctgagggatcaacttccggagccatgtctgatgacagtgagatgcgtgcagcagctggcggagctgcagtcgagggsggacaaggtgccgatggagtgggtaatgcctcgggtgattggcattgcgattccacctggtctgagggccacgtcacgaccaccagcaccagaacctgggtcttgcccacctacaacaaccacctntacaagcgactcggagagagcctgcagtccaacacctacaacggattctccaccccctggggatactttgacttcaaccgcttccactgccacttctcaccacgtgactggcagcgactcatcaacaacaactggggcatgcgacccaaagccatgcgggtcaaaatcttcaacatccaggtcaaggaggtcacgacgtcgaacggcgagacaacggtggctaataaccttaccagcacggttcagatctttgcggactcgtcgtacgaactgccgtacgtgatggatgcgggtcaagagggcagcctgcctccttttcccaacgacgtctttatggtgccccagtacggctactgtggactggtgaccggcaacacttcgcagcaacagactgacagaaatgccttctactgcctggagtactttccttcgcagatgctgcggactggcaacaactttgaaattacgtacagttttgagaaggtgcctttccactcgatgtacgcgcacagccagagcctggaccggctgatgaaccctctcatcgaccagtacctgtggggactgcaatcgaccaccaccggaaccaccctgaatgccgggactgccaccaccaactttaccaagctgcggcctaccaacttttccaactttaaaaagaactggctgcccgggccttcaatcaagcagcagggcttctcaaagactgccaatcaaaactacaagatccctgccaccgggtcagacagtctcatcaaatacgagacgcacagcactctggacggaagatggagtgccctgacccccggacctccaatggccacggctggacctgcggacagcaagttcagcaacagccagctcatctttgcggggcctaaacagaacggcaacacggccaccgtacccgggactctgatcttcacctctgaggaggagctggcagccaccaacgccaccgatacggacatgtggggcaacctacctggcggtgaccagagcaacagcaacctgccgaccgtggacagactgacagccttgggagccgtgcctggaatggtctggcaaaacagagacatttactaccagggtcccatttgggccaagattcctcataccgatggacactttcacccctcaccgctgattggtgggtttgggctgaaacacccgcctcctcaaatttttatcaagaacaccccggtacctgcgaatcctgcaacgaccttcagctctactccggtaaactccttcattactcagtacagcactggccaggtgtcggtgcagattgactgggagatccagaaggagcggtccaaacgctggaaccccgaggtccagtttacctccaactacggacagcaaaactctctgttgtgggctcccgatgcggctgggaaatacactgagcctagggctatcggtacccgctacctcacccaccacctgtaataa

SEQ ID NO: 43 - DNA, 2208 bp, Adeno-associated virus 4
  modified_base (750)..(750): a, c, t, or g
atgactgacggttaccttccagattggctagaggacaacctctctgaaggcgttcgagagtggtgggcgctgcaacctggagcccctaaacccaaggcaaatcaacaacatcaggacaacgctcggggtcttgtgcttccgggttacaaatacctcggacccggcaacggactcgacaagggggaacccgtcaacgcagcggacgcggcagccctcgagcacgacaaggcctacgaccagcagctcaaggccggtgacaacccctacctcaagtacaaccacgccgacgcggagttccagcagcggcttcagggcgacacatcgtttgggggcaacctcggcagagcagtcttccaggccaaaaagagggttcttgaacctcttggtctggttgagcaagcgggtgagacggctcctggaaagaagagaccgttgattgaatccccccagcagcccgactcctccacgggtatcggcaaaaaaggcaagcagccggctaaaaagaagctcgttttcgaagacgaaactggagcaggcgacggaccccctgagggatcaacttccggagccatgtctgatgacagtgagatgcgtgcagcagctggcggagctgcagtcgagggsggacaaggtgccgatggagtgggtaatgcctcgggtgattggcattgcgattccacctggtctgagggccacgtcacgaccaccagcaccagaacctgggtcttgcccacctacaacaaccacctntacaagcgactcggagagagcctgcagtccaacacctacaacggattctccaccccctggggatactttgacttcaaccgcttccactgccacttctcaccacgtgactggcagcgactcatcaacaacaactggggcatgcgacccaaagccatgcgggtcaaaatcttcaacatccaggtcaaggaggtcacgacgtcgaacggcgagacaacggtggctaataaccttaccagcacggttcagatctttgcggactcgtcgtacgaactgccgtacgtgatggatgcgggtcaagagggcagcctgcctccttttcccaacgacgtctttatggtgccccagtacggctactgtggactggtgaccggcaacacttcgcagcaacagactgacagaaatgccttctactgcctggagtactttccttcgcagatgctgcggactggcaacaactttgaaattacgtacagttttgagaaggtgcctttccactcgatgtacgcgcacagccagagcctggaccggctgatgaaccctctcatcgaccagtacctgtggggactgcaatcgaccaccaccggaaccaccctgaatgccgggactgccaccaccaactttaccaagctgcggcctaccaacttttccaactttaaaaagaactggctgcccgggccttcaatcaagcagcagggcttctcaaagactgccaatcaaaactacaagatccctgccaccgggtcagacagtctcatcaaatacgagacgcacagcactctggacggaagatggagtgccctgacccccggacctccaatggccacggctggacctgcggacagcaagttcagcaacagccagctcatctttgcggggcctaaacagaacggcaacacggccaccgtacccgggactctgatcttcacctctgaggaggagctggcagccaccaacgccaccgatacggacatgtggggcaacctacctggcggtgaccagagcaacagcaacctgccgaccgtggacagactgacagccttgggagccgtgcctggaatggtctggcaaaacagagacatttactaccagggtcccatttgggccaagattcctcataccgatggacactttcacccctcaccgctgattggtgggtttgggctgaaacacccgcctcctcaaatttttatcaagaacaccccggtacctgcgaatcctgcaacgaccttcagctctactccggtaaactccttcattactcagtacagcactggccaggtgtcggtgcagattgactgggagatccagaaggagcggtccaaacgctggaaccccgaggtccagtttacctccaactacggacagcaaaactctctgttgtgggctcccgatgcggctgggaaatacactgagcctagggctatcggtacccgctacctcacccaccacctgtaataa

SEQ ID NO: 44 - DNA, 1872 bp, Adeno-associated virus 4
atgccggggttctacgagatcgtgctgaaggtgcccagcgacctggacgagcacctgcccggcatttctgactcttttgtgagctgggtggccgagaaggaatgggagctgccgccggattctgacatggacttgaatctgattgagcaggcacccctgaccgtggccgaaaagctgcaacgcgagttcctggtcgagtggcgccgcgtgagtaaggccccggaggccctcttctttgtccagttcgagaagggggacagctacttccacctgcacatcctggtggagaccgtgggcgtcaaatccatggtggtgggccgctacgtgagccagattaaagagaagctggtgacccgcatctaccgcggggtcgagccgcagcttccgaactggttcgcggtgaccaagacgcgtaatggcgccggaggcgggaacaaggtggtggacgactgctacatccccaactacctgctccccaagacccagcccgagctccagtgggcgtggactaacatggaccagtatataagcgcctgtttgaatctcgcggagcgtaaacggctggtggcgcagcatctgacgcacgtgtcgcagacgcaggagcagaacaaggaaaaccagaaccccaattctgacgcgccggtcatcaggtcaaaaacctccgccaggtacatggagctggtcgggtggctggtggaccgcgggatcacgtcagaaaagcaatggatccaggaggaccaggcgtcctacatctccttcaacgccgcctccaactcgcggtcacaaatcaaggccgcgctggacaatgcctccaaaatcatgagcctgacaaagacggctccggactacctggtgggccagaacccgccggaggacatttccagcaaccgcatctaccgaatcctcgagatgaacgggtacgatccgcagtacgcggcctccgtcttcctgggctgggcgcaaaagaagttcgggaagaggaacaccatctggctctttgggccggccacgacgggtaaaaccaacatcgcggaagccatcgcccacgccgtgcccttctacggctgcgtgaactggaccaatgagaactttccgttcaacgattgcgtcgacaagatggtgatctggtgggaggagggcaagatgacggccaaggtcgtagagagcgccaaggccatcctgggcggaagcaaggtgcgcgtggaccaaaagtgcaagtcatcggcccagatcgacccaactcccgtgatcgtcacctccaacaccaacatgtgcgcggtcatcgacggaaactcgaccaccttcgagcaccaacaaccactccaggaccggatgttcaagttcgagctcaccaagcgcctggagcacgactttggcaaggtcaccaagcaggaagtcaaagactttttccggtgggcgtcagatcacgtgaccgaggtgactcacgagttttacgtcagaaagggtggagctagaaagaggcccgcccccaatgacgcagatataagtgagcccaagcgggcctgtccgtcagttgcgcagccatcgacgtcagacgcggaagctccggtggactacgcggacaggtaccaaaacaaatgttctcgtcacgtgggtatgaatctgatgctttttccctgccggcaatgcgagagaatgaatcagaatgtggacatttgcttcacgcacggggtcatggactgtgccgagtgcttccccgtgtcagaatctcaacccgtgtctgtcgtcagaaagcggacgtatcagaaactgtgtccgattcatcacatcatggggagggcgcccgaggtggcctgctcggcctgcgaactggccaatgtggacttggatgactgtgacatggaacaataa

SEQ ID NO: 45 - DNA, 1611 bp, Adeno-associated virus 4
atgccggggttctacgagatcgtgctgaaggtgcccagcgacctggacgagcacctgcccggcatttctgactcttttgtgagctgggtggccgagaaggaatgggagctgccgccggattctgacatggacttgaatctgattgagcaggcacccctgaccgtggccgaaaagctgcaacgcgagttcctggtcgagtggcgccgcgtgagtaaggccccggaggccctcttctttgtccagttcgagaagggggacagctacttccacctgcacatcctggtggagaccgtgggcgtcaaatccatggtggtgggccgctacgtgagccagattaaagagaagctggtgacccgcatctaccgcggggtcgagccgcagcttccgaactggttcgcggtgaccaagacgcgtaatggcgccggaggcgggaacaaggtggtggacgactgctacatccccaactacctgctccccaagacccagcccgagctccagtgggcgtggactaacatggaccagtatataagcgcctgtttgaatctcgcggagcgtaaacggctggtggcgcagcatctgacgcacgtgtcgcagacgcaggagcagaacaaggaaaaccagaaccccaattctgacgcgccggtcatcaggtcaaaaacctccgccaggtacatggagctggtcgggtggctggtggaccgcgggatcacgtcagaaaagcaatggatccaggaggaccaggcgtcctacatctccttcaacgccgcctccaactcgcggtcacaaatcaaggccgcgctggacaatgcctccaaaatcatgagcctgacaaagacggctccggactacctggtgggccagaacccgccggaggacatttccagcaaccgcatctaccgaatcctcgagatgaacgggtacgatccgcagtacgcggcctccgtcttcctgggctgggcgcaaaagaagttcgggaagaggaacaccatctggctctttgggccggccacgacgggtaaaaccaacatcgcggaagccatcgcccacgccgtgcccttctacggctgcgtgaactggaccaatgagaactttccgttcaacgattgcgtcgacaagatggtgatctggtgggaggagggcaagatgacggccaaggtcgtagagagcgccaaggccatcctgggcggaagcaaggtgcgcgtggaccaaaagtgcaagtcatcggcccagatcgacccaactcccgtgatcgtcacctccaacaccaacatgtgcgcggtcatcgacggaaactcgaccaccttcgagcaccaacaaccactccaggaccggatgttcaagttcgagctcaccaagcgcctggagcacgactttggcaaggtcaccaagcaggaagtcaaagactttttccggtgggcgtcagatcacgtgaccgaggtgactcacgagttttacgtcagaaagggtggagctagaaagaggcccgcccccaatgacgcagatataagtgagcccaagcgggcctgtccgtcagttgcgcagccatcgacgtcagacgcggaagctccggtggactacgcggacagattggctagaggacaacctctctga

SEQ ID NO: 46 - DNA, 1872 bp, Adeno-associated virus 4; identical to SEQ ID NO: 44

SEQ ID NO: 47 - DNA, 1617 bp, Adeno-associated virus 4
  modified_base (162)..(162): a, c, t, or g
atgcgtgcagcagctggcggagctgcagtcgagggsggacaaggtgccgatggagtgggtaatgcctcgggtgattggcattgcgattccacctggtctgagggccacgtcacgaccaccagcaccagaacctgggtcttgcccacctacaacaaccacctntacaagcgactcggagagagcctgcagtccaacacctacaacggattctccaccccctggggatactttgacttcaaccgcttccactgccacttctcaccacgtgactggcagcgactcatcaacaacaactggggcatgcgacccaaagccatgcgggtcaaaatcttcaacatccaggtcaaggaggtcacgacgtcgaacggcgagacaacggtggctaataaccttaccagcacggttcagatctttgcggactcgtcgtacgaactgccgtacgtgatggatgcgggtcaagagggcagcctgcctccttttcccaacgacgtctttatggtgccccagtacggctactgtggactggtgaccggcaacacttcgcagcaacagactgacagaaatgccttctactgcctggagtactttccttcgcagatgctgcggactggcaacaactttgaaattacgtacagttttgagaaggtgcctttccactcgatgtacgcgcacagccagagcctggaccggctgatgaaccctctcatcgaccagtacctgtggggactgcaatcgaccaccaccggaaccaccctgaatgccgggactgccaccaccaactttaccaagctgcggcctaccaacttttccaactttaaaaagaactggctgcccgggccttcaatcaagcagcagggcttctcaaagactgccaatcaaaactacaagatccctgccaccgggtcagacagtctcatcaaatacgagacgcacagcactctggacggaagatggagtgccctgacccccggacctccaatggccacggctggacctgcggacagcaagttcagcaacagccagctcatctttgcggggcctaaacagaacggcaacacggccaccgtacccgggactctgatcttcacctctgaggaggagctggcagccaccaacgccaccgatacggacatgtggggcaacctacctggcggtgaccagagcaacagcaacctgccgaccgtggacagactgacagccttgggagccgtgcctggaatggtctggcaaaacagagacatttactaccagggtcccatttgggccaagattcctcataccgatggacactttcacccctcaccgctgattggtgggtttgggctgaaacacccgcctcctcaaatttttatcaagaacaccccggtacctgcgaatcctgcaacgaccttcagctctactccggtaaactccttcattactcagtacagcactggccaggtgtcggtgcagattgactgggagatccagaaggagcggtccaaacgctggaaccccgaggtccagtttacctccaactacggacagcaaaactctctgttgtgggctcccgatgcggctgggaaatacactgagcctagggctatcggtacccgctacctcacccaccacctgtaa

SEQ ID NO: 48 - DNA, 939 bp, Adeno-associated virus 4
atggagctggtcgggtggctggtggaccgcgggatcacgtcagaaaagcaatggatccaggaggaccaggcgtcctacatctccttcaacgccgcctccaactcgcggtcacaaatcaaggccgcgctggacaatgcctccaaaatcatgagcctgacaaagacggctccggactacctggtgggccagaacccgccggaggacatttccagcaaccgcatctaccgaatcctcgagatgaacgggtacgatccgcagtacgcggcctccgtcttcctgggctgggcgcaaaagaagttcgggaagaggaacaccatctggctctttgggccggccacgacgggtaaaaccaacatcgcggaagccatcgcccacgccgtgcccttctacggctgcgtgaactggaccaatgagaactttccgttcaacgattgcgtcgacaagatggtgatctggtgggaggagggcaagatgacggccaaggtcgtagagagcgccaaggccatcctgggcggaagcaaggtgcgcgtggaccaaaagtgcaagtcatcggcccagatcgacccaactcccgtgatcgtcacctccaacaccaacatgtgcgcggtcatcgacggaaactcgaccaccttcgagcaccaacaaccactccaggaccggatgttcaagttcgagctcaccaagcgcctggagcacgactttggcaaggtcaccaagcaggaagtcaaagactttttccggtgggcgtcagatcacgtgaccgaggtgactcacgagttttacgtcagaaagggtggagctagaaagaggcccgcccccaatgacgcagatataagtgagcccaagcgggcctgtccgtcagttgcgcagccatcgacgtcagacgcggaagctccggtggactacgcggacagattggctagaggacaacctctctga

SEQ ID NO: 49 - DNA, 1197 bp, Adeno-associated virus 4
atggagctggtcgggtggctggtggaccgcgggatcacgtcagaaaagcaatggatccaggaggaccaggcgtcctacatctccttcaacgccgcctccaactcgcggtcacaaatcaaggccgcgctggacaatgcctccaaaatcatgagcctgacaaagacggctccggactacctggtgggccagaacccgccggaggacatttccagcaaccgcatctaccgaatcctcgagatgaacgggtacgatccgcagtacgcggcctccgtcttcctgggctgggcgcaaaagaagttcgggaagaggaacaccatctggctctttgggccggccacgacgggtaaaaccaacatcgcggaagccatcgcccacgccgtgcccttctacggctgcgtgaactggaccaatgagaactttccgttcaacgattgcgtcgacaagatggtgatctggtgggaggagggcaagatgacggccaaggtcgtagagagcgccaaggccatcctgggcggaagcaaggtgcgcgtggaccaaaagtgcaagtcatcggcccagatcgacccaactcccgtgatcgtcacctccaacaccaacatgtgcgcggtcatcgacggaaactcgaccaccttcgagcaccaacaaccactccaggaccggatgttcaagttcgagctcaccaagcgcctggagcacgactttggcaaggtcaccaagcaggaagtcaaagactttttccggtgggcgtcagatcacgtgaccgaggtgactcacgagttttacgtcagaaagggtggagctagaaagaggcccgcccccaatgacgcagatataagtgagcccaagcgggcctgtccgtcagttgcgcagccatcgacgtcagacgcggaagctccggtggactacgcggacaggtaccaaaacaaatgttctcgtcacgtgggtatgaatctgatgctttttccctgccggcaatgcgagagaatgaatcagaatgtggacatttgcttcacgcacggggtcatggactgtgccgagtgcttccccgtgtcagaatctcaacccgtgtctgtcgtcagaaagcggacgtatcagaaactgtgtccgattcatcacatcatggggagggcgcccgaggtggcctgctcggcctgcgaactggccaatgtggacttggatgactgtgacatggaacaa

SEQ ID NO: 50 - DNA, 245 bp, Adeno-associated virus 4
ctccatcatctaggtttgcccactgacgtcaatgtgacgtcctagggttagggaggtccctgtattagcagtcacgtgagtgtcgtatttcgcggagcgtagcggagcgcataccaagctgccacgtcacagccacgtggtccgtttgcgacagtttgcgacaccatgtggtcaggagggtatataaccgcgagtgagccagcgaggagctccattttgcccgcgaattttgaacgagcagcagc

SEQ ID NO: 51 - protein, 313 aa, Adeno-associated virus 4
  MOD_RES (313)..(313): Any amino acid
MELVGWLVDRGITSEKQWIQEDQASYISFNAASNSRSQIKAALDNASKIMSLTKTAPDYLVGQNPPEDISSNRIYRILEMNGYDPQYAASVFLGWAQKKFGKRNTIWLFGPATTGKTNIAEAIAHAVPFYGCVNWTNENFPFNDCVDKMVIWWEEGKMTAKVVESAKAILGGSKVRVDQKCKSSAQIDPTPVIVTSNTNMCAVIDGNSTTFEHQQPLQDRMFKFELTKRLEHDFGKVTKQEVKDFFRWASDHVTEVTHEFYVRKGGARKRPAPNDADISEPKRACPSVAQPSTSDAEAPVDYADRLARGQPLX

SEQ ID NO: 52 - protein, 399 aa, Adeno-associated virus 4
MELVGWLVDRGITSEKQWIQEDQASYISFNAASNSRSQIKAALDNASKIMSLTKTAPDYLVGQNPPEDISSNRIYRILEMNGYDPQYAASVFLGWAQKKFGKRNTIWLFGPATTGKTNIAEAIAHAVPFYGCVNWTNENFPFNDCVDKMVIWWEEGKMTAKVVESAKAILGGSKVRVDQKCKSSAQIDPTPVIVTSNTNMCAVIDGNSTTFEHQQPLQDRMFKFELTKRLEHDFGKVTKQEVKDFFRWASDHVTEVTHEFYVRKGGARKRPAPNDADISEPKRACPSVAQPSTSDAEAPVDYADRYQNKCSRHVGMNLMLFPCRQCERMNQNVDICFTHGVMDCAECFPVSESQPVSVVRKRTYQKLCPIHHIMGRAPEVACSACELANVDLDDCDMEQ

SEQ ID NO: 53 - protein, 623 aa, Adeno-associated virus 4
MPGFYEIVLKVPSDLDEHLPGISDSFVSWVAEKEWELPPDSDMDLNLIEQAPLTVAEKLQREFLVEWRRVSKAPEALFFVQFEKGDSYFHLHILVETVGVKSMVVGRYVSQIKEKLVTRIYRGVEPQLPNWFAVTKTRNGAGGGNKVVDDCYIPNYLLPKTQPELQWAWTNMDQYISACLNLAERKRLVAQHLTHVSQTQEQNKENQNPNSDAPVIRSKTSARYMELVGWLVDRGITSEKQWIQEDQASYISFNAASNSRSQIKAALDNASKIMSLTKTAPDYLVGQNPPEDISSNRIYRILEMNGYDPQYAASVFLGWAQKKFGKRNTIWLFGPATTGKTNIAEAIAHAVPFYGCVNWTNENFPFNDCVDKMVIWWEEGKMTAKVVESAKAILGGSKVRVDQKCKSSAQIDPTPVIVTSNTNMCAVIDGNSTTFEHQQPLQDRMFKFELTKRLEHDFGKVTKQEVKDFFRWASDHVTEVTHEFYVRKGGARKRPAPNDADISEPKRACPSVAQPSTSDAEAPVDYADRYQNKCSRHVGMNLMLFPCRQCERMNQNVDICFTHGVMDCAECFPVSESQPVSVVRKRTYQKLCPIHHIMGRAPEVACSACELANVDLDDCDMEQ

SEQ ID NO: 54 - protein, 537 aa, Adeno-associated virus 4
  MOD_RES (537)..(537): Any amino acid
MPGFYEIVLKVPSDLDEHLPGISDSFVSWVAEKEWELPPDSDMDLNLIEQAPLTVAEKLQREFLVEWRRVSKAPEALFFVQFEKGDSYFHLHILVETVGVKSMVVGRYVSQIKEKLVTRIYRGVEPQLPNWFAVTKTRNGAGGGNKVVDDCYIPNYLLPKTQPELQWAWTNMDQYISACLNLAERKRLVAQHLTHVSQTQEQNKENQNPNSDAPVIRSKTSARYMELVGWLVDRGITSEKQWIQEDQASYISFNAASNSRSQIKAALDNASKIMSLTKTAPDYLVGQNPPEDISSNRIYRILEMNGYDPQYAASVFLGWAQKKFGKRNTIWLFGPATTGKTNIAEAIAHAVPFYGCVNWTNENFPFNDCVDKMVIWWEEGKMTAKVVESAKAILGGSKVRVDQKCKSSAQIDPTPVIVTSNTNMCAVIDGNSTTFEHQQPLQDRMFKFELTKRLEHDFGKVTKQEVKDFFRWASDHVTEVTHEFYVRKGGARKRPAPNDADISEPKRACPSVAQPSTSDAEAPVDYADRLARGQPLX

SEQ ID NO: 55 - protein, 623 aa, Adeno-associated virus 4; identical to SEQ ID NO: 53

SEQ ID NO: 56 - protein, 544 aa, Adeno-associated virus 4
MSDDSEMRAAAGGAAVEGGQGADGVGNASGDWHCDSTWSEGHVTTTSTRTWVLPTYNNHLYKRLGESLQSNTYNGFSTPWGYFDFNRFHCHFSPRDWQRLINNNWGMRPKAMRVKIFNIQVKEVTTSNGETTVANNLTSTVQIFADSSYELPYVMDAGQEGSLPPFPNDVFMVPQYGYCGLVTGNTSQQQTDRNAFYCLEYFPSQMLRTGNNFEITYSFEKVPFHSMYAHSQSLDRLMNPLIDQYLWGLQSTTTGTTLNAGTATTNFTKLRPTNFSNFKKNWLPGPSIKQQGFSKTANQNYKIPATGSDSLIKYETHSTLDGRWSALTPGPPMATAGPADSKFSNSQLIFAGPKQNGNTATVPGTLIFTSEEELAATNATDTDMWGNLPGGDQSNSNLPTVDRLTALGAVPGMVWQNRDIYYQGPIWAKIPHTDGHFHPSPLIGGFGLKHPPPQIFIKNTPVPANPATTFSSTPVNSFITQYSTGQVSVQIDWEIQKERSKRWNPEVQFTSNYGQQNSLLWAPDAAGKYTEPRAIGTRYLTHHL

SEQ ID NO: 57 - protein, 734 aa, Adeno-associated virus 4
MTDGYLPDWLEDNLSEGVREWWALQPGAPKPKANQQHQDNARGLVLPGYKYLGPGNGLDKGEPVNAADAAALEHDKAYDQQLKAGDNPYLKYNHADAEFQQRLQGDTSFGGNLGRAVFQAKKRVLEPLGLVEQAGETAPGKKRPLIESPQQPDSSTGIGKKGKQPAKKKLVFEDETGAGDGPPEGSTSGAMSDDSEMRAAAGGAAVEGGQGADGVGNASGDWHCDSTWSEGHVTTTSTRTWVLPTYNNHLYKRLGESLQSNTYNGFSTPWGYFDFNRFHCHFSPRDWQRLINNNWGMRPKAMRVKIFNIQVKEVTTSNGETTVANNLTSTVQIFADSSYELPYVMDAGQEGSLPPFPNDVFMVPQYGYCGLVTGNTSQQQTDRNAFYCLEYFPSQMLRTGNNFEITYSFEKVPFHSMYAHSQSLDRLMNPLIDQYLWGLQSTTTGTTLNAGTATTNFTKLRPTNFSNFKKNWLPGPSIKQQGFSKTANQNYKIPATGSDSLIKYETHSTLDGRWSALTPGPPMATAGPADSKFSNSQLIFAGPKQNGNTATVPGTLIFTSEEELAATNATDTDMWGNLPGGDQSNSNLPTVDRLTALGAVPGMVWQNRDIYYQGPIWAKIPHTDGHFHPSPLIGGFGLKHPPPQIFIKNTPVPANPATTFSSTPVNSFITQYSTGQVSVQIDWEIQKERSKRWNPEVQFTSNYGQQNSLLWAPDAAGKYTEPRAIGTRYLTHHL

SEQ ID NO: 58 - protein, 598 aa, Adeno-associated virus 4
TAPGKKRPLIESPQQPDSSTGIGKKGKQPAKKKLVFEDETGAGDGPPEGSTSGAMSDDSEMRAAAGGAAVEGGQGADGVGNASGDWHCDSTWSEGHVTTTSTRTWVLPTYNNHLYKRLGESLQSNTYNGFSTPWGYFDFNRFHCHFSPRDWQRLINNNWGMRPKAMRVKIFNIQVKEVTTSNGETTVANNLTSTVQIFADSSYELPYVMDAGQEGSLPPFPNDVFMVPQYGYCGLVTGNTSQQQTDRNAFYCLEYFPSQMLRTGNNFEITYSFEKVPFHSMYAHSQSLDRLMNPLIDQYLWGLQSTTTGTTLNAGTATTNFTKLRPTNFSNFKKNWLPGPSIKQQGFSKTANQNYKIPATGSDSLIKYETHSTLDGRWSALTPGPPMATAGPADSKFSNSQLIFAGPKQNGNTATVPGTLIFTSEEELAATNATDTDMWGNLPGGDQSNSNLPTVDRLTALGAVPGMVWQNRDIYYQGPIWAKIPHTDGHFHPSPLIGGFGLKHPPPQIFIKNTPVPANPATTFSSTPVNSFITQYSTGQVSVQIDWEIQKERSKRWNPEVQFTSNYGQQNSLLWAPDAAGKYTEPRAIGTRYLTHHL

SEQ ID NO: 59 - DNA, 129 bp, Adeno-associated virus 4
ttggccactccctctatgcgcgctcgctcactcactcggccctgcggccagaggccggcagtctggagacctttggtgtccagggcagggccgagtgagtgagcgagcgcgcatagagggagtggccaa

SEQ ID NO: 60 - DNA, 125 bp, Adeno-associated virus 4
ttggccactccctctatgcgcgctcgctcactcactcggccctggagaccaaaggtctccagactgccggcctctggccggcagggccgagtgagtgagcgagcgcgcatagagggagtggccaa

SEQ ID NO: 61 - DNA, 4768 bp, Adeno-associated virus 4
  modified_base (3009)..(3009): a, c, t, or g
ttggccactccctctatgcgcgctcgctcactcactcggccctggagaccaaaggtctccagactgccggcctctggccggcagggccgagtgagtgagcgagcgcgcatagagggagtggccaactccatcatctaggtttgcccactgacgtcaatgtgacgtcctagggttagggaggtccctgtattagcagtcacgtgagtgtcgtatttcgcggagcgtagcggagcgcataccaagctgccacgtcacagccacgtggtccgtttgcgacagtttgcgacaccatgtggtcaggagggtatataaccgcgagtgagccagcgaggagctccattttgcccgcgaattttgaacgagcagcagccatgccggggttctacgagatcgtgctgaaggtgcccagcgacctggacgagcacctgcccggcatttctgactcttttgtgagctgggtggccgagaaggaatgggagctgccgccggattctgacatggacttgaatctgattgagcaggcacccctgaccgtggccgaaaagctgcaacgcgagttcctggtcgagtggcgccgcgtgagtaaggccccggaggccctcttctttgtccagttcgagaagggggacagctacttccacctgcacatcctggtggagaccgtgggcgtcaaatccatggtggtgggccgctacgtgagccagattaaagagaagctggtgacccgcatctaccgcggggtcgagccgcagcttccgaactggttcgcggtgaccaagacgcgtaatggcgccggaggcgggaacaaggtggtggacgactgctacatccccaactacctgctccccaagacccagcccgagctccagtgggcgtggactaacatggaccagtatataagcgcctgtttgaatctcgcggagcgtaaacggctggtggcgcagcatctgacgcacgtgtcgcagacgcaggagcagaacaaggaaaaccagaaccccaattctgacgcgccggtcatcaggtcaaaaacctccgccaggtacatggagctggtcgggtggctggtggaccgcgggatcacgtcagaaaagcaatggatccaggaggaccaggcgtcctacatctccttcaacgccgcctccaactcgcggtcacaaatcaaggccgcgctggacaatgcctccaaaatcatgagcctgacaaagacggctccggactacctggtgggccagaacccgccggaggacatttccagcaaccgcatctaccgaatcctcgagatgaacgggtacgatccgcagtacgcggcctccgtcttcctgggctgggcgcaaaagaagttcgggaagaggaacaccatctggctctttgggccggccacgacgggtaaaaccaacatcgcggaagccatcgcccacgccgtgcccttctacggctgcgtgaactggaccaatgagaactttccgttcaacgattgcgtcgacaagatggtgatctggtgggaggagggcaagatgacggccaaggtcgtagagagcgccaaggccatcctgggcggaagcaaggtgcgcgtggaccaaaagtgcaagtcatcggcccagatcgacccaactcccgtgatcgtcacctccaacaccaacatgtgcgcggtcatcgacggaaactcgaccaccttcgagcaccaacaaccactccaggaccggatgttcaagttcgagctcaccaagcgcctggagcacgactttggcaaggtcaccaagcaggaagtcaaagactttttccggtgggcgtcagatcacgtgaccgaggtgactcacgagttttacgtcagaaagggtggagctagaaagaggcccgcccccaatgacgcagatataagtgagcccaagcgggcctgtccgtcagttgcgcagccatcgacgtcagacgcggaagctccggtggactacgcggacaggtaccaaaacaaatgttctcgtcacgtgggtatgaatctgatgctttttccctgccggcaatgcgagagaatgaatcagaatgtggacatttgcttcacgcacggggtcatggactgtgccgagtgcttccccgtgtcagaatctcaacccgtgtctgtcgtcagaaagcggacgtatcagaaactgtgtccgattcatcacatcatggggagggcgcccgaggtggcctgctcggcctgcgaactggccaatgtggacttggatgactgtgacatggaacaataaatgactcaaaccagatatgactgacggttaccttccagattggctagaggacaacctctctgaaggcgttcgagagtggtgggcgctgcaacctggagcccctaaacccaaggcaaatcaacaacatcaggacaacgctcggggtcttgtgcttccgggttacaaatacctcggacccggcaacggactcgacaagggggaacccgtcaacgcagcggacgcggcagccctcgagcacgacaaggcctacgaccagcagctcaaggccggtgacaacccctacctcaagtacaaccacgccgacgcggagttccagcagcggcttcagggcgacacaccgtttgggggcaacctcggcagagcagtcttccaggccaaaaagagggttcttgaacctcttggtctggttgagcaagcgggtgagacggctcctggaaagaagagaccgttgattgaatccccccagcagcccgactcctccacgggtatcggcaaaaaaggcaagcagccggctaaaaagaagctcgttttcgaagacgaaactggagcaggcgacggaccccctgagggatcaacttccggagccatgtctgatgacagtgagatgcgtgcagcagctggcggagctgcagtcgagggsggacaaggtgccgatggagtgggtaatgcctcgggtgattggcattgcgattccacctggtctgagggccacgtcacgaccaccagcaccagaacctgggtcttgcccacctacaacaaccacctntacaagcgactcggagagagcctgcagtccaacacctacaacggattctccaccccctggggatactttgacttcaaccgcttccactgccacttctcaccacgtgactggcagcgactcatcaacaacaactggggcatgcgacccaaagccatgcgggtcaaaatcttcaacatccaggtcaaggaggtcacgacgtcgaacggcgagacaacggtggctaataaccttaccagcacggttcagatctttgcggactcgtcgtacgaactgccgtacgtgatggatgcgggtcaagagggcagcctgcctccttttcccaacgacgtctttatggtgccccagtacggctactgtggactggtgaccggcaacacttcgcagcaacagactgacagaaatgccttctactgcctggagtactttccttcgcagatgctgcggactggcaacaactttgaaattacgtacagttttgagaaggtgcctttccactcgatgtacgcgcacagccagagcctggaccggctgatgaaccctctcatcgaccagtacctgtggggactgcaatcgaccaccaccggaaccaccctgaatgccgggactgccaccaccaactttaccaagctgcggcctaccaacttttccaactttaaaaagaactggctgcccgggccttcaatcaagcagcagggcttctcaaagactgccaatcaaaactacaagatccctgccaccgggtcagacagtctcatcaaatacgagacgcacagcactctggacggaagatggagtgccctgacccccggacctccaatggccacggctggacctgcggacagcaagttcagcaacagccagctcatctttgcggggcctaaacagaacggcaacacggccaccgtacccgggactctgatcttcacctctgaggaggagctggcagccaccaacgccaccgatacggacatgtggggcaacctacctggcggtgaccagagcaacagcaacctgccgaccgtggacagactgacagccttgggagccgtgcctggaatggtctggcaaaacagagacatttactaccagggtcccatttgggccaagattcctcataccgatggacactttcacccctcaccgctgattggtgggtttgggctgaaacacccgcctcctcaaatttttatcaagaacaccccggtacctgcgaatcctgcaacgaccttcagctctactccggtaaactccttcattactcagtacagcactggccaggtgtcggtgcagattgactgggagatccagaaggagcggtccaaacgctggaaccccgaggtccagtttacctccaactacggacagcaaaactctctgttgtgggctcccgatgcggctgggaaatacactgagcctagggctatcggtacccgctacctcacccaccacctgtaataacctgttaatcaataaaccggtttattcgtttcagttgaactttggtctccgtgtccttcttatcttatctcgtttccatggctactgcgtacataagcagcggcctgcggcgcttgcgcttcgcggtttacaactgccggttaatcagtaacttctggcaaaccatgatgatggagttggccactccctctatgcgcgctcgctcactcactcggccctggagaccaaaggtctccagactgccggcctctggccggcagggccgagtgagtgagcgagcgcgcatagagggagtggccaa

SEQ ID NO: 62 - DNA, 3098 bp, Adeno-associated virus
gaattcgccctttctacggctgcgtcaactggaccaatgagaactttcccttcaacgattgcgtcgacaagatggtgatctggtgggaggagggcaagatgacggccaaggtcgtggagtccgccaaggccattctcggcggcagcaaggtgcgcgtggaccaaaagtgcaagtcttccgcccagatcgatcccacccccgtgatcgtcacttccaacaccaacatgtgcgctgtgattgacgggaacagcaccaccttcgagcaccagcagccgttacaagaccggatgttcaaatttgaactcacccgccgtctggagcacgactttggcaaggtgacaaagcaggaagtcaaagagttcttccgctgggcgcaggatcacgtgaccgaggtggcgcatgagttctacgtcagaaagggtggagccaacaagagacccgcccccgatgacgcggataaaagcgagcccaagcgggcctgcccctcagtcgcggatccatcgacgtcagacgcggaaggagctccggtggactttgccgacaggtaccaaaacaaatgttctcgtcacgcgggcatgcttcagatgctgtttccctgcaagacatgcgagagaatgaatcagaatttcaacatttgcttcacgcacgggaccagagactgttcagaatgtttccccggcgtgtcagaatctcaaccggtcgtcagaaagaggacgtatcggaaactctgtgccattcatcatctgctggggcgggctcccgagattgcttgctcggcctgcgatctggtcaacgtggacctggatgaccgtgtttctgagcaataaatgacttaaaccaggtatggctgccgatggttatcttccagattggctcgaggacaacctctctgagggcattcgcgagtggtgggacttgaaacctggagccccgaaacccaaagccaaccagcaaaagcaggacgacggccggggtctggtgcttcctggctacaagtacctcggacccttcaacggactcgacaagggagagccggtcaacgaggcagacgccgcggccctcgagcacgacaaggcctacgacaagcagctcgagcagggggacaacccgtacctcaagtacaaccacgccgacgccgagtttcaggagcgtcttcaagaagatacgtcttttgggggcaacctcgggcgagcagtcttccaggccaagaagcgggttctcgaacctctcggtctggttgaggaaggcgctaagacggctcctggaaagaagagacccatagaatcccccgactcctccacgggcatcggcaagaaaggccagcagcccgctaaaaagaagctcaactttgggcagactggcgactcagagtcagtgcccgacccccaacctctcggagaacctcccgccgcgccctcaggtctgggatctggtacaatggctgcaggcggtggcgcaccaatggcagacaataacgaaggcgccgacggagtgggtaatgcctccggaaattggcattgcgattccacatggctgggcgacagagtcatcaccaccagcacccgcacctgggccctgcccacctacaacaaccacctctacaagcagatatcaagtcagagcggggctaccaacgacaaccacttcttcggctacagcaccccctggggctattttgacttcaacagattccactgccacttctcaccacgtgactggcagcgactcatcaacaacaactggggattccggcccagaaagctgcggttcaagttgttcaacatccaggtcaaggaggtcacgacgaacgacggcgttacgaccatcgctaataaccttaccagcacgattcaggtcttctcggactcggagtaccaactgccgtacgtcctcggctctgcgcaccagggctgcctccctccgttccctgcggacgtgttcatgattcctcagtacggatatctgactctaaacaacggcagtcagtctgtgggacgttcctccttctactgcctggagtactttccttctcagatgctgagaacgggcaataactttgaattcagctacacctttgaggaagtgcctttccacagcagctatgcgcacagccagagcctggaccggctgatgaatcccctcatcgaccagtacctgtactacctggcccggacccagagcactacggggtccacaagggagctgcagttccatcaggctgggcccaacaccatggccgagcaatcaaagaactggctgcccggaccctgttatcggcagcagagactgtcaaaaaacatagacagcaacaacaacagtaactttgcctggaccggggccactaaataccatctgaatggtagaaattcattaaccaacccgggcgtagccatggccaccaacaaggacgacgaggaccagttctttcccatcaacggagtgctggtttttggcgaaacgggggctgccaacaagacaacgctggaaaacgtgctaatgaccagcgaggaggagatcaaaaccaccaatcccgtggctacagaagaatacggtgtggtctccagcaacctgcaatcgtctacggccggaccccagacacagactgtcaacagccagggggctctgcccggcatggtctggcagaaccgggacgtgtacctgcagggtcccatctgggccaaaattcctcacacggacggcaactttcacccgtctcccctgatgggcggatttggactcaaacacccgcctcctcaaattctcatcaaaaacaccccggtacctgctaatcctccagaggtgtttactcctgccaagtttgcctcatttatcacgcagtacagcaccggccaggtcagcgtggagatcgagtgggaactgcagaaagaaaacagcaaacgctggaatccagagattcagtacacctcaaattatgccaagtctaataatgtggaatttgctgtcaacaacgaaggggtttatactgagcctcgccccattggcacccgttacctcacccgtaacctgtaattgcctgttaatcaataaaccggttaattcgtttcagttgaactttggtctctgcgaagggcgaattc

SEQ ID NO: 63 - protein, 728 aa, Artificial Sequence
  source: /note="Description of Artificial Sequence: Synthetic polypeptide"
MAADGYLPDWLEDNLSEGIREWWDLKPGAPKPKANQQKQDDGRGLVLPGYKYLGPFNGLDKGEPVNEADAAALEHDKAYDKQLEQGDNPYLKYNHADAEFQERLQEDTSFGGNLGRAVFQAKKRVLEPLGLVEEGAKTAPGKKRPIESPDSSTGIGKKGQQPAKKKLNFGQTGDSESVPDPQPLGEPPAAPSGLGSGTMAAGGGAPMADNNEGADGVGNASGNWHCDSTWLGDRVITTSTRTWALPTYNNHLYKQISSQSGATNDNHFFGYSTPWGYFDFNRFHCHFSPRDWQRLINNNWGFRPRKLRFKLFNIQVKEVTTNDGVTTIANNLTSTIQVFSDSEYQLPYVLGSAHQGCLPPFPADVFMIPQYGYLTLNNGSQSVGRSSFYCLEYFPSQMLRTGNNFEFSYTFEEVPFHSSYAHSQSLDRLMNPLIDQYLYYLARTQSTTGSTRELQFHQAGPNTMAEQSKNWLPGPCYRQQRLSKNIDSNNNSNFAWTGATKYHLNGRNSLTNPGVAMATNKDDEDQFFPINGVLVFGETGAANKTTLENVLMTSEEEIKTTNPVATEEYGVVSSNLQSSTAGPQTQTVNSQGALPGMVWQNRDVYLQGPIWAKIPHTDGNFHPSPLMGGFGLKHPPPQILIKNTPVPANPPEVFTPAKFASFITQYSTGQVSVEIEWELQKENSKRWNPEIQYTSNYAKSNNVEFAVNNEGVYTEPRPIGTRYLTRNL

SEQ ID NO: 64 - DNA, 2495 bp, Adeno-associated virus
gaattcgccctttctacggctgcgtcaactagaccaatgagaactttcccttcaacgattgcgtcgacaagatggtgatctggtgggaggagggcaagatgacggccaaggtcgtggagtccgccaaggccattcatcatctgctggggcgggctcccgagattgcttgctcggcctgcgatctggtcaacgtggacctggatgactgtgtttctgagcaataaatgacttaaaccaggtatggctgccgatggttatcttccagattggctcgaggacaacctctctgagggcattcgcgagtggtgggacttgaaacctggagccccgaaacccaaagccaaccagcaaaagcaggacgacggccggggtctggtgcttcctggctacaagtacctcggacccttcaacggactcgacaagggagagccggtcaacgaggcagacgccgcggccctcgagcacgacaaggcctacgacaagcagctcgagcagggggacaacccgtacctcaagtacaaccacgccgacgccgagtttcaggagcgtcttcaagaagatacgtcttttgggggcaacctcgggcgagcagtcttccaggccaagaagcgggttctcgaacctctcggtctggttgaggaaggcgctaagacggctcctggaaagaagagacccatagaatcccccgactcctccacgggcatcggcaagaaaggccagcagcccgctaaaaagaagctcaactttgggcagactggcgactcagagtcagtgcccgaccctcaaccaatcggagaaccccccgcaggcccctctggtctgggatctggtacaatggctgcaggcggtggcgctccaatggcagacaataacgaaggcgccgacggagtgggtaatgcctccggaaattggcattgcgattccacatggctgggcgacagagtcatcaccaccagcacccgcacctgggccctgcccacctacaacaaccacctctacaagcagatatcaagtcagagcggggctaccaacgacaaccacttcttcggctacagcaccccctggggctattttgacttcaacagattccactgccacttctcaccacgtgactggcagcgactcatcaacaacaactggggattccggcccagaaagctgcggttcaagttgttcaacatccaggtcaaggaggtcacgacgaacgacggcgttacgaccatcgctaataaccttaccagcacgattcaggtcttctcggactcggagtaccaactgccgtacgtcctcggctctgcgcaccagggctgcctccctccgttccctgcggacgtgttcatgattcctcagtacggatatctgactctaaacaacggcagtcagtctgtgggacgttcctccttctactgcctggagtactttccttctcagatgctgagaacgggcaataactttgaattcagctacacctttgaggaagtgcctttccacagcagctatgcgcacagccagagcctggaccggctgatgaatcccctcatcgaccagtacctgtactacctggcccggacccagagcactacggggtccacaagggagctgcagttccatcaggctgggcccaacaccatggccgagcaatcaaagaactggctgcccggaccctgttatcggcagcagagactgtcaaaaaacatagacagcaacaacaccagtaactttgcctggaccggggccactaaataccatctgaatggtagaaattcattaaccaacccgggcgtagccatggccaccaacaaggacgacgaggaccagttctttcccatcaacggagtgctggtttttggcaaaacgggggctgccaacaagacaacgctggaaaacgtgctaatgaccagcgaggaggagatcaaaaccaccaatcccgtggctacagaacagtacggtgtggtctccagcaacctgcaatcgtctacggccggaccccagacacagactgtcaacagccagggggctctgcccggcatggtctggcagaaccgggacgtgtacctgcagggtcccatctgggccaaaattcctcacacggacggcaactttcacccgtctcccctgatgggcggatttggactcaaacacccgcctcctcaaattctcatcaaaaacaccccggtacctgctaatcctccagaggtgtttactcctgccaagtttgcctcatttatcacgcagtacagcaccggccaggtcagcgtggagatcgagtgggaactgcagaaagaaaacagcaaacgctggaatccagagattcagtacacctcaaattatgccaagtctaataatgtggaatttgctgtcaacaacgaaggggtttatactgagcctcgccccattggcacccgttacctcacccgtaacctgtaattgcctgttaatcaataaaccggttaattcgtttcagttgaactttggtctctgcgaagggcgaattc

SEQ ID NO: 65 - protein, 728 aa, Artificial Sequence
  source: /note="Description of Artificial Sequence: Synthetic polypeptide"
MAADGYLPDWLEDNLSEGIREWWDLKPGAPKPKANQQKQDDGRGLVLPGYKYLGPFNGLDKGEPVNEADAAALEHDKAYDKQLEQGDNPYLKYNHADAEFQERLQEDTSFGGNLGRAVFQAKKRVLEPLGLVEEGAKTAPGKKRPIESPDSSTGIGKKGQQPAKKKLNFGQTGDSESVPDPQPIGEPPAGPSGLGSGTMAAGGGAPMADNNEGADGVGNASGNWHCDSTWLGDRVITTSTRTWALPTYNNHLYKQISSQSGATNDNHFFGYSTPWGYFDFNRFHCHFSPRDWQRLINNNWGFRPRKLRFKLFNIQVKEVTTNDGVTTIANNLTSTIQVFSDSEYQLPYVLGSAHQGCLPPFPADVFMIPQYGYLTLNNGSQSVGRSSFYCLEYFPSQMLRTGNNFEFSYTFEEVPFHSSYAHSQSLDRLMNPLIDQYLYYLARTQSTTGSTRELQFHQAGPNTMAEQSKNWLPGPCYRQQRLSKNIDSNNTSNFAWTGATKYHLNGRNSLTNPGVAMATNKDDEDQFFPINGVLVFGKTGAANKTTLENVLMTSEEEIKTTNPVATEQYGVVSSNLQSSTAGPQTQTVNSQGALPGMVWQNRDVYLQGPIWAKIPHTDGNFHPSPLMGGFGLKHPPPQILIKNTPVPANPPEVFTPAKFASFITQYSTGQVSVEIEWELQKENSKRWNPEIQYTSNYAKSNNVEFAVNNEGVYTEPRPIGTRYLTRNL

SEQ ID NO: 66 - DNA, 2504 bp, Adeno-associated virus
gaattcgccctttctacggctgcgtcaactggaccaatgagaactttcccttcaacgattgcgtcgacaagatggtgatctggtgggaggagggcaagatgacggccaaggtcgtggagtccgccaaggccattcatcatctgctggggcgggctcccgagattgcttgctcggcctgcgatctggtcaacgtggacctggatgactgtgtttctgagcaataaatgacttaaaccaggtatggctgccgatggttatcttccagattggctcgaggacaacctctctgagggcattcgcgagtggtgggacttgaaacctggagccccgaaacccaaagccaaccagcaaaagcaggacgacggccggggtctggtgcttcctggctacaagtacctcggacccttcaacggactcgacaagggagagccggtcaacgaggcagacgccgcggccctcgagcacgacaaggcctacgacaagcagctcgagcagggggacaacccgtacctcaagtacaaccacgccgacgccgagtttcaggagcgtcttcaagaagatacgtcttttgggggcaacctcgggcgagcagtcttccaggccaagaagcgggttctcgaacctctcggtctggttgaggaaggcgctaagacggctcctggaaagaagagacccatagaatcccccgactcctccacgggcatcggcaagaaaggccagcagcccgctaaaaagaagctcaactttgggcagactggcgactcagagtcagtgcccgaccctcaaccaatcggagaaccccccgcaggcccctctggtctgggatctggtacaatggctgcaggcggtggcgctccaatggcagacaataacgaaggcgccgacggagtgggtaatgcctccggaaattggcattgcgattccacatggctgggcgacagagtcatcaccaccagcacccgcacctgggccctgcccacctacaacaaccacctctacaagcagatatcaagtcagagcggggctaccaacgacaaccacttcttcggctacagcaccccctggggctattttgacttcaacagattccactgccacttctcatcacgtgactggcagcgactcatcaacaacaactggggattccggcccaagagactcaacttcaagctcttcaacatccaggtcaaggaggtcacgcagaatgaaggcaccaagaccatcgccaataaccttaccagcacgattcaggtctttacggactcggaataccggctcccgtacgtcctcggctctgcgcaccagggctgcctgcctccgttcccggcggacgtcttcatgattcctcagtacgggtacctgactctgaacaacggcagtcaggccgtgggccgttcctccttctactgcctggagtactttccttctcaaatgctgagaacgggcaacaactttgagttcagctaccagtttgaggacgtgccttttcacagcagctacgcgcacagccaaagcctggaccggctgatgaaccccctcatcgaccagtacctgtactacctgtctcggactcagtccacgggaggtaccgcaggaactcagcagttgctattttctcaggccgggcctaataacatgtcggctcaggccaaaaactggctacccgggccctgctaccggcagcaacgcgtctccacgacactgtcgcaaaataacaacagcaactttgcttggaccggtgccaccaagtatcatctgaatggcagagactctctggtaaatcccggtgtcgctatggcaacgcacaaggacgacgaagagcgattttttccatccagcggagtcttgatgtttgggaaacagggagctggaaaagacaacgtggactatagcagcgttatgctaaccagtgaggaagaaatcaaaaccaccaacccagtggccacagaacagtacggcgtggtggccgataacctgcaacagcaaaacgccgctcctattgtaggggccgtcaacagtcaaggagccttacctggcatggtctggcagaaccgggacgtgtacctgcagggtcctatctgggccaagattcctcacacggacggcaactttcatccttcgccgctgatgggaggctttggactgaaacacccgcctcctcagatcctgattaagaatacacctgttcccgcggatcctccaactaccttcagtcaagccaagccggcgtcgttcatcacgcagtacagcaccggacaggtcagcgtggaaattgaatgggagctgcagaaagagaacagcaagcgctggaacccagagattcagtatacttccaactactacaaatctacaaatgtggactttgctgtcaatactgagggtacttattcagagcctcgccccattggcacccgttacctcacccgtaacctgtaattgcctgttaatcaataaaccggttaattcgtttcagttgaactttggtctctgcgaagggcgaattc

SEQ ID NO: 67 - protein, 731 aa, Artificial Sequence
  source: /note="Description of Artificial Sequence: Synthetic polypeptide"
MAADGYLPDWLEDNLSEGIREWWDLKPGAPKPKANQQKQDDGRGLVLPGYKYLGPFNGLDKGEPVNEADAAALEHDKAYDKQLEQGDNPYLKYNHADAEFQERLQEDTSFGGNLGRAVFQAKKRVLEPLGLVEEGAKTAPGKKRPIESPDSSTGIGKKGQQPAKKKLNFGQTGDSESVPDPQPIGEPPAGPSGLGSGTMAAGGGAPMADNNEGADGVGNASGNWHCDSTWLGDRVITTSTRTWALPTYNNHLYKQISSQSGATNDNHFFGYSTPWGYFDFNRFHCHFSSRDWQRLINNNWGFRPKRLNFKLFNIQVKEVTQNEGTKTIANNLTSTIQVFTDSEYRLPYVLGSAHQGCLPPFPADVFMIPQYGYLTLNNGSQAVGRSSFYCLEYFPSQMLRTGNNFEFSYQFEDVPFHSSYAHSQSLDRLMNPLIDQYLYYLSRTQSTGGTAGTQQLLFSQAGPNNMSAQAKNWLPGPCYRQQRVSTTLSQNNNSNFAWTGATKYHLNGRDSLVNPGVAMATHKDDEERFFPSSGVLMFGKQGAGKDNVDYSSVMLTSEEEIKTTNPVATEQYGVVADNLQQQNAAPIVGAVNSQGALPGMVWQNRDVYLQGPIWAKIPHTDGNFHPSPLMGGFGLKHPPPQILIKNTPVPADPPTTFSQAKPASFITQYSTGQVSVEIEWELQKENSKRWNPEIQYTSNYYKSTNVDFAVNTEGTYSEPRPIGTRYLTRNL

SEQ ID NO: 68 - DNA, 3128 bp, Adeno-associated virus
gaattcgccctttctacggctgcgtcaactggaccaatgagaactttcccttcaacgattgcgtcgacaagatggtgatctggtgggaggagggcaagatgacggccaaggtcgtggagtccgccaaggccattctcggcggcagcaaggtgcgcgtggaccaaaagtgcaagtcttccgcccagatcgatcccacccccgtgatcgtcacttccaacaccaacatgtgcgccgtgattgacgggaacagcaccaccttcgagcaccagcagccgttacaagaccggatgttcaaatttgaactcacccgccgtctggagcacgactttggcaaggtgacaaagcaggaagtcaaagagttcttccgctgggcgcaggatcacgtgaccgaggtggcgcatgagttctacgtcagaaagggtggagccaacaagagacccgcccccgatgacgcggataaaagcgagcccaagcgggcctgcccctcagtcgcggatccatcgacgtcagacgcggaaggagctccggtggactttgccgacaggtaccaaaacaaatgttctcgtcacgcgggcatgcttcagatgctgtttccctgcaagacatgcgagagaatgaatcagaatttcaacatttgcttcacgcacgggaccagagactgttcagaatgtttccccggcgtgtcagaatctcaaccggtcgtcagaaagaggacgtatcggaaactctgtgccattcatcatctgctagggcgggctcccgagattgcttgctcggcctgcgatctggtcaacgtggacctggatgactgtgtttctgagcaataaatgacttaaaccaggtatggctgccgatggttatcttccagattggctcgaggacaacctctctgagggcattcgcgagtggtgggacttgaaacctggagccccgaaacccaaagccaaccagcaaaagcaggacgacggccggggtctggtgcttcctggctacaagtacctcggacccttcaacggactcgacaagggggagcccgtcaacgcggcggacgcagcggccctcgagcacgacaaggcctacgaccagcagctcaaagcgggtgacaatccgtacctgcggtataaccacgccgacgccgagtttcaggagcgtctgcaagaagatacgtcttttgggggcaacctcgggcgagcagtcttccaggccaagaagcgggttctcgaacctctcggtctggttgaggaaggcgctaagacggctcctggaaagaagagaccggtagagccatcaccccagcgttctccagactcctctacgggcatcggcaagacaggccagcagcccgcgaaaaagagactcaactttgggcagactggcgactcagagtcagtgcccgaccctcaaccaatcggagaaccccccgcaggcccctctggtctgggatctggtacaatggctgcaggcggtggcgctccaatggcagacaataacgaaggcgccgacggagtgggtagttcctcaggaaattggcattgcgattccacatggctgggcgacagagtcatcaccaccagcacccgaacctgggccctccccacctacaacaaccacctctacaagcaaatctccaacgggacatcgggaggaagcaccaacgacaacacctacttcggctacagcaccccctgggggtattttgactttaacagattccactgccacttctcaccacgtgactggcagcgactcatcaacaacaactggggattccggcccaagagactcaacttcaagctcttcaacatccaggtcaaggaggtcacgcagaatgaaggcaccaagaccatcgccaataaccttaccagcacgattcaggtctttacggactcggaataccagctcccgtacgtcctcggctctgcgcaccagggctgcctgcctccgttcccggcggacgtcttcatgattcctcagtacgggtacctgactctgaacaacggcagtcaggccgtgggccgttcctccttctactgcctggagtactttccttctcaaatgctgagaacgggcaacaactttgagttcagctaccagtttgaggacgtgccttttcacagcagctacgcgcacagccaaagcctggaccggctgatgaaccccctcatcgaccagtacctgtactacctgtctcggactcagtccacgggaggtaccgcaggaactcagcagttgctattttctcaggccgggcctaataacatgtcggctcaggccaaaaactggctacccgggccctgctaccggcagcaacgcgtctccacgacactgtcgcaaaataacaacagcaactttgcttggaccggtgccaccaagtatcatctgaatggcagagactctctggtaaatcccggtgtcgctatggcaacgcacaaggacgacgaagagcgattttttccatccagcggagtcttgatgtttgggaaacagggagctggaaaagacaacgtggactatagcagcgttatgctaaccagtgaggaagaaatcaaaaccaccaacccagtggccacagaacagtacggcgtggtggccgataacctgcaacagcaaaacgccgctcctattgtaggggccgtcaacagtcaaggagccttacctggcatggtctggcagaaccgggacgtgtacctgcagggtcctatctgggccaagattcctcacacggacggcaactttcatccttcgccgctgatgggaggctttggactgaaacacccgcctcctcagatcctgattaagaatacacctgttcccgcggatcctccaactaccttcagtcaagccaagctggcgtcgttcatcacgcagtacagcaccggacaggtcagcgtggaaattgaatgggagctgcagaaagagaacagcaagcgctggaacccagagattcagtatacttccaactactacaaatctacaaatgtggactttgctgtcaatactgagggtacttattcagagcctcgccccattggcacccgttacctcacccgtaacctgtaattgcctgttaatcaataaaccggctaattcgtttcagttgaactttggtctctgcgaagggcgaattc

SEQ ID NO: 69 - protein, 738 aa, Artificial Sequence
  source: /note="Description of Artificial Sequence: Synthetic polypeptide"
MAADGYLPDWLEDNLSEGIREWWDLKPGAPKPKANQQKQDDGRGLVLPGYKYLGPFNGLDKGEPVNAADAAALEHDKAYDQQLKAGDNPYLRYNHADAEFQERLQEDTSFGGNLGRAVFQAKKRVLEPLGLVEEGAKTAPGKKRPVEPSPQRSPDSSTGIGKTGQQPAKKRLNFGQTGDSESVPDPQPIGEPPAGPSGLGSGTMAAGGGAPMADNNEGADGVGSSSGNWHCDSTWLGDRVITTSTRTWALPTYNNHLYKQISNGTSGGSTNDNTYFGYSTPWGYFDFNRFHCHFSPRDWQRLINNNWGFRPKRLNFKLFNIQVKEVTQNEGTKTIANNLTSTIQVFTDSEYQLPYVLGSAHQGCLPPFPADVFMIPQYGYLTLNNGSQAVGRSSFYCLEYFPSQMLRTGNNFEFSYQFEDVPFHSSYAHSQSLDRLMNPLIDQYLYYLSRTQSTGGTAGTQQLLFSQAGPNNMSAQAKNWLPGPCYRQQRVSTTLSQNNNSNFAWTGATKYHLNGRDSLVNPGVAMATHKDDEERFFPSSGVLMFGKQGAGKDNVDYSSVMLTSEEEIKTTNPVATEQYGVVADNLQQQNAAPIVGAVNSQGALPGMVWQNRDVYLQGPIWAKIPHTDGNFHPSPLMGGFGLKHPPPQILIKNTPVPADPPTTFSQAKLASFITQYSTGQVSVEIEWELQKENSKRWNPEIQYTSNYYKSTNVDFAVNTEGTYSEPRPIGTRYLTRNL

SEQ ID NO: 70 - DNA, 3084 bp, Adeno-associated virus
gaattcgccctttctacggctgcatcaactggaccaatgagaactttcccttcaacgattgcgtcgacaagatggtgatctggtgggaggagggcaagatgacggccaaggtcgtggagtccgccaaggccattctcggcggcagcaaggtgcgcgtggaccaaaagtgcaagtcgtccgcccagatcgaccccacccccgtgatcgtcacctccaacaccaacatgtgcgccgtgattgacgggaacagcaccaccttcgagcaccagcagccgttgcaggaccggatgttcaagttcgaactcacccgccgtctggagcacgactttggcaaggtgaccaagcaggaagtcaaagagttcttccgctgggcgcaggatcacgtgaccgaggtggcgcatgagttctacgtcagaaagggcggagccagcaaaagacccgcccccgatgacgcggatataagcgagcccaagcgggcctgcccctcagtcgcggatccatcgacgtcagacgcggaaggagctccggtggactttgccgacaggtaccaaaacaaatgttctcgtcacgcgggcatgcttcagatgctgtttccctgcaaaacgtgcgagaaaatgaatcagaatttcaacatttgcttcacgcacggggtcagagactgctcagaatgtttccccggtgcatcagaatctcaaccggtcgtcagaaaaaaaacgtatcagaaactgtgtgccattcatcatctgctggggcgggcacccgagattgcttgctcggcctgcgatctggtcaacgtggacctggacgactgtgtttctgagcaataaatgacttaaaccaggtatggctgccgatggttatcttccagattggcttgaggacaacctctctgagggcattcgcgagtggtgggacctgaaacctggagccccgaaacccaaagccaaccagcaaaagcaggacgacggccggggtctggtgcttcctggctacaagtacctcggacccttcaacggactcgacaagggggagcccgtcaacgcggcggacgcagcggccctcgagcacgacaaggcctacgaccagcagctcaaagcgggtgacaatccgtacctgcggtataaccacgccgacgccgagtttcaggagcgtctgcaagaagatacgtcttttgggggcaacctcgggcgagcagtcttccaggccaagaagcgggttctcgaacctctcggtctggttgaggaaggcgctaagacggctcctggaaagaagagaccggtagagccatcacctcagcgttcccccgactcctccacgggcatcggcaagaaaggccaccagcccgcgagaaagagactgaactttgggcagactggcgactcggagtcagtccccgaccctcaaccaatcggagaaccaccagcaggcccctctggtctgggatctggtacaatggctgcaggcggtggcgctccaatggcagacaataacgaaggcgccgacggagtgggtagttcctcaggaaattggcattgcgattccacatggctgggcgacagagtcatcaccaccagcacccgaacctgggccctgcccacctacaacaaccatctctacaagcaaatctccaacgggacatcgggaggaagcactaacgacaacacctactttggctacagcaccccctgggggtattttgacttcaacagattccactgccacttctcaccacgtgactggcagcgactcatcaacaataactggggattccggcccaagagactcaacttcaagctcttcaacatccaggtcaaggaggtcacgcagaatgaaggcaccaagaccatcgccaataaccttaccagcacgattcaggtgtttacggactcggaataccagctcccgtacgtccccggctctgcgcaccagggctgcctccctccgttcccggcggacgtcttcatgattcctcagtacgggtatctgaccctaaacaatggcagtcaggctgtgggccgttcctccttctactgcctggaatacttcccttctcaaatgctgaggacgggcaacaactttgaattcagctacaccttcgaggacgtgcctttccacagcagctacgcgcacagccagagcctggaccggctgatgaaccctctcatcgaccagtacctgtattacttatccagaactcagtccacaggaggaactcaaggtactcagcaattgttattttctcaagccgggcccgcaaacatgtcggctcaggccaagaactggctacctggaccgtgttaccgtcagcaacgagtttccacgacactgtcgcaaaacaacaacagcaattttgcttggaccggtgccaccaagtatcacctgaatggcagagactccctggttaatcccggcgttgccatggctacccacaaggacgacgaggagcgcttcttcccgtcaagcggagttctaatgtttggcaagcagggggctggaaaagacaatgtggactacagcagcgtgatgctcaccagcgaagaagaaattaaaactactaacccagtggctacagagcagtatggtgtggtggcagacaacctgcagcagaccaacggagctcccattgtgggaactgtcaacagccagggggccttacctggtatggtctggcaaaaccgggacgtgtacctgcagggccccatctgggccaaaattcctcacacggacggcaactttcatccttcgccgctgatgggaggctttggactgaaacacccgcctcctcagatcctggtgaaaaacactcctgttcctgcggatcctccgaccaccttcagccaggccaagctggcttcttttatcacgcagtacagcaccggacaggtcagcgtggaaatcgaatgggagctgcagaaagaaaacagcaagcgctggaacccagagattcagtatacttccaactactacaaatctacaaatgtggactttgctgtcaatactgagggtacttattcagagcctcgccccattggcactcgttatctcacccgtaatctgtaattgcttgttaatcaataaaccggt

SEQ ID NO: 71 - protein, 738 aa, Artificial Sequence
  source: /note="Description of Artificial Sequence: Synthetic polypeptide"
MAADGYLPDWLEDNLSEGIREWWDLKPGAPKPKANQQKQDDGRGLVLPGYKYLGPFNGLDKGEPVNAADAAALEHDKAYDQQLKAGDNPYLRYNHADAEFQERLQEDTSFGGNLGRAVFQAKKRVLEPLGLVEEGAKTAPGKKRPVEPSPQRSPDSSTGIGKKGHQPARKRLNFGQTGDSESVPDPQPIGEPPAGPSGLGSGTMAAGGGAPMADNNEGADGVGSSSGNWHCDSTWLGDRVITTSTRTWALPTYNNHLYKQISNGTSGGSTNDNTYFGYSTPWGYFDFNRFHCHFSPRDWQRLINNNWGFRPKRLNFKLFNIQVKEVTQNEGTKTIANNLTSTIQVFTDSEYQLPYVPGSAHQGCLPPFPADVFMIPQYGYLTLNNGSQAVGRSSFYCLEYFPSQMLRTGNNFEFSYTFEDVPFHSSYAHSQSLDRLMNPLIDQYLYYLSRTQSTGGTQGTQQLLFSQAGPANMSAQAKNWLPGPCYRQQRVSTTLSQNNNSNFAWTGATKYHLNGRDSLVNPGVAMATHKDDEERFFPSSGVLMFGKQGAGKDNVDYSSVMLTSEEEIKTTNPVATEQYGVVADNLQQTNGAPIVGTVNSQGALPGMVWQNRDVYLQGPIWAKIPHTDGNFHPSPLMGGFGLKHPPPQILVKNTPVPADPPTTFSQAKLASFITQYSTGQVSVEIEWELQKENSKRWNPEIQYTSNYYKSTNVDFAVNTEGTYSEPRPIGTRYLTRNL

SEQ ID NO: 72 - DNA, 3123 bp, Adeno-associated virus
gaattcgcccttggctgcgtcaactggaccaatgagaactttcccttcaacgattgcgtcgacaagatggtgatctggtgggaggagggcaagatgacggccaaggtcgtggagtccgccaaggccattctcggcggcagcaaggtgcgcgtggaccaaaagtgcaagtcgtccgcccagatcgaccccacccccgtgatcgtcacctccaacaccaacatgtgcgccgtgattgacgggaacagcaccaccttcgagcaccagcagccgttgcaggaccggatgttcaagttcgaactcacccgccgtctggagcacgactttggcaaggtgaccaagcaggaagtcaaagagttcttccgctgggcgcaggatcacgtgaccgaggtggcgcatgagttctacgtcagaaagggcggagccagcaaaagacccgcccccgatgacgcggatataagcgagcccaagcgggcctgcccctcagtcgcggatccatcgacgtcagacgcggaaggagctccggtggactttgccgacaggtaccaaaacaaatgttctcgtcacgcgggcatgctccagatgctgtttccctgcaaaacgtgcgagagaatgaatcagaatttcaacatttgcttcacgcacggggtcagagactgctcagaatgtttccccggtgcatcagaatctcaaccggtcgtcagaaaaaaaacgtatcagaaactgtgtgccattcatcatctgctggggcgggcacccgagattgcttgctcggcctgcgatctggtcaacgtggacctggacgactgtgtttctgagcaataaatgacttaaaccaggtatggctgccgatggttatcttccagattggcttgaggacaacctctctgagggcattcgcgagtggtgggacctgaaacctggagccccgaaacccaaagccaaccagcaaaagcaggacgacggccggggtctggtgcttcctggctacaagtacctcggacccttcaacggactcgacaagggggagcccgtcaacgcggcggacgcagcggccctcgagcacgacaaggcctacgaccagcagctcaaagcgggtgacaatccgtacctgcggtataaccacgccgacgccgagtttcaggagcgtctgcaagaagatacgtcttttgggggcaacctcgggcgagcagtcttccaggccaagaagcgggttctcgaacctctcggtctggttgaggaaggcgctaagacggctcctggaaagaagagaccggtagagccatcacctcagcgttcccccgactcctccacgggcatcggcaagaaaggccaccagcccgcgagaaagagactgaactttgggcagactggcgactcggagtcagtccccgaccctcaaccaatcggagaaccaccagcaggcccctctggtctgggatctggtacaatggctgcaggcggtggcgctccaatggcagacaataacgaaggcgccgacggagtgggtagttcctcaggaaattggcattgcgattccacatggctgggcgacagagtcatcaccaccagcacccgaacctgggccctgcccacctacaacaaccatctctacaagcaaatctccaacgggacatcgggaggaagcactaacgacaacacctactttggctacagcaccccctgggggtattttgacttcaacagattccactgccacttctcaccacgtgactggcagcgactcatcaacaataactggggattccggcccaagagactcaacttcaagctcttcaacatccaggtcaaggaggtcacgcagaatgaaggcaccaagaccatcgccaataaccttaccagcacgattcaggtgtttacggactcggaataccagctcccgtacgtcctcggctctgcgcaccagggctgcctccctccgttcccggcggacgtcttcatgattcctcagtacgggtatctgaccctaaacaatggcagtcaggctgtgggccgttcctccttctactgcctggaatacttcccttctcaaatgctgaggacgggcaacaactttgaattcagctacaccttcgaggacgtgcctttccacagcagctacgcgcacagccagagcctggaccggctgatgaaccctctcatcgaccagtacctgtattacttatccagaactcagtccacaggaggaactcaaggtactcagcaattgttattttctcaagccgggcccgcaaacatgtcggctcaggccaagaactggctacctggaccgtgttaccgtcagcaacgagtttccacgacactgtcgcaaaacaacaacagcaattttgcttggaccggtgccaccaagtatcacctgaatggcagagactccctggttaatcccggcgttgccatggctacccacaaggacgacgaggagcgcttcttcccgtcaagcggagttctaatgtttggcaagcagggggctggaaaagacaatgtggactacagcagcgtgatgctcaccagcgaagaagaaattaaaactactaacccagtggctacagagcagtatggtgtggtggcagacaacctgcagcagaccaacggagctcccattgtgggaactgtcaacagccagggggccttacctggtatggtctggcaaaaccgggacgtgtacctgcagggccccatctgggccaaaattcctcacacggacggcaactttcatccttcgccgctgatgggaggctttggactgaaacacccgcctcctcagatcctggtgaaaaacactcctgttcctgcggatcctccgaccaccttcagccaggccaagctggcttcttttatcacgcagtacagcaccggacaggtcagcgtggaaatcgaatgggagctgcagaaagaaaacagcaagcgctggaacccagagattcagtatacttccaactactacaaatctacaaatgtggactttgctgtcaatactgagggtacttattcagagcctcgccccattggcactcgttatctcacccgtaatctgtaattgcttgttaatcaataaaccggttaattcgtttcagttgaactttggtctctgcgaagggcgaattc

SEQ ID NO: 73 - protein, 738 aa, Artificial Sequence
  source: /note="Description of Artificial Sequence: Synthetic polypeptide"
MAADGYLPDWLEDNLSEGIREWWDLKPGAPKPKANQQKQDDGRGLVLPGYKYLGPFNGLDKGEPVNAADAAALEHDKAYDQQLKAGDNPYLRYNHADAEFQERLQEDTSFGGNLGRAVFQAKKRVLEPLGLVEEGAKTAPGKKRPVEPSPQRSPDSSTGIGKKGHQPARKRLNFGQTGDSESVPDPQPIGEPPAGPSGLGSGTMAAGGGAPMADNNEGADGVGSSSGNWHCDSTWLGDRVITTSTRTWALPTYNNHLYKQISNGTSGGSTNDNTYFGYSTPWGYFDFNRFHCHFSPRDWQRLINNNWGFRPKRLNFKLFNIQVKEVTQNEGTKTIANNLTSTIQVFTDSEYQLPYVLGSAHQGCLPPFPADVFMIPQYGYLTLNNGSQAVGRSSFYCLEYFPSQMLRTGNNFEFSYTFEDVPFHSSYAHSQSLDRLMNPLIDQYLYYLSRTQSTGGTQGTQQLLFSQAGPANMSAQAKNWLPGPCYRQQRVSTTLSQNNNSNFAWTGATKYHLNGRDSLVNPGVAMATHKDDEERFFPSSGVLMFGKQGAGKDNVDYSSVMLTSEEEIKTTNPVATEQYGVVADNLQQTNGAPIVGTVNSQGALPGMVWQNRDVYLQGPIWAKIPHTDGNFHPSPLMGGFGLKHPPPQILVKNTPVPADPPTTFSQAKLASFITQYSTGQVSVEIEWELQKENSKRWNPEIQYTSNYYKSTNVDFAVNTEGTYSEPRPIGTRYLTRNL

SEQ ID NO: 74 - DNA, 3122 bp, Adeno-associated virus
gaattcgccctttctacggctgcgtcaactggaccaatgagaactttcccttcaacgattgcgtcgacaagatggtgatctggtgggaggagggcaagatgacggccaaggtcgtggagtccgccaaggccattctcggcggcagcaaggtgcgtgtggaccaaaagtgcaagtcttccgcccagatcgatcccacccccgtgatcgtcacctccaacaccaacatgtgcgccgtgattgacgggaacagcgccaccttcgagcaccagcagccgttgcaggaccggatgttcaaatttgaactcacccgccgtctggagcatgactttggcaaggtgacgaagcaggaagtcaaagagttcttccgctgggcgcaggatcacgtgaccgaggtggcgcatgagttccacgtcagaaagggtggagccaacaagagacccgcccccgatgacgcggatataagcgagcccaagcgggcctgcccctcagtcgcggatccatcgacgtcagacgcggaaggagctccggtggactttgccgacaggtaccaaaacaaatgttctcgtcacgcgggcatgcttcagatgctgtttccctgcaagacatgcgagagaatgaatcagaatttcaacatttgcttcacgcacgggaccagagactgttcagaatgtttccccggcgtgtcagaatctcaaccggtcgtcagaaagaggacgtatcggaaactctgtgcgattcatcatctgctggggcgggctcccgagattgcttgctcggcctgcgatctggtcaacgtggacctggatgactgtgtttctgagcaataaatgacttaaaccaggtatggctgccgatggttatcttccagattggctcgaggacaacctctctgagggcattcgcgagtggtgggacttgaaacctggagccccgaaacccaaagccaaccagcaaaagcaggacgacggccggggtctggtgcttcctggctacaagtacctcggacccttcaacggactcgacaagggggagcccgtcaacgcggcggacgcagcggccctcgagcacgacaaagcctacgaccagcagctcaaagcgggtgacaatccgtacctgcggtataatcacgccgacgccgagtttcaggagcgtctgcaagaagatacgtcttttgggggcaacctcgggcgagcagtcttccaggccaagaagcgggttctcgaacctctcggtctggttgaggaaggcgctaagacggctcctggaaagaagagactggtagagcagtcgccacaagagccagactcctcctcgggcatcggcaagacaggccagcagcccgctaaaaagagactcaattttggtcagactggcgactcagagtcagtccccgacccacaacctctcggagaacctccagcagccccctcaggtctgggacctaatacaatggcttcaggcggtggcgctccaatggcagacaataacgaaggcgccgacggagtgggtaattcctcgggaaattggcattgcgattccacatggctgggggacagagtcatcaccaccagcacccgaacctgggccctgcccacctacaacaaccacctctacaagcaaatctccaacggcacctcgggaggaagcaccaacgacaacacctattttggctacagcaccccctgggggtattttgacttcaacagattccactgtcacttttcaccacgtgactggcaacgactcatcaacaacaattggggattccggcccaaaagactcaacttcaagctgttcaacatccaggtcaaggaagtcacgacgaacgaaggcaccaagaccatcgccaataatctcaccagcaccgtgcaggtctttacggactcggagtaccagttaccgtacgtgctaggatccgctcaccagggatgtctgcctccgttcccggcggacgtcttcacggttcctcagtacggctatttaactttaaacaatggaagccaagccctgggacgttcctccttctactgtctggagtatttcccatcgcagatgctgagaaccggcaacaactttcagttcagctacaccttcgaggacgtgcctttccacagcagctacgcgcacagccagagcctggacaggctgatgaatcccctcatcgaccagtacctgtactacctggtcagaacgcaaacgactggaactggagggacgcagactctggcattcagccaagcgggtcctagctcaatggccaaccaggctagaaattgggtgcccggaccttgctaccggcagcagcgcgtctccacgacaaccaaccagaacaacaacagcaactttgcctggacgggagctgccaagtttaagctgaacggccgagactctctaatgaatccgggcgtggcaatggcttcccacaaggatgacgacgaccgcttcttcccttcgagcggggtcctgatttttggcaagcaaggagccgggaacgatggagtggattacagccaagtgctgattacagatgaggaagaaatcaaggctaccaaccccgtggccacagaagaatatggagcagtggccatcaacaaccaggccgccaatacgcaggcgcagaccggactcgtgcacaaccagggggtgattcccggcatggtgtggcagaatagagacgtgtacctgcagggtcccatctgggccaaaattcctcacacggacggcaactttcacccgtctcccctgatgggcggctttggactgaagcacccgcctcctcaaattctcatcaagaacacaccggttccagcggacccgccgcttaccttcaaccaggccaagctgaactctttcatcacgcagtacagcaccggacaggtcagcgtggaaatcgagtgggagctgcagaaagaaaacagcaaacgctggaatccagagattcaatacacttccaactactacaaatctacaaatgtggactttgctgtcaacacggaaggagtttatagcgagcctcgccccattggcacccgttacctcacccgcaacctgtaattacatgttaatcaataaaccggttaattcgtttcagttgaactttggtctctgcgaagggcgaattc

SEQ ID NO: 75 - protein, 736 aa, Artificial Sequence
  source: /note="Description of Artificial Sequence: Synthetic polypeptide"
MAADGYLPDWLEDNLSEGIREWWDLKPGAPKPKANQQKQDDGRGLVLPGYKYLGPFNGLDKGEPVNAADAAALEHDKAYDQQLKAGDNPYLRYNHADAEFQERLQEDTSFGGNLGRAVFQAKKRVLEPLGLVEEGAKTAPGKKRLVEQSPQEPDSSSGIGKTGQQPAKKRLNFGQTGDSESVPDPQPLGEPPAAPSGLGPNTMASGGGAPMADNNEGADGVGNSSGNWHCDSTWLGDRVITTSTRTWALPTYNNHLYKQISNGTSGGSTNDNTYFGYSTPWGYFDFNRFHCHFSPRDWQRLINNNWGFRPKRLNFKLFNIQVKEVTTNEGTKTIANNLTSTVQVFTDSEYQLPYVLGSAHQGCLPPFPADVFTVPQYGYLTLNNGSQALGRSSFYCLEYFPSQMLRTGNNFQFSYTFEDVPFHSSYAHSQSLDRLMNPLIDQYLYYLVRTQTTGTGGTQTLAFSQAGPSSMANQARNWVPGPCYRQQRVSTTTNQNNNSNFAWTGAAKFKLNGRDSLMNPGVAMASHKDDDDRFFPSSGVLIFGKQGAGNDGVDYSQVLITDEEEIKATNPVATEEYGAVAINNQAANTQAQTGLVHNQGVIPGMVWQNRDVYLQGPIWAKIPHTDGNFHPSPLMGGFGLKHPPPQILIKNTPVPADPPLTFNQAKLNSFITQYSTGQVSVEIEWELQKENSKRWNPEIQYTSNYYKSTNVDFAVNTEGVYSEPRPIGTRYLTRNL

SEQ ID NO: 76 - DNA, 3117 bp, Adeno-associated virus
gaattcgcccttggctgcgtcaactggaccaatgagaactttcccttcaacgattgcgtcgacaagatggtgatctggtgggaggagggcaagatgacggccaaggtcgtggagtccgccaaggccattctcggcggcagcaaggtgcgtgtggaccaaaagtgcaagtcttccgcccagatcgatcccacccccgtgatcgtcacctccaacaccaacatgtgcgccgtgattgacgggaacagcaccaccttcgagcaccagcagccgttgcaggaccggatgttcaaatttgaactcacccgccgtctggagcatgactttggcaaggtgacgaagcaggaagtcaaagagttcttccgctgggcgcaggatcacgtgaccgaggtggcgcatgagttccacgtcagaaagggtggagccaacaagagacccgcccccgatgacgcggatataagcgagcccaagcgggcctgcccctcagtcgcggatccatcgacgtcagacgcggaaggagctccggtggactttgccgacaggtaccaaaacaaatgttctcgtcacgcgggcatgcttcagatgctgtttccctgcaagacatgcgagagaatgaatcagaatttcaacatttgcttcacgcacgggaccagagactgttcagaatgtttccccggcgtgtcagaatctcaaccggtcgtcagaaagaggacgtatcggaaactctgtgcgattcatcatctgctggggcgggctcccgagattgcttgctcggcctgcgatctggtcaacgtggacctggatgactgtgtttctgagcaataaatgacttaaaccaggtatggctgccgatggttatcttccagattggctcgaggacaacctctctgagggcattcgcgagtggtgggacttgaaacctggagccccgaaacccaaagccaaccagcaaaagcaggacgacggccggggtctggtgcttcctggctacaagtacctcggacccttcaacggactcgacaagggggagcccgtcaacgcggcggacgcagcggccctcgagcacgacaaagcctacgaccagcagctcaaagcgggtgacaatccgtacctgcggtataatcacgccgacgccgagtttcaggagcgtctgcaagaagatacgtcttttgggggcaacctcgggcgagcagtcttccaggccaagaagcgggttctcgaacctctcggtctggttgaggaaggcgctaagacggctcctggaaagaagagaccggtagagcagtcgccacaagagccagactcctcctcgggcatcggcaagacaggccagcagcccgctaaaaagagactcaattttggtcagactggcgactcagagtcagtccccgacccacaacctctcggagaacctccagcagccccctcaggtctgggacctaatacaatggcttcaggcggtggcgctccaatggcagacaataacgaaggcgccgacggagtgggtaattcctcgggaaattggcattgcgattccacatggctgggggacagagtcatcaccaccagcacccgaacctgggccctgcccacctacaacaaccacctctacaagcaaatctccaacggcacctcgggaggaagcaccaacgacaacacctattttggctacagcaccccctgggggtattttgacttcaacagattccactgtcacttttcaccacgtgactggcaacgactcatcaacaacaattggggattccggcccaaaagactcaacttcaagctgttcaacatccaggtcaaggaagtcacgacgaacgaaggcaccaagaccatcgccaataatctcaccagcaccgtgcgggtctttacggactcggagtaccagttaccgtacgtgctaggatccgctcaccagggatgtctgcctccgttcccggcggacgtcttcatggttcctcagtacggctatttaactttaaacaatggaagccaagccctgggacgttcctccttctactgtctggagtatttcccatcgcagatgctgagaaccggcaacaactttcagttcagctacaccttcgaggacgtgcctttccacagcagctacgcgcacagccagagcctggacaggctgatgaatcccctcatcgaccagtacctgtactacctggtcagaacgcaaacgactggaactggagggacgcagactctggcattcagccaagcgggtcctagctcaatggccaaccaggctagaaattgggtgcccggaccttgctaccggcagcagcgcgtctccacgacaaccaaccagagcaacaacagcaactttgcctggacgggagctgccaagtttaagctgaacggccgagactctctaatgaatccgggcgtggcaatggcttcccacaaggatgacgacgaccgcttcttcccttcgagcggggtcctgatttttggcaagcaaggagccgggaacgatggagtggattacagccaagtgctgattacagatgaggaagaaatcaaggctaccaaccccgtggccacagaagaatatggagcagtggccatcaacaaccaggccgccaatacgcaggcgcagaccggactcgtgcacaaccagggggtgattcccggcatggtgtggcagaatagagacgtgtacctgcagggtcccatctgggccaaaattcctcacacggacggcaactttcacccgtctcccctgatgggcggctttggactgaagcacccgcctcctcaaattctcatcaagaacacaccggttccagcggacccgccgcttaccttcaaccaggccaagctgaactctttcatcacgcagtacagcaccggacaggtcagcgtggaaatcgagtgggagctgcagaaagaaaacagcaaacgctggaatccagagattcaatacacttccaactactacaaatctacaaatgtggactttgctgtcaacacggaaggagtttatagcgagcctcgccccattggcacccgttacctcacccgcaacctgtaattacatgttaatcaataaaccggttaattcgtttcagttgaactttggtctctgcgaagggcgaattc

SEQ ID NO: 77 - protein, 736 aa, Artificial Sequence
  source: /note="Description of Artificial Sequence: Synthetic polypeptide"
MAADGYLPDWLEDNLSEGIREWWDLKPGAPKPKANQQKQDDGRGLVLPGYKYLGPFNGLDKGEPVNAADAAALEHDKAYDQQLKAGDNPYLRYNHADAEFQERLQEDTSFGGNLGRAVFQAKKRVLEPLGLVEEGAKTAPGKKRPVEQSPQEPDSSSGIGKTGQQPAKKRLNFGQTGDSESVPDPQPLGEPPAAPSGLGPNTMASGGGAPMADNNEGADGVGNSSGNWHCDSTWLGDRVITTSTRTWALPTYNNHLYKQISNGTSGGSTNDNTYFGYSTPWGYFDFNRFHCHFSPRDWQRLINNNWGFRPKRLNFKLFNIQVKEVTTNEGTKTIANNLTSTVRVFTDSEYQLPYVLGSAHQGCLPPFPADVFMVPQYGYLTLNNGSQALGRSSFYCLEYFPSQMLRTGNNFQFSYTFEDVPFHSSYAHSQSLDRLMNPLIDQYLYYLVRTQTTGTGGTQTLAFSQAGPSSMANQARNWVPGPCYRQQRVSTTTNQSNNSNFAWTGAAKFKLNGRDSLMNPGVAMASHKDDDDRFFPSSGVLIFGKQGAGNDGVDYSQVLITDEEEIKATNPVATEEYGAVAINNQAANTQAQTGLVHNQGVIPGMVWQNRDVYLQGPIWAKIPHTDGNFHPSPLMGGFGLKHPPPQILIKNTPVPADPPLTFNQAKLNSFITQYSTGQVSVEIEWELQKENSKRWNPEIQYTSNYYKSTNVDFAVNTEGVYSEPRPIGTRYLTRNL

SEQ ID NO: 78 - DNA, 3121 bp, Adeno-associated virus
gaattcgcccttctacggctgcgtcaactggaccaatgagaactttcccttcaacgattgcgtcgacaagatggtgatctggtgggaggagggcaagatgacggccaaggtcgtggagtccgccaaggccattctcggcggcagcaaggtgcgtgtggaccaaaagtgcaagtcttccgcccagatcgatcccacccccgtgatcgtcacctccaacaccaacatgtgcgccgtgattgacgggaacagcaccaccttcgagcaccagcagccgttgcaggaccggatgttcaaatttgaactcacccgccgtctggagcatgactttggcaaggtgacgaagcaggaagtcaaagagttcttccgctgggcgcaggatcacgtgaccgaggtggcgcatgagttccacgtcagaaagggtggcgccaacaagagacccgcccccgatgacgcggatataagcgagcccaagcgggcctgcccctcagtcgcggatccatcgacgtcagacgcggaaggagctccggtggactttgccgacaggtaccaaaacaaatgttctcgtcacgcgggcatgcttcagatgctgtttccctgcaagacatgcgagagaatgaatcagaatttcaacatttgcttcacgcacgggaccagagactgttcagaatgtttccccggcgtgtcagaatctcaaccggtcgtcagaaagaggacgtatcggaaactctgtgcgattcatcatctgctggggcgggctcccgagattgcttgctcggcctgcgatctggtcaacgtggacctggatgactgtgtttctgagcaataaatgacttaaaccaggtatggctgccgatggttatcttccagattggctcgaggacaacctctctgagggcattcgcgagtggtgggacttgaaacctggagccccgaaacccaaagccaaccagcaaaagcaggacgacggccggggtctggtgcttcctggctacaagtacctcggacccttcaacggactcgacaagggggagcccgtcaacgcggcggacgcagcggccctcgagcacgacaaagcctacgaccagcagctcaaagcgggtgacaatccgtacctgcggtataatcacgccgacgccgagtttcaggagcgtctgcaagaagatacgtcctttgggggcaacctcgggcgagcagtcttccaggccaagaagcgggttctcgaacctctcggtctggttgaggaaggcgctaagacggctcctggaaagaagagaccggtagagcagtcgccacaagagccagactcctcctcgggcatcggcaagacaggccagcagcccgctaaaaagagactcaattttggtcagactggcgactcagagtcagtccccgacccacaacctctcggagaacctccagcagccccctcaggtctgggacctaatacaatggcttcaggcggtggcgctccaatggcagacaataacgaaggcgccgacggagtgggtaattcctcgggaaattggcattgcgattccacatggctgggggacagagtcatcaccaccagcacccgaacctgggccctgcccacctacaacaaccacctctacaagcaaatctccaacggcacctcgggaggaagcaccaacgacaacacctattttggctacagcaccccctgggggtattttgacttcaacagattccactgtcacttttcaccacgtgactggcaacgactcatcaacaacaattggggattccggcccaaaagactcaacttcaagctgttcaacatccaggtcaaggaagtcacgacgaacgaaggcaccaagaccatcgccaataatctcaccagcaccgtgcaggtctttacggacttggagtaccagttaccgtacgtgctaggatccgctcaccagggatgtctgcctccgttcccggcggacgtcttcatggttcctcagtacggctatttaactttaaacaatggaagccaagccctgggacgttcctccttctactgtctggagtatttcccatcgcagatgccgagaaccggcaacaactttcagttcagctacaccttcgaggacgtgcctttccacagcagctacgcgcacagccagagcctggacaggctgatgaatcccctcatcgaccagtacctgtactacctggtcagaacgcaaacgactggaactggagggacgcagactctggcattcagccaagcgggtcctagctcaatggccaaccaggctagaaattgggtgcccggaccttgctaccggcagcagcgcgtctccacgacaaccaaccagaacaacaacagcaactttgcctggacgggagctgccaagtttaagctgaacggccgagactctctaatgaatccgggcgtggcaatggcttcccacaaggatgacgacgaccgcttcttcccttcgagcggggtcctgatttttggcaagcaaggagccgggaacgatggagtggattacagccaagtgctgattacagatgaggaagaaatcaaggctaccaaccccgtggccacagaagaatatggagcagtggccatcaacaaccaggccgccaatacgcaggcgcagaccggactcgtgcacaaccagggggtgattcccggcatggtgtggcagaatagagacgtgtacctgcagggtcccatctgggccaaaattcctcacacggacggcaactttcacccgtctcccctgatgggcggctttggactgaagcacccgcctcctcaaattctcatcaagaacacaccggttccagcggacccgccgcttaccttcaaccaggccaagctgaactctttcatcacgcagtacagcaccggacaggtcagcgtggaaatcgagtgggagctgcagaaagaaaacagcaaacgctggaatccagagattcaatacacttccaactactacaaatctacaaatgtggactttgctgtcaacacggaaggagtttatagcgagcctcgccccattggcacccgttacctcacccgcaacctgtaattacatgttaatcaataaaccggttaattcgtttcagttgaactttggtctctgcgaagggcgaattc

SEQ ID NO: 79 - protein, 736 aa, Artificial Sequence
  source: /note="Description of Artificial Sequence: Synthetic polypeptide"
MAADGYLPDWLEDNLSEGIREWWDLKPGAPKPKANQQKQDDGRGLVLPGYKYLGPFNGLDKGEPVNAADAAALEHDKAYDQQLKAGDNPYLRYNHADAEFQERLQEDTSFGGNLGRAVFQAKKRVLEPLGLVEEGAKTAPGKKRPVEQSPQEPDSSSGIGKTGQQPAKKRLNFGQTGDSESVPDPQPLGEPPAAPSGLGPNTMASGGGAPMADNNEGADGVGNSSGNWHCDSTWLGDRVITTSTRTWALPTYNNHLYKQISNGTSGGSTNDNTYFGYSTPWGYFDFNRFHCHFSPRDWQRLINNNWGFRPKRLNFKLFNIQVKEVTTNEGTKTIANNLTSTVQVFTDLEYQLPYVLGSAHQGCLPPFPADVFMVPQYGYLTLNNGSQALGRSSFYCLEYFPSQMPRTGNNFQFSYTFEDVPFHSSYAHSQSLDRLMNPLIDQYLYYLVRTQTTGTGGTQTLAFSQAGPSSMANQARNWVPGPCYRQQRVSTTTNQNNNSNFAWTGAAKFKLNGRDSLMNPGVAMASHKDDDDRFFPSSGVLIFGKQGAGNDGVDYSQVLITDEEEIKATNPVATEEYGAVAINNQAANTQAQTGLVHNQGVIPGMVWQNRDVYLQGPIWAKIPHTDGNFHPSPLMGGFGLKHPPPQILIKNTPVPADPPLTFNQAKLNSFITQYSTGQVSVEIEWELQKENSKRWNPEIQYTSNYYKSTNVDFAVNTEGVYSEPRPIGTRYLTRNL

SEQ ID NO: 80 - DNA, 3122 bp, Adeno-associated virus
gaattcgccctttctacggctgcgtcaactggaccaatgagaactttcccttcaacgattgcgtcgacaagatggtgatctggtgggaggagggcaagatgacggccaaggtcgtggagtccgccaaggccattctcggcggcagcaaggtgcgtgtggaccaaaagtgcaagtcttccgcccagatcgatcccacccccgtgatcgtcacctccaacaccaacatgtgcgccgtgattgacgggaacagcaccaccttcgagcaccagcagccgttgcaggaccggatgttcaaatttgaactcacccgccgtctggagcatgactttggcaaggtgacgaagcaggaagtcaaagggttcttccgctgggcgcaggatcacgtgaccgaggtggcgcatgagttccacgtgcgagcccaagcgggcctgcccctcagtcgcggatccatcgacgtcagaccagaaagggtggagccaacaagagacccgcccccgatgacgcggatataagcggaaggagctccggtggactttgccgacaggtaccaaaacaaatgttctcgtcacgcgggcatgcttcagatgctgtttccctgcaagacatgcgagagaatgaatcagaatttcaacatttgcttcacgcacgggaccagagactgttcagaatgtttccccggcgtgtcagaatctcaaccggtcgtcagaaagaggacgtatcggaaactctgtgcgattcatcatctgctggggcgggctcccgagattgcttgctcggcctgcgatctggtcaacgtggacctggatgactgtgtttctgagcaataaatgacttaaaccaggtatggctgccgatggttatcttccagattggctcgaggacaacctctctgagggcattcgcgagtggtgggacttgaaacctggagccccgaaacccaaagccaaccagcaaaagcaggacgacggccggggtctggtgcttcctggctacaagtacctcggacccttcaacggactcgacaagggggagcccgtcaacgcggcggacgcagcggccctcgagcacgacaaagcctacgaccagcagctcaaagcgggtgacaatccgtacctgcggtataatcacgccgacgccgagtttcaggagcgtctgcaagaagatacgtcttttgggggcaacctcgggcgagcagtcttccaggccaagaagcgggttctcgaacctctcggtctggttgaggaaggcgctaagacggctcctggaaagaagagaccggtagagcagtcgccacaagagccagactcctcctcgggcatcggcaagacaggccagcagcccgctaaaaagagactcaattttggtcagactggcgactcagagtcagtccccgacccacaacctctcggagaacctccagcagccccctcaggtctgggacctaatacaatggcttcaggcggtggcgctccaatggcagacaataacgaaggcgccgacggagtgggtaattcctcgggaaattggcattgcgattccacatggctgggggacagagtcatcaccaccagcacccgaacctgggccctgcccacctacaacaaccacctctacaagcaaatctccaacggcacctcgggaggaagcaccaacgacaacacctattttggctacagcaccccctgggggtattttgacttcaacagattccactgtcacttttcaccacgtgactggcaacgactcatcaacaacaattggggattccggcccaaaagactcaacttcaagctgttcaacatccaggtcaaggaagtcacgacgaacgaaggcaccaagaccatcgccaataatctcaccagcaccgtgcaggtctttacggactcggagtaccagttaccgtacgtgctaggatccgctcaccagggatgtctgcctccgttcccggcggacgtcttcatggttcctcagtacggctatttaactttaaacaatggaagccaagccctgggacgttcctccttctactgtctggagtatttcccatcgcagatgctgagaaccggcaacaactttcagttcagctacaccttcgaggacgtgcctttccacagcagctacgcgcacagccagagcctggacaggctgatgaatcccctcatcgaccagtacctgtactacctggtcagaacgcaaacgactggaactggagggacgcagactctggcattcagccaagcgggtcctagctcaatggccaaccaggctagaaattgggtgcccggaccttgctaccggcagcagcgcgtctccacgacaaccaaccagaacaacaacagcaactttgcctggacgggagctgccaagtttaagctgaacggccgagactctctaatgaatccgggcgtggcaatggcttcccacaaggatgacgacgaccgcttcttcccttcgagcggggtcctgatttttggcaagcaaggagccgggaacgatggagtggattacagccaagtgctgattacagatgaggaagaaatcaaggctaccaaccccgtggccacagaagaatatggagcagtggccatcaacaaccaggccgccaatacgcaggcgcagaccggactcgtgcacaaccagggggtgattcccggcatggtgtggcagaatagagacgtgtacctgcagggtcccatctgggccaaaattcctcacacggacggcaactttcacccgtctcccctgatgggcggctttggactgaagcacccgcctcctcaaattctcatcaagaacacaccggttccagcggacccgccgcttaccttcaaccaggccaagctgaactctttcatcacgcagtacagcaccggacaggtcagcgtggaaatcgagtgggagctgcagaaagaaaacagcaaacgctggaatccagagattcaatacacttccaactactacaaatctacaaatgtggactttgctgtcaacacggagggggtttatagcgagcctcgccccattggcacccgttacctcacccgcaacctgtaattacatgttaatcaataaaccggttaattcgtttcagttgaactttggtctctgcgaagggcgaattc

SEQ ID NO: 81 - protein, 736 aa, Artificial Sequence
  source: /note="Description of Artificial Sequence: Synthetic polypeptide"
MAADGYLPDWLEDNLSEGIREWWDLKPGAPKPKANQQKQDDGRGLVLPGYKYLGPFNGLDKGEPVNAADAAALEHDKAYDQQLKAGDNPYLRYNHADAEFQERLQEDTSFGGNLGRAVFQAKKRVLEPLGLVEEGAKTAPGKKRPVEQSPQEPDSSSGIGKTGQQPAKKRLNFGQTGDSESVPDPQPLGEPPAAPSGLGPNTMASGGGAPMADNNEGADGVGNSSGNWHCDSTWLGDRVITTSTRTWALPTYNNHLYKQISNGTSGGSTNDNTYFGYSTPWGYFDFNRFHCHFSPRDWQRLINNNWGFRPKRLNFKLFNIQVKEVTTNEGTKTIANNLTSTVQVFTDSEYQLPYVLGSAHQGCLPPFPADVFMVPQYGYLTLNNGSQALGRSSFYCLEYFPSQMLRTGNNFQFSYTFEDVPFHSSYAHSQSLDRLMNPLIDQYLYYLVRTQTTGTGGTQTLAFSQAGPSSMANQARNWVPGPCYRQQRVSTTTNQNNNSNFAWTGAAKFKLNGRDSLMNPGVAMASHKDDDDRFFPSSGVLIFGKQGAGNDGVDYSQVLITDEEEIKATNPVATEEYGAVAINNQAANTQAQTGLVHNQGVIPGMVWQNRDVYLQGPIWAKIPHTDGNFHPSPLMGGFGLKHPPPQILIKNTPVPADPPLTFNQAKLNSFITQYSTGQVSVEIEWELQKENSKRWNPEIQYTSNYYKSTNVDFAVNTEGVYSEPRPIGTRYLTRNL

SEQ ID NO: 82 - DNA, 2370 bp, Adeno-associated virus
gaattcgccctttctacggctgcgtcaactggaccaatgagaactttcccttcaacgattgcgtcgacaagatggtgatctggtgggaggagggcaagatgacggccaaggtcgtggagtccgccaaggccattctcggcggcagcaaggtgcgcgtggaccaaaagtgcaagtcgtccgcccagatcgaccccacccccgtgatcgtcacctccaacaccaacatgtgcgccgtgattgacgggaacagcaccaccttcgagcaccagcagccgttgcaggaccggatgttcaagttcgaactcacccgccgtctggagcacgactttggcaaggtgaccaagcaggaagtcaaagagttcttccgctgggcgcaggatcacgtgaccgaggtggcgcatgagttctacgtcagaaagggcggagccagcaaaagacccgcccccgatgacgcggatataagcgagcccaagcgggcctgcccctcagtcgcggatccatcgacgtcagacgcggaaggagctccggtggactttgccgacaggtaccaaaacaaatgttctcgtcacgcgggcatgcttcagacgctgtttccctgcaaaacgtgcgagagaatgaatcagaatttcaacatttgcttcacgcacggggtcagagactgctcagaatgtttccccggtgcatcagaatctcaaccggtcgtcagaaaaaaaacgtatcagaaactgtgtgccattcatcatctgctggggcgggcacccgagattgcttgctcggcctgcgatctggtcaacgtggacctggacgactgtgtttctgagcaataaatgacttaaaccaggtatggctgccgatggttatcttccagattggcttgaggacaacctctctgagggcattcgcgagtggtgggacctgaaacctggagccccgaaacccaaagccaaccagcaaaagcaggacgacggccggggtctggtgcttcctggctacaagtacctcggacccttcaacggactcgacaagggggagcccgtcaacgcggcggacgcagcggccctcgagcacgacaaggcctacgaccagcagctcaaagcgggtgacaatccgtacctgcggtataaccacgccgacgccgagtttcaggagcgtctgcaagaagatacgtcttttgggggcaacctcgggcgagcagtcttccaggccaagaagcgggttctcgaacctctcggtctggttgaggaaggcgctaagacggctcctggaaagaagagaccggtagagccatcacctcagcgttcccccgactcctccacgggcatcggcaagaaaggccaccagcccgcgagaaagagactgaactttgggcagactggcgactcggagtcagtccccgaccctcaaccaatcggagaaccaccagcaggcccctctggtctgggatctggtacaatggctgcaggcggtggcgctccaatggcagacaataacgaaggcgccgacggagtgggtagttcctcaggaaattggcattgcgattccacatggctgggcgacagagtcatcaccaccagcacccgaacctgggccctgcccacctacaacaaccatctctacaagcaaatctccaacgggacatcgggaggaagcactaacgacaacacctactttggctacagcaccccctgggggtattttgacttcaacagattccactgccacttctcaccacgtgactggcagcgactcatcaacaataactggggattccggcccaagagactcaacttcaagctcttcaacatccaggtcaaggaggtcacgcagaatgaaggcaccaagaccatcgccaataaccttaccagcacgattcaggtgtttacggactcggaataccagctcccgtacgtcctcggctctgcgcaccagggctgcctccctccgttcccggcggacgtcttcatgattcctcagtacgggtatctgaccctaaacaatggcagtcaggctgtgggccgttcctccttctactgcctggaatacttcccttctcaaatgctgaggacgggcaacaactttgaattcagctacaccttcgaggacgtgcctttccacagcagctacgcgcacagccagagcctggaccggctgatgaaccctctcatcgaccagtacctgtattacttatccagaactcagtccacaggaggaactcaaggtactcagcaattgttattttctcaagccgggcccgcaaacatgtyggctcaggccaagaactggctacctggaccgtgttaccgtcagcaacgagtttccacgacactgtcgcaaaacaacaacagcaattttgctggaccggtgccacca

SEQ ID NO: 83 - protein, 738 aa, Artificial Sequence; identical to SEQ ID NO: 73
  source: /note="Description of Artificial Sequence: Synthetic polypeptide"

SEQ ID NO: 84 - DNA, 2205 bp, Adeno-associated virus
atgactgacggttaccttccagattggctagaggacaacctctctgaaggcgttcgagagtggtgggcgctgcaacctggagcccctaaacccaaggcaaatcaacaacatcaggacaacgctcggggtcttgtgcttccgggttacaaatacctcggacccggcaacggactcgacaagggggaacccgtcaacgcagcggacgcggcagccctcgagcacgacaaggcctacgaccagcagctcaaggccggtgacaacccctacctcaagtacaaccacgccgacgcggagttccagcagcggcttcagggcgacacatcgtttgggggcaacctcggcagagcagtcttccaggccaaaaagagggttcttgaacctcttggtctggttgagcaagcgggtgagacggctcctggaaagaagagaccgttgattgaatccccccagcagcccgactcctccacgggtatcggcaaaaaaggcaagcagccggctaaaaagaagctcgttttcgaagacgaaactggagcaggcgacggaccccctgagggatcaacttccggagccatgtctgatgacagtgagatgcgtgcagcagctggcggagctgcagtcgagggcggacaaggtgccgatggagtgggtaatgcctcgggtgattggcattgcgattccacctggtctgagggccacgtcacgaccaccagcaccagaacctgggtcttgcccacctacaacaaccacctctacaagcgactcggagagagcctgcagtccaacacctacaacggattctccaccccctggggatactttgacttcaaccgcttccactgccacttctcaccacgtgactggcagcgactcatcaacaacaactggggcatgcgacccaaagccatgcgggtcaaaatcttcaacatccaggtcaaggaggtcacgacgtcgaacggcgagacaacggtggctaataaccttaccagcacggttcagatctttgcggactcgtcgtacgaactgccgtacgtgatggatgcgggtcaagagggcagcctgcctccttttcccaacgacgtctttatggtgccccagtacggctactgtggactggtgaccggcaacacttcgcagcaacagactgacagaaatgccttctactgcctggagtactttccttcgcagatgctgcggactggcaacaactttgaaattacgtacagttttgagaaggtgcctttccactcgatgtacgcgcacagccagagcctggaccggctgatgaaccctctcatcgaccagtacctgtggggactgcaatcgaccaccaccggaaccaccctgaatgccgggactgccaccaccaactttaccaagctgcggcctaccaacttttccaactttaaaaagaactggctgcccgggccttcaatcaagcagcagggcttctcaaagactgccaatcaaaactacaagatccctgccaccgggtcagacagtctcatcaaatacgagacgcacagcactctggacggaagatggagtgccctgacccccggacctccaatggccacggctggacctgcggacagcaagttcagcaacagccagctcatctttgcggggcctaaacagaacggcaacacggccaccgtacccgggactctgatcttcacctctgaggaggagctggcagccaccaacgccaccgatacggacatgtggggcaacctacctggcggtgaccagagcaacagcaacctgccgaccgtggacagactgacagccttgggagccgtgcctggaatggtctggcaaaacagagacatttactaccagggtcccatttgggccaagattcctcataccgatggacactttcacccctcaccgctgattggtgggtttgggctgaaacacccgcctcctcaaatttttatcaagaacaccccggtacctgcgaatcctgcaacgaccttcagctctactccggtaaactccttcattactcagtacagcactggccaggtgtcggtgcagattgactgggagatccagaaggagcggtccaaacgctggaaccccgaggtccagtttacctccaactacggacagcaaaactctctgttgtgggctcccgatgcggctgggaaatacactgagcctagggctatcggtacccgctacctcacccaccacctgtaa

SEQ ID NO: 85 - protein, 734 aa, Adeno-associated virus; identical to SEQ ID NO: 57

SEQ ID NO: 86 - DNA, 3128 bp, Adeno-associated virus
gaattcgccctttctacggctgcgtcaactggaccaatgagaactttcccttcaacgattgcgtcgacaagatgttgatctggtgggaggagggcaagatgacggccaaggtcgtggagtccgccaaggccattctcggcggcagcaaagtgcgcgtggaccaaaagtgcaagccgtccgcccagatcgaccccacccccgtgatcgtcacctccaacaccaacatgtgcgccgtgattgacgggaacagcaccaccttcgagcaccagcagccgttgcgggaccggatgttcaagtttgaactcacccgccgtctggagcacgactttggcaaggtgacaaagcaggaagtcagagagttcttccgctgggcgcaggatcacgtgaccgaggtggcgcacgagttctacgtcagaaagggtggagccaacaagagacccgcccccgatgacgcggataaaagcgagcccaagcgggcctgcccctcagtcgcggatccatcgacgtcagacgcggaaggagctccggtggactttgccgacaggtaccaaaacaaatgttctcgtcacgcgggcatgcttcagatgctgtttccctgcaaaacatgcgagagaatgaatcagaatttcaacatttgcttcacgcacgggaccagagactgttcagaatgtttccccggcgtgtcagaatctcaaccggtcgtcagaaaaaagacgtatcggaaactctgtgcgattcatcatctgctggggcgggcacccgagattgcttgctcggcctgcgatctggtcaacgtggacctagatgactgtgtttctgagcaataaatgacttaaaccaggtatggctgccgatggttatcttccagattggctcgaggacaacctctctgagggcattcgcgagtggtgggacttgaaacctggagccccgaaacccaaagccaaccagcaaaagcaggacgacggccggggtctggtgcttcctggctacaagtacctcggacccttcaacggactcgacaagggggagcccgtcaacgcggcggacgcagcggccctcgagcacgacaaggcctacgaccagcagctcaaagcgggtgacaatccgtacctgcggtataaccacgccgacgccgagtttcaggagcgtctgcaagaagatacgtcttttgggggcaacctcgggcgagcagtcttccaggccaagaagcgggttctcgaacctctcggtctggttgaggaaggcgctaagacggctcctggaaagaagagaccggtagagccatcaccccagcgttctccagactcctctacgggcatcggcaagaaaggccagcagcccgcgaaaaagagactcaactttgggcagactggcgactcagagtcagtgcccgaccctcaaccaatcggagaaccccccgcaggcccctctggtctgggatctggtacaatggctgcaggcggtggcgctccaatggcagacaataacgaaggcgccgacggagtgggtagttcctcaggaaattggcattgcgattccacatggctgggcgacagagtcatcaccaccagcacccgaacctgggccctccccacctacaacaaccacctctacaagcaaatctccaacgggacttcgggaggaagcaccaacgacaacacctacttcggctacagcaccccctgggggtattttgactttaacagattccactgccacttctcaccacgtgactggcagcgactcatcaacaacaactggggattccggcccaagagactcaacttcaagctcttcaacatccaggtcaaggaggtcacgcagaatgaaggcaccaagaccatcgccaataaccttaccagcacgattcaggtctttacggactcggaataccagctcccgtacgtcctcggctctgcgcaccagggctgcctgcctccgttcccggcggacgtcttcatgattcctcagtacgggtacctgactctgaacaatggcagtcaggccgtgggccgttcctccttctactgcctggagtactttccttctcaaatgctgagaacgggcaacaactttgagttcagctaccagtttgaggacgtgccttttcacagcagctacgcgcacagccaaagcctggaccggctgatgaaccccctcatcgaccagtacctgtactacctgtctcggactcagtccacgggaggtaccgcaggaactcagcagttgctattttctcaggccgggcctaataacatgtcggctcaggccaaaaactggctacccgggccctgctaccggcagcaacgcgtctccacgacactgtcgcaaaataacaacagcaactgtaaatcccggtgtcgctatggcaacccacaaggacgacgaagagcgattttgcctggaccggtgccaccaagtatcatctgaatggcagagactctctgttttccgtccagcggagtcttaatgtttgggaaacagggagctggaaaagacaacgtggactatagcagcgttatgctaaccagtgaggaagaaattaaaaccaccaacccagtggccacggaacagtacggcgtggtggccgataacctgcaacagcaaaacgccgctcctattgtaggggccgtcaacagtcaaggagccttacctggcatggtctggcagaaccgggacgtgtacctgcagggtcctatctgggccaagattcctcacacggacggaaactttcatccctcgccgctgatgggaggctttggactgaaacacccgcctcctcagatcctgattaagaatacacctgttcccgcggatcctccaactaccttcagtcaagctaagctggcgtcgttcatcacgcagtacagcaccggacaggtcagcgtggaaattgaatgggagctgcagaaagaaaacagcaaacgctggaacccagagattcaatacacttccaactactacaaatctacaaatgtggacttcgctgttaacacagatggcacttattctgagcctcgccccattggcacccgttacctcacccgtaatctgtaattgctcgttaatcaataaaccggttgattcgtttcagttgaactttggtctctgcgaagggcgaattc

SEQ ID NO: 87 - protein, 738 aa, Artificial Sequence; identical to SEQ ID NO: 7
  source: /note="Description of Artificial Sequence: Synthetic polypeptide"

SEQ ID NO: 88 - DNA, 3128 bp, Adeno-associated virus
gaattcgccctttctacggctgcgtcaactggaccaatgagaactttcccttcaacgattgcgtcgacaagatggtgatctggtgggaggagggcaagatgacggccaaggtcgtggagtccgccaaggccattctcggcggcagcaaagtgcgcgtggaccaaaagtgcaagtcgtccgcccagatcgaccccacccccgtgatcgtcacctccaacaccaacatgtgcgccgtgattgacgggaacagcaccaccttcgagcaccagcagccgttgcaggaccggatgttcaagtttgaactcacccgccgtctggagcacgactttggcaaggtgacaaagcaggaagtcagagagttcttccgctgggcgcaggatcacgtgaccgaggtggcgcacgagttctacgtcagaaagggtggagccaacaagagacccgcccccgatgacgcggataaaagcgagcccaagcgggcctgcccctcagtcgcggatccatcgacgtcagacgcggaaggagctccggtggactttgccgacaggtaccaaaacaaatgttctcgtcacgcgggcatgcttcagatgctgtttccctgcaaaacatgcgagagaatgaatcagaatttcaacatttgcttcacgcacgggaccagagactgttcagaatgtttccccggcgtgtcagaatctcaaccggttgtcagaaaaaagacgtatcggaaactctgtgcgattcatcatctgctggggcgggcacccgagattgcttgctcggcctgcgatctggtcaacgtggacctagatgactgtgtttctgagcaataaatgacttaaaccaggtatggctgccgatggttatcttccagattggctcgaggacaacctctctgagggcattcgcgagtggtgggacttgaaacctggagccccgaaacccaaagccaaccagcaaaagcaggacgacggccggggtctggtgcttcctggctacaagtacctcggacccttcaacggactcgacaagggggagcccgtcaacgcggcggacgcagcggccctcgagcacgacaaggcctacgaccagcagctcaaagcgggtgacaatccgtacctgcggtataaccacgccgacgccgagtttcaggagcgtctgcaagaagatacgtcttttgggggcaacctcgggcgagcagtcttccaggccaagaagcgggttctcgaacctctcggtctggttgaggaaggcgctaagacggctcctggaaagaagagaccggtagagccatcaccccagcgttctccagactcctctacgggcatcggcaagaaaggccagcagcccgcgaaaaagagactcaactttgggcagactggcgactcagagtcagtgcccgaccctcaaccaatcggagaaccccccgcaggcccctctggtctgggatctggtacaatggctgcaggcggtggcgctccaatggcagacaataacgaaggcgccgacggagtgggtagttcctcaggaaattggcattgcgattccacatggctgggcgacagagtcatcaccaccagcacccgaacctgggccctccccacctacaacaaccacctctacaagcaaatctccaacgggacttcgggaggaagcaccaacgacaacacctacttcggctacagcaccccctgggggtattttgactttaacagattccactgccacttctcaccacgtgactggcagcgactcatcaacaacaactggggattccggcccaagagacccaacttcaagctcttcaacatccaggtcaaggaggtcacgcagaatgaaggcaccaagaccatcgccaataaccttaccagcacgattcaggtctttacggactcggaataccagctcccgtacgtcctcggctctgcgcaccagggctgcctgcctccgttcccggcggacgtcttcatgattcctcagtacgggtacctgactctgaacaatggcagtcaggccgtgggccgttcctccttctactgcctggagtactttccttctcaaatgctgagaacgggcaacaactttgagttcagctaccagtttgaggacgtgccttttcacagcagctacgcgcacagccaaagcctggaccggctgatgaaccccctcatcgaccagtacctgtactacctgtctcggactcagtccacgggaggtaccgcaggaactcagcagttgctattttctcaggccgggcctaataacatgtcggctcaggccaaaaactggctacccgggccctgctaccggcagcaacgcgtctccacgacactgtcgcaaaataacaacagcaactttgcctggaccggtgccaccaagtatcatctgaatggcagagactctctggtaaatcccggtgtcgctatggcaacccacaaggacgacgaagagcgattttttccgtccagcggagtcttaatgtttgggaaacagggagctggaaaagacaacgtggactatagcagcgttatgctaaccagtgaggaagaaattaaaaccaccaacccagtggccacagaacagtacggcgtggtggccgataacctgcaacagcaaaacgccgctcctattgtaggggccgtcaacagtcaaggagccttacctggcatggtctggcagaaccgggacgtgtacctgcagggtcctatctgggccaagattcctcacacggacggaaactttcatccctcgccgctgatgggaggctttggactgaaacacccgcctcctcagatcctgattaagaatacacctgttcccgcggatcctccaactaccttcagtcaagctaagctggcgtcgttcatcacgcagtacagcaccggacaggtcagcgtggaaattgaatgggagctgcagaaagaaaacagcaaacgctggaacccagagattcaatacacttccaactactacaaatctacaaatgtggactttgctgttaacacagatggcacttattctgagcctcgccccattggcacccgttacctcacccgtaatctgtaattgcttgttaatcaataaaccggttgattcgtttcagttgaactttggtctctgcgaagggcgaattc

SEQ ID NO: 89 - protein, 738 aa, Artificial Sequence
  source: /note="Description of Artificial Sequence: Synthetic polypeptide"
MAADGYLPDWLEDNLSEGIREWWDLKPGAPKPKANQQKQDDGRGLVLPGYKYLGPFNGLDKGEPVNAADAAALEHDKAYDQQLKAGDNPYLRYNHADAEFQERLQEDTSFGGNLGRAVFQAKKRVLEPLGLVEEGAKTAPGKKRPVEPSPQRSPDSSTGIGKKGQQPAKKRLNFGQTGDSESVPDPQPIGEPPAGPSGLGSGTMAAGGGAPMADNNEGADGVGSSSGNWHCDSTWLGDRVITTSTRTWALPTYNNHLYKQISNGTSGGSTNDNTYFGYSTPWGYFDFNRFHCHFSPRDWQRLINNNWGFRPKRPNFKLFNIQVKEVTQNEGTKTIANNLTSTIQVFTDSEYQLPYVLGSAHQGCLPPFPADVFMIPQYGYLTLNNGSQAVGRSSFYCLEYFPSQMLRTGNNFEFSYQFEDVPFHSSYAHSQSLDRLMNPLIDQYLYYLSRTQSTGGTAGTQQLLFSQAGPNNMSAQAKNWLPGPCYRQQRVSTTLSQNNNSNFAWTGATKYHLNGRDSLVNPGVAMATHKDDEERFFPSSGVLMFGKQGAGKDNVDYSSVMLTSEEEIKTTNPVATEQYGVVADNLQQQNAAPIVGAVNSQGALPGMVWQNRDVYLQGPIWAKIPHTDGNFHPSPLMGGFGLKHPPPQILIKNTPVPADPPTTFSQAKLASFITQYSTGQVSVEIEWELQKENSKRWNPEIQYTSNYYKSTNVDFAVNTDGTYSEPRPIGTRYLTRNL

SEQ ID NO: 90 - protein, 738 aa, Adeno-associated virus
MAADGYLPDWLEDNLSEGIREWWDLKPGAPKPKANQQKQDDGRGLVLPGYKYLGPFNGLDKGEPVNAADAAALEHDKAYDQQLKAGDNPYLRYNHADAEFQERLQEDTSFGGNLGRAVFQAKKRVLEPLGLVEEAAKTAPGKKRPVEPSPQRSPDSSTGIGKKGQQPAKKRLNFGQTGDSESVPDPQPIGEPPAGPSGLGSGTMAAGGGAPMADNNEGADGVGSSSGNWHCDSTWLGDRVITTSTRTWALPTYNNHLYKQISNGTSGGSTNDNTYFGYSTPWGYFDFNRFHCHFSPRDWQRLINNNWGFRPKRLSFKLFNIQVKEVTQNEGTKTIANNLTSTIQVFTDSEYQLPYVLGSAHQGCLPPFPADVFMIPQYGYLTLNNGSQAVGRSSFYCLEYFPSQMLRTGNNFEFSYTFEDVPFHSSYAHSQSLDRLMNPLIDQYLYYLSRTQSTGGTQGTQQLLFSQAGPANMSAQAKNWLPGPCYRQQRVSTTLSQNNNSNFAWTGATKYHLNGRDSLVNPGVAMATHKDDEERFFPSSGVLMFGKQGAGRDNVDYSSVMLTSEEEIKTTNPVATEQYGVVADNLQQTNTGPIVGNVNSQGALPGMVWQNRDVYLQGPIWAKIPHTDGNFHPSPLMGGFGLKHPPPQILIKNTPVPADPPTTFSQAKLASFITQYSTGQVSVEIEWELQKENSKRWNPEIQYTSNYYKSTNVDFAVNTEGTYSEPRPIGTRYLTRNL

SEQ ID NO: 91 - DNA, 2172 bp, Artificial Sequence
  source: /note="Description of Artificial Sequence: Synthetic polynucleotide"
atgtcttttgttgatcaccctccagattggttggaagaagttggtgaaggtcttcgcgagtttttgggccttgaagcgggcccaccgaaaccaaaacccaatcagcagcatcaagatcaagcccgtggtcttgtgctgcctggttataactatctcggacccggaaacggtctcgatcgaggagagcctgtcaacagggcagacgaggtcgcgcgagagcacgacatctcgtacaacgagcagcttgaggcgggagacaacccctacctcaagtacaaccacgcggacgccgagtttcaggagaagctcgccgacgacacatccttcgggggaaacctcggaaaggcagtctttcaggccaagaaaagggttctcgaaccttttggcctggttgaagagggtgctaagacggcccctaccggaaagcggatagacgaccactttccaaaaagaaagaaggctcggaccgaagaggactccaagccttccacctcgtcagacgccgaagctggacccagcggatcccagcagctgcaaatcccagcccaaccagcctcaagtttgggagctgatacaatgtctgcgggaggtggcggcccattgggcgacaataaccaaggtgccgatggagtgggcaatgcctcgggagattggcattgcgattccacgtggatgggggacagagtcgtcaccaagtccacccgaacctgggtgctgcccagctacaacaaccaccagtaccgagagatcaaaagcggctccgtcgacggaagcaacgccaacgcctactttggatacagcaccccctgggggtactttgactttaaccgcttccacagccactggagcccccgagactggcaaagactcatcaacaactactggggcttcagaccccggtccctcagagtcaaaatcttcaacattcaagtcaaagaggtcacggtgcaggactccaccaccaccatcgccaacaacctcacctccaccgtccaagtgtttacggacgacgactaccagctgccctacgtcgtcggcaacgggaccgagggatgcctgccggccttccctccgcaggtctttacgctgccgcagtacggttacgcgacgctgaaccgcgacaacacagaaaatcccaccgagaggagcagcttcttctgcctagagtactttcccagcaagatgctgagaacgggcaacaactttgagtttacctacaactttgaggaggtgcccttccactccagcttcgctcccagtcagaacctgttcaagctggccaacccgctggtggaccagtacttgtaccgcttcgtgagcacaaataacactggcggagtccagttcaacaagaacctggccgggagatacgccaacacctacaaaaactggttcccggggcccatgggccgaacccagggctggaacctgggctccggggtcaaccgcgccagtgtcagcgccttcgccacgaccaataggatggagctcgagggcgcgagttaccaggtgcccccgcagccgaacggcatgaccaacaacctccagggcagcaacacctatgccctggagaacactatgatcttcaacagccagccggcgaacccgggcaccaccgccacgtacctcgagggcaacatgctcatcaccagcgagagcgagacgcagccggtgaaccgcgtggcgtacaacgtcggcgggcagatggccaccaacaaccagagctccaccactgcccccgcgaccggcacgtacaacctccaggaaatcgtgcccggcagcgtgtggatggagagggacgtgtacctccaaggacccatctgggccaagatcccagagacgggggcgcactttcacccctctccggccatgggcggattcggactcaaacacccaccgcccatgatgctcatcaagaacacgcctgtgcccggaaatatcaccagcttctcggacgtgcccgtcagcagcttcatcacccagtacagcaccgggcaggtcaccgtggagatggagtgggagctcaagaaggaaaactccaagaggtggaacccagagatccagtacacaaacaactacaacgacccccagtttgtggactttgccccggacagcaccggggaatacagaaccaccagacctatcggaacccgataccttacccgacccctt

SEQ ID NO: 92 - protein, 720 aa, Artificial Sequence
  source: /note="Description of Artificial Sequence: Synthetic polypeptide"
MSFVDHPPDWLEEVGEGLREFLGLEAGPPKPKPNQQHQDQARGLVLPGYNYLGPGNGLDRGEPVNRADEVAREHDISYNEQLEAGDNPYLKYNHADAEFQEKLADDTSFGGNLGKAVFQAKKRVLEPFGLVEEGAKTAPTGKRIDDHFPKRKKARTEEDSKPSTSSDAEAGPSGSQQLQIPAQPASSLGADTMSAGGGGPLGDNNQGADGVGNASGDWHCDSTWMGDRVVTKSTRTWVLPSYNNHQYREIKSGSVDGSNANAYFGYSTPWGYFDFNRFHSHWSPRDWQRLINNYWGFRPRSLRVKIFNIQVKEVTVQDSTTTIANNLTSTVQVFTDDDYQLPYVVGNGTEGCLPAFPPQVFTLPQYGYATLNRDNTENPTERSSFFCLEYFPSKMLRTGNNFEFTYNFEEVPFHSSFAPSQNLFKLANPLVDQYLYRFVSTNNTGGVQFNKNLAGRYANTYKNWFPGPMGRTQGWNLGSGVNRASVSAFATTNRMELEGASYQVPPQPNGMTNNLQGSNTYALENTMIFNSQPANPGTTATYLEGNMLITSESETQPVNRVAYNVGGQMATNNQSSTTAPATGTYNLQEIVPGSVWMERDVYLQGPIWAKIPETGAHFHPSPAMGGFGLKHPPPMMLIKNTPVPGNITSFSDVPVSSFITQYSTGQVTVEMEWELKKENSKRWNPEIQYTNNYNDPQFVDFAPDSTGEYRTTRPIGTRYL

SEQ ID NO: 93 - protein, 724 aa, Adeno-associated virus 5
MSFVDHPPDWLEEVGEGLREFLGLEAGPPKPKPNQQHQDQARGLVLPGYNYLGPGNGLDRGEPVNRADEVAREHDISYNEQLEAGDNPYLKYNHADAEFQEKLADDTSFGGNLGKAVFQAKKRVLEPFGLVEEGAKTAPTGKRIDDHFPKRKKARTEEDSKPSTSSDAEAGPSGSQQLQIPAQPASSLGADTMSAGGGGPLGDNNQGADGVGNASGDWHCDSTWMGDRVVTKSTRTWVLPSYNNHQYREIKSGSVDGSNANAYFGYSTPWGYFDFNRFHSHWSPRDWQRLINNYWGFRPRSLRVKIFNIQVKEVTVQDSTTTIANNLTSTVQVFTDDDYQLPYVVGNGTEGCLPAFPPQVFTLPQYGYATLNRDNTENPTERSSFFCLEYFPSKMLRTGNNFEFTYNFEEVPFHSSFAPSQNLFKLANPLVDQYLYRFVSTNNTGGVQFNKNLAGRYANTYKNWFPGPMGRTQGWNLGSGVNRASVSAFATTNRMELEGASYQVPPQPNGMTNNLQGSNTYALENTMIFNSQPANPGTTATYLEGNMLITSESETQPVNRVAYNVGGQMATNNQSSTTAPATGTYNLQEIVPGSVWMERDVYLQGPIWAKIPETGAHFHPSPAMGGFGLKHPPPMMLIKNTPVPGNITSFSDVPVSSFITQYSTGQVTVEMEWELKKENSKRWNPEIQYTNNYNDPQFVDFAPDSTGEYRTTRPIGTRYLTRPL

SEQ ID NO: 94 - DNA, 2175 bp, Adeno-associated virus
atgtcttttgttgatcaccctccagattggttggaagaagttggtgaaggtcttcgcgagtttttgggccttgaagcgggcccaccgaaaccaaaacccaatcagcagcatcaagatcaagcccgtggtcttgtgctgcctggttataactatctcggacccggaaacggtctcgatcgaggagagcctgtcaacagggcagacgaggtcgcgcgagagcacgacatctcgtacaacgagcagcttgaggcgggagacaacccctacctcaagtacaaccacgcggacgccgagtttcaggagaagctcgccgacgacacatccttcgggggaaacctcggaaaggcagtctttcaggccaagaaaagggttctcgaaccttttggcctggttgaagagggtgctaagacggcccctaccggaaagcggatagacgaccactttccaaaaagaaagaaggctcggaccgaagaggactccaagccttccacctcgtcagacgccgaagctggacccagcggatcccagcagctgcaaatcccagcccaaccagcctcaagtttgggagctgatacaatgtctgcgggaggtggcggcccattgggcgacaataaccaaggtgccgatggagtgggcaatgcctcgggagattggcattgcgattccacgtggatgggggacagagtcgtcaccaagtccacccgaacctgggtgctgcccagctacaacaaccaccagtaccgagagatcaaaagcggctccgtcgacggaagcaacgccaacgcctactttggatacagcaccccctgggggtactttgactttaaccgcttccacagccactggagcccccgagactggcaaagactcatcaacaactactggggcttcagaccccggtccctcagagtcaaaatcttcaacattcaagtcaaagaggtcacggtgcaggactccaccaccaccatcgccaacaacctcacctccaccgtccaagtgtttacggacgacgactaccagctgccctacgtcgtcggcaacgggaccgagggatgcctgccggccttccctccgcaggtctttacgctgccgcagtacggttacgcgacgctgaaccgcgacaacacagaaaatcccaccgagaggagcagcttcttctgcctagagtactttcccagcaagatgctgagaacgggcaacaactttgagtttacctacaactttgaggaggtgcccttccactccagcttcgctcccagtcagaacctgttcaagctggccaacccgctggtggaccagtacttgtaccgcttcgtgagcacaaataacactggcggagtccagttcaacaagaacctggccgggagatacgccaacacctacaaaaactggttcccggggcccatgggccgaacccagggctggaacctgggctccggggtcaaccgcgccagtgtcagcgccttcgccacgaccaataggatggagctcgagggcgcgagttaccaggtgcccccgcagccgaacggcatgaccaacaacctccagggcagcaacacctatgccctggagaacactatgatcttcaacagccagccggcgaacccgggcaccaccgccacgtacctcgagggcaacatgctcatcaccagcgagagcgagacgcagccggtgaaccgcgtggcgtacaacgtcggcgggcagatggccaccaacaaccagagctccaccactgcccccgcgaccggcacgtacaacctccaggaaatcgtgcccggcagcgtgtggatggagagggacgtgtacctccaaggacccatctgggccaagatcccagagacgggggcgcactttcacccctctccggccatgggcggattcggactcaaacacccaccgcccatgatgctcatcaagaacacgcctgtgcccggaaatatcaccagcttctcggacgtgcccgtcagcagcttcatcacccagtacagcaccgggcaggtcaccgtggagatggagtgggagctcaagaaggaaaactccaagaggtggaacccagagatccagtacacaaacaactacaacgacccccagtttgtggactttgccccggacagcaccggggaatacagaaccaccagacctatcggaacccgataccttacccgacccctttaa

SEQ ID NO: 95 - DNA, 2208 bp, Adeno-associated virus
atggctgccgatggttatcttccagattggctcgaggacaacctctctgagggcattcgcgagtggtgggacttgaaacctggagccccgaaacccaaagccaaccagcaaaagcaggacgacggccggggtctggtgcttcctggctacaagtacctcggacccttcaacggactcgacaagggggagcccgtcaacgcggcggatgcagcggccctcgagcacgacaaggcctacgaccagcagctcaaagcgggtgacaatccgtacctgcggtataaccacgccgacgccgagtttcaggagcgtctgcaagaagatacgtcttttgggggcaacctcgggcgagcagtcttccaggccaagaagagggttctcgaaccttttggtctggttgaggaaggtgctaagacggctcctggaaagaaacgtccggtagagcagtcgccacaagagccagactcctcctcgggcattggcaagacaggccagcagcccgctaaaaagagactcaattttggtcagactggcgactcagagtcagtccccgacccacaacctctcggagaacctccagcaacccccgctgctgtgggacctactacaatggcttcaggcggtggcgcaccaatggcagacaataacgaaggcgccgacggagtgggtaatgcctcaggaaattggcattgcgattccacatggctgggcgacagagtcatcaccaccagcacccgaacatgggccttgcccacctataacaaccacctctacaagcaaatctccagtgcttcaacgggggccagcaacgacaaccactacttcggctacagcaccccctgggggtattttgatttcaacagattccactgccatttctcaccacgtgactggcagcgactcatcaacaacaattggggattccggcccaagagactcaacttcaagctcttcaacatccaagtcaaggaggtcacgacgaatgatggcgtcacgaccatcgctaataaccttaccagcacggttcaagtcttctcggactcggagtaccagttgccgtacgtcctcggctctgcgcaccagggctgcctccctccgttcccggcggacgtgttcatgattccgcagtacggctacctaacgctcaacaatggcagccaggcagtgggacggtcatccttttactgcctggaatatttcccatcgcagatgctgagaacgggcaataactttaccttcagctacaccttcgaggacgtgcctttccacagcagctacgcgcacagccagagcctggaccggctgatgaatcctctcatcgaccagtacctgtattacctgaacagaactcagaatcagtccggaagtgcccaaaacaaggacttgctgtttagccgggggtctccagctggcatgtctgttcagcccaaaaactggctacctggaccctgttaccggcagcagcgcgtttctaaaacaaaaacagacaacaacaacagcaactttacctggactggtgcttcaaaatataaccttaatgggcgtgaatctataatcaaccctggcactgctatggcctcacacaaagacgacaaagacaagttctttcccatgagcggtgtcatgatttttggaaaggagagcgccggagcttcaaacactgcattggacaatgtcatgatcacagacgaagaggaaatcaaagccactaaccccgtggccaccgaaagatttgggactgtggcagtcaatctccagagcagcagcacagaccctgcgaccggagatgtgcatgttatgggagccttacctggaatggtgtggcaagacagagacgtatacctgcagggtcctatttgggccaaaattcctcacacggatggacactttcacccgtctcctctcatgggcggctttggacttaagcacccgcctcctcagatcctcatcaaaaacacgcctgttcctgcgaatcctccggcagagttttcggctacaaagtttgcttcattcatcacccagtattccacaggacaagtgagcgtggagattgaatgggagctgcagaaagaaaacagcaaacgctggaatcccgaagtgcagtatacatctaactatgcaaaatctgccaacgttgatttcactgtggacaacaatggactttatactgagcctcgccccattggcacccgttacctcacccgtcccctg

SEQ ID NO: 96 - protein, 736 aa, Adeno-associated virus 6
MAADGYLPDWLEDNLSEGIREWWDLKPGAPKPKANQQKQDDGRGLVLPGYKYLGPFNGLDKGEPVNAADAAALEHDKAYDQQLKAGDNPYLRYNHADAEFQERLQEDTSFGGNLGRAVFQAKKRVLEPFGLVEEGAKTAPGKKRPVEQSPQEPDSSSGIGKTGQQPAKKRLNFGQTGDSESVPDPQPLGEPPATPAAVGPTTMASGGGAPMADNNEGADGVGNASGNWHCDSTWLGDRVITTSTRTWALPTYNNHLYKQISSASTGASNDNHYFGYSTPWGYFDFNRFHCHFSPRDWQRLINNNWGFRPKRLNFKLFNIQVKEVTTNDGVTTIANNLTSTVQVFSDSEYQLPYVLGSAHQGCLPPFPADVFMIPQYGYLTLNNGSQAVGRSSFYCLEYFPSQMLRTGNNFTFSYTFEDVPFHSSYAHSQSLDRLMNPLIDQYLYYLNRTQNQSGSAQNKDLLFSRGSPAGMSVQPKNWLPGPCYRQQRVSKTKTDNNNSNFTWTGASKYNLNGRESIINPGTAMASHKDDKDKFFPMSGVMIFGKESAGASNTALDNVMITDEEEIKATNPVATERFGTVAVNLQSSSTDPATGDVHVMGALPGMVWQDRDVYLQGPIWAKIPHTDGHFHPSPLMGGFGLKHPPPQILIKNTPVPANPPAEFSATKFASFITQYSTGQVSVEIEWELQKENSKRWNPEVQYTSNYAKSANVDFTVDNNGLYTEPRPIGTRYLTRPL

SEQ ID NO: 97 - protein, 623 aa, Adeno-associated virus 6
MPGFYEIVIKVPSDLDEHLPGISDSFVNWVAEKEWELPPDSDMDLNLIEQAPLTVAEKLQRDFLVQWRRVSKAPEALFFVQFEKGESYFHLHILVETTGVKSMVLGRFLSQIRDKLVQTIYRGIEPTLPNWFAVTKTRNGAGGGNKVVDECYIPNYLLPKTQPELQWAWTNMEEYISACLNLAERKRLVAHDLTHVSQTQEQNKENLNPNSDAPVIRSKTSARYMELVGWLVDRGITSEKQWIQEDQASYISFNAASNSRSQIKAALDNAGKIMALTKSAPDYLVGPAPPADIKTNRIYRILELNGYDPAYAGSVFLGWAQKRFGKRNTIWLFGPATTGKTNIAEAIAHAVPFYGCVNWTNENFPFNDCVDKMVIWWEEGKMTAKVVESAKAILGGSKVRVDQKCKSSAQIDPTPVIVTSNTNMCAVIDGNSTTFEHQQPLQDRMFKFELTRRLEHDFGKVTKQEVKEFFRWAQDHVTEVAHEFYVRKGGANKRPAPDDADKSEPKRACPSVADPSTSDAEGAPVDFADRYQNKCSRHAGMLQMLFPCKTCERMNQNFNICFTHGTRDCSECFPGVSESQPVVRKRTYRKLCAIHHLLGRAPEIACSACDLVNVDLDDCVSEQ

SEQ ID NO: 98 - DNA, 4683 bp, Adeno-associated virus 6
ttggccactccctctctgcgcgctcgctcgctcactgaggccgggcgaccaaaggtcgcccgacgcccgggctttgcccgggcggcctcagtgagcgagcgagcgcgcagagagggagtggccaactccatcactaggggttcctggaggggtggagtcgtgacgtgaattacgtcatagggttagggaggtcctgtattagaggtcacgtgagtgttttgcgacattttgcgacaccatgtggtcacgctgggtatttaagcccgagtgagcacgcagggtctccattttgaagcgggaggtttgaacgcgcagcgccatgccggggttttacgagattgtgattaaggtccccagcgaccttgacgagcatctgcccggcatttctgacagctttgtgaactgggtggccgagaaggaatgggagttgccgccagattctgacatggatctgaatctgattgagcaggcacccctgaccgtggccgagaagctgcagcgcgacttcctggtccagtggcgccgcgtgagtaaggccccggaggccctcttctttgttcagttcgagaagggcgagtcctacttccacctccatattctggtggagaccacgggggtcaaatccatggtgctgggccgcttcctgagtcagattagggacaagctggtgcagaccatctaccgcgggatcgagccgaccctgcccaactggttcgcggtgaccaagacgcgtaatggcgccggaggggggaacaaggtggtggacgagtgctacatccccaactacctcctgcccaagactcagcccgagctgcagtgggcgtggactaacatggaggagtatataagcgcgtgtttaaacctggccgagcgcaaacggctcgtggcgcacgacctgacccacgtcagccagacccaggagcagaacaaggagaatctgaaccccaattctgacgcgcctgtcatccggtcaaaaacctccgcacgctacatggagctggtcgggtggctggtggaccggggcatcacctccgagaagcagtggatccaggaggaccaggcctcgtacatctccttcaacgccgcctccaactcgcggtcccagatcaaggccgctctggacaatgccggcaagatcatggcgctgaccaaatccgcgcccgactacctggtaggccccgctccgcccgccgacattaaaaccaaccgcatttaccgcatcctggagctgaacggctacgaccctgcctacgccggctccgtctttctcggctgggcccagaaaaggttcggaaaacgcaacaccatctggctgtttgggccggccaccacgggcaagaccaacatcgcggaagccatcgcccacgccgtgcccttctacggctgcgtcaactggaccaatgagaactttcccttcaacgattgcgtcgacaagatggtgatctggtgggaggagggcaagatgacggccaaggtcgtggagtccgccaaggccattctcggcggcagcaaggtgcgcgtggaccaaaagtgcaagtcgtccgcccagatcgatcccacccccgtgatcgtcacctccaacaccaacatgtgcgccgtgattgacgggaacagcaccaccttcgagcaccagcagccgttgcaggaccggatgttcaaatttgaactcacccgccgtctggagcatgactttggcaaggtgacaaagcaggaagtcaaagagttcttccgctgggcgcaggatcacgtgaccgaggtggcgcatgagttctacgtcagaaagggtggagccaacaagagacccgcccccgatgacgcggataaaagcgagcccaagcgggcctgcccctcagtcgcggatccatcgacgtcagacgcggaaggagctccggtggactttgccgacaggtaccaaaacaaatgttctcgtcacgcgggcatgcttcagatgctgtttccctgcaaaacatgcgagagaatgaatcagaatttcaacatttgcttcacgcacgggaccagagactgttcagaatgtttccccggcgtgtcagaatctcaaccggtcgtcagaaagaggacgtatcggaaactctgtgccattcatcatctgctggggcgggctcccgagattgcttgctcggcctgcgatctggtcaacgtggatctggatgactgtgtttctgagcaataaatgacttaaaccaggtatggctgccgatggttatcttccagattggctcgaggacaacctctctgagggcattcgcgagtggtgggacttgaaacctggagccccgaaacccaaagccaaccagcaaaagcaggacgacggccggggtctggtgcttcctggctacaagtacctcggacccttcaacggactcgacaagggggagcccgtcaacgcggcggatgcagcggccctcgagcacgacaaggcctacgaccagcagctcaaagcgggtgacaatccgtacctgcggtataaccacgccgacgccgagtttcaggagcgtctgcaagaagatacgtcttttgggggcaacctcgggcgagcagtcttccaggccaagaagagggttctcgaaccttttggtctggttgaggaaggtgctaagacggctcctggaaagaaacgtccggtagagcagtcgccacaagagccagactcctcctcgggcattggcaagacaggccagcagcccgctaaaaagagactcaattttggtcagactggcgactcagagtcagtccccgacccacaacctctcggagaacctccagcaacccccgctgctgtgggacctactacaatggcttcaggcggtggcgcaccaatggcagacaataacgaaggcgccgacggagtgggtaatgcctcaggaaattggcattgcgattccacatggctgggcgacagagtcatcaccaccagcacccgaacatgggccttgcccacctataacaaccacctctacaagcaaatctccagtgcttcaacgggggccagcaacgacaaccactacttcggctacagcaccccctgggggtattttgatttcaacagattccactgccatttctcaccacgtgactggcagcgactcatcaacaacaattggggattccggcccaagagactcaacttcaagctcttcaacatccaagtcaaggaggtcacgacgaatgatggcgtcacgaccatcgctaataaccttaccagcacggttcaagtcttctcggactcggagtaccagttgccgtacgtcctcggctctgcgcaccagggctgcctccctccgttcccggcggacgtgttcatgattccgcagtacggctacctaacgctcaacaatggcagccaggcagtgggacggtcatccttttactgcctggaatatttcccatcgcagatgctgagaacgggcaataactttaccttcagctacaccttcgaggacgtgcctttccacagcagctacgcgcacagccagagcctggaccggctgatgaatcctctcatcgaccagtacctgtattacctgaacagaactcagaatcagtccggaagtgcccaaaacaaggacttgctgtttagccgggggtctccagctggcatgtctgttcagcccaaaaactggctacctggaccctgttaccggcagcagcgcgtttctaaaacaaaaacagacaacaacaacagcaactttacctggactggtgcttcaaaatataaccttaatgggcgtgaatctataatcaaccctggcactgctatggcctcacacaaagacgacaaagacaagttctttcccatgagcggtgtcatgatttttggaaaggagagcgccggagcttcaaacactgcattggacaatgtcatgatcacagacgaagaggaaatcaaagccactaaccccgtggccaccgaaagatttgggactgtggcagtcaatctccagagcagcagcacagaccctgcgaccggagatgtgcatgttatgggagccttacctggaatggtgtggcaagacagagacgtatacctgcagggtcctatttgggccaaaattcctcacacggatggacactttcacccgtctcctctcatgggcggctttggacttaagcacccgcctcctcagatcctcatcaaaaacacgcctgttcctgcgaatcctccggcagagttttcggctacaaagtttgcttcattcatcacccagtattccacaggacaagtgagcgtggagattgaatgggagctgcagaaagaaaacagcaaacgctggaatcccgaagtgcagtatacatctaactatgcaaaatctgccaacgttgatttcactgtggacaacaatggactttatactgagcctcgccccattggcacccgttacctcacccgtcccctgtaattgtgtgttaatcaataaaccggttaattcgtgtcagttgaactttggtctcatgtcgttattatcttatctggtcaccatagcaaccggttacacattaactgcttagttgcgcttcgcgaatacccctagtgatggagttgcccactccctctatgcgcgctcgctcgctcggtggggccggcagagcagagctctgccgtctgcggacctttggtccgcaggccccaccgagcgagcgagcgcgcatagagggagtgggcaa

SEQ ID NO: 99 - DNA, 2211 bp, Adeno-associated virus
atggctgccgatggttatcttccagattggctcgaggacaacctctctgagggcattcgcgagtggtgggacttgaaacctggagccccgaaacccaaagccaaccagcaaaagcaggacgacggccggggtctggtgcttcctggctacaagtacctcggacccttcaacggactcgacaagggggagcccgtcaacgcggcggatgcagcggccctcgagcacgacaaggcctacgaccagcagctcaaagcgggtgacaatccgtacctgcggtataaccacgccgacgccgagtttcaggagcgtctgcaagaagatacgtcttttgggggcaacctcgggcgagcagtcttccaggccaagaagagggttctcgaaccttttggtctggttgaggaaggtgctaagacggctcctggaaagaaacgtccggtagagcagtcgccacaagagccagactcctcctcgggcattggcaagacaggccagcagcccgctaaaaagagactcaattttggtcagactggcgactcagagtcagtccccgacccacaacctctcggagaacctccagcaacccccgctgctgtgggacctactacaatggcttcaggcggtggcgcaccaatggcagacaataacgaaggcgccgacggagtgggtaatgcctcaggaaattggcattgcgattccacatggctgggcgacagagtcatcaccaccagcacccgaacatgggccttgcccacctataacaaccacctctacaagcaaatctccagtgcttcaacgggggccagcaacgacaaccactacttcggctacagcaccccctgggggtattttgatttcaacagattccactgccatttctcaccacgtgactggcagcgactcatcaacaacaattggggattccggcccaagagactcaacttcaagctcttcaacatccaagtcaaggaggtcacgacgaatgatggcgtcacgaccatcgctaataaccttaccagcacggttcaagtcttctcggactcggagtaccagttgccgtacgtcctcggctctgcgcaccagggctgcctccctccgttcccggcggacgtgttcatgattccgcagtacggctacctaacgctcaacaatggcagccaggcagtgggacggtcatccttttactgcctggaatatttcccatcgcagatgctgagaacgggcaataactttaccttcagctacaccttcgaggacgtgcctttccacagcagctacgcgcacagccagagcctggaccggctgatgaatcctctcatcgaccagtacctgtattacctgaacagaactcagaatcagtccggaagtgcccaaaacaaggacttgctgtttagccgggggtctccagctggcatgtctgttcagcccaaaaactggctacctggaccctgttaccggcagcagcgcgtttctaaaacaaaaacagacaacaacaacagcaactttacctggactggtgcttcaaaatataaccttaatgggcgtgaatctataatcaaccctggcactgctatggcctcacacaaagacgacaaagacaagttctttcccatgagcggtgtcatgatttttggaaaggagagcgccggagcttcaaacactgcattggacaatgtcatgatcacagacgaagaggaaatcaaagccactaaccccgtggccaccgaaagatttgggactgtggcagtcaatctccagagcagcagcacagaccctgcgaccggagatgtgcatgttatgggagccttacctggaatggtgtggcaagacagagacgtatacctgcagggtcctatttgggccaaaattcctcacacggatggacactttcacccgtctcctctcatgggcggctttggacttaagcacccgcctcctcagatcctcatcaaaaacacgcctgttcctgcgaatcctccggcagagttttcggctacaaagtttgcttcattcatcacccagtattccacaggacaagtgagcgtggagattgaatgggagctgcagaaagaaaacagcaaacgctggaatcccgaagtgcagtatacatctaactatgcaaaatctgccaacgttgatttcactgtggacaacaatggactttatactgagcctcgccccattggcacccgttacctcacccgtcccctgtaa

SEQ ID NO: 100 - protein, 736 aa, Adeno-associated virus; identical to SEQ ID NO: 96

SEQ ID NO: 101 - protein, 736 aa, Adeno-associated virus
MAADGYLPDWLEDNLSEGIREWWDLKPGAPKPKANQQKQDDGRGLVLPGYKYLGPFNGLDKGEPVNAADAAALEHDKAYDQQLKAGDNPYLRYNHADAEFQERLQEDTSFGGNLGRAVFQAKKRVLEPFGLVEEGAKTAPGKKRPVEQSPQEPDSSSGIGKTGQQPAKKRLNFGQTGDSESVPDPQPLGEPPATPAAVGPTTMASGGGAPMADNNEGADGVGNASGNWHCDSTWLGDRVITTSTRTWALPTYNNHLYKQISSASTGASNDNHYFGYSTPWGYFDFNRFHCHFSPRDWQRLINNNWGFRPKRLNFKLFNIQVKEVTTNDGVTTIANNLTSTVQVFSDSEYQLPYVLGSAHQGCLPPFPADVFMIPQYGYLTLNNGSQAVGRSSFYCLEYFPSQMLRTGNNFTFSYTFEDVPFHSSYAHSQSLDRLMNPLIDQYLYYLNRTQNQSGSAQNKDLLFSRGSPAGMSVQPKNWLPGPCYRQQRVSKTKTDNNNSNFTWTGASKYNLNGRESIINPGTAMASHKDDEDKFFPMSGVMIFGKESAGASNTALDNVMITDEEEIKATNPVATERFGTVAVNLQSSSTDPATGDVHVMGALPGMVWQDRDVYLQGPIWAKIPHTDGHFHPSPLMGGFGLKHPPPQILIKNTPVPANPPAEFSATKFASFITQYSTGQVSVEIEWELQKENSKRWNPEVQYTSNYAKSANVDFTVDNNGLYTEPRPIGTRYLTRPL

SEQ ID NO: 102 - protein, 736 aa, Adeno-associated virus
MAADGYLPDWLEDNLSEGIREWWDLKPGAPKPKANQQKQDDGRGLVLPGYKYLGPFNGLDKGEPVNAADAAALEHDKAYDQQLKAGDNPYLRYNHADAEFQERLQEDTSFGGNLGRAVFQAKKRVLEPLGLVEEGAKTAPGKKRPVEQSPQEPDSSSGIGKTGQQPAKKRLNFGQTGDSESVPDPQPLGEPPATPAAVGPTTMASGGGAPMADNNEGADGVGNASGNWHCDSTWLGDRVITTSTRTWALPTYNNHLYKQISSASTGASNDNHYFGYSTPWGYFDFNRFHCHFSPRDWQRLINNNWGFRPKRLNFKLFNIQVKEVTTNDGVTTIANNLTSTVQVFSDSEYQLPYVLGSAHQGCLPPFPADVFMIPQYGYLTLNNGSQAVGRSSFYCLEYFPSQMLRTGNNFTFSYTFEDVPFHSSYAHSQSLDRLMNPLIDQYLYYLNRTQNQSGSAQNKDLLFSRGSPAGMSVQPKNWLPGPCYRQQRVSKTKTDNNNSNFTWTGASKYNLNGRESIINPGTAMASHKDDEDKFFPMSGVMIFGKESAGASNTALDNVMITDEEEIKATNPVATERFGTVAVNLQSSSTDPATGDVHVMGALPGMVWQDRDVYLQGPIWAKIPHTDGHFHPSPLMGGFGLKHPPPQILIKNTPVPANPPAEFSATKFASFITQYSTGQVSVEIEWELQKENSKRWNPEVQYTSNYAKSANVDFTVDNNGLYTEPRPIGTRYLTRPL

SEQ ID NO: 103 - protein, 736 aa, Adeno-associated virus
MAADGYLPDWLEDNLSEGIREWWDLKPGAPKPKANQQKQDDGRGLVLPGYKYLGPFNGLDKGEPVNAADAAALEHDKAYDQQLKAGDNPYLRYNHADAEFQERLQEDTSFGGNLGRAVFQAKKRVLEPLGLVEEGAKTAPGKKRPVEQSPQEPDSSSGIGKTGQQPAKKRLNFGQTGDSESVPDPQPLGEPPATPAAVGPTTMASGGGAPMADNNEGADGVGNASGNWHCDSTWLGDRVITTSTRTWALPTYNNHLYKQISSASTGASNDNHYFGYSTPWGYFDFNRFHCHFSPRDWQRLINNNWGFRPKRLNFKLFNIQVKEVTTNDGVTTIANNLTSTVQVFSDSEYQLPYVLGSAHQGCLPPFPADVFMIPQYGYLTLNNGSQAVGRSSFYCLEYFPSQMLRTGNNFTFSYTFEDVPFHSSYAHSQSLDRLMNPLIDQYLYYLNRTQNQSGSAQNKDLLFSRGSPAGMSVQPKNWLPGPCYRQQRVSKTKTDNNNSNFTWTGASKYNLNGRESIINPGTAMASHKDDKDKFFPMSGVMIFGKESAGASNTALDNVMITDEEEIKATNPVATERFGTVAVNLQSSSTDPATGDVHVMGALPGMVWQDRDVYLQGPIWAKIPHTDGHFHPSPLMGGFGLKHPPPQILIKNTPVPANPPAEFSATKFASFITQYSTGQVSVEIEWELQKENSKRWNPEVQYTSNYAKSANVDFTVDNNGLYTEPRPIGTRYLTRPL

SEQ ID NO: 104 - DNA, 2214 bp, Adeno-associated virus
atggctgccgatggttatcttccagattggctcgaggacaacctctctgagggcattcgcgagtggtgggacctgaaacctggagccccgaaacccaaagccaaccagcaaaagcaggacaacggccggggtctggtgcttcctggctacaagtacctcggacccttcaacggactcgacaagggggagcccgtcaacgcggcggacgcagcggccctcgagcacgacaaggcctacgaccagcagctcaaagcgggtgacaatccgtacctgcggtataaccacgccgacgccgagtttcaggagcgtctgcaagaagatacgtcatttgggggcaacctcgggcgagcagtcttccaggccaagaagcgggttctcgaacctctcggtctggttgaggaaggcgctaagacggctcctgcaaagaagagaccggtagagccgtcacctcagcgttcccccgactcctccacgggcatcggcaagaaaggccagcagcccgccagaaagagactcaatttcggtcagactggcgactcagagtcagtccccgaccctcaacctctcggagaacctccagcagcgccctctagtgtgggatctggtacagtggctgcaggcggtggcgcaccaatggcagacaataacgaaggtgccgacggagtgggtaatgcctcaggaaattggcattgcgattccacatggctgggcgacagagtcattaccaccagcacccgaacctgggccctgcccacctacaacaaccacctctacaagcaaatctccagtgaaactgcaggtagtaccaacgacaacacctacttcggctacagcaccccctgggggtattttgactttaacagattccactgccacttctcaccacgtgactggcagcgactcatcaacaacaactggggattccggcccaagaagctgcggttcaagctcttcaacatccaggtcaaggaggtcacgacgaatgacggcgttacgaccatcgctaataaccttaccagcacgattcaggtattctcggactcggaataccagctgccgtacgtcctcggctctgcgcaccagggctgcctgcctccgttcccggcggacgtcttcatgattcctcagtacggctacctgactctcaacaatggcagtcagtctgtgggacgttcctccttctactgcctggagtacttcccctctcagatgctgagaacgggcaacaactttgagttcagctacagcttcgaggacgtgcctttccacagcagctacgcacacagccagagcctggaccggctgatgaatcccctcatcgaccagtacttgtactacctggccagaacacagagtaacccaggaggcacagctggcaatcgggaactgcagttttaccagggcgggccttcaactatggccgaacaagccaagaattggttacctggaccttgcttccggcaacaaagagtctccaaaacgctggatcaaaacaacaacagcaactttgcttggactggtgccaccaaatatcacctgaacggcagaaactcgttggttaatcccggcgtcgccatggcaactcacaaggacgacgaggaccgctttttcccatccagcggagtcctgatttttggaaaaactggagcaactaacaaaactacattggaaaatgtgttaatgacaaatgaagaagaaattcgtcctactaatcctgtagccacggaagaatacgggatagtcagcagcaacttacaagcggctaatactgcagcccagacacaagttgtcaacaaccagggagccttacctggcatggtctggcagaaccgggacgtgtacctgcagggtcccatctgggccaagattcctcacacggatggcaactttcacccgtctcctttgatgggcggctttggacttaaacatccgcctcctcagatcctgatcaagaacactcccgttcccgctaatcctccggaggtgtttactcctgccaagtttgcttcgttcatcacacagtacagcaccggacaagtcagcgtggaaatcgagtgggagctgcagaaggaaaacagcaagcgctggaacccggagattcagtacacctccaactttgaaaagcagactggtgtggactttgccgttgacagccagggtgtttactctgagcctcgccctattggcactcgttacctcacccgtaatctgtaa

SEQ ID NO: 105 - protein, 738 aa, Adeno-associated virus
MAADGYLPDWLEDNLSEGIREWWALKPGAPKPKANQQKQDDGRGLVLPGYKYLGPFNGLDKGEPVNAADAAALEHDKAYDQQLQAGDNPYLRYNHADAEFQERLQEDTSFGGNLGRAVFQAKKRVLEPLGLVEEGAKTAPGKKRPVEPSPQRSPDSSTGIGKKGQQPARKRLNFGQTGDSESVPDPQPLGEPPAAPSGVGPNTMAAGGGAPMADNNEGADGVGSSSGNWHCDSTWLGDRVITTSTRTWALPTYNNHLYKQISNGTSGGATNDNTYFGYSTPWGYFDFNRFHCHFSPRDWQRLINNNWGFRPKRLSFKLFNIQVKEVTQNEGTKTIANNLTSTIQVFTDSEYQLPYVLGSAHQGCLPPFPADVFMIPQYGYLTLNNGSQAVGRSSFYCLEYFPSQMLRTGNNFQFTYTFEDVPFHSSYAHSQSLDRLMNPLIDQYLYYLSRTQTTGGTANTQTLGFSQGGPNTMANQAKNWLPGPCYRQQRVSTTTGQNNNSNFAWTAGTKYHLNGRNSLANPGIAMATHKDDEERFFPSNGILIFGKQNAARDNADYSDVMLTSEEEIKTTNPVATEEYGIVADNLQQQNTAPQIGTVNSQGALPGMVWQNRDVYLQGPIWAKIPHTDGNFHPSPLMGGFGLKHPPPQILIKNTPVPADPPTTFNQSKLNSFITQYSTGQVSVEIEWELQKENSKRWNPEIQYTSNYYKSTSVDFAVNTEGVYSEPRPIGTRYLTRNL

SEQ ID NO: 106 - protein, 737 aa, Adeno-associated virus 7
MAADGYLPDWLEDNLSEGIREWWDLKPGAPKPKANQQKQDNGRGLVLPGYKYLGPFNGLDKGEPVNAADAAALEHDKAYDQQLKAGDNPYLRYNHADAEFQERLQEDTSFGGNLGRAVFQAKKRVLEPLGLVEEGAKTAPAKKRPVEPSPQRSPDSSTGIGKKGQQPARKRLNFGQTGDSESVPDPQPLGEPPAAPSSVGSGTVAAGGGAPMADNNEGADGVGNASGNWHCDSTWLGDRVITTSTRTWALPTYNNHLYKQISSETAGSTNDNTYFGYSTPWGYFDFNRFHCHFSPRDWQRLINNNWGFRPKKLRFKLFNIQVKEVTTNDGVTTIANNLTSTIQVFSDSEYQLPYVLGSAHQGCLPPFPADVFMIPQYGYLTLNNGSQSVGRSSFYCLEYFPSQMLRTGNNFEFSYSFEDVPFHSSYAHSQSLDRLMNPLIDQYLYYLARTQSNPGGTAGNRELQFYQGGPSTMAEQAKNWLPGPCFRQQRVSKTLDQNNNSNFAWTGATKYHLNGRNSLVNPGVAMATHKDDEDRFFPSSGVLIFGKTGATNKTTLENVLMTNEEEIRPTNPVATEEYGIVSSNLQAANTAAQTQVVNNQGALPGMVWQNRDVYLQGPIWAKIPHTDGNFHPSPLMGGFGLKHPPPQILIKNTPVPANPPEVFTPAKFASFITQYSTGQVSVEIEWELQKENSKRWNPEIQYTSNFEKQTGVDFAVDSQGVYSEPRPIGTRYLTRNL

SEQ ID NO: 107 - protein, 623 aa, Artificial Sequence
  source: /note="Description of Artificial Sequence: Synthetic polypeptide"
MPGFYEIVIKVPSDLDEHLPGISDSFVNWVAEKEWELPPDSDMDLNLIEQAPLTVAEKLQRDFLVQWRRVSKAPEALFFVQFEKGESYFHLHVLVETTGVKSMVLGRFLSQIREKLVQTIYRGVEPTLPNWFAVTKTRNGAGGGNKVVDECYIPNYLLPKTQPELQWAWTNMEEYISACLNLAERKRLVAQHLTHVSQTQEQNKENLNPNSDAPVIRSKTSARYMELVGWLVDRGITSEKQWIQEDQASYISFNAASNSRSQIKAALDNAGKIMALTKSAPDYLVGPSLPADIKTNRIYRILELNGYDPAYAGSVFLGWAQKKFGKRNTIWLFGPATTGKTNIAEAIAHAVPFYGCVNWTNENFPFNDCVDKMVIWWEEGKMTAKVVESAKAILGGSKVRVDQKCKSSAQIDPTPVIVTSNTNMCAVIDGNSTTFEHQQPLQDRMFKFELTRRLEHDFGKVTKQEVKEFFRWASDHVTEVAHEFYVRKGGASKRPAPDDADISEPKRACPSVADPSTSDAEGAPVDFADRYQNKCSRHAGMIQMLFPCKTCERMNQNFNICFTHGVRDCLECFPGVSESQPVVRKKTYRKLCAIHHLLGRAPEIACSACDLVNVDLDDCVSEQ

SEQ ID NO: 108 - DNA, 4721 bp, Adeno-associated virus 7
ttggccactccctctatgcgcgctcgctcgctcggtggggcctgcggaccaaaggtccgcagacggcagagctctgctctgccggccccaccgagcgagcgagcgcgcatagagggagtggccaactccatcactaggggtaccgcgaagcgcctcccacgctgccgcgtcagcgctgacgtaaatcacgtcataggggagtggtcctgtattagctgtcacgtgagtgcttttgcgacattttgcgacaccacgtggccatttgaggtatatatggccgagtgagcgagcaggatctccattttgaccgcgaaatttgaacgagcagcagccatgccgggtttctacgagatcgtgatcaaggtgccgagcgacctggacgagcacctgccgggcatttctgactcgtttgtgaactgggtggccgagaaggaatgggagctgcccccggattctgacatggatctgaatctgatcgagcaggcacccctgaccgtggccgagaagctgcagcgcgacttcctggtccaatggcgccgcgtgagtaaggccccggaggccctgttctttgttcagttcgagaagggcgagagctacttccaccttcacgttctggtggagaccacgggggtcaagtccatggtgctaggccgcttcctgagtcagattcgggagaagctggtccagaccatctaccgcggggtcgagcccacgctgcccaactggttcgcggtgaccaagacgcgtaatggcgccggcggggggaacaaggtggtggacgagtgctacatccccaactacctcctgcccaagacccagcccgagctgcagtgggcgtggactaacatggaggagtatataagcgcgtgtttgaacctggccgaacgcaaacggctcgtggcgcagcacctgacccacgtcagccagacgcaggagcagaacaaggagaatctgaaccccaattctgacgcgcccgtgatcaggtcaaaaacctccgcgcgctacatggagctggtcgggtggctggtggaccggggcatcacctccgagaagcagtggatccaggaggaccaggcctcgtacatctccttcaacgccgcctccaactcgcggtcccagatcaaggccgcgctggacaatgccggcaagatcatggcgctgaccaaatccgcgcccgactacctggtggggccctcgctgcccgcggacattaaaaccaaccgcatctaccgcatcctggagctgaacgggtacgatcctgcctacgccggctccgtctttctcggctgggcccagaaaaagttcgggaagcgcaacaccatctggctgtttgggcccgccaccaccggcaagaccaacattgcggaagccatcgcccacgccgtgcccttctacggctgcgtcaactggaccaatgagaactttcccttcaacgattgcgtcgacaagatggtgatctggtgggaggagggcaagatgacggccaaggtcgtggagtccgccaaggccattctcggcggcagcaaggtgcgcgtggaccaaaagtgcaagtcgtccgcccagatcgaccccacccccgtgatcgtcacctccaacaccaacatgtgcgccgtgattgacgggaacagcaccaccttcgagcaccagcagccgttgcaggaccggatgttcaaatttgaactcacccgccgtctggagcacgactttggcaaggtgacgaagcaggaagtcaaagagttcttccgctgggccagtgatcacgtgaccgaggtggcgcatgagttctacgtcagaaagggcggagccagcaaaagacccgcccccgatgacgcggatataagcgagcccaagcgggcctgcccctcagtcgcggatccatcgacgtcagacgcggaaggagctccggtggactttgccgacaggtaccaaaacaaatgttctcgtcacgcgggcatgattcagatgctgtttccctgcaaaacgtgcgagagaatgaatcagaatttcaacatttgcttcacacacggggtcagagactgtttagagtgtttccccggcgtgtcagaatctcaaccggtcgtcagaaaaaagacgtatcggaaactctgcgcgattcatcatctgctggggcgggcgcccgagattgcttgctcggcctgcgacctggtcaacgtggacctggacgactgcgtttctgagcaataaatgacttaaaccaggtatggctgccgatggttatcttccagattggctcgaggacaacctctctgagggcattcgcgagtggtgggacctgaaacctggagccccgaaacccaaagccaaccagcaaaagcaggacaacggccggggtctggtgcttcctggctacaagtacctcggacccttcaacggactcgacaagggggagcccgtcaacgcggcggacgcagcggccctcgagcacgacaaggcctacgaccagcagctcaaagcgggtgacaatccgtacctgcggtataaccacgccgacgccgagtttcaggagcgtctgcaagaagatacgtcatttgggggcaacctcgggcgagcagtcttccaggccaagaagcgggttctcgaacctctcggtctggttgaggaaggcgctaagacggctcctgcaaagaagagaccggtagagccgtcacctcagcgttcccccgactcctccacgggcatcggcaagaaaggccagcagcccgccagaaagagactcaatttcggtcagactggcgactcagagtcagtccccgaccctcaacctctcggagaacctccagcagcgccctctagtgtgggatctggtacagtggctgcaggcggtggcgcaccaatggcagacaataacgaaggtgccgacggagtgggtaatgcctcaggaaattggcattgcgattccacatggctgggcgacagagtcattaccaccagcacccgaacctgggccctgcccacctacaacaaccacctctacaagcaaatctccagtgaaactgcaggtagtaccaacgacaacacctacttcggctacagcaccccctgggggtattttgactttaacagattccactgccacttctcaccacgtgactggcagcgactcatcaacaacaactggggattccggcccaagaagctgcggttcaagctcttcaacatccaggtcaaggaggtcacgacgaatgacggcgttacgaccatcgctaataaccttaccagcacgattcaggtattctcggactcggaataccagctgccgtacgtcctcggctctgcgcaccagggctgcctgcctccgttcccggcggacgtcttcatgattcctcagtacggctacctgactctcaacaatggcagtcagtctgtgggacgttcctccttctactgcctggagtacttcccctctcagatgctgagaacgggcaacaactttgagttcagctacagcttcgaggacgtgcctttccacagcagctacgcacacagccagagcctggaccggctgatgaatcccctcatcgaccagtacttgtactacctggccagaacacagagtaacccaggaggcacagctggcaatcgggaactgcagttttaccagggcgggccttcaactatggccgaacaagccaagaattggttacctggaccttgcttccggcaacaaagagtctccaaaacgctggatcaaaacaacaacagcaactttgcttggactggtgccaccaaatatcacctgaacggcagaaactcgttggttaatcccggcgtcgccatggcaactcacaaggacgacgaggaccgctttttcccatccagcggagtcctgatttttggaaaaactggagcaactaacaaaactacattggaaaatgtgttaatgacaaatgaagaagaaattcgtcctactaatcctgtagccacggaagaatacgggatagtcagcagcaacttacaagcggctaatactgcagcccagacacaagttgtcaacaaccagggagccttacctggcatggtctggcagaaccgggacgtgtacctgcagggtcccatctgggccaagattcctcacacggatggcaactttcacccgtctcctttgatgggcggctttggacttaaacatccgcctcctcagatcctgatcaagaacactcccgttcccgctaatcctccggaggtgtttactcctgccaagtttgcttcgttcatcacacagtacagcaccggacaagtcagcgtggaaatcgagtgggagctgcagaaggaaaacagcaagcgctggaacccggagattcagtacacctccaactttgaaaagcagactggtgtggactttgccgttgacagccagggtgtttactctgagcctcgccctattggcactcgttacctcacccgtaatctgtaattgcatgttaatcaataaaccggttgattcgtttcagttgaactttggtctcctgtgcttcttatcttatcggtttccatagcaactggttacacattaactgcttgggtgcgcttcacgataagaacactgacgtcaccgcggtacccctagtgatggagttggccactccctctatgcgcgctcgctcgctcggtggggcctgcggaccaaaggtccgcagacggcagagctctgctctgccggccccaccgagcgagcgagcgcgcatagagggagtggccaa

SEQ ID NO: 109 - DNA, 2214 bp, Adeno-associated virus; identical to SEQ ID NO: 104

SEQ ID NO: 110 - protein, 737 aa, Adeno-associated virus; identical to SEQ ID NO: 106

SEQ ID NO: 111 - DNA, 2217 bp, Adeno-associated virus
atggctgccgatggttatcttccagattggctcgaggacaacctctctgagggcattcgcgagtggtgggcgctgaaacctggagccccgaagcccaaagccaaccagcaaaagcaggacgacggccggggtctggtgcttcctggctacaagtacctcggacccttcaacggactcgacaagggggagcccgtcaacgcggcggacgcagcggccctcgagcacgacaaggcctacgaccagcagctgcaggcgggtgacaatccgtacctgcggtataaccacgccgacgccgagtttcaggagcgtctgcaagaagatacgtcttttgggggcaacctcgggcgagcagtcttccaggccaagaagcgggttctcgaacctctcggtctggttgaggaaggcgctaagacggctcctggaaagaagagaccggtagagccatcaccccagcgttctccagactcctctacgggcatcggcaagaaaggccaacagcccgccagaaaaagactcaattttggtcagactggcgactcagagtcagttccagaccctcaacctctcggagaacctccagcagcgccctctggtgtgggacctaatacaatggctgcaggcggtggcgcaccaatggcagacaataacgaaggcgccgacggagtgggtagttcctcgggaaattggcattgcgattccacatggctgggcgacagagtcatcaccaccagcacccgaacctgggccctgcccacctacaacaaccacctctacaagcaaatctccaacgggacatcgggaggagccaccaacgacaacacctacttcggctacagcaccccctgggggtattttgactttaacagattccactgccacttttcaccacgtgactggcagcgactcatcaacaacaactggggattccggcccaagagactcagcttcaagctcttcaacatccaggtcaaggaggtcacgcagaatgaaggcaccaagaccatcgccaataacctcaccagcaccatccaggtgtttacggactcggagtaccagctgccgtacgttctcggctctgcccaccagggctgcctgcctccgttcccggcggacgtgttcatgattccccagtacggctacctaacactcaacaacggtagtcaggccgtgggacgctcctccttctactgcctggaatactttccttcgcagatgctgagaaccggcaacaacttccagtttacttacaccttcgaggacgtgcctttccacagcagctacgcccacagccagagcttggaccggctgatgaatcctctgattgaccagtacctgtactacttgtctcggactcaaacaacaggaggcacggcaaatacgcagactctgggcttcagccaaggtgggcctaatacaatggccaatcaggcaaagaactggctgccaggaccctgttaccgccaacaacgcgtctcaacgacaaccgggcaaaacaacaatagcaactttgcctggactgctgggaccaaataccatctgaatggaagaaattcattggctaatcctggcatcgctatggcaacacacaaagacgacgaggagcgtttttttcccagtaacgggatcctgatttttggcaaacaaaatgctgccagagacaatgcggattacagcgatgtcatgctcaccagcgaggaagaaatcaaaaccactaaccctgtggctacagaggaatacggtatcgtggcagataacttgcagcagcaaaacacggctcctcaaattggaactgtcaacagccagggggccttacccggtatggtctggcagaaccgggacgtgtacctgcagggtcccatctgggccaagattcctcacacggacggcaacttccacccgtctccgctgatgggcggctttggcctgaaacatcctccgcctcagatcctgatcaagaacacgcctgtacctgcggatcctccgaccaccttcaaccagtcaaagctgaactctttcatcacgcaatacagcaccggacaggtcagcgtggaaattgaatgggagctgcagaaggaaaacagcaagcgctggaaccccgagatccagtacacctccaactactacaaatctacaagtgtggactttgctgttaatacagaaggcgtgtactctgaaccccgccccattggcacccgttacctcacccgtaatctgtaa

SEQ ID NO: 112 - DNA, 2213 bp, Adeno-associated virus 8
atggctgccgatggttatcttccagattggctcgaggacaacctctctgagggcattcgcgagtggtgggcgctgaaacctggagccccgaagcccaaagccaaccagcaaaagcaggacgacggccggggtctggtgcttcctggctacaagtacctcggacccttcaacggactcgacaagggggagcccgtcaacgcggcggacgcagcggccctcgagcacgacaaggcctacgaccagcagctgcaggcgggtgacaatccgtacctgcggtataaccacgccgacgccgagtttcaggagcgtctgcaagaagatacgtcttttgggggcaacctcgggcgagcagtcttccaggccaagaagcgggttctcgaacctctcggtctggttgaggaaggcgctaagacggctcctggaaagaagagaccggtagagccatcaccccagcgttctccagactcctctacgggcatcggcaagaaaggccaacagcccgccagaaaaagactcaattttggtcagactggcgactcagagtcagttccagaccctcaacctctcggagaacctccagcagcgccctctggtgtgggacctaatacaatggctgcaggcggtggcgcaccaatggcagacaataacgaaggcgccgacggagtgggtagttcctcgggaaattggcattgcgattccacatggctgggcgacagagtcatcaccaccagcacccgaacctgggccctgcccacctacaacaaccacctctacaagcaaatctccaacgggacatcgggaggagccaccaacgacaacacctacttcggctacagcaccccctgggggtattttgactttaacagattccactgccacttttcaccacgtgactggcagcgactcatcaacaacaactggggattccggcccaagagactcagcttcaagctcttcaacatccaggtcaaggaggtcacgcagaatgaaggcaccaagaccatcgccaataacctcaccagcaccatccaggtgtttacggactcggagtaccagctgccgtacgttctcggctctgcccaccagggctgcctgcctccgttcccggcggacgtgttcatgattccccagtacggctacctaacactcaacaacggtagtcaggccgtgggacgctcctccttctactgcctggaatactttccttcgcagatgctgagaaccggcaacaacttccagtttacttacaccttcgaggacgtgcctttccacagcagctacgcccacagccagagcttggaccggctgatgaatcctctgattgaccagtacctgtactacttgtctcggactcaaacaacaggaggcacggcaaatacgcagactctgggcttcagccaaggtgggcctaatacaatggccaatcaggcaaagaactggctgccaggaccctgttaccgccaacaacgcgtctcaacgacaaccgggcaaaacaacaatagcaactttgcctggactgctgggaccaaataccatctgaatggaagaaattcattggctaatcctggcatcgctatggcaacacacaaagacgacgaggagcgtttttttcccagtaacgggatcctgatttttggcaaacaaaatgctgccagagacaatgcggattacagcgatgtcatgctcaccagcgaggaagaaatcaaaaccactaaccctgtggctacagaggaatacggtatcgtggcagataacttgcagcagcaaaacacggctcctcaaattggaactgtcaacagccagggggccttacccggtatggtctggcagaaccgggacgtgtacctgcagggtcccatctgggccaagattcctcacacggacggcaacttccacccgtctccgctgatgggcggctttggcctgaaacatcctccgcctcagatcctgatcaagaacacgcctgtacctgcggatcctccgaccaccttcaaccagtcaaagctgaactctttcatcacgcaatacagcaccggacaggtcagcgtggaaattgaatgggagctgcagaaggaaaacagcaagcgctggaaccccgagatccagtacacctccaactactacaaatctacaagtgtggactttgctgtaatacagaaggcgtgtactctgaaccccgccccattggcacccgttacctcacccgtaatctg

SEQ ID NO: 113 - DNA, 4393 bp, Adeno-associated virus 8
cagagagggagtggccaactccatcactaggggtagcgcgaagcgcctcccacgctgccgcgtcagcgctgacgtaaattacgtcataggggagtggtcctgtattagctgtcacgtgagtgcttttgcggcattttgcgacaccacgtggccatttgaggtatatatggccgagtgagcgagcaggatctccattttgaccgcgaaatttgaacgagcagcagccatgccgggcttctacgagatcgtgatcaaggtgccgagcgacctggacgagcacctgccgggcatttctgactcgtttgtgaactgggtggccgagaaggaatgggagctgcccccggattctgacatggatcggaatctgatcgagcaggcacccctgaccgtggccgagaagctgcagcgcgacttcctggtccaatggcgccgcgtgagtaaggccccggaggccctcttctttgttcagttcgagaagggcgagagctactttcacctgcacgttctggtcgagaccacgggggtcaagtccatggtgctaggccgcttcctgagtcagattcgggaaaagcttggtccagaccatctacccgcggggtcgagccccaccttgcccaactggttcgcggtgaccaaagacgcggtaatggcgccggcgggggggaacaaggtggtggacgagtgctacatccccaactacctcctgcccaagactcagcccgagctgcagtgggcgtggactaacatggaggagtatataagcgcgtgcttgaacctggccgagcgcaaacggctcgtggcgcagcacctgacccacgtcagccagacgcaggagcagaacaaggagaatctgaaccccaattctgacgcgcccgtgatcaggtcaaaaacctccgcgcgctatatggagctggtcgggtggctggtggaccggggcatcacctccgagaagcagtggatccaggaggaccaggcctcgtacatctccttcaacgccgcctccaactcgcggtcccagatcaaggccgcgctggacaatgccggcaagatcatggcgctgaccaaatccgcgcccgactacctggtggggccctcgctgcccgcggacattacccagaaccgcatctaccgcatcctcgctctcaacggctacgaccctgcctacgccggctccgtctttctcggctgggctcagaaaaagttcgggaaacgcaacaccatctggctgtttggacccgccaccaccggcaagaccaacattgcggaagccatcgcccacgccgtgcccttctacggctgcgtcaactggaccaatgagaactttcccttcaatgattgcgtcgacaagatggtgatctggtgggaggagggcaagatgacggccaaggtcgtggagtccgccaaggccattctcggcggcagcaaggtgcgcgtggaccaaaagtgcaagtcgtccgcccagatcgaccccacccccgtgatcgtcacctccaacaccaacatgtgcgccgtgattgacgggaacagcaccaccttcgagcaccagcagcctctccaggaccggatgtttaagttcgaactcacccgccgtctggagcacgactttggcaaggtgacaaagcaggaagtcaaagagttcttccgctgggccagtgatcacgtgaccgaggtggcgcatgagttttacgtcagaaagggcggagccagcaaaagacccgcccccgatgacgcggataaaagcgagcccaagcgggcctgcccctcagtcgcggatccatcgacgtcagacgcggaaggagctccggtggactttgccgacaggtaccaaaacaaatgttctcgtcacgcgggcatgcttcagatgctgtttccctgcaaaacgtgcgagagaatgaatcagaatttcaacatttgcttcacacacggggtcagagactgctcagagtgtttccccggcgtgtcagaatctcaaccggtcgtcagaaagaggacgtatcggaaactctgtgcgattcatcatctgctggggcgggctcccgagattgcttgctcggcctgcgatctggtcaacgtggacctggatgactgtgtttctgagcaataaatgacttaaaccaggtatggctgccgatggttatcttccagattggctcgaggacaacctctctgagggcattcgcgagtggtgggcgctgaaacctggagccccgaagcccaaagccaaccagcaaaagcaggacgacggccggggtctggtgcttcctggctacaagtacctcggacccttcaacggactcgacaagggggagcccgtcaacgcggcggacgcagcggccctcgagcacgacaaggcctacgaccagcagctgcaggcgggtgacaatccgtacctgcggtataaccacgccgacgccgagtttcaggagcgtctgcaagaagatacgtcttttgggggcaacctcgggcgagcagtcttccaggccaagaagcgggttctcgaacctctcggtctggttgaggaaggcgctaagacggctcctggaaagaagagaccggtagagccatcaccccagcgttctccagactcctctacgggcatcggcaagaaaggccaacagcccgccagaaaaagactcaattttggtcagactggcgactcagagtcagttccagaccctcaacctctcggagaacctccagcagcgccctctggtgtgggacctaatacaatggctgcaggcggtggcgcaccaatggcagacaataacgaaggcgccgacggagtgggtagttcctcgggaaattggcattgcgattccacatggctgggcgacagagtcatcaccaccagcacccgaacctgggccctgcccacctacaacaaccacctctacaagcaaatctccaacgggacatcgggaggagccaccaacgacaacacctacttcggctacagcaccccctgggggtattttgactttaacagattccactgccacttttcaccacgtgactggcagcgactcatcaacaacaactggggattccggcccaagagactcagcttcaagctcttcaacatccaggtcaaggaggtcacgcagaatgaaggcaccaagaccatcgccaataacctcaccagcaccatccaggtgtttacggactcggagtaccagctgccgtacgttctcggctctgcccaccagggctgcctgcctccgttcccggcggacgtgttcatgattccccagtacggctacctaacactcaacaacggtagtcaggccgtgggacgctcctccttctactgcctggaatactttccttcgcagatgctgagaaccggcaacaacttccagtttacttacaccttcgaggacgtgcctttccacagcagctacgcccacagccagagcttggaccggctgatgaatcctctgattgaccagtacctgtactacttgtctcggactcaaacaacaggaggcacggcaaatacgcagactctgggcttcagccaaggtgggcctaatacaatggccaatcaggcaaagaactggctgccaggaccctgttaccgccaacaacgcgtctcaacgacaaccgggcaaaacaacaatagcaactttgcctggactgctgggaccaaataccatctgaatggaagaaattcattggctaatcctggcatcgctatggcaacacacaaagacgacgaggagcgtttttttcccagtaacgggatcctgatttttggcaaacaaaatgctgccagagacaatgcggattacagcgatgtcatgctcaccagcgaggaagaaatcaaaaccactaaccctgtggctacagaggaatacggtatcgtggcagataacttgcagcagcaaaacacggctcctcaaattggaactgtcaacagccagggggccttacccggtatggtctggcagaaccgggacgtgtacctgcagggtcccatctgggccaagattcctcacacggacggcaacttccacccgtctccgctgatgggcggctttggcctgaaacatcctccgcctcagatcctgatcaagaacacgcctgtacctgcggatcctccgaccaccttcaaccagtcaaagctgaactctttcatcacgcaatacagcaccggacaggtcagcgtggaaattgaatgggagctgcagaaggaaaacagcaagcgctggaaccccgagatccagtacacctccaactactacaaatctacaagtgtggactttgctgttaatacagaaggcgtgtactctgaaccccgccccattggcacccgttacctcacccgtaatctgtaattgcctgttaatcaataaaccggttgattcgtttcagttgaactttggtctctgcg

SEQ ID NO: 114 - protein, 738 aa, Adeno-associated virus 8; identical to SEQ ID NO: 105

SEQ ID NO: 115 - protein, 737 aa, Adeno-associated virus 8
MAADGYLPDWLEDNLSEGIREWWALKPGAPKPKANQQKQDDGRGLVLPGYKYLGPFNGLDKGEPVNAADAAALEHDKAYDQQLQAGDNPYLRYNHADAEFQERLQEDTSFGGNLGRAVFQAKKRVLEPLGLVEEGAKTAPGKKRPVEPSPQRSPDSSTGIGKKGQQPARKRLNFGQTGDSESVPDPQPLGEPPAAPSGVGPNTMAAGGGAPMADNNEGADGVGSSSGNWHCDSTWLGDRVITTSTRTWALPTYNNHLYKQISNGTSGGATNDNTYFGYSTPWGYFDFNRFHCHFSPRDWQRLINNNWGFRPKRLSFKLFNIQVKEVTQNEGTKTIANNLTSTIQVFTDSEYQLPYVLGSAHQGCLPPFPADVFMIPQYGYLTLNNGSQAVGRSSFYCLEYFPSQMLRTGNNFQFTYTFEDVPFHSSYAHSQSLDRLMNPLIDQYLYYLSRTQTTGGTANTQTLGFSQGGPNTMANQAKNWLPGPCYRQQRVSTTTGQNNNSNFAWTAGTKYHLNGRNSLANPGIAMATHKDDEERFFPSNGILIFGKQNAARDNADYSDVMLTSEEEIKTTNPVATEEYGIVADNLQQQNTAPQIGTVNSQGALPGMVWQNRDVYLQGPIWAKIPHTDGNFHPSPLMGGFGLKHPPPQILIKNTPVPADPPTTFNQSKLNSFITQYSTGQVSVEIEWELQKENSKRWNPEIQYTSNYYKSTSVDFAVIQKACTLNPAPLAPVTSPVI

SEQ ID NO: 116 - DNA, 2217 bp, Adeno-associated virus; identical to SEQ ID NO: 111

SEQ ID NO: 117 - DNA, 2214 bp, Artificial Sequence
  source: /note="Description of Artificial Sequence: Synthetic polynucleotide"
atggctgccgatggttatcttccagattggctcgaggacaacctctctgagggcattcgcgagtggtgggcgctgaaacctggagccccgaagcccaaagccaaccagcaaaagcaggacgacggccggggtctggtgcttcctggctacaagtacctcggacccttcaacggactcgacaagggggagcccgtcaacgcggcggacgcagcggccctcgagcacgacaaggcctacgaccagcagctgcaggcgggtgacaatccgtacctgcggtataaccacgccgacgccgagtttcaggagcgtctgcaagaagatacgtcttttgggggcaacctcgggcgagcagtcttccaggccaagaagcgggttctcgaacctctcggtctggttgaggaaggcgctaagacggctcctggaaagaagagaccggtagagccatcaccccagcgttctccagactcctctacgggcatcggcaagaaaggccaacagcccgccagaaaaagactcaattttggtcagactggcgactcagagtcagttccagaccctcaacctctcggagaacctccagcagcgccctctggtgtgggacctaatacaatggctgcaggcggtggcgcaccaatggcagacaataacgaaggcgccgacggagtgggtagttcctcgggaaattggcattgcgattccacatggctgggcgacagagtcatcaccaccagcacccgaacctgggccctgcccacctacaacaaccacctctacaagcaaatctccaacgggacatcgggaggagccaccaacgacaacacctacttcggctacagcaccccctgggggtattttgactttaacagattccactgccacttttcaccacgtgactggcagcgactcatcaacaacaactggggattccggcccaagagactcagcttcaagctcttcaacatccaggtcaaggaggtcacgcagaatgaaggcaccaagaccatcgccaataacctcaccagcaccatccaggtgtttacggactcggagtaccagctgccgtacgttctcggctctgcccaccagggctgcctgcctccgttcccggcggacgtgttcatgattccccagtacggctacctaacactcaacaacggtagtcaggccgtgggacgctcctccttctactgcctggaatactttccttcgcagatgctgagaaccggcaacaacttccagtttacttacaccttcgaggacgtgcctttccacagcagctacgcccacagccagagcttggaccggctgatgaatcctctgattgaccagtacctgtactacttgtctcggactcaaacaacaggaggcacggcaaatacgcagactctgggcttcagccaaggtgggcctaatacaatggccaatcaggcaaagaactggctgccaggaccctgttaccgccaacaacgcgtctcaacgacaaccgggcaaaacaacaatagcaactttgcctggactgctgggaccaaataccatctgaatggaagaaattcattggctaatcctggcatcgctatggcaacacacaaagacgacgaggagcgtttttttcccagtaacgggatcctgatttttggcaaacaaaatgctgccagagacaatgcggattacagcgatgtcatgctcaccagcgaggaagaaatcaaaaccactaaccctgtggctacagaggaatacggtatcgtggcagataacttgcctgagcggacggcgatgagtcttccgggaactgtcaacagccagggggccttacccggtatggtctggcagaaccgggacgtgtacctgcagggtcccatctgggccaagattcctcacacggacggcaacttccacccgtctccgctgatgggcggctttggcctgaaacatcctccgcctcagatcctgatcaagaacacgcctgtacctgcggatcctccgaccaccttcaaccagtcaaagctgaactctttcatcacgcaatacagcaccggacaggtcagcgtggaaattgaatgggagctgcagaaggaaaacagcaagcgctggaaccccgagatccagtacacctccaactactacaaatctacaagtgtggactttgctgttaatacagaaggcgtgtactctgaaccccgccccattggcacccgttacctcacccgtaatctg

SEQ ID NO: 118 - protein, 738 aa, Artificial Sequence
  source: /note="Description of Artificial Sequence: Synthetic polypeptide"
MAADGYLPDWLEDNLSEGIREWWALKPGAPKPKANQQKQDDGRGLVLPGYKYLGPFNGLDKGEPVNAADAAALEHDKAYDQQLQAGDNPYLRYNHADAEFQERLQEDTSFGGNLGRAVFQAKKRVLEPLGLVEEGAKTAPGKKRPVEPSPQRSPDSSTGIGKKGQQPARKRLNFGQTGDSESVPDPQPLGEPPAAPSGVGPNTMAAGGGAPMADNNEGADGVGSSSGNWHCDSTWLGDRVITTSTRTWALPTYNNHLYKQISNGTSGGATNDNTYFGYSTPWGYFDFNRFHCHFSPRDWQRLINNNWGFRPKRLSFKLFNIQVKEVTQNEGTKTIANNLTSTIQVFTDSEYQLPYVLGSAHQGCLPPFPADVFMIPQYGYLTLNNGSQAVGRSSFYCLEYFPSQMLRTGNNFQFTYTFEDVPFHSSYAHSQSLDRLMNPLIDQYLYYLSRTQTTGGTANTQTLGFSQGGPNTMANQAKNWLPGPCYRQQRVSTTTGQNNNSNFAWTAGTKYHLNGRNSLANPGIAMATHKDDEERFFPSNGILIFGKQNAARDNADYSDVMLTSEEEIKTTNPVATEEYGIVADNLPERTAMSLPGTVNSQGALPGMVWQNRDVYLQGPIWAKIPHTDGNFHPSPLMGGFGLKHPPPQILIKNTPVPADPPTTFNQSKLNSFITQYSTGQVSVEIEWELQKENSKRWNPEIQYTSNYYKSTSVDFAVNTEGVYSEPRPIGTRYLTRNL

SEQ ID NO: 119 - DNA, 2214 bp, Artificial Sequence
  source: /note="Description of Artificial Sequence: Synthetic polynucleotide"
atggctgccgatggttatcttccagattggctcgaggacaacctctctgagggcattcgcgagtggtgggcgctgaaacctggagccccgaagcccaaagccaaccagcaaaagcaggacgacggccggggtctggtgcttcctggctacaagtacctcggacccttcaacggactcgacaagggggagcccgtcaacgcggcggacgcagcggccctcgagcacgacaaggcctacgaccagcagctgcaggcgggtgacaatccgtacctgcggtataaccacgccgacgccgagtttcaggagcgtctgcaagaagatacgtcttttgggggcaacctcgggcgagcagtcttccaggccaagaagcgggttctcgaacctctcggtctggttgaggaaggcgctaagacggctcctggaaagaagagaccggtagagccatcaccccagcgttctccagactcctctacgggcatcggcaagaaaggccaacagcccgccagaaaaagactcaattttggtcagactggcgactcagagtcagttccagaccctcaacctctcggagaacctccagcagcgccctctggtgtgggacctaatacaatggctgcaggcggtggcgcaccaatggcagacaataacgaaggcgccgacggagtgggtagttcctcgggaaattggcattgcgattccacatggctgggcgacagagtcatcaccaccagcacccgaacctgggccctgcccacctacaacaaccacctctacaagcaaatctccaacgggacatcgggaggagccaccaacgacaacacctacttcggctacagcaccccctgggggtattttgactttaacagattccactgccacttttcaccacgtgactggcagcgactcatcaacaacaactggggattccggcccaagagactcagcttcaagctcttcaacatccaggtcaaggaggtcacgcagaatgaaggcaccaagaccatcgccaataacctcaccagcaccatccaggtgtttacggactcggagtaccagctgccgtacgttctcggctctgcccaccagggctgcctgcctccgttcccggcggacgtgttcatgattccccagtacggctacctaacactcaacaacggtagtcaggccgtgggacgctcctccttctactgcctggaatactttccttcgcagatgctgagaaccggcaacaacttccagtttacttacaccttcgaggacgtgcctttccacagcagctacgcccacagccagagcttggaccggctgatgaatcctctgattgaccagtacctgtactacttgtctcggactcaaacaacaggaggcacggcaaatacgcagactctgggcttcagccaaggtgggcctaatacaatggccaatcaggcaaagaactggctgccaggaccctgttaccgccaacaacgcgtctcaacgacaaccgggcaaaacaacaatagcaactttgcctggactgctgggaccaaataccatctgaatggaagaaattcattggctaatcctggcatcgctatggcaacacacaaagacgacgaggagcgtttttttcccagtaacgggatcctgatttttggcaaacaaaatgctgccagagacaatgcggattacagcgatgtcatgctcaccagcgaggaagaaatcaaaaccactaaccctgtggctacagaggaatacggtatcgtggcagataacttgagttttagtcgtgcggttctttgtgatggaactgtcaacagccagggggccttacccggtatggtctggcagaaccgggacgtgtacctgcagggtcccatctgggccaagattcctcacacggacggcaacttccacccgtctccgctgatgggcggctttggcctgaaacatcctccgcctcagatcctgatcaagaacacgcctgtacctgcggatcctccgaccaccttcaaccagtcaaagctgaactctttcatcacgcaatacagcaccggacaggtcagcgtggaaattgaatgggagctgcagaaggaaaacagcaagcgctggaaccccgagatccagtacacctccaactactacaaatctacaagtgtggactttgctgttaatacagaaggcgtgtactctgaaccccgccccattggcacccgttacctcacccgtaatctg

SEQ ID NO: 120 - protein, 738 aa, Artificial Sequence
  source: /note="Description of Artificial Sequence: Synthetic polypeptide"
MAADGYLPDWLEDNLSEGIREWWALKPGAPKPKANQQKQDDGRGLVLPGYKYLGPFNGLDKGEPVNAADAAALEHDKAYDQQLQAGDNPYLRYNHADAEFQERLQEDTSFGGNLGRAVFQAKKRVLEPLGLVEEGAKTAPGKKRPVEPSPQRSPDSSTGIGKKGQQPARKRLNFGQTGDSESVPDPQPLGEPPAAPSGVGPNTMAAGGGAPMADNNEGADGVGSSSGNWHCDSTWLGDRVITTSTRTWALPTYNNHLYKQISNGTSGGATNDNTYFGYSTPWGYFDFNRFHCHFSPRDWQRLINNNWGFRPKRLSFKLFNIQVKEVTQNEGTKTIANNLTSTIQVFTDSEYQLPYVLGSAHQGCLPPFPADVFMIPQYGYLTLNNGSQAVGRSSFYCLEYFPSQMLRTGNNFQFTYTFEDVPFHSSYAHSQSLDRLMNPLIDQYLYYLSRTQTTGGTANTQTLGFSQGGPNTMANQAKNWLPGPCYRQQRVSTTTGQNNNSNFAWTAGTKYHLNGRNSLANPGIAMATHKDDEERFFPSNGILIFGKQNAARDNADYSDVMLTSEEEIKTTNPVATEEYGIVADNLSFSRAVLCDGTVNSQGALPGMVWQNRDVYLQGPIWAKIPHTDGNFHPSPLMGGFGLKHPPPQILIKNTPVPADPPTTFNQSKLNSFITQYSTGQVSVEIEWELQKENSKRWNPEIQYTSNYYKSTSVDFAVNTEGVYSEPRPIGTRYLTRNL

SEQ ID NO: 121 - DNA, 4385 bp, Adeno-associated virus 9
cagagagggagtggccaactccatcactaggggtaatcgcgaagcgcctcccacgctgccgcgtcagcgctgacgtagattacgtcataggggagtggtcctgtattagctgtcacgtgagtgcttttgcgacattttgcgacaccacatggccatttgaggtatatatggccgagtgagcgagcaggatctccattttgaccgcgaaatttgaacgagcagcagccatgccgggcttctacgagattgtgatcaaggtgccgagcgacctggacgagcacctgccgggcatttctgactcttttgtgaactgggtggccgagaaggaatgggagctgcccccggattctgacatggatcggaatctgatcgagcaggcacccctgaccgtggccgagaagctgcagcgcgacttcctggtccaatggcgccgcgtgagtaaggccccggaggccctcttctttgttcagttcgagaagggcgagagctactttcacctgcacgttctggtcgagaccacgggggtcaagtccatggtgctaggccgcttcctgagtcagattcgggagaagctggtccagaccatctaccgcgggatcgagccgaccctgcccaactggttcgcggtgaccaagacgcgtaatggcgccggcggggggaacaaggtggtggacgagtgctacatccccaactacctcctgcccaagactcagcccgagctgcagtgggcgtggactaacatggaggagtatataagcgcgtgcttgaacctggccgagcgcaaacggctcgtggcgcagcacctgacccacgtcagccagacgcaggagcagaacaaggagaatctgaaccccaattctgacgcgcccgtgatcaggtcaaaaacctccgcgcgctacatggagctggtcgggtggctggtggaccggggcatcacctccgagaagcagtggatccaggaggaccaggcctcgtacatctccttcaacgccgcctccaactcgcggtcccagatcaaggccgcgctggacaatgccggcaagatcatggcgctgaccaaatccgcgcccgactacctggtaggcccttcacttccggtggacattacgcagaaccgcatctaccgcatcctgcagctcaacggctacgaccctgcctacgccggctccgtctttctcggctgggcacaaaagaagttcgggaaacgcaacaccatctggctgtttgggccggccaccacgggaaagaccaacatcgcagaagccattgcccacgccgtgcccttctacggctgcgtcaactggaccaatgagaactttcccttcaacgattgcgtcgacaagatggtgatctggtgggaggagggcaagatgacggccaaggtcgtggagtccgccaaggccattctcggcggcagcaaggtgcgcgtggaccaaaagtgcaagtcgtccgcccagatcgaccccactcccgtgatcgtcacctccaacaccaacatgtgcgccgtgattgacgggaacagcaccaccttcgagcaccagcagcctctccaggaccggatgtttaagttcgaactcacccgccgtctggagcacgactttggcaaggtgacaaagcaggaagtcaaagagttcttccgctgggccagtgatcacgtgaccgaggtggcgcatgagttttacgtcagaaagggcggagccagcaaaagacccgcccccgatgacgcggataaaagcgagcccaagcgggcctgcccctcagtcgcggatccatcgacgtcagacgcggaaggagctccggtggactttgccgacaggtaccaaaacaaatgttctcgtcacgcgggcatgcttcagatgctgcttccctgcaaaacgtgcgagagaatgaatcagaatttcaacatttgcttcacacacggggtcagagactgctcagagtgtttccccggcgtgtcagaatctcaaccggtcgtcagaaagaggacgtatcggaaactctgtgcgattcatcatctgctggggcgggctcccgagattgcttgctcggcctgcgatctggtcaacgtggacctggatgactgtgtttctgagcaataaatgacttaaaccaggtatggctgccgatggttatcttccagattggctcgaggacaacctctctgagggcattcgcgagtggtgggcgctgaaacctggagccccgaagcccaaagccaaccagcaaaagcaggacgacggccggggtctggtgcttcctggctacaagtacctcggacccttcaacggactcgacaagggggagcccgtcaacgcggcggacgcagcggccctcgagcacggcaaggcctacgaccagcagctgcaggcgggtgacaatccgtacctgcggtataaccacgccgacgccgagtttcaggagcgtctgcaagaagatacgtcttttgggggcaacctcgggcgagcagtcttccaggccaagaagcgggttctcgaacctctcggtctggttgaggaaggcgctaagacggctcctggaaagaagagaccggtagagccatcaccccagcgttctccagactcctctacgggcatcggcaagaaaggccaacagcccgccagaaaaagactcaattttggtcagactggcgactcagagtcagttccagaccctcaacctctcggagaacctccagcagcgccctctggtgtgggacctaatacaatggctgcaggcggtggcgcaccaatggcagacaataacgaaggcgccgacggagtgggtaattcctcgggaaattggcattgcgattccacatggctgggggacagagtcatcaccaccagcacccgaacctgggcattgcccacctacaacaaccacctctacaagcaaatctccaatggaacatcgggaggaagcaccaacgacaacacctactttggctacagcaccccctgggggtattttgacttcaacagattccactgccacttctcaccacgtgactggcagcgactcatcaacaacaactggggattccggccaaagagactcaacttcaagctgttcaacatccaggtcaaggaggttacgacgaacgaaggcaccaagaccatcgccaataaccttaccagcaccgtccaggtctttacggactcggagtaccagctaccgtacgtcctaggctctgcccaccaaggatgcctgccaccgtttcctgcagacgtcttcatggttcctcagtacggctacctgacgctcaacaatggaagtcaagcgttaggacgttcttctttctactgtctggaatacttcccttctcagatgctgagaaccggcaacaactttcagttcagctacactttcgaggacgtgcctttccacagcagctacgcacacagccagagtctagatcgactgatgaaccccctcatcgaccagtacctatactacctggtcagaacacagacaactggaactgggggaactcaaactttggcattcagccaagcaggccctagctcaatggccaatcaggctagaaactgggtacccgggccttgctaccgtcagcagcgcgtctccacaaccaccaaccaaaataacaacagcaactttgcgtggacgggagctgctaaattcaagctgaacgggagagactcgctaatgaatcctggcgtggctatggcatcgcacaaagacgacgaggaccgcttctttccatcaagtggcgttctcatatttggcaagcaaggagccgggaacgatggagtcgactacagccaggtgctgattacagatgaggaagaaattaaagccaccaaccctgtagccacagaggaatacggagcagtggccatcaacaaccaggccgctaacacgcaggcgcaaactggacttgtgcataaccagggagttattcctggtatggtctggcagaaccgggacgtgtacctgcagggccctatttgggctaaaatacctcacacagatggcaactttcacccgtctcctctgatgggtggatttggactgaaacacccacctccacagattctaattaaaaatacaccagtgccggcagatcctcctcttaccttcaatcaagccaagctgaactctttcatcacgcagtacagcacgggacaagtcagcgtggaaatcgagtgggagctgcagaaagaaaacagcaagcgctggaatccagagatccagtatacttcaaactactacaaatctacaaatgtggactttgctgtcaataccaaaggtgtttactctgagcctcgccccattggtactcgttacctcacccgtaatttgtaattgcctgttaatcaataaaccggttaattcgtttcagttgaactttggtctctgcg

SEQ ID NO: 122 - DNA, 4382 bp, Adeno-associated virus 9
cagagagggagtggccaactccatcactaggggtaatcgcgaagcgcctcccacgctgccgcgtcagcgctgacgtagattacgtcataggggagtggtcctgtattagctgtcacgtgagtgcttttgcgacattttgcgacaccacatggccatttgaggtatatatggccgagtgagcgagcaggatctccattttgaccgcgaaatttgaacgagcagcagccatgccgggcttctacgagattgtgatcaaggtgccgagcgacctggacgagcacctgccgggcatttctgactcttttgtgaactgggtggccgagaaggaatgggagctgcccccggattctgacatggatcggaatctgatcgagcaggcacccctgaccgtggccgagaagctgtagcgcgacttcctggtccaatggcgccgcgtgagtaaggccccggaggccctcttctttgttcagttcgagaagggcgagagctactttcacctgcacgttctggtcgagaccacgggggtcaagtccatggtgctaggccgcttcctgagtcagattcgggagaagctggtccagaccatctaccgcgggatcgagccgaccctgcccaactggttcgcggtgaccaagacgcgtaatggcgccggcggggggaacaaggtggtggacgagtgctacatccccaactacctcctgcccaagactcagcccgagctgcagtgggcgtggactaacatggaggagtatataagcgcgtgcttgaacctggccgagcgcaaacggctcgtggcgcagcacctgacccacgtcagccagacgcaggagcagaacaaggagaatctgaaccccaattctgacgcgcccgtgatcaggtcaaaaacctccgcgcgctacatggagctggtcgggtggctggtggaccggggcatcacctccgagaagcagtggatccaggaggaccaggcctcgtacatctccttcaacgccgcctccaactcgcggtcccagatcaaggccgcgctggacaatgccggcaagatcatggcgctgaccaaatccgcgcccgactacctggtaggcccttcacttccggtggacattacgcagaaccgcatctaccgcatcctgcagctcaacggctacgaccctgcctacgccggctccgtctttctcggctgggcacaaaagaagttcgggaaacgcaacaccatctggctgtttgggccggccaccacgggaaagaccaacatcgcagaagccattgcccacgccgtgcccttctacggctgcgtcaactggaccaatgagaactttcccttcaacgattgcgtcgacaagatggtgatctggtgggaggagggcaagatgacggccaaggtcgtggagtccgccaaggccattctcggcggcagcaaggtgcgcgtggaccaaaagtgcaagtcgtccgcccagatcgaccccactcccgtgatcgtcacctccaacaccaacatgtgcgccgtgattgacgggaacagcaccaccttcgagcaccagcagcctctccaggaccggatgtttaagttcgaactcacccgccgtctggagcacgactttggcaaggtgacaaagcaggaagtcaaagagttcttccgctgggccagtgatcacgtgaccgaggtggcgcatgagttttacgtcagaaagggcggagccagcaaaagacccgcccccgatgacgcggataaaagcgagcccaagcgggcctgcccctcagtcgcggatccatcgacgtcagacgcggaaggagctccggtggactttgccgacaggtaccaaaacaaatgttctcgtcacgcgggcatgcttcagatgctgcttccctgcaaaacgtgcgagagaatgaatcagaatttcaacatttgcttcacacacggggtcagagactgctcagagtgtttccccggcgtgtcagaatctcaaccggtcgtcagaaagaggacgtatcggaaactctgtgcgattcatcatctgctggggcgggctcccgagattgcttgctcggcctgcgatctggtcaacgtggacctggatgactgtgtttctgagcaataaatgacttaaaccaggtatggctgccgatggttatcttccagattggctcgaggacaacctctctgagggcattcgcgagtggtgggacctgaaacctggagccccgaaacccaaagccaaccagcaaaagcaggacgacggccggggtctggtgcttcctggctacaagtacctcggacccttcaacggactcgacaagggggagcccgtcaacgcggcggacgcagcggccctcgagcacgacaaggcctacgaccagcagctcaaagcgggtgacaatccgtacctgcggtataaccacgccgacgccgagtttcaggagcgtctgcaagaagatacgtcttttgggggcaacctcgggcgagcagtcttccaggccaagaagcgggttctcgaacctctcggtctggttgaggaaggcgctaagacggctcctggaaagaagagaccggtagagcagtcaccccaagaaccagactcatcctcgggcatcggcaaatcaggccagcagcccgctaaaaagagactcaattttggtcagactggcgactcagagtcagtccccgacccacaacctctcggagaacctccagaagccccctcaggtctgggacctaatacaatggcttcaggcggtggcgctccaatggcagacaataacgaaggcgccgacggagtgggtaattcctcgggaaattggcattgcgattccacatggctgggggacagagtcatcaccaccagcacccgaacctgggcattgcccacctacaacaaccacctctacaagcaaatctccaatggaacatcgggaggaagcaccaacgacaacacctactttggctacagcaccccctgggggtattttgacttcaacagattccactgccacttctcaccacgtgactggcagcgactcatcaacaacaactggggattccggccaaagagactcaacttcaagctgttcaacatccaggtcaaggaggttacgacgaacgaaggcaccaagaccatcgccaataaccttaccagcaccgtccaggtctttacggactcggagtaccagctaccgtacgtcctaggctctgcccaccaaggatgcctgccaccgtttcctgcagacgtcttcatggttcctcagtacggctacctgacgctcaacaatggaagtcaagcgttaggacgttcttctttctactgtctggaatacttcccttctcagatgctgagaaccggcaacaactttcagttcagctacactttcgaggacgtgcctttccacagcagctacgcacacagccagagtctagatcgactgatgaaccccctcatcgaccagtacctatactacctggtcagaacacagacaactggaactgggggaactcaaactttggcattcagccaagcaggccctagctcaatggccaatcaggctagaaactgggtacccgggccttgctaccgtcagcagcgcgtctccacaaccaccaaccaaaataacaacagcaactttgcgtggacgggagctgctaaattcaagctgaacgggagagactcgctaatgaatcctggcgtggctatggcatcgcacaaagacgacgaggaccgcttctttccatcaagtggcgttctcatatttggcaagcaaggagccgggaacgatggagtcgactacagccaggtgctgattacagatgaggaagaaattaaagccaccaaccctgtagccacagaggaatacggagcagtggccatcaacaaccaggccgctaacacgcaggcgcaaactggacttgtgcataaccagggagttattcctggtatggtctggcagaaccgggacgtgtacctgcagggccctatttgggctaaaatacctcacacagatggcaactttcacccgtctcctctgatgggtggatttggactgaaacacccacctccacagattctaattaaaaatacaccagtgccggcagatcctcctcttaccttcaatcaagccaagctgaactctttcatcacgcagtacagcacgggacaagtcagcgtggaaatcgagtgggagctgcagaaagaaaacagcaagcgctggaatccagagatccagtatacttcaaactactacaaatctacaaatgtggactttgctgtcaataccgaaggtgtttactctgagcctcgccccattggtactcgttacctcacccgtaatttgtaattgcctgttaatcaataaaccggttaattcgtttcagttgaactttggtctctgcg

SEQ ID NO: 123 - protein, 736 aa, Adeno-associated virus 9
MAADGYLPDWLEDNLSEGIREWWALKPGAPQPKANQQHQDNARGLVLPGYKYLGPGNGLDKGEPVNAADAAALEHDKAYDQQLKAGDNPYLKYNHADAEFQERLKEDTSFGGNLGRAVFQAKKRLLEPLGLVEEAAKTAPGKKRPVEQSPQEPDSSAGIGKSGAQPAKKRLNFGQTGDTESVPDPQPIGEPPAAPSGVGSLTMASGGGAPVADNNEGADGVGSSSGNWHCDSQWLGDRVITTSTRTWALPTYNNHLYKQISNSTSGGSSNDNAYFGYSTPWGYFDFNRFHCHFSPRDWQRLINNNWGFRPKRLNFKLFNIQVKEVTDNNGVKTIANNLTSTVQVFTDSDYQLPYVLGSAHEGCLPPFPADVFMIPQYGYLTLNDGSQAVGRSSFYCLEYFPSQMLRTGNNFQFSYEFENVPFHSSYAHSQSLDRLMNPLIDQYLYYLSKTINGSGQNQQTLKFSVAGPSNMAVQGRNYIPGPSYRQQRVSTTVTQNNNSEFAWPGASSWALNGRNSLMNPGPAMASHKEGEDRFFPLSGSLIFGKQGTGRDNVDADKVMITNEEEIKTTNPVATESYGQVATNHQSAQAQAQTGWVQNQGILPGMVWQDRDVYLQGPIWAKIPHTDGNFHPSPLMGGFGMKHPPPQILIKNTPVPADPPTAFNKDKLNSFITQYSTGQVSVEIEWELQKENSKRWNPEIQYTSNYYKSNNVEFAVNTEGVYSEPRPIGTRYLTRNL

SEQ ID NO: 124 - protein, 736 aa, Artificial Sequence
  source: /note="Description of Artificial Sequence: Synthetic polypeptide"
MAADGYLPDWLEDNLSEGIREWWDLKPGAPKPKANQQKQDDGRGLVLPGYKYLGPFNGLDKGEPVNAADAAALEHDKAYDQQLKAGDNPYLRYNHADAEFQERLQEDTSFGGNLGRAVFQAKKRVLEPLGLVEEGAKTAPGKKRPVEQSPQEPDSSSGIGKSGQQPAKKRLNFGQTGDSESVPDPQPLGEPPEAPSGLGPNTMASGGGAPMADNNEGADGVGNSSGNWHCDSTWLGDRVITTSTRTWALPTYNNHLYKQISNGTSGGSTNDNTYFGYSTPWGYFDFNRFHCHFSPRDWQRLINNNWGFRPKRLNFKLFNIQVKEVTTNEGTKTIANNLTSTVQVFTDSEYQLPYVLGSAHQGCLPPFPADVFMVPQYGYLTLNNGSQALGRSSFYCLEYFPSQMLRTGNNFQFSYTFEDVPFHSSYAHSQSLDRLMNPLIDQYLYYLVRTQTTGTGGTQTLAFSQAGPSSMANQARNWVPGPCYRQQRVSTTTNQNNNSNFAWTGAAKFKLNGRDSLMNPGVAMASHKDDEDRFFPSSGVLIFGKQGAGNDGVDYSQVLITDEEEIKATNPVATEEYGAVAINNQAANTQAQTGLVHNQGVIPGMVWQNRDVYLQGPIWAKIPHTDGNFHPSPLMGGFGLKHPPPQILIKNTPVPADPPLTFNQAKLNSFITQYSTGQVSVEIEWELQKENSKRWNPEIQYTSNYYKSTNVDFAVNTEGVYSEPRPIGTRYLTRNL

SEQ ID NO: 125 - protein, 623 aa, Artificial Sequence
  source: /note="Description of Artificial Sequence: Synthetic polypeptide"
MPGFYEIVIKVPSDLDEHLPGISDSFVNWVAEKEWELPPDSDMDRNLIEQAPLTVAEKLQRDFLVQWRRVSKAPEALFFVQFEKGESYFHLHVLVETTGVKSMVLGRFLSQIREKLVQTIYRGIEPTLPNWFAVTKTRNGAGGGNKVVDECYIPNYLLPKTQPELQWAWTNMEEYISACLNLAERKRLVAQHLTHVSQTQEQNKENLNPNSDAPVIRSKTSARYMELVGWLVDRGITSEKQWIQEDQASYISFNAASNSRSQIKAALDNAGKIMALTKSAPDYLVGPSLPVDITQNRIYRILQLNGYDPAYAGSVFLGWAQKKFGKRNTIWLFGPATTGKTNIAEAIAHAVPFYGCVNWTNENFPFNDCVDKMVIWWEEGKMTAKVVESAKAILGGSKVRVDQKCKSSAQIDPTPVIVTSNTNMCAVIDGNSTTFEHQQPLQDRMFKFELTRRLEHDFGKVTKQEVKEFFRWASDHVTEVAHEFYVRKGGASKRPAPDDADKSEPKRACPSVADPSTSDAEGAPVDFADRYQNKCSRHAGMLQMLLPCKTCERMNQNFNICFTHGVRDCSECFPGVSESQPVVRKRTYRKLCAIHHLLGRAPEIACSACDLVNVDLDDCVSEQ

SEQ ID NO: 126 - DNA, 2211 bp, Adeno-associated virus
atggctgccgatggttatcttccagattggctcgaggacaaccttagtgaaggaattcgcgagtggtgggctttgaaacctggagcccctcaacccaaggcaaatcaacaacatcaagacaacgctcgaggtcttgtgcttccgggttacaaataccttggacccggcaacggactcgacaagggggagccggtcaacgcagcagacgcggcggccctcgagcacgacaaggcctacgaccagcagctcaaggccggagacaacccgtacctcaagtacaaccacgccgacgccgagttccaggagcggctcaaagaagatacgtcttttgggggcaacctcgggcgagcagtcttccaggccaaaaagaggcttcttgaacctcttggtctggttgaggaagcggctaagacggctcctggaaagaagaggcctgtagagcagtctcctcaggaaccggactcctccgcgggtattggcaaatcgggtgcacagcccgctaaaaagagactcaatttcggtcagactggcgacacagagtcagtcccagaccctcaaccaatcggagaacctcccgcagccccctcaggtgtgggatctcttacaatggcttcaggtggtggcgcaccagtggcagacaataacgaaggtgccgatggagtgggtagttcctcgggaaattggcattgcgattcccaatggctgggggacagagtcatcaccaccagcacccgaacctgggccctgcccacctacaacaatcacctctacaagcaaatctccaacagcacatctggaggatcttcaaatgacaacgcctacttcggctacagcaccccctgggggtattttgacttcaacagattccactgccacttctcaccacgtgactggcagcgactcatcaacaacaactggggattccggcctaagcgactcaacttcaagctcttcaacattcaggtcaaagaggttacggacaacaatggagtcaagaccatcgccaataaccttaccagcacggtccaggtcttcacggactcagactatcagctcccgtacgtgctcgggtcggctcacgagggctgcctcccgccgttcccagcggacgttttcatgattcctcagtacgggtatctgacgcttaatgatggaagccaggccgtgggtcgttcgtccttttactgcctggaatatttcccgtcgcaaatgctaagaacgggtaacaacttccagttcagctacgagtttgagaacgtacctttccatagcagctacgctcacagccaaagcctggaccgactaatgaatccactcatcgaccaatacttgtactatctctcaaagactattaacggttctggacagaatcaacaaacgctaaaattcagtgtggccggacccagcaacatggctgtccagggaagaaactacatacctggacccagctaccgacaacaacgtgtctcaaccactgtgactcaaaacaacaacagcgaatttgcttggcctggagcttcttcttgggctctcaatggacgtaatagcttgatgaatcctggacctgctatggccagccacaaagaaggagaggaccgtttctttcctttgtctggatctttaatttttggcaaacaaggaactggaagagacaacgtggatgcggacaaagtcatgataaccaacgaagaagaaattaaaactactaacccggtagcaacggagtcctatggacaagtggccacaaaccaccagagtgcccaagcacaggcgcagaccggctgggttcaaaaccaaggaatacttccgggtatggtttggcaggacagagatgtgtacctgcaaggacccatttgggccaaaattcctcacacggacggcaactttcacccttctccgctgatgggagggtttggaatgaagcacccgcctcctcagatcctcatcaaaaacacacctgtacctgcggatcctccaacggccttcaacaaggacaagctgaactctttcatcacccagtattctactggccaagtcagcgtggagatcgagtgggagctgcagaaggaaaacagcaagcgctggaacccggagatccagtacacttccaactattacaagtctaataatgttgaatttgctgttaatactgaaggtgtatatagtgaaccccgccccattggcaccagatacctgactcgtaatctgtaa

SEQ ID NO: 127 - protein, 736 aa, Adeno-associated virus; identical to SEQ ID NO: 123

SEQ ID NO: 128 - DNA, 2460 bp, Adeno-associated virus
ggtaattcctccggaaattggcattgcgattccacatggctgggcgaccgagtcattaccaccagcacccggacttgggccctgcccacctacaacaaccacctctacaagcaaatctccagccaatcgggtgccaccaacgacaaccactacttcggctacagcaccccttgggggtattttgatttcaacagattccactgccatttctcaccacgtgactggcagcgactcatcaacaacaactggggattcatggctgccgatggttatcttccagattggctcgaggacactctctctgaaggaatcagacagtggtggaagctcaaacctggcccaccaccgccgaaacctaaccaacaacaccgggacgacagtaggggtcttgtgcttcctgggtacaagtacctcggacccttcaacggactcgacaaaggagagccggtcaacgaggcagacgccgcggccctcgagcacgacaaagcctacgaccaccagctcaagcaaggggacaacccgtacctcaaatacaaccacgcggacgctgaatttcaggagcgtcttcaagaagatacgtctttcgggggcaacctcgggcgagcagtcttccaggccaaaaagagggtactcgagcctcttggtctggttgaggaagctgttaagacggctcctggaaaaaagagacctatagagcagtctcctgcagaaccggactcttcctcgggcatcggcaaatcaggccagcagcccgctaagaaaagactcaattttggtcagactggcgacacagagtcagtcccagaccctcaaccaatcggagaaccccccgcagccccctctggtgtgggatctaatacaatggcttcaggcggtggggcaccaatggcagacaataacgaaggcgccgacggagtgggtaattcctcgggaaattggcattgcgattccacatggatgggcgacagagttatcaccaccagcacaagaacctgggccctccccacctacaataatcacctctacaagcaaatctccagcgaatcgggagccaccaacgacaaccactacttcggctacagcaccccctgggggtattttgactttaacagattccactgtcacttctcaccacgtgactggcagcgactcatcaacaacaactggggatttagacccaagaaactcaatttcaagctcttcaacatccaagtcaaggaggtcacgcagaatgatggaaccacgaccatcgccaataaccttaccagcacggtgcaggtcttcacagactctgagtaccagctgccctacgtcctcggttcggctcaccagggctgccttccgccgttcccagcagacgtcttcatgattcctcagtacggctacttgactctgaacaatggcagccaagcggtaggacgttcttcattctactgtctagagtattttccctctcagatgctgaggacgggaaacaacttcaccttcagctacacttttgaagacgtgcctttccacagcagctacgcgcacagccagagtctggatcggctgatgaatcctctcattgaccagtacctgtattacctgagcaaaactcagggtacaagtggaacaacgcagcaatcgagactgcagttcagccaagctgggcctagctccatggctcagcaggccaaaaactggctaccgggacccagctaccgacagcagcgaatgtctaagacggctaatgacaacaacaacagtgaatttgcttggactgcagccaccaaatattacctgaatggaagaaattctctggtcaatcccgggcccccaatggccagtcacaaggacgatgaggaaaagtatttccccatgcacggaaatctcatctttggaaaacaaggcacaggaactaccaatgtggacattgaatcagtgcttattacagacgaagaagaaatcagaacaactaatcctgtggctacagaacaatacggacaggttgccaccaaccatcagagtcagaacaccacagcttcctatggaagtgtggacagccagggaatcttacctggaatggtgtggcaggaccgcgatgtctatcttcaaggtcccatttgggccaaaactcctcacacggacggacactttcatccttctccgctcatgggaggctttggactgaaacaccctcctccccagatcctgatcaaaaacacacctgtgccagcgaatcccgcgaccactttcactcctggaaagtttgcttcgttcattacccagtattccaccggacaggtcagcgtggaaatagagtgggagctgcagaaagaaaacagcaaacgctggaacccagaaattcagtacacctccaactacaacaagtcggtgaatgtggagtttaccgtggacgcaaacggtgtttattctgaaccccgccctattggcactcgttaccttacccggaacttg

SEQ ID NO: 129 - DNA, 3123 bp, Adeno-associated virus
gaattcgccctttctacggctgcgtcaactggaccaatgaaaactttcccttcaacgattgcgtcgacaagatggtgatctggtgggaggagggaaagatgaccgccaaggtcgtggaatctgccaaagccattctgggtggaggcaaggttcgtgtggaccagaaatgcaagtcttcggcccagatcgacccgactccggtgattgtcacctctaacaccaacatgtgcgccgtgattgacggaaactcgaccaccttcgagcaccagcagccgttgcaagaccggatgttcaaatttgaacttacccgccgtttggatcatgactttgggaaggtcaccaagcaggaagtcaaagactttttccggtgggctcaagatcacgtgactgaggtggagcatgagttctacgtcaaaaagggtggagccaagaaaaggcccgcccccgatgatgtatatataaatgagcccaagcgggcgcgcgagtcagttgcgcagccatcgacgtcagacgcggaagcttcgataaactacgcggacaggtaccaaaacaaatgttctcgtcacgtgggcatgaatctgatgctgtttccctgtcgacaatgcgaaagaatgaatcagaattcaaatatctgcttcacacacgggcaaaaagactgtttggaatgctttcccgtgtcagaatctcaacccgtttctgtcgtcagaaaaacgtatcagaaactttgttacattcatcatatcatgggaaaagtaccagacgcctgcactgcctgcgacctggtaaatgtggacttggatgactgtatttctgagcaataaatgacttaaatcaggtatggctgctgacggttatcttccagattggctcgaggacactctctctgaaggaatcagacagtggtggaagctcaaacctggcccaccaccgccgaaacctaaccaacaacaccgggacgacagtaggggtcttgtgcttcctgggtacaagtacctcggacccttcaacggactcgacaaaggagagccggtcaacgaggcagacgccgcggccctcgagcacgacaaagcctacgaccaccagctcaagcaaggggacaacccgtacctcaaatacaaccacgcggacgctgaatttcaggagcgtcttcaagaagatacgtctttcgggggcaacctcgggcgagcagtcttccaggccaaaaagagggtactcgagcctcttggtctggttgaggaagctgttaagacggctcctggaaaaaagagacctatagagcagtctcctgcagaaccggactcttcctcgggcatcggcaaatcaggccagcagcccgctaagaaaagactcaattttggtcagactggcgacacagagtcagtcccaggccctcaaccaatcggagaaccccccgcagccccctctggtgtgggatctaatacaatggcttcaggcggtggggcaccaatggcagacaataacgaaggcgccgacggagtgggtaattcctcgggaaattggcattgcgattccacatggatgggcgacagagttatcaccaccagcacaagaacctgggccctccccacctacaataatcacctctacaagcaaatctccagcgaatcgggagccaccaacgacaaccactacttcggctacagcaccccctgggggtattttgactttaacagattccactgtcacttctcaccacgtgactggcagcgactcatcaacaacaactggggatttagacccaagaaactcaatttcaagctcttcaacatccaagtcaaggaggtcacgcagaatgatggaaccacgaccatcgccaataaccttaccagcgcggtgcaggtcttcacagactctgagtaccagctgccctacgtcctcggttcggctcaccagggctgccttccgccgttcccagcagacgtcttcatgattcctcagtacggctacttgactctgaacaatggcagccaagcggtaggacgttcttcattctactgtctagagtattttccctctcagatgctgaggacgggaaacaacttcaccttcagctacacttttgaagacgtgcctttccacagcagctacgcgcacagccagagtctggatcggctgatgaatcctctcattgaccagtacctgtattacctgagcaaaactcagggtacaagtggaacaacgcagcaatcgagactgcagttcagccaagctgggcctagctccatggctcagcaggccaaaaactggctaccgggacccagctaccgacagcagcgaatgtctaagacggctaatgacaacaacaacagtgaatttgcttggactgcagccaccaaatattacctgaatggaagaaattctctggtcaatcccgggcccccagtggccagtcacaaggacgatgaggaaaagtatttccccatgcacggaaatctcatctttggaaaacaaggcacaggaactaccaatgtggacattgaatcagtgcttattacagacgaagaagaaatcagaacaactaatcctgtggctacagaacaatacggacaggttgccaccaaccatcagagtcagaacaccacagcttcctatggaagtgtggacagccagggaatcttacctggaatggtgtggcaggaccgcgatgtctatcttcaaggtcccatttgggccaaaactcctcacacggacggacactttcatccttctccgctcatgggaggctttggactgaaacaccctcctccccagatcctgatcaaaaacacacctgtgccagcgaatcccgcgaccactttcactcctggaaagtttgcttcgttcattacccagtattccacctgacaggtcagcgtggaaatagagtgggagctgcagaaagaaaacagcaaacgctggaacccagaaattcagtacacctccaactacaacaagtcggtgaatgtggagtttaccgtggacgcaaacggtgtttattctgaaccccgccctattggcactcgttaccttacccggaacttgtaatttcctgttaatgaataagccgatttatgcgtttcagttgaactttggtctctgcgaagggcgaattcgtttaaacct

SEQ ID NO: 130 - protein, 735 aa, Artificial Sequence
  source: /note="Description of Artificial Sequence: Synthetic polypeptide"
MAADGYLPDWLEDTLSEGIRQWWKLKPGPPPPKPNQQHRDDSRGLVLPGYKYLGPFNGLDKGEPVNEADAAALEHDKAYDHQLKQGDNPYLKYNHADAEFQERLQEDTSFGGNLGRAVFQAKKRVLEPLGLVEEAVKTAPGKKRPIEQSPAEPDSSSGIGKSGQQPAKKRLNFGQTGDTESVPGPQPIGEPPAAPSGVGSNTMASGGGAPMADNNEGADGVGNSSGNWHCDSTWMGDRVITTSTRTWALPTYNNHLYKQISSESGATNDNHYFGYSTPWGYFDFNRFHCHFSPRDWQRLINNNWGFRPKKLNFKLFNIQVKEVTQNDGTTTIANNLTSAVQVFTDSEYQLPYVLGSAHQGCLPPFPADVFMIPQYGYLTLNNGSQAVGRSSFYCLEYFPSQMLRTGNNFTFSYTFEDVPFHSSYAHSQSLDRLMNPLIDQYLYYLSKTQGTSGTTQQSRLQFSQAGPSSMAQQAKNWLPGPSYRQQRMSKTANDNNNSEFAWTAATKYYLNGRNSLVNPGPPVASHKDDEEKYFPMHGNLIFGKQGTGTTNVDIESVLITDEEEIRTTNPVATEQYGQVATNHQSQNTTASYGSVDSQGILPGMVWQDRDVYLQGPIWAKTPHTDGHFHPSPLMGGFGLKHPPPQILIKNTPVPANPATTFTPGKFASFITQYSTGQVSVEIEWELQKENSKRWNPEIQYTSNYNKSVNVEFTVDANGVYSEPRPIGTRYLTRNL

SEQ ID NO: 131 - DNA, 3123 bp, Adeno-associated virus
gaattcgccctttctacggctgcgtcaactggaccaatgaaaactttcccttcaacgattgcgtcgacaagatggtgatctggtgggaggagggaaagatgaccgccaaggtcgtggaatctgccaaagccattctgggtggaagcaaggttcgtgtggaccagaaatgcaagtcttcggcccagatcgacccgactccggtgattgtcacctctaacaccaacatgtgcgccgtgattgacggaaactcgaccaccttcgagcaccagcagccgttgcaagaccggatgttcaaatttgaacttacccgccgtttggatcatgactttgggaaggtcaccaagcaggaagtcaaagactttttccggtgggctcaagatcacgtgactgaggtggagcatgagttctacgtcaaaaagggtggagccaagaaaaggcccgcccccgatgatgtatatataaatgagcccaagcgggcgcgcgagtcagttgcgcagccatcgacgtcagacgcggaagcttcgataaactacgcgggcaggtaccaaaacaaatgttctcgtcacgtgggcatgaatctgatgctgtttccctgtcgacaatgcgaaagaatgaatcagaattcaaatatctgcttcacacacgggcaaaaagactgtttggaatgctttcccgtgtcagaatctcaacccgtttctgtcgtcagaaaaacgtatcagaaactttgttacattcatcatatcatgggaaaagaaccagacgcctgcactgcctgcgacctggtaaatgtggacttggatgactgtatttctgagcaataaatgacttaaatcaggtatggctgctgacggttatcttccagattggctcgaggacactctctctgaaggaatcagacagtggtggaagctcaaacctggcccaccaccgccgaaacctaaccaacaacaccgggacgacagtaggggtcttgtgcttcctgggtacaagtacctcggacccttcaacggactcgacaaaggagagccggtcaacgaggcagacgccgcggccctcgagcacgacaaagcctacgaccaccagctcaagcaaggggacaacccgtacctcaaatacaaccacgcggacgctgaatttcaggagcgtcttcaagaagatacgtctttcgggggcaacctcgggcgagcagtcttccaggccaaaaagagggtactcgagcctcttggtctggttgaggaagctgttaagacggctcctggaaaaaagagacctatagagcagtctcctgcagaaccggactcttcctcgggcatcggcgaatcaggccagcagcccgctaagaaaagactcaattttggtcagactggcgacacagagtcagtcccagaccctcaaccaatcggagaaccccccgcagccccctctggtgtgggatctaatacaatggcttcaggcggtggggcaccaatggcagacgataacgaaggcgccgacggagtgggtaattcctcgggaaattggcattgcgattccacatggatgggcgacagagttatcaccaccagcacaagaacctgggccctccccacctacaataatcacctctacaagcaaatctccagcgaatcgggagccaccaacgacaaccactacttcggctacagcaccccctgggggtattttgactttaacagattccactgtcacttctcaccacgtgactggcagcgactcatcaacaacaactggggatttagacccaagaaactcaatttcaagctcttcaacatccaagtcaaggaggtcacgcagaatgatggaaccacgaccatcgccaataaccttaccagcacggtgcaggtcttcacagactctgagtaccagctgccctacgtcctcggttcggctcaccagggctgccttccgccgttcccagcagacgtcttcatgattcctcagtacggctacttgactctgaacaatggcagccaagcggtaggacgttcttcattctactgtctagagtattttccctctcagatgctgaggacgggaaacaacttcaccttcagctacacttttgaagacgtgcctttccacagcagctacgcgcacagccagagtctggatcggctgatgaatcctctcattgaccagtacctgtattacctgagcaaaactcagggtacaagtggaacaacgcagcaatcgagactgcagttcagccaagctgggcctagctccatggctcagcaggccaaaaactggctaccgggacccagctaccgacagcagcgaatgtctaagacggctaatgacaacaacaacagtgaatttgcttggactgcagccaccaaatattacctgaatggaagaaattctctggtcaatcccgggcccccaatggccagtcacaaggacgatgaggaaaagtatttccccatgcacggaaatctcatctttggaaaacaaggcacaggaactaccaatgtggacattgaatcagtgcttattacagacgaagaagaaatcagaacaactaatcctgtggctacagaacaatacggacaggttgccaccaaccatcagagtcaggacaccacagcttcctatggaagtgtggacagccagggaatcttacctggaatggtgtggcaggaccgcgatgtctatcttcaaggtcccatttgggccaaaactcctcacacggacggacactttcatccttctccgctcatgggaggctttggactgaaacaccctcctccccagatcctgatcaaaaacacacctgtgccagcgaatcccgcgaccactttcactcctggaaagtttgcttcgttcattacccagtattccaccggacaggtcagcgtggaaatagagtgggagctgcagaaagaaaacagcaaacgctggaacccagaaattcagtacacctccaactacaacaagtcggtgaatgtggagtttaccgtggacgcaaacggtgtttattctgaaccccgccctattggcactcgttaccttacccggaacttgtaatttcctgttaatgaataaaccgatttatgcgtttcagttgaactttggtctctgcgaagggcgaattcgcggccgcta

SEQ ID NO: 132 - protein, 735 aa, Artificial Sequence
  source: /note="Description of Artificial Sequence: Synthetic polypeptide"
MAADGYLPDWLEDTLSEGIRQWWKLKPGPPPPKPNQQHRDDSRGLVLPGYKYLGPFNGLDKGEPVNEADAAALEHDKAYDHQLKQGDNPYLKYNHADAEFQERLQEDTSFGGNLGRAVFQAKKRVLEPLGLVEEAVKTAPGKKRPIEQSPAEPDSSSGIGESGQQPAKKRLNFGQTGDTESVPDPQPIGEPPAAPSGVGSNTMASGGGAPMADDNEGADGVGNSSGNWHCDSTWMGDRVITTSTRTWALPTYNNHLYKQISSESGATNDNHYFGYSTPWGYFDFNRFHCHFSPRDWQRLINNNWGFRPKKLNFKLFNIQVKEVTQNDGTTTIANNLTSTVQVFTDSEYQLPYVLGSAHQGCLPPFPADVFMIPQYGYLTLNNGSQAVGRSSFYCLEYFPSQMLRTGNNFTFSYTFEDVPFHSSYAHSQSLDRLMNPLIDQYLYYLSKTQGTSGTTQQSRLQFSQAGPSSMAQQAKNWLPGPSYRQQRMSKTANDNNNSEFAWTAATKYYLNGRNSLVNPGPPMASHKDDEEKYFPMHGNLIFGKQGTGTTNVDIESVLITDEEEIRTTNPVATEQYGQVATNHQSQDTTASYGSVDSQGILPGMVWQDRDVYLQGPIWAKTPHTDGHFHPSPLMGGFGLKHPPPQILIKNTPVPANPATTFTPGKFASFITQYSTGQVSVEIEWELQKENSKRWNPEIQYTSNYNKSVNVEFTVDANGVYSEPRPIGTRYLTRNL

SEQ ID NO: 133 - DNA, 3113 bp, Adeno-associated virus
gaattcgccctttctacggctgcgtcaactggaccaatgaaaactttcccttcaacgattgcgtcgacaagatggtgatctggtgggaggagggaaagatgaccgccaaggtcgtggaatctgccaaagccattctgggtggaagcaaggttcgtgtggaccagaaatgcaagtcttcggcccagatcgacccgactccggtgattgtcacctctaacaccaacatgtgcgccgtgattgacggaaactcgaccaccttcgagcaccagcagccgttgcaagaccggatgttcaaatttgaacttacccgccgtttggatcatgactttgggaaggtcaccaagcaggaagtcaaagactttttccggtgggctcaagatcacgtgactgaggtggagcatgagttctacgtcaaaaagggtggagccaagaaaaggcccgcccccgatgatgtatatataaatgagcccaagcgggcgcgcgagtcagttgcgcagccatcgacgtcagacgcggaagcttcgataaactacgcggacaggtaccaaaacaaatgttctcgtcacgtgggcatgaatctgatgctgtttccctgtcgacaatgcgaaagaatgaatcagaattcaaatatctgcttcacacacgggcaaaaagactgtttggaatgctttcccgtgtcagaatctcaacccgttcctgtcgtcagaaaaacgtatcagaaactttgttacattcatcatatcatgggaaaagtaccagacgcctgcactgcctgcgacctggtaaatgtggacttggatgactgtatttctgagcaataaatgacttaaatcaggtatggctgctgacggttatcttccagattggctcgaggacactctctctgaaggaatcagacagtggtggaagctcaaacctggcccaccaccgccgaaacctaaccaacaacaccgggacgacagtaggggtcttgtgcttcctgggtacaagtacctcggacccttcaacggactcgacaaaggagagccggtcaacgaggcagacgccgcggccctcgagcacgacaaagcctacgaccaccagctcaagcaaggggacaacccgtacctcaaatacaaccacgcggacgctgaatttcaggagcgtcttcaagaagatacgtctttcgggggcaacctcgggcgagcagtcttccaggccaaaaagagggtactcgagcctcttggtctggttgaggaagctgttaagacggctcctggaaaaaagagacctatagagcagtctcctgcagaaccggactcttcctcgggcatcggcaaatcaggccagcagcccgctaagaaaagactcaattttggtcagactggcgacacagagtcagtcccagaccctcaaccaatcggagaaccccccgcagccccctctggtgtgggatctaatacaatggcttcaggcggtggggcaccaatggcagacaataacgaaggcgccgacggagtgggtaattcctcgggaaattggcattgcgattccacatggatgggcgacagagttatcaccaccagcacaagaacctgggccctccccacctacaataatcacctctacaagcaaatctccagcgaatcgggagccaccaacgacaaccactacttcggctacagcaccccctgggggtattttgactttaacagattccactgtcacttctcaccacgtgactggcagcgactcatcaataacaactggggatttagacccaagaaactcaatttcaagctcttcaacatccaagtcaaggaggtcacgcagaatgatggaaccacgaccatcgccaataaccttaccagcacggtgcaggtcttcacagactctgagtaccagctgccctacgtcctcggttcggctcaccagggctgccttccgccgttcccagcagacgtcttcatgattcctcagtacggctacttgactctgaacaatggcagccaagcggtaggacgttcttcattctactgtctagagtattttccctctcagatgctgaggacgggaaacaacttcaccttcagctacacttttgaagacgtgcctttccacagcagctacgcgcacagccagagtctggatcggctgatgaatcctctcattgaccagtacctgtattacctgagcaaaactcagggtacaagtggaacaacgcagcaatcgagactgcagttcaaccaagctgggcctagctccatggctcagcaggccaaaaactggctaccgggacccagctaccgacagcagcgaatgtctaagacggctaatgacaacaacaacagtgaatttgcttggactgcagccaccaaatattacccgaatggaagaaattctctggtcaatcccgggcccccaatggccagtcacaaggacgatgaggaaaagtatttccccatgcacggaaatctcatctttggaaaacaaggcacaggaactaccaatgtggacattgaatcagtgcttattacagacgaagaagaaatcagaacgactaatcctgtggctacagaacaatacggacaggttgccaccaaccgtcagagtcagaacaccacagcttcctatggaagtgtggacagccagggaatcttacctggaatggtgtggcaggaccgcgatgtctatcttcaaggtcccatttgggccaaaactcctcacacggacggacactttcatccttctccgctcatgggaggctttggactgaaacaccctcctccccagatcctgatcaaaaacacacctgtgccagcgaatcccgcgaccactttcactcctggaaagtttgcttcgttcattacccagtattccaccggacaggtcagcgtggaaatagagtgggagctgcagaaagaaaacagcaaacgctggaacccggaaattcagtacacctccaactacaacaagtcggtgaatgtggagtttaccgtggacgcaaacggtgtttattctgaaccccgccctattggcactcgttaccttacccggaacttgtaatttcctgttaatgaataaaccgatttatgcgtttcagttgaactttggtctctgcgaagggcgaattc

SEQ ID NO: 134 - protein, 735 aa, Artificial Sequence
  source: /note="Description of Artificial Sequence: Synthetic polypeptide"
MAADGYLPDWLEDTLSEGIRQWWKLKPGPPPPKPNQQHRDDSRGLVLPGYKYLGPFNGLDKGEPVNEADAAALEHDKAYDHQLKQGDNPYLKYNHADAEFQERLQEDTSFGGNLGRAVFQAKKRVLEPLGLVEEAVKTAPGKKRPIEQSPAEPDSSSGIGKSGQQPAKKRLNFGQTGDTESVPDPQPIGEPPAAPSGVGSNTMASGGGAPMADNNEGADGVGNSSGNWHCDSTWMGDRVITTSTRTWALPTYNNHLYKQISSESGATNDNHYFGYSTPWGYFDFNRFHCHFSPRDWQRLINNNWGFRPKKLNFKLFNIQVKEVTQNDGTTTIANNLTSTVQVFTDSEYQLPYVLGSAHQGCLPPFPADVFMIPQYGYLTLNNGSQAVGRSSFYCLEYFPSQMLRTGNNFTFSYTFEDVPFHSSYAHSQSLDRLMNPLIDQYLYYLSKTQGTSGTTQQSRLQFNQAGPSSMAQQAKNWLPGPSYRQQRMSKTANDNNNSEFAWTAATKYYPNGRNSLVNPGPPMASHKDDEEKYFPMHGNLIFGKQGTGTTNVDIESVLITDEEEIRTTNPVATEQYGQVATNRQSQNTTASYGSVDSQGILPGMVWQDRDVYLQGPIWAKTPHTDGHFHPSPLMGGFGLKHPPPQILIKNTPVPANPATTFTPGKFASFITQYSTGQVSVEIEWELQKENSKRWNPEIQYTSNYNKSVNVEFTVDANGVYSEPRPIGTRYLTRNL

SEQ ID NO: 135 - DNA, 3122 bp, Adeno-associated virus
agcggccgcgaattcgccctttctacggctgcgtcaactggaccaatgaaaactttcccttcaacgattgcgtcgacaagatggtgatctggtgggaggagggaaagatgaccgccaaggtcgtggaatctgccaaagccattctgggtggaagcaaggttcgtgtggaccagaaatgcaggtcttcggcccagatcgacccgactccggtgattgtcacctctaacaccaacatgtgcgccgtgattgacggaaactcgaccaccttcgagcaccagcagccgttgcaagaccggatgttcaaatttgaacttacccgccgtttggatcatgactttgggaaggtcaccaagcaggaagtcaaagactttttccggtgggctcaagatcacgtgactgaggtggagcatgagttctacgtcaaaaagggtggagccaagaaaaggcccgcccccgatgatgtatatataaatgagcccaagcgggcgcgcgagtcagttgcgcagccatcgacgtcagacgcggaagcttcgataaactacgcggacaggtaccaaaacaaatgttctcgtcacgtgggcatgaatctgatgctgtttccctgtcgacaatgcgaaagaatgaatcagaattcaaatatctgcttcacacacgggcaaaaagactgtttggaatgctttcccgtgtcagaatctcaacccgtttctgtcgtcagaaaaacgtatcagaaactttgttacattcatcatatcatgggaaaagtaccagacgcctgcactgcctgcgacctggtaaatgtggacttggatgactgtatttctgagcaataaatgacttaaatcaggtatggctgctgacggttatcttccagattggctcgaggacactctctctgaaggaatcagacagtggtggaagctcaaacctggcccaccaccgccgaaacctaaccaacaacaccgggacgacagtaggggtcttgtgcttcctgggtacaagtacctcggacccttcaacggactcgacaaaggagagccggtcaacgaggcagacgccgcggccctcgagcacgacaaagcctacgaccaccagctcaagcaaggggacaacccgtacctcaaatacaaccacgcggacgctgaatttcaggagcgtcttcaagaagatacgtctttcgggggcaacctcgggcgagcagtcttccaggccaaaaagagggtactcgagcctcttggtctggttgaggaagctgttaagacggctcctggaaaaaagagacctatagagcagtctcctgcagaaccggactcttcctcgggcatcggcaaatcaggccagcagcccgctaagaaaagactcaattttggtcagactggcgacacagagtcagtcccagaccctcaaccaatcggagaaccccccgcagccccctctggtgtgggatctaatacaatggcttcaggcggtggggcaccaatggcagacaataacgaaggcgccgacggagtgggtaattcctcgggaaattggcattgcgattccacatggatgggcgacagagttatcaccaccagcacaagaacctgggccctccccacctacaataatcgcctctacaagcaaatctccagcgaatcgggagccaccaacgacaaccactacttcggctacagcaccccctgggggtattttgactttaacagattccactgtcacttctcaccacgtgactggcagcgactcatcaacaacaactggggatttagacccaagaaactcaatttcaagctcttcaacatccaagtcaaggaggtcacgcagaatgatggaaccacgaccatcgccaataaccttaccagcacggtgcaggtcttcacagactctgagtaccagctgccctacgtcctcggttcggctcaccagggctgccttccgccgttcccagcagacgtcttcatgattcctcagtacggctacttgactctgaacaatggcagccaagcggtaggacgttcttcattctactgtctagagtattttccctctcagatgctgaggacgggaaacaacttcaccttcagctacacttttgaagacgtgcctttccacagcagctacgcgcacagccagagtctggatcggctgatgaatcctctcattgaccagtacctgtattacctgagcaaaactcagggtacaagtggaacaacgcagcaatcgagactgcagttcagccaagctgggcctagctccatggctcagcaggccaaaaactggctaccgggacccagctaccgacagcagcgaatgtctaagacggctaatgacaacaacaacagtgaatttgcttggactgcagccaccaaatattacctgaatggaagaaattctctggtcaatcccgggcccccaatggccagtcacaaggacgatgaggaaaagtatttccccatgcacggaaatctcatctttggaaaacaaggcacaggaactaccaatgtggacattgaatcagtgcttattacagacgaagaagaaatcagaacaactaatcctgtggctacagaacaatacggacaggttgccaccaaccatcagagtcagaacaccacagcttcctatggaagtgtggacagccagggaatcttacctggaatggtgtggcaggaccgcgatgtctatcttcaaggtcccatttgggccaaaactcctcacacggacggacactttcatccttctccgctcatgggaggctttggactgaaacaccctcctccccagatcctgatcaaaaacacacctgtgccagcgaatcccgcgaccactttcactcctggaaagtttgcttcgttcattacccagtattccaccggacaggtcagcgtggaaatagagtgggagctgcagaaagaaaacagcaaacgctggaacccagaaattcagtacacctccaactacaacaagtcggtgaatgtggagtttaccgtggacgcaaacggtgtttattctgaaccccgccctattggcactcgttaccttacccggaacttgtaatttcctgttaatgaataaaccgatttatgcgtttcagttgaactttggtctctgcgaagggcgaattc

SEQ ID NO: 136 - protein, 735 aa, Artificial Sequence
  source: /note="Description of Artificial Sequence: Synthetic polypeptide"
MAADGYLPDWLEDTLSEGIRQWWKLKPGPPPPKPNQQHRDDSRGLVLPGYKYLGPFNGLDKGEPVNEADAAALEHDKAYDHQLKQGDNPYLKYNHADAEFQERLQEDTSFGGNLGRAVFQAKKRVLEPLGLVEEAVKTAPGKKRPIEQSPAEPDSSSGIGKSGQQPAKKRLNFGQTGDTESVPDPQPIGEPPAAPSGVGSNTMASGGGAPMADNNEGADGVGNSSGNWHCDSTWMGDRVITTSTRTWALPTYNNRLYKQISSESGATNDNHYFGYSTPWGYFDFNRFHCHFSPRDWQRLINNNWGFRPKKLNFKLFNIQVKEVTQNDGTTTIANNLTSTVQVFTDSEYQLPYVLGSAHQGCLPPFPADVFMIPQYGYLTLNNGSQAVGRSSFYCLEYFPSQMLRTGNNFTFSYTFEDVPFHSSYAHSQSLDRLMNPLIDQYLYYLSKTQGTSGTTQQSRLQFSQAGPSSMAQQAKNWLPGPSYRQQRMSKTANDNNNSEFAWTAATKYYLNGRNSLVNPGPPMASHKDDEEKYFPMHGNLIFGKQGTGTTNVDIESVLITDEEEIRTTNPVATEQYGQVATNHQSQNTTASYGSVDSQGILPGMVWQDRDVYLQGPIWAKTPHTDGHFHPSPLMGGFGLKHPPPQILIKNTPVPANPATTFTPGKFASFITQYSTGQVSVEIEWELQKENSKRWNPEIQYTSNYNKSVNVEFTVDANGVYSEPRPIGTRYLTRNL

SEQ ID NO: 137 - DNA, 3121 bp, Adeno-associated virus
gaattcgcccttcgcagagaccaaagttcaactgaaacgaatcaaccggtttattgattaacaagcaattacagattacgggtgaggtaacgggtgccgatggggcgaggctcagaataagtgccatctgtgttaacagcaaagtccacatttgtagatttgtagtagttggaagtgtattgaatctctgggttccagcgtttgctgttttctttctgcagctcccattcaatttccacgctgacctgtccggtgctgtactgcgtgatgaacgacgccagcttagcttgactgaaggtagttggaggatccgcgggaacaggtgtattcttaatcaggatctgaggaggcgggtgtttcagtccaaagccccccatcagcggcgagggatgaaagtttccgtccgtgtgaggaatcttggcccagataggaccctgcaggtacacgtcccggttctgccagaccatgccaggtaaggctccttgactgttgacggcccctacaataggagcggcgttttgctgttgcaggttatcggccaccacgccgtactgttctgtggccactgggttggtggttttaatttcttcctcactggttagcataacgctgctatagtccacgttgccttttccagctccctgtttcccaaacattaagactccgctggacggaaaaaatcgctcttcgtcgtccttgtgggttgccatagcgacaccgggatttaccagagagtctctgccattcagatgatacttggtggcaccggtccaggcaaagttgctgttgttattttgcgacagtgtcgtggagacgcgttgctgccggtagcagggcccgggtagccagtttttggcctgagccgacatgttattaggcccggcctgagaaaatagcaactgctgagttcctgcggtacctcccgtggactgagtccgagacaggtagtacaggtactggtcgatgagggggttcatcagccggtccaggctttggctgtgcgcgtagctgctgtgaaaaggcacgtcctcaaactggtagctgaactcaaagttgttgcccgttctcagcatttgagaaggaaagtactccaggcagtagaaggaggaacggcccacggcctgactgccattgttcagagtcaggtacccgtactgaggaatcatgaagacgtccgccgggaacggaggcaggcagccctggcgcgcagagccgaggacgtacgggagctggtattccgagtccgtaaagacctgaatcgtgctggtaaggttattggcgatggtcttggtgccttcattctgcgtgacctccttgacctggatgttgaagagcttgaagttgagtctcttgggccggaatccccagttgttgttgatgagtcgctgccagtcacgtggtgagaagtggcagtggaatctgttaaagtcaaaatacccccagggggtgctgtagccgaagtaggtgttgtcgttggtgcttcctcccgaagtcccgttggagatttgcttgtagaggtggttgttgtaggtggggagggcccaggttcgggtgctggtggtgatgactctgtcgcccagccatgtggaatcgcaatgccaatttcctgaggaactacccactccgtcggcgccttcgttattgtctgccattggagcgccaccgcctgcagccattgtaccagatcccagaccagaggggcctgcggggggttctccgattggttgagggtcgggcactgactctgagtcgccagtctgcccaaagttgagtctctttttcgcgggctgctggcctttcttgccgatgcccgtagtggagtctggagaacgctggggtgatggctctaccggtctcttctttccaggagccgtcttagcgccttcctcaaccagaccgagaggttcgagaacccgcttcttggcctggaagactgctcgtccgaggttgcccccaaaagacgtatcttcttgcagacgctcctgaaactcggcgtcggcgtggttataccgcaggtacggattgtcacccgctttgagctgctggtcgtaggccttgtcgtgctcgagggccgctgcgtccgccgcgttgacgggctcccccttgtcgagtccgttgaagggtccgaggtacttgtagccaggaagcaccagaccccggccgtcgtcctgcttttgctggttggctttgggcttcggggctccaggtttcagcgcccaccactcgcgaatgccctcagagaggttgtcctcgagccaatctggaagataaccatcggcagccatacctgatctaaatcatttattgttcaaagatgcagtcatccaaatccacattgaccagatcgcaggcagtgcaagcgtctggcacctttcccatgatatgatgaatgtagcacagtttctgatacgcctttttgacgacagaaacgggttgagattctgacacgggaaagcactctaaacagtctttctgtccgtgagtgaagcagatatttgaattctgattcattctctcgcattgtctgcagggaaacagcatcagattcatgcccacgtgacgagaacatttgttttggtacctgtccgcgtagttgatcgaagcttccgcgtctgacgtcgatggctgcgcaactgactcgcgcacccgtttgggctcacttatatctgcgtcactgggggcgggtcttttcttggctccaccctttttgacgtagaattcatgctccacctcaaccacgtgatcctttgcccaccggaaaaagtctttgacttcctgcttggtgaccttcccaaagtcatgatccagacggcgggtgagttcaaatttgaacatccggtcttgcaacggctgctggtgttcgaaggtcgttgagttcccgtcaatcacggcgcacatgttggtgttggaggtgacgatcacgggagtcgggtctatctgggccgaggacttgcatttctggtccacgcgcaccttgcttcctccgagaatggctttggccgactccacgaccttggcggtcatcttcccctcctcccaccagatcaccatcttgtcgacacagtcgttgaagggaaagttctcattggtccagttgacgcagccgtagaagggcgaattc

SEQ ID NO: 138 - protein, 733 aa, Artificial Sequence
  source: /note="Description of Artificial Sequence: Synthetic polypeptide"
MAADGYLPDWLEDNLSEGIREWWDLKPGAPKLKANQQKQDDGRGLVLPGYKYLGPFHGLDKGEPVNAADAAALEHDKAYDQQLKAGDNPYLRYNHADAEFQERLQEDTSFGGNLGRAVFQAKKRVLEPLGLVEEGAKTAPGKKRPLESPQEPDSSSGIGKKGKQPAKKRLNFEEDTGAGDGPPEGSDTSAMSSDIEMRAAPGGNAVDAGQGSDGVGNASGDWHCDSTWSEGKVTTTSTRTWVLPTYNNHLYLRLGTTSNSNTYNGFSTPWGYFDFNRFHCHFSPRDWQRLINNNWGLRPKAMRVKIFNIQVKEVTTSNGETTVANNLTSTVQIFADSSYELPYVMDAGQEGSLPPFPNDVFMVPQYGYCGIVTGENQNQTDRNAFYCLEYFPSQMLRTGNNFEMAYNFEKVPFHSMYAHSQSLDRLMNPLLDQYLWHLQSTTSGETLNQGNAATTFGKIRSGDFAFYRKNWLPGPCVKQQRFSKTASQNYKIPASGGNALLKYDTHYTLNNRWSNIAPGPPMATAGPSDGDFSNAQLIFPGPSVTGNTTTSANNLLFTSEGEIAATNPRDTDMFGQIADNNQNATTAPITGNVTAMGVLPGMVWQNRDIYYQGPIWAKIPHADGHFHPSPLIGGFGLKHPPPQIFIKNTPVPANPATTFTAARVDSFITQYSTGQVAVQIEWEIEKERSKRRNPEVQFTSNYGNQSSMLWAPDTTGKYTEPRVIGSRYLTNHL

SEQ ID NO: 139 - protein, 735 aa, Adeno-associated virus
MAADGYLPDWLEDTLSEGIRQWWKLKPGPPPPKPNQQHRDDSRGLVLPGYKYLGPFNGLDKGEPVNEADAAALEHDKAYDHQLKQGDNPYLKYNHADAEFQERLQEDTSFGGNLGRAVFQAKKRVLEPLGLVEEAVKTAPGKKRPIEQSPAEPDSSSGIGKSGQQPAKKRLNFGQTGDTESVPDPQPIGEPPAAPSGVGSNTMASGGGAPMADNNEGADGVGNSSGNWHCDSTWMGDRVITTSTRTWALPTYNNHLYKQISSESGATNDNHYFGYSTPWGYFDFNRFHCHFSPRDWQRLINNNWGFRPKKLNFKLFNIQVKEVTQNDGTTTIANNLTSTVQVFTDSEYQLPYVLGSAHQGCLPPFPADVFMIPQYGYLTLNNGSQAVGRSSFYCLEYFPSQMLRTGNNFTFSYTFEDVPFHSSYAHSQSLDRLMNPLIDQYLYYLSKTQGTSGTTQQSRLQFSQAGPSSMAQQAKNWLPGPSYRQQRMSKTANDNNNSEFAWTAATKYYLNGRNSLVNPGPPMASHKDDEEKYFPMHGNLIFGKQGTGTTNVDIESVLITDEEEIRTTNPVATEQYGQVATNHQSQNTTASYGSVDSQGILPGMVWQDRDVYLQGPIWAKIPHTDGHFHPSPLMGGFGLKHPPPQILIKNTPVPANPATTFTPGKFASFITQYSTGQVSVEIEWELQKENSKRWNPEIQYTSNYNKSVNVEFTVDANGVYSEPRPIGTRYLTRNL

SEQ ID NO: 140 - DNA, 3127 bp, Adeno-associated virus
gcggccgcgaattcgcccttcgcagagaccaaagttcaactgaaacgaatcaaccggtttattgattaacatgcaattacagattacgggtgaggtaacgagtgccaatagggcgaggctcagagtaaacaccctggctgtcaacggcaaagtccacaccagtctgcttttcaaagttggaggtgtactgaatctccgggtcccagcgcttgctgttttccttctgcagctcccactcgatttccacgctgacttgtccggtgctgtactgtgtgatgaacgaagcaaacttggcaggagtaaacacctccggaggattagcgggaacgggagtgttcttgatcaggatctgaggaggcggatgtttaagtccaaagccgcccatcaaaggagacgggtgaaagttgccatccgtgtgaggaatcttggcccagatgggaccctgcaggtacacgtcccggttctgccagaccatgccaggtaaggctccctggttgttgacaacttgtgtctgggctgcagtattagccgcttgtaagttgctgctgactatcccgtattcttccgtggctacaggattagtaggacgaatttcttcttcatttgtcattaacacattttccaatgtagttttgttagttgctccagtttttccaaaaatcaggactccgctggatgggaaaaagcggtcctcgtcgtccttgtgagttgccatggcgacgccgggattaaccaacgagtttctgccgttcaggtgatatttggtggcaccagtccaagcaaagttgctgttgttgttttgatccagcgttttggagaccctttgttgccggaagcagggtccaggtaaccaattcttggcttgttcggccatagttgaaggcccgccctggtaaaactgcagttcccgattgccagctgtgcctcctgggtcactctgtgttctggccaggtagtacaagtactggtcgatgaggggattcatcagccggtccaggctctggctgtgtgcgtagctgctgtggaaaggcacgtcctcgaagctgtagctgaactcaaagttgttgcccgttctcagcatctgagaggggaagtactccaggcagtagaaggaggaacgtcccacagactgactgccattgttgagagtcaggtagccgtactgaggaatcatgaagacgtccgccgggaacggaggcaggcagccctggtgcgcagagccgaggacgtacggcagctggtattccgagtccgagaatacctgaatcgtgctggtaaggttattagcgatggtcgtaacgccgtcattcgtcgtgacctccttgacctggatgttgaagagcttgaaccgcagcttcttgggccggaatccccagttgttgttgatgagtcgctgccagtcacgtggtgagaagtggcagtggaatctgttaaagtcaaaatacccccagggggtgctgtagccgaagtaggtgttgtcgttggtactacctgcagtttcactggagatttgctcgtagaggtggttgttgtaggtgggcagggcccaggttcgggtgctggtggtaatgactctgtcgcccagccatgtggaatcgcaatgccaatttcctgaggcattacccactccgtcggcaccttcgttattgtctgccattggtgcgccaccgcctgcagccactgtaccagatcccacactagagggcgctgctggaggttctccgagaggttgagggtcggggactgactctgagtcgccagtctgaccgaaattgagtctctttctggcgggctgctggcccttcttgccgatgcccgtggaggagtcgggggaacgctgaggtgacggctctaccggtctcttctttgcaggagccgtcttagcgccttcctcaaccagaccgagaggttcgagaacccgcttcttggcctggaagactgctcgcccgaggttgcccccaaatgacgtatcttcttgcagacgctcctgaaactcggcgtcggcgtggttataccgcaggtacgggttgtcacccgcattgagctgctggtcgtaggccttgtcgtgctcgagggccgctgcgtccgccgcgttgacgggctcccccttgtcgagtccgttgaagggtccgaggtacttgtagccaggaagcaccagaccccggccgttgtcctgcttttgctggttggctttgggtttcggggctccaggtttcaggtcccaccactcgcgaatgccctcagagaggttgtcctcgagccaatctggaagataaccatcggcagccatacctgatttaaatcatttattgttcaaagatgcagtcatccaaatccacattgaccagatcgcaggcagtgcaagcgtctggcacctttcccatgatatgatgaatgtagcacagtttctgatacgcctttttgacgacagaaacgggtttagattctgacacgggaaagcactctaaacagtctttctgtccgtgagtgaagcagatatttgaattctgattcattctctcgcattgtctgcagggaaacagcatcagattcatgcccacgtgacgagaacatttgttttggtacctgtctgcgtagttgatcgaagcttccgcgtctgacgtcgatggctgcgcaactgactcgcgcacccgtttgggctcacttatatctgcgtcactgggggcgggtcttttcttggctccaccctttttgacgtagaattcatgctccacctcaaccacgtaatcctttgcccaccggaaaaagtctttgacttcctgcttggtgaccttcccaaagtcatgatccagacggcgggtgagttcaaatttgaacatccggtcttgcaacggctgctggtgttcgaaggtcgttgagttcccgtcgatcacggcgcacatgttggtgttggagatgacgatcgcgggagtcgggtctatctgggccgaggacttgcatttctggtccacgcgcaccttgcttcctccgagaatggctttggccgactccacgaccttggcggtcatcttcccctcctcccaccagatcaccatcttgtcgacacagtcgttgaagggaaagttctcattggtccagttgacgcagccgtagaaagggcgaattc

SEQ ID NO: 141 - protein, 728 aa, Artificial Sequence
  source: /note="Description of Artificial Sequence: Synthetic polypeptide"
MAADGYLPDWLEDNLSEGIREWWDLKPGAPKPKANQQKQDDGRGLVLPGYKYLRPFNGLDKGEPVNEADAAALEHDKAYDKQLEQGDNPYLKYNHADAEFQERLQEDTSFGGNLGRAVFQAKKRVLEPLGLVEEVAKTAPGKKRPIESPDSSTGIGKKGQQPAKKKLNFGQTGDSESVPDPQPLGEPPAAPSGLGSGTMAAGGGAPMADNNEGADGVGNASGNWHCDSTWLGDRVITTSTRTWALPTYNNHLYKQISSQSGATNDNHFFSYSTPWGYFDFNRFHCHFSPRDWQRLINNNWGFRPRKLRFKLFNIQVKEVTTNDGVTTIANNLTSTIQVFSDSEYQLPYVLGSAHQGCLPPFPADVFMIPQYGYLTLNNGSQSVGRSSFYCLEYFPSQMLRTGNNFEFSYTFEEVPFHSSYVHSQSLDRLMNPLIDQYLYYLARTQSTTGSTRELQFHQAGPNTMAEQSKNWLPGPCYRQQRLSKNIDSNNNSNFAWTGATKYHLNGRNSLTNPGVAMATNKDDEDQFFPINGVLVFGKTGAANKTTLENVLMTSEEEIKTTNPVATEEYGVVSSNLQSSTAGPQTQTVNSQGALPGMVWQNRDVCLQGPIWAKIPHTDGNFHPSPLMGGFGLKHPPPQILIKNTPVPANPPEVFTPAKFASFITQYSTGQVSVEIEWELQKENSKRWNPEIQYTSNYAKSNNVEFAVNNEGVYTEPRPIGTRYLTRNL

SEQ ID NO: 142 - DNA, 3106 bp, Adeno-associated virus
gcggccgcgaattcgcccttcgcagagaccaaagttcaactgaaacgaatcaaccggtttattgattaacaagtaattacaggttacgggtgaggtaacgggtgccaatggggcgaggctcagtataaaccccttcgttgttgacagcaaattccacattattagacttggcataatttgaggtgtactgaatctctggattccagcgtttgctgttttctttctgcagttcccactcgatctccacgctgacctggccggtgctgtactgcgtgataaatgaggcaaacttggcaggagtaaacacctctggaggattagcaggtaccggggtgtttttgatgagaatttgaggaggcgggtgtttgagtccaaatccgcccatcaggggagacgggtgaaagttgccgtccgtgtgaggaattttggcccagatgggaccctgcaggcacacgtcccggttctgccagaccatgccgggcagagccccctggctgttgacagtctgtgtctggggtccggccgtagacgattgcaggttgctggagaccacaccgtattcttctgtagccacgggattggtggttttgatctcctcctcgctggtcattagcacgttttccagcgttgtcttgttggcagcccccgttttgccaaaaaccagcactccgttgatgggaaagaactggtcctcgtcgtccttgttggtggccatggctacgcccgggttggttaatgaatttctaccattcagatggtatttagtggccccggtccaggcaaagttactgttgttgttgctgtctatgttttttgacagtctctgctgccgataacagggtccgggcagccagttctttgattgctcggccatggtgttgggcccagcctgatggaactgcagctcccttgtggaccccgtagtgctctgggtccgggccaggtagtacaggtactggtcgatgaggggattcatcagccggtctaggctctggctgtgcacatagctgctgtggaaaggcacttcctcaaaggtgtagctgaattcaaagttattgcccgttctcagcatctgagaaggaaagtactccaggcagtagaaggaggaacgtcccacagactgactgccgttgtttagagtcagatatccgtactgaggaatcatgaacacgtccgcagggaacggagggaggcagccctggtgcgcagagccgaggacgtacggcagttggtactccgagtccgagaagacctgaatcgtgctggtaaggttattagcgatggtcgtaacgccgtcgttcgtcgtgacctccttgacctggatgttgaacaacttgaaccgcagctttctgggccggaatccccagttgttgttgatgagtcgctgccagtcacgtggtgagaagtggcagtggaatctgttgaagtcaaaatagccccagggggtgctgtagctgaagaagtggttgtcgttggtagccccgctctgacttgatatctgcttgtagaggtggttgttgtaggtgggcagggcccaggtgcgggtgctggtggtgatgactctgtcgcccagccatgtggaatcgcaatgccaatttccggaggcattacccactccgtcggcgccttcgttattgtctgccattggtgcgccaccgcctgcagccattgtaccagatcccagacctgagggcgcggcgggaggttctccgagaggttgggggtcgggcactgactctgagtcgccagtctgcccaaagttgagcttctttttagcgggctgctggcctttcttgccgatgcccgtggaggagtcgggggattctatgggtctcttctttccaggagccgtcttagcgacttcctcaaccagaccgagaggttcgagaacccgcttcttggcctggaagactgctcgcccgaggttgcccccaaaagacgtatcttcttgaagacgctcctgaaactcggcgtcggcgtggttgtacttgaggtacgggttgtccccctgctcgagctgcttgtcgtaggccttgtcgtgctcgagggccgcggcgtctgcctcgttgaccggctctcccttgtcgagtccgttgaagggtctgaggtacttgtagccaggaagcaccagaccccggccgtcgtcctgcttttgctggttggctttgggtttcggggctccaggtttcaagtcccaccactcgcgaatgccctcagagaggttgtcctcgagccaatctggaagataaccatcggcagccatacctggtttaagtcatttattgctcagaaacacagtcatccaggtccacgttgaccagatcgcaggccgagcaagcaatctcgggagcccgccccagcagatgatgaatggcacagagtttccgatacgtcctctttctgacgaccggttgagattctgacacgccggggaaacattctgaacagtctctggtcccgtgcgtgaagcaaatgttgaaattctgattcactctctcgcatgtcttgcagggaaacagcatctgaagcatgcccgcgtgacgagaacatttgttttggtacctgtcggcaaagtccaccggagctccttccgcgtctgacgtcgatggattcgcgactgaggggcaggcccgcttgggctcgcttttatccgcgtcatcgggggcgggtctcttgttggccccaccctttctgacgtagaacccatgcgccacctcggtcacgtgatcctgcgcccagcggaagaaccttttgacttcctgctttgtcaccttgccaaagttatgctccagacggcgggtgggttcaaatttgaacatccggtcctgcaacggctgctggtgctcgaaggtggcgctgttcccgtcaatcacggcgcacatgttggtgttggaggtgacggtcacgggggtggggtcgatctgggcggacgacttgcacttttggtccacgcgcaccttgctgccgccgagaatggccttggcggactccacgaccttggccgtcatcttgccctcctcccaccagatcaccatcttgtcggcgcaatcgttgaagggaaagttctcattggtccagttgacgcagccgtagaaagggcgaattc

SEQ ID NO: 143 - protein, 728 aa, Artificial Sequence
  source: /note="Description of Artificial Sequence: Synthetic polypeptide"
MAADGYLPDWLEDNLSEGIREWWDLKPGAPKPKANQQKQDDGRGLVLPGYKYLGPFNGLDKGEPVNEADAAALEHDKAYDKQLEQGDNPYLKYNHADAEFQERLQEDTSFGGNLGRAVFQAKKRVLEPLGLVEEGAKTASGKKRPIESPDSSTGIGKKGQQPAKKKLNFGQTGDSESVPDPQPLGEPPAAPSGLGSGTMAAGGGAPMADNNEGADGVGNASGNWHCDSTWLGDRVITTSTRTWALPTYNNHLYKQISSQSGATNDNHFFGYSTPWGYFDFNRFHCHFSPRDWQRLINNNWGFRPRKLRFKLFNIQVKEVTTNDGVTTIANNLTSTIQVFSDSEYQLPYVLGSAHQGCLPPFPADVFMIPQYGYLTLNNGSQSVGRSSFCCLEYFPSQMLRTGNNFEFSYTFEEVPFHSSYAHSQSLDRLMNPLIDQYLYYLARTQSTTGSTRELQFHQAGPNTVAEQSKNWLPGPCYRQQRLSKNIDSNNNSNFAWTGATKYHLNGRNSLTNPGVAMATNKDDEDQFLPINGVLVFGKTGAANKTTLENVLMTSEEEIKTTNPVATEEYGVVSSNLQSSTAGPRTQTVNSQGALPGMVWQNRDVYLQGPIWAEIPHTDGNFHPSPLMGGFGLKHPPPQILIKNTPVPANPPEVFTPAKFASFITQYSTGQVSVEIEWELQKENSKRWNPEIQYTSNYAKSNNVEFAVNNEGVYTEPRPIGTRYLTRNL

SEQ ID NO: 144 - DNA, 3102 bp, Adeno-associated virus
gcggccgcgaattcgcccttcgcagagaccaaagttcaactgaaacgaatcaaccggtttattgattaacaagtaattacaggttacgggtgaggtaacgggtgccaatggggcgaggctcagtataaaccccttcgttgttgacagcaaattccacattattagacttggcataatttgaggtgtactgaatctctggattccagcgtttgctgttttctttctgcagttcccactcgatctccacgctgacctggccggtgctgtactgcgtgataaatgaggcaaacttggcaggagtaaacacctctggaggattagcaggtaccggggtgtttttgatgagaatttgaggaggcgggtgtttgagtccaaatccgcccatcaggggagacgggtgaaagttgccgtccgtgtgaggaatttcggcccagatgggaccctgcaggtacacgtcccggttctgccagaccatgccgggcagagccccctggctgttgacagtctgtgtccggggtccggccgtagacgattgcaggttgctggagaccacaccgtattcttctgtagccacgggattggtggttttgatctcctcctcgctggtcattagcacgttttccagcgttgtcttgttggcagcccccgttttgccaaaaaccagcactccgttgatgggaaggaactggtcctcgtcgtccttgttggtggccatggctacgcccgggttggttaatgaatttctaccattcagatggtatttagtggccccggtccaggcaaagttactgttgttgttgctgtctatgttttttgacagtctctgctgccgataacagggtccgggcagccagttctttgattgctcggccacggtgttgggcccagcctgatggaactgcagctcccttgtggaccccgtagtgctctgggtccgggccaggtagtacaggtactggtcgatgaggggattcatcagccggtccaggctctggctgtgcgcatagctgctgtggaaaggcacttcctcaaaggtgtagctgaattcaaagttattgcccgttctcagcatctgagaaggaaagtactccaggcagcagaaggaggaacgtcccacagactgactgccgttgtttagagtcagatatccgtactgaggaatcatgaacacgtccgcagggaacggagggaggcagccctggtgcgcagagccgaggacgtacggcagttggtactccgagtccgagaagacctgaatcgtgctggtaaggttattagcgatggtcgtaacgccgtcgttcgtcgtgacctccttgacctggatgttgaacaacttgaaccgcagctttctgggccggaatccccagttgttgttgatgagtcgctgccagtcacgtggtgagaagtggcagtggaatctgttgaagtcaaaatagccccagggggtgctgtagccgaagaagtggttgtcgttggtagccccgctctgacttgatatctgcttgtagaggtggttgttgtaggtgggcagggcccaggtgcgggtgctggtggtgatgactctgtcgcccagccatgtggaatcgcaatgccaatttccggaggcattacccactccgtcggcgccttcgttattgtctgccattggtgcgccaccgcctgcagccattgtaccagatcccagacctgagggcgcggcgggaggttctccgagaggttgggggtcgggcactgactctgagtcgccagtctgcccaaagttgagcttctttttagcgggctgctggcctttcttgccgatgcccgtggaggagtcgggggattctatgggtctcttctttccggaagccgtcttagcgccttcctcaaccagaccgagaggttcgagaacccgcttcttggcctggaagactgctcgcccgaggttgcccccaaaagacgtatcttcttgaagacgctcctgaaactcggcgtcggcgtggttgtacttgaggtacgggttgtccccctgctcgagctgcttgtcgtaggccttgtcgtgctcgagggccgcggcgtctgcctcgttgaccggctctcccttgtcgagtccgttgaagggtccgaggtacttgtagccaggaagcaccagaccccggccgtcgtcctgcttttgctggttggctttgggtttcggggctccaggtttcaagtcccaccactcgcgaatgccctcagagaggttgtcctcgagccaatctggaagataaccatcggcagccatacctggtttaagtcatttattgctcagaaacacagtcatccaggtccacgttgaccagatcgcaggccgagcaagcaatctcgggagcccgccccagcagatgatgaatggcacagagtttccgatacgtcctctttctgacgaccggttgagattctgacacgccggggaaacattctgaacagtctctggtcccgtgcgtgaagcaaatgttgaaattctgattcattctctcgcatgtcttgcagggaaacagcatctgaagcatgcccgcgtgacgagaacatttgttttggtacctgtcggcaaagtccaccggagctccttccgcgtctgacgtcgatggatccgcgactgaggggcaagcccgcttgggctcgcttttatccgcgtcatcgggggcgggtctcttgttggctccaccctttctgacgtagaactcatgcgccacctcggtcacgtgatcctgcgcccagcggaagaactctttgacttcctgctttgtcaccttgccaaagtcatgctccagacggcgggtgagttcaaatttgaacatccggtcttgtaacggctgctggtgctcgaaggtggtgctgttcccgtcaatcacggcgcacatgttggtgttggaagtgacgatcacgggggtgggatcgatctgggcggacgacttgcacttttggtccacgcgcaccttgctgccgccgagaatggccttggcggactccacgaccttggccgtcatcttgccctcctcccaccagatcaccatcttgtcgacgcaatcgttgaagggaaagttctcattggtccagttgacgcagccgaagggcgaattc

SEQ ID NO: 145 - protein, 728 aa, Adeno-associated virus
MAADGYLPDWLEDNLSEGIREWWDLKPGAPKPKANQQKQDDGRGLVLPGYRYLGPFNGLDKGEPVNEADAAALEHDKAYDKQLEQGDNPYLKYNHADAEFQERLQEDTSFGGNLGRAVFQAKKRVLEPLGLVEEGAKTAPGKKRPIESPDSSTGIGKNGQPPAKKKLNFGQTGDSESVPDPQPLGEPPAAPSGLGSGTMAAGGGAPMADNNEGADGVGNASGNWHCDSTWLGDRVITTSTRTWALPTYNNHLYKQISSQSGATNDNHFFGYSTPWGYFDFNRFHCHFSPRDWQRLINNNWGFRPRKLRFKLFNIQVKEVTTNDGVTTIANNLTSTIQVFSDSEYQLPYVLGSAHQGCLPPFPADVFMIPQYGYLTLNNGSQSVGRSSFYCLEYFPSQMLRTGNNFEFSYTFEEVPFHSSYAHSQSLDRLMNPLIDQYLYYLARTQSTTGSTRELQFHQAGPNTMAEQSKNWLPGPCYRQQRLSKNIDSNNNSNFAWTGATKYHLNGRNSLTNPGVAMATNKDDEDQFFPINGVLVFGKTGAANKTTLENVLMTSEEEIKTTNPVATEEYGVVSSNLQSSTAGPQTQTVNSQGALPGMVWQNRDVYLQGPIWAKIPHTDGNFHPSPLMGGFGLKHPPPQILIKNTPVPANPPEVFTPAKFASFITQYSTGQVSVEIEWELQKENSKRWNPEIQYTSNYAKSNNVEFAVNNEGVYTEPRPIGTRYLTRNL

SEQ ID NO: 146 - protein, 728 aa, Artificial Sequence
  source: /note="Description of Artificial Sequence: Synthetic polypeptide"
MAADGYLPDWLEGNLSEGIREWWDLKPGAPKPKANQQKQDDGRGLVLPGYRYLGPFNGLDKGEPVNEADAAALEHDKAYDKQLEQGDNPYLKYNHADAEFQERLQEDTSFGGNLGRAVFQAKKRVLEPLGLVEEGAKTAPGKKRPIESPDSSTGIGKNGQPPAKKKLNFGQTGDSESVPDPQPLGEPPAAPSGLGSGTMAAGGGAPMADNNEGADGVGNASGNWHCDSTWLGDRVITTSTRTWALPTYNNHLYKQISSQSGATNDNHFFGYSTPWGYFDFNRFHCHFSPRDWQRLINNNWGFRPRKLRFKLFNIQVKEVTTNDGVTTIANNLTSTIQVFSDSEYQLPYVLGSAHQGCLPPFPADVFMIPQYGYLTLNNGSQSVGRSSFYCLEYFPSQMLRTGDNFEFSYTFEEVPFHSSYAHSQSLDRLMNPLIDQYLYYLARTQSTTGSTRELQFHQAGPNTMAEQSKNWLPGPCYRQQRLSKNIDSNNNSNFAWTGATKYHLNGRNSLTNPGVAMATNKDDEDQFFPINGVLVFGKTGAANKTTLENVLMTSEEEIKTTNPVATEEYGVVSSNLQSSTAGPQTQTVNSQGALPGMVWQNRDVYLQGPIWAKIPHTDGNFHPSPLMGGFGLKHPPPQILIKNTPVPANPPEVFTPAKFASFITQYSTGQVSVEIEWELQKENSKRWNPEIQYTSNYAKSNNVEFAVNNEGVYTEPRPIGTRYLTRNL

SEQ ID NO: 147 - DNA, 3106 bp, Adeno-associated virus
gcggccgcgaattcgcccttcgcagagaccaaagttcaactgaaacgaatcagccggtttattgattaacaagtaattacaggttacgggtgaggtaacgggtgccaatggggcgaggctcagtataaaccccttcgttgttgacagcaaattccacattattagacttggcataatttgaggtgtactgaatctctggattccagcgtttgctgttttctttctgcagttcccactcgatctccacgctgacctggccggtgctgtactgcgtgataaatgaggcaaacttggcaggagtaaacacctctggaggattagcaggtaccggggtgtttttgatgagaatttgaggaggcgggtgtttgagtccaaatccgcccatcaggggagacgggtgaaagttgccgtccgtgtgaggaattttggcccagatgggaccctgcaggtacacgtcccggttctgccagaccatgccgggcagagccccctggctgttgacagtctgtgtctggggtccggccgtagacgattgcaggttgctggagaccacaccgtattcttctgtagccacgggattggtggttttgatctcctcctcgctggtcattagcacgttttccagcgttgtcttgttggcagcccccgttttgccaaaaaccagcactccgttgatgggaaagaactggtcctcgtcgtccttgttggtggccatggctacgcccgggttggttaatgaatttctaccattcagatggtatttagtggccccggtccaggcaaagttactgttgttgttgctgtctatgttttttgacagtctctgctgccgataacagggtccgggcagccagttctttgattgctcggccatggtgttgggcccagcctgatggaactgcagctcccttgtggaccccgtagtgctctgggtccgggccaggtagtacaggtactggtcgatgaggggattcatcagccggtccaggctctggctgtgcgcatagctgctgtggaaaggcacttcctcaaaggtgtagctgaattcaaagttatcgcccgttctcagcatctgagaaggaaagtactccaggcagtagaaggaggaacgtcccacagactgactgccgttgtttagagtcagatatccgtactgaggaatcatgaacacgtccgcagggaacggagggaggcagccctggtgcgcagagccgaggacgtacggcagttggtactccgagtccgagaagacctgaatcgtgctggtaaggttattagcgatggtcgtaacgccgtcgttcgtcgtgacctccttgacctggatgttgaacaacttgaaccgcagctttctgggccggaatccccagttgttgttgatgagtcgctgccagtcacgtggtgagaagtggcagtggaatctgttgaagtcaaaatagccccagggggtgctgtagccgaagaagtggttgtcgttggtagccccgctctgacttgatatctgcttgtagaggtggttgttgtaggtgggcagggcccaggtgcgggtgctggtggtgatgactctgtcgcccagccatgtggaatcgcaatgccaatttccggaggcattacccactccgtcggcgccttcgttattgtctgccattggtgcgccaccgcctgcagccattgtaccagatcccagacctgagggcgcggcgggaggttctccgagaggttgggggtcgggcactgactctgagtcgccagtctgcccaaagttgagcttctttttagcgggcggctggccgttcttgccgatgcccgtggaggagtcgggggattctatgggtctcttctttccaggagccgtcttagcgccttcctcaaccagaccgagaggttcgagaacccgcttcttggcctggaagactgctcgcccgaggttgcccccaaaagacgtatcttcttgaagacgctcctgaaactcggcgtcggcgtggttgtacttgaggtacgggttgtccccctgctcgagctgcttgtcgtaggccttgtcgtgctcgagggccgcggcgtctgcctcgttgaccggctctcccttgtcgagtccgttgaagggtccgaggtacctgtagccaggaagcaccagaccccggccgtcgtcctgcttttgctggttggctttgggtttcggggctccaggtttcaagtcccaccactcgcgaatgccctcagagaggttgccctcgagccaatctggaagataaccatcggcagccatacctggtttaagtcatttattgctcagaaacacagtcatccaggtccacgttggccagatcgcaggccgagcaagcaatctcgggagcccgccccagcagatgatgaatggcacagagtttccgatacgtcctctttctgacgaccggttgagattctgacacgccggggaaacattctgaacagtctctggtcccgtgcgtgaagcaaatgttgaaattctgattcattctctcgcatgtcttgcaggggaacagcatctgaagcatgcccgcgtgacgagaacatttgttttggtacctgtcggcaaagtccaccggagctccttccgcgtctgacgtcgatggatccgcgactgaggggcaggcccgcttgggctcgcttttatccgcgtcatcgggggcgggtctcttgttggctccaccctttctgacgtagaactcatacgccacctcggtcacgtgatcctgcgcccagcggaagaactctttgacttcctgctttgtcaccttgccaaagtcatgctccagacggcgggtgagttcaaatttgaacatccggtcttgtaacggctgctggtgctcgaaggtggtgctgttcccgtcaatcacggcgcacatgttggtgttggaagtgacgatcacgggggtgggatcgatctgggcggacgacttgcacttttggtccacgcgcaccttgctgccgccgagaatggccttggcggactccacgaccttggccgtcatcctgccctcctcccaccagatcaccatcttgtcgacgcaatcgttgaagggaaagttctcattggtccagttgacgcagccgtagaaagggcgaattc

SEQ ID NO: 148 - protein, 728 aa, Artificial Sequence
  source: /note="Description of Artificial Sequence: Synthetic polypeptide"
MAADGYLPDWLEDNLSEGIREWWDLKPGAPKPKANQQKQDDGRGLVLPGYKYLGPFNGLDKGEPVNEADAAALEHDKAYDKQLEQGDNPYLKYNHADAEFQERLQEDTSFGGNLGRAVFQAKKRVLEPLGLVEEGAKTAPGKKRPIESPDSSTGIGKKGQQPAKKKLNFGQTGDSESVPDPQPLGEPPAAPSGLGSGTMAAGGGAPMADNNEGADGVGNASGNWHCDSTWLGDRVITTSTRTWALPTYNNHLYKQISSQSGATNDNHFFGYSTPWGYFDFNRFHCHFSPRDWQRLINNNWGFRPRKLRFKLFNIQVKEVTTNDGVTTIANNLTSTIQVFSDSEYQLPYVLGSAHQGCLPPFPADVFMIPQYGYLTLNNGSQSMGRSSFYCLEYFPSQMLRTGNNFEFSYTFEEVPFHSSYAHSQSLDRLMNPLIDQYLYYLARTQSTTGSTRELQFHQAGPNTMAEQSKNWLPGPCYRQQRLSKNIDSNNNSNFAWTGATKYHLNGRNSLTNPGVAMATNKDDEGQFFPINGVLVFGKTGAANKTTLENVLMTSEEEIKTTNPVATEEYGVVSSNLQSSTAGPQTQTVNSQGALPGMVWQNRDVYLQGPIWAKIPHTDGNFHPSPLMGGFGLKHPPPQILIKNTPVPANPPGVFTPALFASFITQYSTGQVSVEIEWELQKENSKRWNPEIQYTSNYAKSNNVEFAVNNEGVYTEPRPIGTRYLTRNL

SEQ ID NO: 149 - DNA, 3098 bp, Adeno-associated virus
gaattcgcccttcgcagagaccaaagttcaactgaaacgaatcaaccggtttattgattaacaagtaattacaggttacgggtgaggtaacgggtgccaatggggcgaggctcagtataaaccccttcgttgttgacagcaaattccacattattagacttggcataatttgaggtgtactgaatctctggattccagcgtttgctgttttctttctgcagttcccactcgatctccacgctgacctggccggtgctgtactgcgtgataaatgaggcaaactaggcaggagtaaacacccctggaggattagcaggtaccggggtgtttttgatgagaatttgaggaggcgggtgtttgagtccaaatccgcccatcaggggagacgggtgaaagttgccgtccgtgtgaggaattttggcccagatgggaccctgcaggtacacgtcccggttctgccagaccatgccgggcagagccccctggctgttgacagtctgtgtctggggtccggccgtagacgattgcaggttgctggagaccacaccgtattcttctgtagccacgggattggtggttttgatctcctcctcgctggtcattagcacgttttccagcgttgtcttgttggcagcccccgttttgccaaaaaccagcactccgttgatgggaaagaactggccctcgtcgtccttgttggtggccatggctacgcccgggttggttaatgaatttctaccattcagatggtatttagtggccccggtccaggcaaagttactgttgttgttgctgtctatgttttttgacagtctctgctgccgataacagggtccgggcagccagttctttgattgctcggccatggtgttgggcccagcctgatggaactgcagctcccttgtggaccccgtagtgctctgggtccgggccaggtagtacaggtactggtcgatgaggggattcatcagccggtccaggctctggctgtgcgcatagctgctgtggaaaggcacttcctcaaaggtgtagctgaattcaaagttattgcccgttctcagcatctgagaaggaaagtactccaggcagtagaaggaggaacgtcccatagactgactgccgttgtttagagtcagatatccgtactgaggaatcatgaacacgtccgcagggaacggagggaggcagccctggtgcgcagagccgaggacgtacggcagttggtactccgagtccgagaagacctgaatcgtgctggtaaggttattagcgatggtcgtaacgccgtcgttcgtcgtgacctccttgacctggatgttgaacaacttgaaccgcagctttctgggccggaatccccagttgttgttgatgagtcgctgccagtcacgtggtgagaagtggcagtggaatctgttgaagtcaaaatagccccagggggtgctgtagccgaagaagtggttgtcgttggtagccccgctctgacttgatatctgcttgtagaggtggttgttgtaggtgggcagggcccaggtgcgggtgctggtggtgatgactctgtcgcccagccatgtggaatcgcaatgccaatttccggaggcattacccactccgtcggcgccttcgttattgtctgccattggtgcgccaccgcctgcagccattgtaccagatcccagacctgagggcgcggcgggaggttctccgagaggttgggggtcgggcactgactctgagtcgccagtctgcccaaagttgagcttctttttagcgggctgctggcctttcttgccgatgcccgtggaggagtcgggggattctatgggtctcttctttccaggagccgtcttagcgccttcctcaaccagaccgagaggttcgagaacccgcttcttggcctggaagactgctcgcccgaggttgcccccaaaagacgtatcttcttgaagacgctcctgaaactcagcgtcggcgtggttgtacttgaggtacgggttgtccccctgctcgagctgcttgtcgtaggccttgtcgtgctcgagggccgcggcgtctgcctcgttgaccggctctcccttgtcgagtccgttgaagggtccgaggtacttgtagccaggaagcaccagaccccggccgtcgtcctgcttttgctggttggctttgggtttcggggctccaggtttcaagtcccaccactcgcgaatgccctcagagaggttgtcctcgagccaatctggaagataaccatcggcagccatacctggtttaagtcatttattgctcagaaacacagtcatccaggtccacgttgaccagatcgcaggccgagcaagcaatctcgggagcccgccccagcagatgatgaatggcacagagtttccgatacgtcctctttctgacgaccggttgagattctgacacgccggggaaacattctgaacagtctctggtcccgtgcgtgaagcaaatgttgaaattctgattcattctctcgcatgtcttgcagggaaacagcatctgaagcatgcccgcgtgacgagaacatttgttttggtacctgtcggcaaagtccaccggagctccttccgcgtctgacgtcgatggatccgcgactgaggggcaggcccgcttgggctcgcttttatccgcgtcatcgggggcgggcctcttgttggctccaccctttctgacgtagaactcatgcgccacctcggtcacgtgatcctgcgcccagcggaagaactctttgacttcctgctttgtcaccttgccaaagtcctgctccagacggcgggtgagttcaaatttgaacatccggtcttgtaacggctgctggtgctcgaaggtggtgctgttcccgtcaatcacggcgcacatgttggtgttggaagtgacgatcacgggggtgggatcgatctgggcggacgacttgcacttttggtccacgcgcaccttgctgccgccgagaatggccttggcggactccacgaccttggccgtcatcttgccctcctcccaccagatcaccatcttgtcgacgcaatcgttgaagggaaagttctcattggtccagttgacgcagccgtagaaagggcgaattc

SEQ ID NO: 150 - DNA, 2187 bp, Adeno-associated virus
atggctgccgatggttatcttccagattggctcgagggcaacctctctgagggcattcgcgagtggtgggacttgaaacctggagccccgaaacccaaagccaaccagcaaaagcaggacgacggccggggtctggtgcttcctggctacaggtacctcggacccttcaacggactcgacaagggagagccggtcaacgaggcagacgccgcggccctcgagcacgacaaggcctacgacaagcagctcgagcagggggacaacccgtacctcaagtacaaccacgccgacgccgagtttcaggagcgtcttcaagaagatacgtcttttgggggcaacctcgggcgagcagtcttccaggccaagaagcgggttctcgaacctctcggtctggttgaggaaggcgctaagacggctcctggaaagaagagacccatagaatcccccgactcctccacgggcatcggcaagaacggccagccgcccgctaaaaagaagctcaactttgggcagactggcgactcagagtcagtgcccgacccccaacctctcggagaacctcccgccgcgccctcaggtctgggatctggtacaatggctgcaggcggtggcgcaccaatggcagacaataacgaaggcgccgacggagtgggtaatgcctccggaaattggcattgcgattccacatggctgggcgacagagtcatcaccaccagcacccgcacctgggccctgcccacctacaacaaccacctctacaagcagatatcaagtcagagcggggctaccaacgacaaccacttcttcggctacagcaccccctggggctattttgacttcaacagattccactgccacttctcaccacgtgactggcagcgactcatcaacaacaactggggattccggcccagaaagctgcggttcaagttgttcaacatccaggtcaaggaggtcacgacgaacgacggcgttacgaccatcgctaataaccttaccagcacgattcaggtcttctcggactcggagtaccaactgccgtacgtcctcggctctgcgcaccagggctgcctccctccgttccctgcggacgtgttcatgattcctcagtacggatatctgactctaaacaacggcagtcagtctgtgggacgttcctccttctactgcctggagtactttccttctcagatgctgagaacgggcgataactttgaattcagctacacctttgaggaagtgcctttccacagcagctatgcgcacagccagagcctggaccggctgatgaatcccctcatcgaccagtacctgtactacctggcccggacccagagcactacggggtccacaagggagctgcagttccatcaggctgggcccaacaccatggccgagcaatcaaagaactggctgcccggaccctgttatcggcagcagagactgtcaaaaaacatagacagcaacaacaacagtaactttgcctggaccggggccactaaataccatctgaatggtagaaattcattaaccaacccgggcgtagccatggccaccaacaaggacgacgaggaccagttctttcccatcaacggagtgctggtttttggcaaaacgggggctgccaacaagacaacgctggaaaacgtgctaatgaccagcgaggaggagatcaaaaccaccaatcccgtggctacagaagaatacggtgtggtctccagcaacctgcaatcgtctacggccggaccccagacacagactgtcaacagccagggggctctgcccggcatggtctggcagaaccgggacgtgtacctgcagggtcccatctgggccaaaattcctcacacggacggcaactttcacccgtctcccctgatgggcggatttggactcaaacacccgcctcctcaaattctcatcaaaaacaccccggtacctgctaatcctccagaggtgtttactcctgccaagtttgcctcatttatcacgcagtacagcaccggccaggtcagcgtggagatcgagtgggaactgcagaaagaaaacagcaaacgctggaatccagagattcagtacacctcaaattatgccaagtctaataatgtggaatttgctgtcaacaacgaaggggtttatactgagcctcgccccattggcacccgttacctcacccgtaacctgtaa

SEQ ID NO: 151 - protein, 728 aa, Adeno-associated virus; identical to SEQ ID NO: 146

SEQ ID NO: 152 - protein, 728 aa, Adeno-associated virus
MAADGYLPDWLEDNLSEGIREWWDLKPGAPKPKANQQKQDDGRGLVLPGYRYLGPFNGLDKGEPVNEADAAALEHDKAYDKQLEQGDNPYLKYNHADAEFQERLQEDTSFGGNLGRAVFQAKKRVLEPLGLVEEGAKTAPGKKRPIESPDSSTGIGKNGQPPAKKKLNFGQTGDSESVPDPQPLGEPPAAPSGLGSGTMAAGGGAPMADNNEGADGVGNASGNWHCDSTWLGDRVITTSTRTWALPTYNNHLYKQISSQSGATNDNHFFGYSTPWGYFDFNRFHCHFSPRDWQRLINNNWGFRPRKLRFKLFNIQVKEVTTNDGVTTIANNLTSTIQVFSDSEYQLPYVLGSAHQGCLPPFPADVFMIPQYGYLTLNNGSQSVGRSSFYCLEYFPSQMLRTGDNFEFSYTFEEVPFHSSYAHSQSLDRLMNPLIDQYLYYLARTQSTTGSTRELQFHQAGPNTMAEQSKNWLPGPCYRQQRLSKNIDSNNNSNFAWTGATKYHLNGRNSLTNPGVAMATNKDDEDQFFPINGVLVFGKTGAANKTTLENVLMTSEEEIKTTNPVATEEYGVVSSNLQSSTAGPQTQTVNSQGALPGMVWQNRDVYLQGPIWAKIPHTDGNFHPSPLMGGFGLKHPPPQILIKNTPVPANPPEVFTPAKFASFITQYSTGQVSVEIEWELQKENSKRWNPEIQYTSNYAKSNNVEFAVNNEGVYTEPRPIGTRYLTRNL

SEQ ID NO: 153 - protein, 728 aa, Adeno-associated virus; identical to SEQ ID NO: 145

SEQ ID NO: 154 - protein, 728 aa, Adeno-associated virus
MAADGYLPDWLEDNLSEGIREWWDLKPGAPKPKANQQKQDDGRGLVLPGYKYLGPFNGLDKGEPVNEADAAALEHDKAYDKQLEQGDNPYLKYNHADAEFQERLQEDTSFGGNLGRAVFQAKKRVLEPLGLVEEGAKTAPGKKRPIESPDSSTGIGKNGQPPAKKKLNFGQTGDSESVPDPQPLGEPPAAPSGLGSGTMAAGGGAPMADNNEGADGVGNASGNWHCDSTWLGDRVITTSTRTWALPTYNNHLYKQISSQSGATNDNHFFGYSTPWGYFDFNRFHCHFSPRDWQRLINNNWGFRPRKLRFKLFNIQVKEVTTNDGVTTIANNLTSTIQVFSDSEYQLPYVLGSAHQGCLPPFPADVFMIPQYGYLTLNNGSQSVGRSSFYCLEYFPSQMLRTGNNFEFSYTFEEVPFHSSYAHSQSLDRLMNPLIDQYLYYLARTQSTTGSTRELQFHQAGPNTMAEQSKNWLPGPCYRQQRLSKNIDSNNNSNFAWTGATKYHLNGRNSLTNPGVAMATNKDDEDQFFPINGVLVFGKTGAANKTTLENVLMTSEEEIKTTNPVATEEYGVVSSNLQSSTAGPQTQTVNSQGALPGMVWQNRDVYLQGPIWAKIPHTDGNFHPSPLMGGFGLKHPPPQILIKNTPVPANPPEVFTPAKFASFITQYSTGQVSVEIEWELQKENSKRWNPEIQYTSNYAKSNNVEFAVNNEGVYTEPRPIGTRYLTRNL

SEQ ID NO: 155 - protein, 728 aa, Adeno-associated virus
MAADGYLPDWLEDNLSEGIREWWDLKPGAPKPKANQQKQDDGRGLVLPGYKYLGPFNGLDKGEPVNEADAAALEHDKAYDKQLEQGDNPYLKYNHADAEFQERLQEDTSFGGNLGRAVFQAKKRVLEPLGLVEEGAKTAPGKKRPIESPDSSTGIGKKGQQPAKKKLNFGQTGDSESVPDPQPLGEPPAAPSGLGSGTMAAGGGAPMADNNEGADGVGNASGNWHCDSTWLGDRVITTSTRTWALPTYNNHLYKQISSQSGATNDNHFFGYSTPWGYFDFNRFHCHFSPRDWQRLINNNWGFRPRKLRFKLFNIQVKEVTTNDGVTTIANNLTSTIQVFSDSEYQLPYVLGSAHQGCLPPFPADVFMIPQYGYLTLNNGSQSVGRSSFYCLEYFPSQMLRTGNNFEFSYTFEEVPFHSSYAHSQSLDRLMNPLIDQYLYYLARTQSTTGSTRELQFHQAGPNTMAEQSKNWLPGPCYRQQRLSKNIDSNNNSNFAWTGATKYHLNGRNSLTNPGVAMATNKDDEDQFFPINGVLVFGKTGAANKTTLENVLMTSEEEIKTTNPVATEEYGVVSSNLQSSTAGPQTQTVNSQGALPGMVWQNRDVYLQGPIWAKIPHTDGNFHPSPLMGGFGLKHPPPQILIKNTPVPANPPEVFTPAKFASFITQYSTGQVSVEIEWELQKENSKRWNPEIQYTSNYAKSNNVEFAVNNEGVYTEPRPIGTRYLTRNL

SEQ ID NO: 156 - DNA, 2215 bp, Artificial Sequence
  source: /note="Description of Artificial Sequence: Synthetic polynucleotide"
atggctgccgatggttatcttccagattggctcgaggacactctctctgaaggaataagacagtggtggaagctcaaacctggcccaccaccaccaaagcccgcagagcggcataaggacgacagcaggggtcttgtgcttcctgggtacaagtacctcggacccttcaacggactcgacaagggagagccggtcaacgaggcagacgccgcggccctcgagcacgacaaagcctacgaccggcagctcgacagcggagacaacccgtacctcaagtacaaccacgccgacgccgagttccaggagcggctcaaagaagatacgtcttttgggggcaacctcgggcgagcagtcttccaggccaaaaagaggcttcttgaacctcttggtctggttgaggaagcggctaagacggctcctggaaagaagaggcctgtagagcactctcctgtggagccagactcctcctcgggaaccggaaaggcgggccagcagcctgcaagaaaaagattgaattttggtcagactggagacgcagactcagtcccagaccctcaaccaatcggagaacctcccgcagccccctcaggtgtgggatctcttacaatggctgcaggcggtggcgcaccaatggcagacaataacgagggcgccgacggagtgggtaattcctcgggaaattggcattgcgattccacatggatgggcgacagagtcatcaccaccagcacccgaacctgggccctgcccacctacaacaaccacctctacaagcaaatctccaacagcacatctggaggatcttcaaatgacaacgcctacttcggctacagcaccccctgggggtattttgactttaacagattccactgccacttttcaccacgtgactggcagcgactcatcaacaacaactggggattccggcccaagagactcagcttcaagctcttcaacatccaggtcaaggaggtcacgcagaatgaaggcaccaagaccatcgccaataacctcaccagcaccatccaggtgtttacggactcggagtaccagctgccgtacgttctcggctctgcccaccagggctgcctgcctccgttcccggcggacgtgttcatgattccccagtacggctacctaacactcaacaacggtagtcaggccgtgggacgctcctccttctactgcctggaatactttccttcgcagatgctgagaaccggcaacaacttccagtttacttacaccttcgaggacgtgcctttccacagcagctacgcccacagccagagcttggaccggctgatgaatcctctgattgaccagtacctgtactacttgtctcggactcaaacaacaggaggcacgacaaatacgcagactctgggcttcagccaaggtgggcctaatacaatggccaatcaggcaaagaactggctgccaggaccctgttaccgccagcagcgagtatcaaagacatctgcggataacaacaacagtgaatactcgtggactggagctaccaagtaccacctcaatggcagagactctctggtgaatccgggcccggccatggcaagccacaaggacgatgaagaaaagtttttttcctcagagcggggttctcatctttgggaagcaaggctcagagaaaacaaatgtggacattgaaaaggtcatgattacagacgaagaggaaatcaggacaaccaatcccgtggctacggagcagtatggttctgtatctaccaacctccagagaggcaacagacaagcagctaccgcagatgtcaacacacaaggcgttcttccaggcatggtctggcaggacagagatgtgtaccttcaggggcccatctgggcaaagattccacacacggacggacattttcacccctctcccctcatgggtggattcggacttaaacaccctccgcctcagatcctgatcaagaacacgcctgtacctgcggatcctccgaccaccttcaaccagtcaaagctgaactctttcatcacccagtattctactggccaagtcagcgtggagatcgagtgggagctgcagaaggaaaacagcaagcgctggaaccccgagatccagtacacctccaactactacaaatctacaagtgtggactttgctgttaatacagaaggcgtgtactctgaaccccgccccattggcacccgttacctcacccgtaatctgtaa

SEQ ID NO: 157 - protein, 737 aa, Artificial Sequence
  source: /note="Description of Artificial Sequence: Synthetic polypeptide"
MAADGYLPDWLEDTLSEGIRQWWKLKPGPPPPKPAERHKDDSRGLVLPGYKYLGPFNGLDKGEPVNEADAAALEHDKAYDRQLDSGDNPYLKYNHADAEFQERLKEDTSFGGNLGRAVFQAKKRLLEPLGLVEEAAKTAPGKKRPVEHSPVEPDSSSGTGKAGQQPARKRLNFGQTGDADSVPDPQPIGEPPAAPSGVGSLTMAAGGGAPMADNNEGADGVGNSSGNWHCDSTWMGDRVITTSTRTWALPTYNNHLYKQISNSTSGGSSNDNAYFGYSTPWGYFDFNRFHCHFSPRDWQRLINNNWGFRPKRLSFKLFNIQVKEVTQNEGTKTIANNLTSTIQVFTDSEYQLPYVLGSAHQGCLPPFPADVFMIPQYGYLTLNNGSQAVGRSSFYCLEYFPSQMLKTGNNFQFTYTFEDVPFHSSYAHSQSLDRLMNPLIDQYLYYLSRTQTTGGTTNTQTLGFSQGGPNTMANQAKNWLPGPCYRQQRVSKTSADNNNSEYSWTGATKYHLNGRDSLVNPGPAMASHKDDEEKFFPQSGVLIFGKQGSEKTNVDIEKVMITDEEEIRTTNPVATEQYGSVSTNLQRGNRQAATADVNTQGVLPGMVWQDRDVYLQGPIWAKIPHTDGHFHPSPLMGGFGLKHPPPQILIKNTPVPADPPTTFNQSKLNSFITQYSTGQVSVEIEWELQKENSKRWNPEIQYTSNYYKSTSVDFAVNTEGVYSEPRPIGTRYLTRNL

SEQ ID NO: 158 - protein, 737 aa, Artificial Sequence
  source: /note="Description of Artificial Sequence: Synthetic polypeptide"
MAADGYLPDWLEDTLSEGIRQWWKLKPGPPPPKPAERHKDDSRGLVLPGYKYLGPFNGLDKGEPVNEADAAALEHDKAYDRQLDSGDNPYLKYNHADAEFQERLKEDTSFGGNLGRAVFQAKKRLLEPLGLVEEAAKTAPGKKRPVEHSPVEPDSSSGTGKAGQQPARKRLNFGQTGDADSVPDPQPIGEPPAAPSGVGSLTMAAGGGAPMADNNEGADGVGNSSGNWHCDSTWMGDRVITTSTRTWALPTYNNHLYKQISNSTSGGSSNDNAYFGYSTPWGYFDFNRFHCHFSPRDWQRLINNNWGFRPKRLSFKLFNIQVKEVTQNEGTKTIANNLTSTIQVFTDSEYQLPYVLGSAHQGCLPPFPADVFMIPQYGYLTLNNGSQAVGRSSFYCLEYFPSQMLKTGNNFQFTYTFEDVPFHSSYAHSQSLDRLMNPLIDQYLYYLSRTQTTGGTTNTQTLGFSQGGPNTMANQAKNWLPGPCYRQQRVSKTSADNNNSEYSWTGATKYHLNGRDSLVNPGPAMASHKDDEEKFFPQSGVLIFGKQGSEKTNVDIEKVMITDEEEIRTTNPVATEQYGSVSTNLQQGNTQAATADVNTQGVLPGMVWQDRDVYLQGPIWAKIPHTDGHFHPSPLMGGFGLKHPPPQILIKNTPVPADPPTTFNQSKLNSFITQYSTGQVSVEIEWELQKENSKRWNPEIQYTSNYYKSTSVDFAVNTEGVYSEPRPIGTRYLTRNL

SEQ ID NO: 159 - protein, 737 aa, Artificial Sequence
  source: /note="Description of Artificial Sequence: Synthetic polypeptide"
MAADGYLPDWLEDTLSEGIRQWWKLKPGPPPPKPAERHKDDSRGLVLPGYKYLGPFNGLDKGEPVNEADAAALEHDKAYDRQLDSGDNPYLKYNHADAEFQERLKEDTSFGGNLGRAVFQAKKRLLEPLGLVEEAAKTAPGKKRPVEHSPVEPDSSSGTGKAGQQPARKRLNFGQTGDADSVPDPQPIGEPPAAPSGVGSLTMAAGGGAPMADNNEGADGVGNSSGNWHCDSTWMGDRVITTSTRTWALPTYNNHLYKQISNSTSGGSSNDNAYFGYSTPWGYFDFNRFHCHFSPRDWQRLINNNWGFRPKRLSFKLFNIQVKEVTQNEGTKTIANNLTSTIQVFTDSEYQLPYVLGSAHQGCLPPFPADVFMIPQYGYLTLNNGSQAVGRSSFYCLEYFPSQMLRTGNNFQFTYTFEDVPFHSSYAHSQSLDRLMNPLIDQYLYYLSRTQTTGGTTNTQTLGFSQGGPNTMANQAKNWLPGPCYRQQRVSKTSADNNNSEYSWTGATKYHLNGRDSLVNPGPAMASHKDDEEKFFPQSGVLIFGKQGSEKTNVDIEKVMITDEEEIRTTNPVATEQYGSVSTNLQQGNTQAATADVNTQGVLPGMVWQDRDVYLQGPIWAKIPHTDGHFHPSPLMGGFGLKHPPPQILIKNTPVPADPPTTFNQSKLNSFITQYSTGQVSVEIEWELQKENSKRWNPEIQYTSNYYKSTSVDFAVNTEGVYSEPRPIGTRYLTRNL

SEQ ID NO: 160 - protein, 729 aa, Artificial Sequence
  source: /note="Description of Artificial Sequence: Synthetic polypeptide"
MAADGYLPDWLEDNLSEGIREWWDLKPGAPKPKANQQKQDDGRGLVLPGYKYLGPFNGLDKGEPVNAADAAALEHDKAYDQQLKAGDNPYLRYNHADAEFQERLQEDTSFGGNLGRAVFQAKKRVLEPLGLVEEGAKTAPGKKRPIDSPDSSTGIGKKGQQPAKKKLNFGQTGDSESVPDPQPLGEPPAAPSSVGSGTMAAGGGAPTADNNEGADGVGNASGNWHCDSTWLGDRVITTSTRTWALPTYNNHLYKQISSSSSGATNDNHYFGYSTPWGYFDFNRFHCHFSPRDWQRLINNNWGFRPKKLRFKLFNIQVKEVTTNDGVTTIANNLTSTVQVFSDSEYQLPYVLGSAHQGCLPPFPADVFMIPQYGYLTLNNGSQSVGRSSFYCLEYFPSQMLRTGNNFEFSYSFEDVPFHSSYAHSQSLDRLMNPLIDQYLYYLARTQSTTGSTRELQFHQAGPNTMAEQSKNWLPGPCYRQQRLSKNLDFNNNSNFAWTAATKYHLNGRNSLTNPGIPMATNKDDEDQFFPINGVLVFGKTGAANKTTLENVLMTSEEEIKTTNPVATEEYGVVSSNLQSSTAGPQSQTINSQGALPGMVWQNRDVYLQGPIWAKIPHTDGNFHPSPLMGGFGLEHPPPQILIKNTPVPANPPEVFTPAKFASFITQYSTGQVSVEIEWELQKENSKRWNPEIQYTSNYAKSNNVEFAVNPDGVYTEPRPIGTRYLTRNL

SEQ ID NO: 161 - DNA, 3075 bp, Adeno-associated virus
tgagaactttcctttcaacgattgcgtcggacaagatggtgatctggtgggaggaggggaagatgaccgccaaggtcgtggagtcggccaaagccattcttggaggaagcaaggtgcgtgtggaccagaaatgcaagtcctcggcccagatagacccgactcccgtgatcgtcacctccaacaccaacatgtgcgccgtgattgacgggaactcaacgaccttcgagcaccagcagccgttgcaagaccggatgttcaaatttgaacttacccgccgtctggatcatgactttggaaaggtcaccaagcaggaagtgaaagactttttccggtgggcaaaggatcacgtggttgaggtggagcatgaattctacgtcaaaaagggtggagctaagaaaagacccgcccccagtgacgcagatataagtgagcccaaacgggcgcgcgagtcagttgcgcagccatcaacgtcagacgcggaagcttcgatcaactacgcggacaggtaccaaaaacaaatgttctcgtcacgtgggcatgaatctgatgctgtttccctgcagacaatgcgagagaatgaatcagaattcaaatatctgcttcactcacggacagaaagactgtttagagtgctttcccgtgtcagaatctcaacccgtttctgtcgtcaaaaaggcgtatcagaaactgtgctacattcatcatatcatgggaaaggtgccagacgcttgcactgcctgcgatctggtcaatgtggatttggatgactgcatctctgaacaataaatgatttaaatcaggtatggctgccgatggttatcctccagattggctcgaggacactctctctgaagggataagacagtggtggaagctcaaacctggcccaccaccaccaaagcccgcagagcggcataaggacgacagcaggggtcttgtgcttcctgggtacaagtacctcggacccttcaacggactcgacaagggggagccggtcaacgaggcagacgccgcggccctcgagcacgacaaggcctacgaccggcagctcgacagcggagacaacccgtacctcaagtacaaccacgccgacgcagagtttcaggagcgccttaaagaagatacgtcttttgggggcaacctcggacgagcagtcttccaggcgaaaaagagggttcttgaacctctgggcctggttgaggaacctgttaagacggctccgggaaaaaagaggccggtagagcactctcctgtggagccagactcctcctcgggaaccggaaaagcgggccagcggcctgcaagaaaaagattaaattttggtcagactggagacgcagactccgtacctgacccccagcctctcggacagccaccagcagccccctctggtctgggatctactacaatggctacaggcagtggcgcaccaatggcagacaataacgagggtgccgatggagtgggtaattcctcaggaaattggcattgcgattcccaatggctgggcgacagagtcatcaccaccagcacccgaacctgggccctgcccacatacaacaaccacctctacaagcaaatctccagccaatcaggagccagcaacgacaaccactactttggctacagcaccccctgggggtattttgacttcaacagattccactgccacttttcaccacgtgactggcaaagactcatcaacaacaactggggattccggcccaaaagactcaacttcaagctctttaatattcaagtcaaagaggtcacgcagaatgacggtacgacgacgattgccaataaccttaccagcacggttcaggtgtttactgactcggagtaccagctcccgtacgtcctgggctcggcgcatcaaggatgcctcccgccgtttccagcggacgtcttcatggtcccacagtatggatacctcaccctgaacaacgggagtcaggcggtaggacgctcttccttttactgcctggagtactttccttctcagatgctgcgtactggaaacaactttcagttcagctacacttttgaagacgtgcctttccacagcagctacgctcacagccagagtctggatcggctgatgaatcctctgatcgaccagtacctgtattatctgaacaagacacaaacaaatagtggaactcttcagcagtctcggctactgtttagccaagctggaccaaccaacatgtctcttcaagctaaaaactggctgcctggaccttgctacagacagcagcgtctgtcaaaacaggcaaacgacaacaacaacagcaactttccctggactgcagctacaaagtatcatctaaatggccgggactcgttggttaatccaggaccagctatggccagtcacaaggatgacgaagaaaagtttttccccatgcatggaaccctgatatttggtaaacaaggaacaaatgccaacgacgcggatttggaaaatgtcatgattacagatgaagaagaaatcagggccaccaatcccgtggctacggagcagtacgggactgtgtcaaataatttgcaaaactcaaacactggtccaactactggaactgtcaatcgccaaggagcgttacctggtatggtgtggcaggatcgagacgtgtacctgcagggacccatttgggccaagattcctcacaccgatggacactttcatccttctccactgatgggaggttttggactcaaacacccgcctcctcagatcatgatcaaaaacactcccgttccagccaatcctcccacaaacttcagttctgccaagtttgcttctttcatcacacagtattccacgggacaggtcagcgtggagatcgagtgggagctgcagaaggagaacagcaaacgctggaatcccgaaattcagtacacttccaactacaacaagtctgttaatgtggactttactgtggacactaatggtgtgtattcagagcctcgccccattggcaccagatacctgactcgtaatctgtaattgcttgttaatcaataaaccgtttaattcgtttcagttgaactttggtctctgcgaagggcgaa

SEQ ID NO: 162 - DNA, 3142 bp, Adeno-associated virus
aaaacgacgggccagtgattgtaatacgactcactatagggcgaaattgaaattagcggccgcgaattcgcctttcgcagagaccaaagttcaactgaaacgaattaaacggtttattgattaacaagcaattacagattacgagtcaggtatctggtgccaatggggcgaggctctgaatacacaccattagtgtccacagtaaagtccacattaacagacttgttgtagttggaagtgtactgaatttcgggattccagcgtttgctgttctccttctgcagctcccactcgatctccacgctgacctgtcccgtggaatactgtgtgatgaaagaagcaaacttggcagaactgaagtttgtgggaggattggctggaacgggagtgtttttgatcatgatctgaggaggcgggtgtttgagtccaaaacctcccatcagtggagaaggatgaaagtgtccatcggtgtgaggaatcttggcccaaatgggtccctgcaggtacacgtctcgatcctgccacaccataccaggtaacgctccttggtgattgacagttccagtagttggaccagtgtttgagttttgcaaattatttgacacagtcccgtactgctccgtagccacgggattggtggccctgatttcttcttcatctgtaatcatgacattttccaaatccgcgtcgttggcatttgttccttgtttaccaaatatcagggttccatgcatggggaaaaacttttcttcgtcatccttgtgactggccatagctggtcctggattaaccaacgagtcccggccatttagatgatactttgtagctgcagtccagggaaagttgctgttgttgttgtcgtttgcctgttttgacagacgctgctgtctgtagcaaggtccaggcagccagtttttagcttgaagagacatgttggttggtccagcttggctaaacagtagccgagactgctgaagagttccactatttgtttgtgtcttgttcagataatacaggtactggtcgatcagaggattcatcagccgatccagactctggctgtgagcgtagctgctgtggaaaggcacgtcttcaaaagtgtagctgaactgaaagttgtttccagtacgcagcatctgagaaggaaagtactccaggcagtaaaaggaagagcgtcctaccgcctgactcccgttgttcagggtgaggtatccatactgtgggaccatgaagacgtccgctggaaacggcgggaggcatccttgatgcgccgagcccaggacgtacgggagctggtactccgagtcagtaaacacctgaaccgtgctggtaaggttattggcaatcgtcgtcgtaccgtcattctgcgtgacctctttgacttgaatattaaagagcttgaagttgagtcttttgggccggaatccccggttgttgttgacgagtctttgccagtcacgtggtgaaaagtggcagtggaatctgttgaagtcaaaatacccccagggggtgctgtagccaaagtagtggttgtcgttgctggctcctgattggctggagatttgcttgtagaggtggttgttgtatgtgggcagggcccaggttcgggtgctggtggtgatgactctgtcgcccagccattgggaatcgcaatgccaatttcctgaggaattacccactccatcggcaccctcgttattgtctgccattggtgcgccactgcctgtagccattgtagtagatcccagaccagagggggctgctggtggctgtccgagaggctgggggtcaggtacggagtctgcgtctccagtctgaccaaaatttaatctttttcttgcaggctgctggcccgcttttccggttcccgaggaggagtctggctccacaggagagtgctctaccggcctcttttttcccggagccgtcttaacaggctcctcaaccaggcccagaggttcaagaaccctctttttcgcctggaagactgctcgtccgaggttgcccccaaaagacgtatcttctttaaggcgctcctgaaactctgcgtcggcgtggttgtacttgaggtacgggttgtctccgctgtcgagctgccggtcgtaggccttgtcgtgctcgagggccgcggcgtctgcctcgttgaccggctcccccttgtcgagtccgttgaagggtccgaggtacttgtacccaggaagcacaagacccctgctgtcgtccttatgccgctctgcgggctttggtggtggtgggccaggtttgagcttccaccactgtcttattccttcagagagagtgtcctcgagccaatctggaagataaccatcggcagccatacctgatttaaatcatttattgttcagagatgcagtcatccaaatccacattgaccagatcgcaggcagtgcaagcgtctggcacctttcccatgatatgatgaatgtagcacagtttctgatacgcctttttgacgacagaaacgggttgagattctgacacgggaaagcactctaaacagtctttctgtccgtgagtgaagcagatatttgaattctgattcattctctcgcattgtctgcagggaaacagcatcagattcatgcccacgtgacgagaacatttgttttggtacctgtccgcgtagttgatcgaagcttccgcgtctgacgtcgatggctgcgcaactgactcgcgcgcccgtttgggctcacttatatctgcgtcactgggggcgggtcttttcttagctccaccctttttgacgtagaattcatgctccacctcaaccacgtgatcctttgcccaccggaaaaagtctttcacttcctgcttggtgacctttccaaagtcatgatccagacggcgggtaagttcaaatttgaacatccggtcttgcaacggctgctggtgctcgaaggtcgttgagttcccgtcaatcacggcgcacatgttggtgttggaggtgacgatcacgggagtcgggtctatctgggccgaggacttgcatttctggtccacacgcaccttgcttcctccaagaatggctttggccgactccacgaccttggcggtcatcttcccctcctcccaccagatcaccatcttgtcgacgcaatggtaaaaggaaagttctcattgg

SEQ ID NO: 163 - protein, 735 aa, Adeno-associated virus 2
MAADGYLPDWLEDTLSEGIRQWWKLKPGPPPPKPAERHKDDSRGLVLPGYKYLGPFNGLDKGEPVNEADAAALEHDKAYDRQLDSGDNPYLKYNHADAEFQERLKEDTSFGGNLGRAVFQAKKRVLEPLGLVEEPVKTAPGKKRPVEHSPVEPDSSSGTGKAGQQPARKRLNFGQTGDADSVPDPQPLGEPPATPAAVGPTTMASGGGAPMADNNEGADGVGNASGNWHCDSTWLGDRVITTSTRTWALPTYNNHLYKQISSASTGASNDNHYFGYSTPWGYFDFNRFHCHFSPRDWQRLINNNWGFRPKRLNFKLFNIQVKEVTQNDGTTTIANNLTSTVQVFTDSEYQLPYVLGSAHQGCLPPFPADVFMIPQYGYLTLNNGSQAVGRSSFYCLEYFPSQMLRTGNNFTFSYTFEDVPFHSSYAHSQSLDRLMNPLIDQYLYYLNRTQNQSGSAQDKALLFSRGSPAGMSVQPKNWLPGPCYRQQRVSKTKTDNNNSNFTWTGASKYNLNGRESIINPGTAMASHKDDKDKFFPMSGVMIFGKESAGASNTALDNVMITDEEEIKATNPVATERFGTVAVNFQSSSTDPATGDVHVMGALPGMVWQDRDVYLQGPIWAKIPHTDGHFHPSPLMGGFGLKHPPPQILIKNTPVPANPPAEFSATKFASFITQYSTGQVSVEIEWELQKENSKRWNPEVQYTSNYAKSANVDFTVDNNGLYTEPRPIGTRYLTRP

SEQ ID NO: 164 - protein, 740 aa, Adeno-associated virus 2
MAADGYLPDWLEDTLSEGIRQWWKLKPGPPPPKPAERHKDDSRGLVLPGYKYLGPFNGLDKGEPVNAADAAALEHDKAYDRQLDSGDNPYLKYNHADAEFQERLKEDTSFGGNLGRAVFQAKKRVLEPLGLVEEPVKTAPGKKRPVEHSPVEPDSSSGTGKAGQQPARKRLNFGQTGDADSVPDPQPLGQPPAAPSGLGTNTMATGSGAPMADNNEGADGVGNSSGNWHCDSTWMGDRVITTSTRTWALPTYNNHLYKQISSQSGASNDNHYFGYSTPWGYFDFNRFHCHFSPRDWQRLINNNWGFRPKRLNFKLFNIQVKEVTQNDGTTTIANNLTSTVQVFTDSEYQLPYVLGSAHQGCLPPFPADVFMVPQYGYLTLNNGSQAVGRSSFYCLEYFPSQMLRTGNNFTFSYTFEDVPFHSSYAHSQSLDRLMNPLIDQYLYYLSRTNTPSGTTTQSGLQFSQAGASDIRDQSRNWLPGPCYRQQRVSKTSADNNNSEYSWTGATKYHLNGRDSLVNPGPAMASHKDDEEKFFPQSGVLIFGKQGSEKTNVDIEKVMITDEEEIRTTNPVATEQYGSVSTNLQRGNRQAATADVNTQGVLPGMVWQDRDVYLQGPIWAKIPHTDGHFHPSPLMGGFGLKHPPPQILIKNTPVPANPSTTFSAAKFASFITQYSTGQVSVEIEWELQKENSKRWNPEIQYTSNYNKSVNVDFTVDTNGVYSEPRPIGTRYLTRNLLLAAA

SEQ ID NO: 165 - protein, 734 aa, Adeno-associated virus 2
MAADGYLPDWLEDTLSEGIRQWWKLKPGPPPPKPAERHKDDSRGLVLPGYKYLGPFNGLDKGEPVNEADAAALEHDKAYDRQLDSGDNPYLKYNHADAEFQERLKEDTSFGGNLGRAVFQAKKRVLEPLGLVEEPVKTAPGKKRPVEHSPVEPDSSSGTGKAGQQPARKRLNFGQTGDADSVPDPQPLGQPPAAPSGLGTNTMATGSGAPMADNNEGADGVGNSSGNWHCDSTWMGDRVITTSTRTWALPTYNNHLYKQISSQSGASNDNHYFGYSTPWGYFDFNRFHCHFSPRDWQRLINNNWGFRPKRLNFKLFNIQVKEVTQNDGTTTIANNLTSTVQVFTDSEYQLPYVLGSAHQGCLPPFPADVFMVPQYGYLTLNNGSQAVGRSSFYCLEYFPSQMLRTGNNFTFSYTFEDVPFHSSYAHSQSLDRLMNPLIDQYLYYLSRTNTPSGTTTQSGLQFSQAGASDIRDQSRNWLPGPCYRQQRVSKTSADNNNSEYSWTGATMYHLNGRDSLVNPGPAMASHKDDEEKFFPQSGVLIFGKQGSEKTNVDIEKVMITDEEEIRTTNPVATEQYGSVSTNLQRGNRQAATADVNTQGVLPGMVWQDRDVYLQGPIWAKIPHTDGHFHPSPLMGGFGLKHPPPQILIKNTPVPANPSTTFSAAKFASFITQYSTGQVSVEIEWELQKENSKRWNPEIQYTSNYNKSINVDFTVDTNGVYSEPRPIGTRYLTRN

SEQ ID NO: 166 - protein, 734 aa, Adeno-associated virus 2
MAADGYLPDWLEDTLSEGIRQWWKLKPGPPPPKPAERHKDDSRGLVLPGYKYLGPFNGLDKGEPVNEADAAALEHDKAYDRQLDSGDNPYLKYNHADAEFQERLKEDTSFGGNLGRAVFQAKKRVLEPLGLVEEPVKTAPGKKRPVEHSPVEPDSSSGTGKAGQQPARKRLNFGQTGDADSVPDPQPLGQPPAAPSGLGTNTMATGSGAPMADNNEGADGVGNSSGNWHCDSTWMGDRVITTSTRTWALPTYNNHLYKQISSQSGASNDNHYFGYSTPWGYFDFNRFHCHFSPRDWQRLINNNWGFRPKRLNFKLFNIQVKEVTQNDGTTTIANNLTSTVQVFTDSEYQLPYVLGSAHQGCLPPFPADVFMVPQYGYLTLNNGSQAVGRSSFYCLEYFPSQMLRTGNNFTFSYTFEDVPFHSSYAHSQSLDRLMNPLIDQYLYYLSRTNTPSGTTTQSGLQFSQAGASDIRDQSRNWLPGPCYRQQRVSKTSADNNNSEYSWTGATKYHLNGRDSLVNPGPAMASHKDDEEKFFPQSGVLIFGKQGSEKTNVDIEKVMITDEEEIRTTNPVATEQYGSVSTNLQRGNRQAATADVNTQGVLPGMVWQDRDVYLQGPIWAKIPHTDGHFHPSPLMGGFGLKHPPPQILIKNTPVPANPSTTFSEAKFASFITQYSTGQVSVEIEWELQKENSKRWNPEIQYTSNYNKSVNVDFTVDTNGVYSEPRPIGTRYLTRN

SEQ ID NO: 167 - protein, 739 aa, Adeno-associated virus 2
MAADGYLPDWLEDTLSEGIRQWWKLKPGPPPPKPAERHKDDSRGLVLPGYKYLGPFNGLDKGEPVNEADAAALEHDKAYDRQLDSGDNPYLKYNHADAEFQERLKEDTSFGGNLGRAVFQAKKRVLEPLGLVEEPVKTAPGKKRPVEHSPVEPDSSSGTGKAGQQPARKRLNFGQTGDADSVPDPQPLGQPPAAPSGLGTNTMATGSGAPMADNNEGADGVGNSSGNWHCDSTWMGDRVITTSTRTWALPTYNNHLYKQISSQSGASNDNHYFGYSTPWGYFDFNRFHCHFSPRDWQRLINNNWGFRPKRLNFKLFNIQVKEVTQNDGTTTIANNLTSTVQVFTDSEYQLPYVLGSAHQGCLPPFPADVFMVPQYGYLTLNNGSQAVGRSSFYCLEYFPSQMLRTGNNFTFSYTFEDVPFHSSYAHSQSLDRLMNPLIDQYLYYLSRTNTPSGTTTQSGLQFSQAGASDIRDQSRNWLPGPCYRQQRVSKTSADNNNSEYSWTGATKYHLNGRDSLVNPGPAMASHKDDEEKFFPQSGVLIFGKQGSEKTNVDIEKVMITDEEEIRTTNPVATEQYGSVSTNLQRGNRQAATADVNTQGVLPGMVWQDRDVYLQGPIWAKIPHTDGHFHPSPLMGGFGLKHPPPQILIKNTPVPANPSTTFSAAKFASFITQYSTGQVSVEIEWELQKENSKRWNPEIQYTSNYNKSVNVDFTVDTNGVYSEPRPIGTRYLTRNLLLAA

SEQ ID NO: 168 - protein, 725 aa, Adeno-associated virus 2
MAADGYLPDWLEDTLSEGIRQWWKLKPGPPPPKPAERHKDDSRGLVLPGYKYLGPFNGLDKGEPVNEADAAALEHDKAYDRQLDSGDNPYLKYNHADAEFQERLKEDTSFGGNLGRAVFQAKKRVLEPLGLVEEPVKTAPGKKRPVEHSPVEPDSSSGTGKAGQQPARKRLNFGQTGDADSVPDPQPLGQPPAAPSGLGTNTMATGSGAPMADNNEGADGVGNSSGNWHCDSTWMGDRVITTSTRTWALPTYNNHLYKQISSQSGASNDNHYFGYSTPWGYFDFNRFHCHFSPRDWQRLINNNWGFRPKRLNFKLFNIQVKEVTQNDGTTTIANNLTSTVQVFTDSEYQLPYVLGSAHQGCLPPFPADVFMVPQYGYLTLNNGSQAVGRSSFYCLEYFPSQMLRTGNNFTFSYTFEDVPFHSSYAHSQSLDRLMNPLIDQYLYYLSRTNTPSGTTTQSGLQFSQAGASDIRDQSRNWLPGPCYRQQRVSKTSADNNNSEYSWTGATKYHLNGRDSLVNPGPAMASHKDDEEKFFPQSGVLIFGKQGSEKTNVDIEKVMITDEEEIRTTNPVATEQYGSVSTNLQRGNRQAATADVNTQGVLPGMVWQDRDVYLQGPIWAKIPHTDGHFHPSPLMGGFGLKHPPPQILIKNTPVPANPSTTFSAAKFASFITQYSTGQVSVEIEWELQKENSKRWNPEIQYTSNYNKSVNVDFTVDTNGVYSEPRP

SEQ ID NO: 169 - protein, 707 aa, Adeno-associated virus 2
MAADGYLPDWLEDTLSEGIRQWWKLKPGPPPPKPAERHKDDSRGLVLPGYKYLGPFNGLDKGEPVNEADAAALEHDKAYDRQLDSGDNPYLKYNHADAEFQERLKEDTSFGGNLGRAVFQAKKRVLEPLGLVEEPVKTAPGKKRPVEHSPVEPDSSSGTGKAGQQPARKRLNFGQTGDADSVPDPQPLGQPPAAPSGLGTNTMATGSGAPMADNNEGADGVGNSSGNWHCDSTWMGDRVITTSTRTWALPTYNNHLYKQISSQSGASNDNHYFGYSTPWGYFDFNRFHCHFSPRDWQRLINNNWGFRPKRLNFKLFNIQVKEVTQNDGTTTIANNLTSTVQVFTDSEYQLPYVLGSAHQGCLPPFPADVFMVPQYGYLTLNNGSQAVGRSSFYCLEYFPSQMLRTGNNFTFSYTFEDVPFHSSYAHSQSLDRLMNPLIDQYLYYLSRTNTPSGTTTQSGLQFSQAGASDIRDQSRNWLPGPCYRQQRVSKTSADNNNSEYSWTGATKYHLNGRDSLVNPGPAMASHKDDEEKFFPQSGVLIFGKQGSEKTNVDIEKVMITDEEEIRTTNPVATEQYGSCIYQPPERQQTSSYRRCQHTRRSSRHGLAGQRCVPSGAHLGKDSTHGRTFSPLSPHGWIRTTPSSTDSHQEHPGTCESFDHLQCGKVCFLHHTVLHGTGQRGDRVRAAEGKQQTLESRNSVHFQLQQVC

SEQ ID NO: 170 - protein, 739 aa, Adeno-associated virus 2; identical to SEQ ID NO: 167

SEQ ID NO: 171 - protein, 737 aa, Adeno-associated virus 2
MASDGYLPDWLEDNLSEGIREWWDLKPGAPKPKANQQKQDDGRGLVLPGYKYLGPFNGLDKGEPVNAADAAALEHDKAYDQQLKAGDNPYLRYNHADAEFQERLQEDTSFGGNLGRAVFQAKKRVLEPFGLVEEGAKTAPGKKRPVEQSPQEPDSSSGIGKTGQQPAKKRLNFGQTGDSESVPDPQPLGEPPATPAAVGPTTMASGGGAPMADNNEGADGVGNASGNWHCDSTWLGDRVITTSTRTWALPTYNNHLYKQISSASTGASNDNHYFGYSTPWGYFDFNRFHCHFSPRDWQRLINNNWGFRPKRLNFKLFNIQVKEVTTNDGTTTIANNLTSTVQVFTDSEYQLPYVLGSAHQGCLPPFPADVFMVPQYGYLTLNNGSQAVGRSSFYCLEYFPSQMLRTGNNFTFSYTFEDVPFHSSYAHSQSLDRLMNPLIDQYLYYLSRTNTPSGTTTQSGLQFSQAGASDIRDQSRNWLPGPCYRQQRVSKTSADNNNSEYSWTGATKYHLNGRDSLVNPGPAMASHKDDEEKFFPQSGVLIFGKQGSEKTNVDIEKVMITDEEEIRTTNPVATEQYGSVSTNLQRGNRQAATADVNTQGVLPGMVWQDRDVYLQGPIWAKIPHTDGHFHPSPLMGGFGLKHHPPQILIKNTPVPANPSTTFSAAKFASFITQYSTGQVSVEIEWELQKENSKRWNPEIQYTSNYNKSVNVDFTVDTNGVYSEPRPIGTRYLTRNLL

SEQ ID NO: 172 - protein, 741 aa, Adeno-associated virus 2
MAADGYLPDWLEDTLSEGIREWWALKPGAPKPKANQQKQDDGRGLVLPGYKYLGPFNGLDKGEPVNEADAAALEHDKAYDQQLQAGDNPYLRYNHADAEFQERLQEDTSFGGNLGRAVFQAKKRVLEPLGLVEEPVKTAPGKKRPVEHSPVEPDSSSGTGKSGQQPARKRLNFGQTGDADSVPDPQPLGQPPAAPSGLGTNTMATGSGAPMADNNEGADGVGNSSGNWHCDSTWMGDRVITTSTRTWALPTYNNHLYKQISSQSGASNDNHYFGYSTPWGYFDFNRFHCHFSPRDWQRLINNNWGFRPKRLNFKLFNIQVKEVTQNDGTTTIANNLTSTVQVFTDSEYQLPYVLGSAHQGCLPPFPADVFMVPQYGYLTLNNGSQAVGRSSFYCLEYFPSQMLRTGNNFTFSYTFEDVPFHSSYAHSQSLDRLMNPLIDQYLYYLSRTNTPSGTTTQSGLQFSQAGASDIRDQSRNWLPGPCYRQQRVSKTSADNNNSEYSWTGATKYHLNGRDSLVNPGPAMASHKDDEEKFFPQSGVLIFGKQGSEKTNVDIEKVMITDEEEIRTTNPVATEQYGSVSTNLQRGNLANHNNTTNARQAATADVNTQGVLPGMVWQDRDVYLQGPIWAKIPHTDGHFHPSPLMGGFGLKHPPPQILIKNTPVPANPSTTFSAAKFASFITQYSTGQVSVEIEWELQKENSKRWNPEIQYTSNYNKSINVDFTVDTNGVYSEPRPIGTRYL

SEQ ID NO: 173 - protein, 730 aa, Adeno-associated virus 2
MASDGYLPDWLEDNLSEGIREWWDLKPGAPKPKANQQKQDDGRGLVLPGYKYLGPFNGLDKGEPVNAADAAALEHDKAYDQQLKAGDNPYLRYNHADAEFQERLQEDTSFGGNLGRAVFQAKKRVLEPFGLVEEGAKTAPGKKRPVEQSPQEPDSSSGIGKTGQQPAKKRLNFGQTGDSESVPDPQPLGEPPATPAAVGPTTMASGGGAPMADNNEGADGVGNASGNWHCDSTWLGDRVITTSTRTWALPTYNNHLYKQISSASTGASNDNHYFGYSTPWGYFDFNRFHCHFSPRDWQRLINNNWGFRPKRLNFKLFNIQVKEVTTNDGVTTIANNLTSTVQVFSDSEYQLPYVLGSAHQGCLPPFPADVFMIPQYGYLTLNNGSQAVGRSSFYCLEYFPSQMLRTGNNFTFSYTFEDVPFHSSYAHSQSLDRLMNPLIDQYLYYLNRTQNQSGSAQNNDLLFSRGSPAGMSVQPKNWLPGPCYRQQRVSKTKTDNNNSNFTWTGASKYNLNGRESIINPGTAMASHKDDKDKFFPMSGVMIFGKESAGASNTALDNVMITDEEEIKATNPVATERFGTVAVNLQSSSTDPATGDVHVMGALPGMVWQDRDVYLQGPIWAKIPHTDGHFHPSPLMGGFGLKNPPPQILIKNTPVPANPPAEFSATKFASFITQYSTGQVSVEIEWELQKENSKRWNPEVQYTSNYAKSANVDFTVDNNGLYTEPRPIGTR

SEQ ID NO: 174 - protein, 735 aa, Adeno-associated virus 2
  MOD_RES (239)..(239): Any amino acid
MASDGYLPDWLEDNLSEGIREWWDLKPGAPKPKANQQKQDDGRGLVLPGYKYLGPFNGLDKGEPVNAADAAALEHDKAYDQQLKAGDNPYLRYNHADAEFQERLQEDTSFGGNLGRAVFQAKKRVLEPFGLVEEGAKTAPGKKRPVEQSPQEPDSSSGIGKTGQQPAKKRLNFGQTGDSESVPDPQPLGEPPATPAAVGPTTMASGGGAPMADNNEGADGVGNASGNWHCDSTWLGDRXITTSTRTWALPTYNNHLYKQISSASTGASNDNHYFGYSTPWGYFDFNRFHCHFSPRDWQRLINNNWGFRPKRLNFKLFNIQVKEVTTNDGVTTIANNLTSTVQVFSDSEYQLPYVLGSAHQGCLPPFPADVFMIPQYGYLTLNNGSQAVGRSSFYCLEYFPSQMLRTGNNFTFSYTFEDVPFHSSYAHSQSLDRLMNPLIDQYLYYLNRTQNQSGSAQNNDLLFSRGSPAGMSVQPKNWLPGPCYRQQRVSKTKTDNNNSNFTWTGASKYNLNGRESIINPGTAMASHKDDKDKFFPMSGVMIFGKESAGASNTALDNVMITDEEEIKATNPVATERFGTVAVNLQSSSTDPATGDVHVMGALPGMVWQDRDVYLQGPIWAKIPHTDGHFHPSPLMGGFGLKNPPPQILIKNTPVPANPPAEFSATKFASFITQYSTGQVSVEIEWELQKENSKRWNPEVQYTSNYAKSANVDFTVDNNGLYTEPRPIGTRYLTRP

SEQ ID NO: 175 - protein, 733 aa, Adeno-associated virus 2
MASDGYLPDWLEDNLSEGIREWWDLKPGAPKPKANQQKQDDGRGLVLPGYKYLGPFNGLDKGEPVNAADAAALEHDKAYDQQLKAGDNPYLRYNHADAEFQERLQEDTSFGGNLGRAVFLAKKRVLEPFGLVEEGAKTAPGKKRPVEQSPQEPDSSSGIGKTGQQPAKKRLNFGQTGDSESVPDPQPLGEPPATPAAVGPTTMASGGGAPMADNNEGADGVGNASGNWHCDSTWLGDRVITTSTRTWALPTYNNHLYKQISSASTGASNDNHYFGYSTPWGYFDFNRFHCHFSPRDWQRLINNNWGFRPKRLNFKLFNIQVKEVTTNDGVTTIANNLTSTVQVFSDSEYQLPYVLGSAHQGCLPPFPADVFMIPQYGYLTLNNGSQAVGRSSFYCLEYFPSQMLRTGNNFTFSYTFEDVPFHSSYAHSQSLDRLMNPLIDQYLYYLNRTQNQSGSAQNNDLLFSRGSPAGMSVQPKNWLPGPCYRQQRVSKTKTDNNNSNFTWTGASKYNLNGRESIINPGTAMASHKDDKDKFFPMSGVMIFGKESAGASNTALDNVMITDEEEIKATNPVATERFGTVAVNLQSSSTDPATGDVHVMGALPGMVWQDRDVYLQGPIWAKIPHTDGHFHPSPLMGGFGLKNPPPQILIKNTPVPANPPAEFSATKFASFITQYSTGQVSVEIEWELQKENSKRWNPEVQYTSNYAKSANVDFTVDNNGLYTEPRPIGTRYLT

SEQ ID NO: 176 - protein, 734 aa, Adeno-associated virus 2
MAADGYLPDWLEDTLSEGIRQWWKLKPGPPPPKPAERHKDDSRGLVLPGCKYLGPFNGLDKGEPVNEADAAALEHDKAYDRQLDSGDNPYLKYNHADAEFQERLKEDTSFGGNLGRAVFQAKKRVLEPLGLVEEPVKTAPGKKRPVEHSPVEPDSSSGTGKAGQQPARKRLNFGQTGDADSVPDPQPLGQPPAAPSGLGTNTMATGSGAPMADNNEGADGVGNSSGNWHCDSTWMGDRVITTSTRTWALPTYNNHLYKQISSQSGASNDNHYFGYSTPWGYFDFNRFHCHFSPRDWQRLINNNWGFRPKRLNFKLFNIQVKEVTQNDGTTTIANNLTSTVQVFSDSEYQLPYVLGSAHQGCLPPFPADVFMIPQYGYLTLNNGSQAVGRSSFYCLEYFPSQMLRTGNNFTFNYTFEDVPFHSSYAHSQSLDRLMNPLIDQYLYYLNRTQNQSGSAQNNDLLFSRGSPAGMSVQPKNWLPGPCYRQQRVSKTKTDNNNSNFTWTGASKYNLNGRESIINPGTAMASHKDDKDKFFPMSGVMIFGKESAGASNTALDNVMITDEEEIKATNPVATERFGTVAVNLQSSSTDPATGDVHVMGALPGMVWQDRDVYLQGPIWAKIPHTDGHFHPSPLMGGFGLKNPPPQILIKNTPVPANPPAEFSATKFASFITQYSTGQVSVEIEWELQKENSKRWNPEVQYTSNYAKSANVDFTVDNNGLYTEPRPIGTRYLTRP

SEQ ID NO: 177 - protein, 734 aa, Adeno-associated virus 2
MAADGYLPDWLEDTLSEGIRQWWKLKPGPPPPKPAERHKDDSRGLVLPGYKYLGPFNGLDKGEPVNEADAAALEHDKAYDRQLDSGDNPYLKYNHADAEFQERLKEDTSFGGNLGRAVFQAKKRVLEPLGLVEEPVKTAPGKKRPVEHSPVEPDSSSGTGKAGQQPARKRLNFGQTGDADSVPDPQPLGQPPAAPSGLGTNTMATGSGAPMADNNEGADGVGNSSGNWHCDSTWMGDRVITTSTRTWALSTYNNHLYKQISSQSGASNDNHYFGYSTPWGYFDFNRFHCHFSPRDWQRLINNNWGFRPKRLNFKLFNIQVKEVTQNDGTTTIANNLTSTVQVFTDSEYQLPYVLGSAHQGCLPPFPADVFMVPQYGYLTLNNGSQAVGRSSFYCLEYFPSQMLRTGNNFTFSYTFEDVPFHSSYAHSQSLDRLMNPLIDQYLYYLSRTNTPSGTTTQSRLQFSQAGASDIRDQSRNWLPGPCYRQQRVSKTSADNNNSEYSWTGATKYHLNGRDSLVNPGPAMASHKDDEEKFFPQSGVLIFGKQGSEKTNVDIEKVMITDEEEIRTTNPVATEQYGSVSTNLQRGNRQAATADVNTQGVLPGMVWQDRDVYLQGPIWAKIPHTDGHFHPSPLMGGFGLKHPPPQILIKNTPVPANPSTTFSAAKFASFITQYSTGQVSVEIEWELQKENSKRWNPEIQYTSNYNKSINVDFTVDTNGVYSEPRPIGTRYLTRN

SEQ ID NO: 178 - protein, 738 aa, Adeno-associated virus 2
MAADGYLPDWLEDTLSEGIRQWWKLKPGPPPPKPAERHKDDSRGLVLPGYKYLGPFNGLDKGEPVNEADAAALEHDKAYDRQLDGGDNPYLKYNHADAEFQERLKEDTSFGGNLGRAVFQAKKRVLEPLGLVEEPVKTAPGKKRPVEHSPVEPDSSSGTGKAGQQPARKRLNFGQTGDADSVPDPQPLGQPPAAPSGLGTNTMATGSGAPMADNNEGADGVGNSSGNWHCDSTWMGDRVITTSTRTWALPTYNNHLYKQISSQSGASNDNHYFGYSTPWGYFDFNRFHCHFSPRDWQRLINNNWGFRPKRLNFKLFNIQVKEVTQNDGTTTIANNLTSTVQVFTDSEYQLPYVLGSAHQGCLPPFPADVFMVPQYGYLTLNNGSQAVGRSSFYCLEYFPSQMLRTGNNFTFSYTFEDVPFHSSYAHSQSLDRLMNPLIDQYLYYLSRTNTPSGTTTQSGLQFSQAGASDIRDQSRNWLPGPCYRQQRVSKTSADNNNSEYSWTGATKYHLNGRDSLVNPGPAMASHKDDEEKFFPQSGVLIFGKQGSEKTNVDIEKVMITDEEEIRTTNPVATEQYGSVSTNLQRGNRQAATADVNTQGVLPGMVWQDRDVYLQGPIWAKIPHTDGHFHPSPLMGGFGLKHPPPQILIKNTPVPANPSTTFSAAKFASFITQYSTGQVSVEIEWELQKENSKRWNPEIQYTSNYNKSVNVDFTVDTNGVYSEPRPIGTRYLTRNLLRP

SEQ ID NO: 179 - DNA, 2208 bp, Adeno-associated virus
atggctgccgatggttatcttccagattggctcgaggacactctctctgaaggaataagacagtggtggaagctcaaacctggcccaccaccaccaaagcccgcagagcggcataaggacgacagcaggggtcttgtgcttcctgggtacaagtacctcggacccttcaacggactcgacaagggggagccggtcaacgaggcagacgccgcggccctcgagcacgacaaggcctacgaccggcagctcgacagcggagacaacccgtacctcaagtacaaccacgccgacgcagagtttcaggagcgccttaaagaagatacgtcttttgggggcaacctcggacgagcagtcttccaggcgaaaaagagggttcttgaacctctgggcctggttgaggaacctgttaagacggctccgggaaaaaagaggccggtagagcactctcctgtggagccagactcctcctcgggaaccggaaaagcgggccagcagcctgcaagaaaaagattaaattttggtcagactggagacgcagactccgtacctgacccccagcctctcggacagccaccagcagccccctctggtctgggatctactacaatggctacaggcagtggcgcaccaatggcagacaataacgagggtgccgatggagtgggtaattcctcaggaaattggcattgcgattcccaatggctgggcgacagagtcatcaccaccagcacccgaacctgggccctgcccacatacaacaaccacctctacaagcaaatctccagccaatcaggagccagcaacgacaaccactactttggctacagcaccccctgggggtattttgacttcaacagattccactgccacttttcaccacgtgactggcaaagactcatcaacaacaactggggattccggcccaaaagactcaacttcaagctctttaatattcaagtcaaagaggtcacgcagaatggcggtacgacgacgattgccaataaccttaccagcacggttcaggtgtttactgactcggagtaccagctcccgtacgtcctgggctcggcgcatcaaggatgcctcccgccgtttccagcggacgtcttcatggtcccacagtatggatacctcaccctgaacaacgggagtcaggcggtaggacgctcttccttttactgcctggagtactttccttctcagatgctgcgtactggaaacaactttcagttcagctacacttttgaagacgtgcctttccacagcagctacgctcacagccagagtctggatcggctgatgaatcctctgatcgaccagtacctgtattatctgaacaagacacaaacaaatagtggaactcttcagcagtctcggctactgtttagccaagctggaccaaccaacatgtctcttcaagctaaaaactggctgcctggaccttgctacagacagcagcgtctgtcaaaacaggcaaacggcaacaacaacagcaactttccctggactgcagctacaaagtatcatctaaatggccgggactcgttggttaatccaggaccagctatggccagtcacaaggatgacgaagaaaagtttttccccatgcatggaaccctgatatttggtaaacaaggaacaaatgccaacgacgcggatttggaaaatgtcatgattacagatgaagaagaaatcagggccaccaatcccgtggctacggagcagtacgggactgtgtcaaataatttgcaaaactcaaacactggtccaactactggaactgtcaatcaccaaggagcgttacctggtatggtgtggcaggatcgagacgtgtacctgcagggacccatttgggccaagattcctcacaccgatggacactttcatccttctccactgacgggaggttttggactcaaacacccgcctcctcagatcatgatcaaaaacactcccgttccagccaatcctcccacaaacttcagttctgccaagtttgcttctttcatcacacagtattccacgggacaggtcagcgtggagatcgagtgggagctgcagaaggagaacagcaaacgctggaatcccgaaattcagtacacttccaactacaacaagtctgttaatgtggactttactgtggacactaatggtgtgtattcagagcctcgccccattggcaccagatacctgactcgtaatctgtaa

SEQ ID NO: 180 - protein, 735 aa, Adeno-associated virus
MAADGYLPDWLEDTLSEGIRQWWKLKPGPPPPKPAERHKDDSRGLVLPGYKYLGPFNGLDKGEPVNEADAAALEHDKAYDRQLDSGDNPYLKYNHADAEFQERLKEDTSFGGNLGRAVFQAKKRVLEPLGLVEEPVKTAPGKKRPVEHSPVEPDSSSGTGKAGQQPARKRLNFGQTGDADSVPDPQPLGQPPAAPSGLGSTTMATGSGAPMADNNEGADGVGNSSGNWHCDSQWLGDRVITTSTRTWALPTYNNHLYKQISSQSGASNDNHYFGYSTPWGYFDFNRFHCHFSPRDWQRLINNNWGFRPKRLNFKLFNIQVKEVTQNGGTTTIANNLTSTVQVFTDSEYQLPYVLGSAHQGCLPPFPADVFMVPQYGYLTLNNGSQAVGRSSFYCLEYFPSQMLRTGNNFQFSYTFEDVPFHSSYAHSQSLDRLMNPLIDQYLYYLNKTQTNSGTLQQSRLLFSQAGPTNMSLQAKNWLPGPCYRQQRLSKQANGNNNSNFPWTAATKYHLNGRDSLVNPGPAMASHKDDEEKFFPMHGTLIFGKQGTNANDADLENVMITDEEEIRATNPVATEQYGTVSNNLQNSNTGPTTGTVNHQGALPGMVWQDRDVYLQGPIWAKIPHTDGHFHPSPLTGGFGLKHPPPQIMIKNTPVPANPPTNFSSAKFASFITQYSTGQVSVEIEWELQKENSKRWNPEIQYTSNYNKSVNVDFTVDTNGVYSEPRPIGTRYLTRNL

SEQ ID NO: 181 - DNA, 2208 bp, Adeno-associated virus
atggctgccgatggttatcttccagattggctcgaggacactctctctgaaggaataagacagtggtggaagctcaaacctggcccaccaccaccaaagctcgcagagcggcatcaggacgacagcaggggtcttgtgcttcctgggtacaagtacctcggacccttcaacggactcgacaaaggagagccggtcaacgaggcagacgccgcggccctcgagcacgacaaggcctacgaccggcagctcgacagcggagacaacccgtacctcaagtacaaccacgccgacgcggagtttcaggagcgtcttaaagaagatacgtcttttgggggcaacctcggacgagcagtcttccaggcgaaaaagagggttcttgaacctctgggcctggttgaggaacctgttaagacggctccgggaaaaaagaggccggtagagcactctcctgtggagccagactcctcctcgggaaccggaaaggcgggccatcagcctgcgagaaagagattgaattttggtcagactggagacgcagactccgtacctgacccccagcctctcggacagccaccagcagcccccacaagtctgggatctactacaatggctacaggcagtggcgcaccaatggcagacaataacgagggtgccgatggagtgggtaattcctcaggaaattggcattgcgattcccaatggctgggcgacagagtcatcaccaccagcacccgaacctgggccctgcccacctacaacaaccacctctacaagcaaatctccagccaatcaggagcctcgaacgacaaccactactttggctacagcaccccctgggggtattttgacttcaacagattccactgtcacttctccccacgtgattggcaaagactcatcaacaacaactggggattccgacccaagagactcaacttcaagctctttaacattcaagtcaaagaggtcacgcagaatgacggtacgacgacgattgccaataaccttaccagcacggttcaggtgtttactgactcggagtaccagctcccgtacgtcctcggctcggcgcatcaaggatgcctcccgccgtttccagcggacgtcttcacggtcccacagtatggatacctcaccctgaacaacgggagtcaggcggtaggacgctcttccttttactgcctggagtactttccttctcagatgctgcgtactggaaacaaccttaccttcagctacacctttgaggacgttcctttccacagcagctacgctcacagccagagtttggaccggctgatgaatcctctgatcgaccagtatctatattatctgaacaggacacaatcaaatagtggaactcttcagcagtctaggctactgtttagccaagctggacccaccagcatgtctcttcaagctaaaaactggctgcctggaccttgctacagacagcagcgtctttcaaagcaggcaaacgacaacaacaacagcaactttccctggactgcggctacaaagtatcatctaaatggccgggactcgttggttaatccaggaccagctatggccagccacaaagacgatgaagaaaagtttttccccatgcatggaaccctgatatttggtaaacaaggaacaaatgctaacgacgcggatttggagcatgttatgattacagatgaagaagaaatcaggaccaccaatcctgtggctacagagcagtacggaaacgtgtcaaataatttgcaaaactcaaatactggtccaactacagaaaatgtcaatcaccagggagcgttacctggtatggtgtggcaggatcgagacgtgtacctgcagggacccatttgggccaagattcctcacaccgacggacactttcacccttctccactgatgggaggttttggactcaaacacccgcctcctcaaatcatgatcaaaaacactcccgttccagccaatcctcccacaaactacagttctgccaagtttgcttctttcatcacacagtattccacgggccaggtcagcgtggagattgagtgggagctgcggaaggagaacagcaaacgctggaaccccgagatccagtatacttccaactacaacaaatctgttaatgtggactttactgtggacactaatggtgtgtattcagagcctcgccccattggcaccagatacctgactcgtaatctgtaa

SEQ ID NO: 182 - protein, 735 aa, Adeno-associated virus
MAADGYLPDWLEDTLSEGIRQWWKLKPGPPPPKLAERHQDDSRGLVLPGYKYLGPFNGLDKGEPVNEADAAALEHDKAYDRQLDSGDNPYLKYNHADAEFQERLKEDTSFGGNLGRAVFQAKKRVLEPLGLVEEPVKTAPGKKRPVEHSPVEPDSSSGTGKAGHQPARKRLNFGQTGDADSVPDPQPLGQPPAAPTSLGSTTMATGSGAPMADNNEGADGVGNSSGNWHCDSQWLGDRVITTSTRTWALPTYNNHLYKQISSQSGASNDNHYFGYSTPWGYFDFNRFHCHFSPRDWQRLINNNWGFRPKRLNFKLFNIQVKEVTQNDGTTTIANNLTSTVQVFTDSEYQLPYVLGSAHQGCLPPFPADVFTVPQYGYLTLNNGSQAVGRSSFYCLEYFPSQMLRTGNNLTFSYTFEDVPFHSSYAHSQSLDRLMNPLIDQYLYYLNRTQSNSGTLQQSRLLFSQAGPTSMSLQAKNWLPGPCYRQQRLSKQANDNNNSNFPWTAATKYHLNGRDSLVNPGPAMASHKDDEEKFFPMHGTLIFGKQGTNANDADLEHVMITDEEEIRTTNPVATEQYGNVSNNLQNSNTGPTTENVNHQGALPGMVWQDRDVYLQGPIWAKIPHTDGHFHPSPLMGGFGLKHPPPQIMIKNTPVPANPPTNYSSAKFASFITQYSTGQVSVEIEWELRKENSKRWNPEIQYTSNYNKSVNVDFTVDTNGVYSEPRPIGTRYLTRNL

SEQ ID NO: 183 - DNA, 2208 bp, Adeno-associated virus
atggctgccgatggttatcttccagattggctcgaggacactctctctgaaggaataagacagtggtggaagctcaaacctggcccaccaccaccaaagcccgcagagcggcatcaggacgacagcaggggtcttgtgcttcctgggtacaagtacctcggacccttcaacggactcgacaaaggagagccggtcaacgaggcagacgccgcggccctcgagcacgacaaggcctacgaccggcagctcgacagcggagacaacccgtacctcaagtacaaccacgccgacgcggagtttcaggagcgtcttaaagaagatacgtcttttgggggcaacctcggacgagcagtcttccaggcgaaaaagagggttcttgaacctctgggcctggttgaggaacctgttaagacggctccgggaaaaaagaggccggtagagcactctcctgtggagccagactcctcctcgggaaccggaaaagcgggccatcagcctgcgagaaagagattgaattttggtcagactggagacgcagactccgtacctgacccccagcctctcggacagccaccagcagcccccacaagtttgggatctactacaatggctacaggcagtggcgcaccaatggcagacaataacgagggtgccgatggagtgggtaattcctcaggaaattggcattgcgattcccaatggctgggcgacagagtcatcaccaccagcacccgaacctgggccctgcccacctacaacaaccacctctacaagcaaatctccagccaatcaggagcctcgaacgacaaccactactttggctacagcaccccctgggggtattttgacttcaacagattccactgtcacttctccccacgtgattggcaaagactcatcaacaacaactggggattccgacccaagagactcaacttcaagctctttaacattcaagtcaaggaggtcacgcagaatgacggtacgacgacgattgccaataaccttaccagcacggttcaggtgtttactgactcggagtaccagctcccgtacgtcctcggctcggcgcatcaaggatgcctcccgccgtttccagcggacgtcttcatggtcccacagtatggatacctcaccctgaacaacgggagtcaggcggtaggacgctcttccttttactgcctggagtactttccttctcagatgctgcgtactggaaacaactttaccttcagctacacctttgaggacgttcctttccacagcagctacgctcacagccagagtttggaccggctgatgaatcctctgatcgaccagtatctatattatctgaacaggacacaatcaaatagtggaactcttcagcagtctaggctactgtttagccaagctggacccaccagcatgtctcttcaagctaaaaactggctgcctggaccttgctacagacagcagcgtctttcaaagcaggcaaacgacaacaacaacagcaactttccctggactgcggctacaaagtatcgtctaaatggccgggactcgttggttaatccaggaccagctatggccagccacaaagacgatgaagaaaagtttttccccatgcatggaaccctgatatttggtaaacaaggaacaaatgctaacgacgcggatttggagcatgttatgattacagatgaagaagaaatcaggaccaccaatcctgtggctacagagcagtacggaaacgtgtcaaataatttgcaaaactcaaatactggtccaactacagaaaatgtcaatcaccagggagcgttacctggtatggtgtggcaggatcgagacgtgtacctgcagggacccatttgggccaagattcctcacaccgacggacactttcacccttctccactgatgggaggttttggactcaaacacccgcctcctcaaatcatgatcaaaaacactcccgttccagccaatcctcccacaaacttcagttctgccaagtttgcttctttcatcacacagtattccacgggccaggtcagcgtggagattgagtgggagctgcagaaggagaacagcaaacgctggaaccccgagatccagtatacttccaactacaacaaatctgttaatgtggactttactgtggacactaatggtgtgtattcagagcctcgccccattggcaccagatacctgactcgtaatctgtaa

SEQ ID NO: 184 - protein, 735 aa, Adeno-associated virus
MAADGYLPDWLEDTLSEGIRQWWKLKPGPPPPKPAERHQDDSRGLVLPGYKYLGPFNGLDKGEPVNEADAAALEHDKAYDRQLDSGDNPYLKYNHADAEFQERLKEDTSFGGNLGRAVFQAKKRVLEPLGLVEEPVKTAPGKKRPVEHSPVEPDSSSGTGKAGHQPARKRLNFGQTGDADSVPDPQPLGQPPAAPTSLGSTTMATGSGAPMADNNEGADGVGNSSGNWHCDSQWLGDRVITTSTRTWALPTYNNHLYKQISSQSGASNDNHYFGYSTPWGYFDFNRFHCHFSPRDWQRLINNNWGFRPKRLNFKLFNIQVKEVTQNDGTTTIANNLTSTVQVFTDSEYQLPYVLGSAHQGCLPPFPADVFMVPQYGYLTLNNGSQAVGRSSFYCLEYFPSQMLRTGNNFTFSYTFEDVPFHSSYAHSQSLDRLMNPLIDQYLYYLNRTQSNSGTLQQSRLLFSQAGPTSMSLQAKNWLPGPCYRQQRLSKQANDNNNSNFPWTAATKYRLNGRDSLVNPGPAMASHKDDEEKFFPMHGTLIFGKQGTNANDADLEHVMITDEEEIRTTNPVATEQYGNVSNNLQNSNTGPTTENVNHQGALPGMVWQDRDVYLQGPIWAKIPHTDGHFHPSPLMGGFGLKHPPPQIMIKNTPVPANPPTNFSSAKFASFITQYSTGQVSVEIEWELQKENSKRWNPEIQYTSNYNKSVNVDFTVDTNGVYSEPRPIGTRYLTRNL

SEQ ID NO: 185 - DNA, 2208 bp, Adeno-associated virus
atggctgccgatggttatcttccagattggctcgaggacactctctctgaaggaataagacagtggtggaagctcaaacctggcccaccaccaccaaagcccgcagagcggcatcaggacgacagcaggggtcttgtgcttcctgggtacaagtacctcggacccttcaacggactcgacaaaggagagccggtcaacgaggcagacgccgcggccctcgagcacgacaaggcctacgaccggcagctcgacagcggagacaacccgtacctcaagtacaaccacgccgacgcggagtttcaggagcgtcttaaagaagatacgtcttttgggggcaacctcggacgagcagtcttccaggcgaaaaagagggttcttgaacctctgggcctggttgaggaacctgttaagacggctccgggaaaaaagaggccggtagagcactctcctgtggagccagactcctcctcgggaaccggaaaagcgggccatcagcctgcgagaaagagattgaattttggtcagactggagacgcagactccgtacctgacccccagcctctcggacagccaccagcagcccccacaagtttgggatctactacaatggctacaggcagtggcgcaccaatggcagacaataacgagggtgccgatggagtgggtaattcctcaggaaattggcattgcgattcccaatggctgggcgacagagtcatcaccaccagcacccgaacctgggccctgcccacctacaacaaccacctctacaagcaaatctccagccaatcaggagcctcgaacgacaaccactactttggctacagcaccccctgggggtattttgacttcaacagattccactgtcacttctccccacgtgattggcaaagactcatcaacaacaactggggattccgacccaagagactcaacttcaagctctttaacattcaagtcaaagaggtcacgcagaatgacggtacgacgacgattgccaataaccttaccagcacggttcaggtgtttactgactcggagtaccagctcccgtacgtcctcggctcggcgcatcaaggatgcctcccgccgtttccagcggacgtcttcatggtcccacagtatggatacctcaccctgaacaacgggagtcaggcggtaggacgcccttccttttactgcctggagtactttccttctcagatgctgcgtactggaaacaactttaccttcagctacacctttgaggacgttcctttccacagcagctacgctcacagccagagtttggaccggctgatgaatcctctgatcgaccagtatctatattatctgaacaggacacaatcaaatagtggaactcttcagcagtctaggctactgtttagccaagctggacccaccagcatgtctcttcaagctaaaaactggctgcctggaccttgctacagacagcagcgtctttcaaagcaggcaaacgacaacaacaacagcaactttccctggactgcggctacaaagtatcatctaaatggccgggactcgttggttaatccaggaccagctatggccagccacaaagacgatgaagaaaagtttttccccatgcatgggaccctgatatttggtaaacaaggaacaaatgctaacgacgcggatttggagcatgttatgattacagatgaagaagaaatcaggaccaccaatcctgtggctacagagcagtacggaaacgtgtcaaataatttgcaaaactcaaatactggtccaactacagaaaatgtcaatcaccagggagcgttacctggtatggtgtggcaggatcgagacgtgtacctgcagggacccatttgggccaagattcctcacaccgacggacactttcacccttctccactgatgggaggttttggactcaaacacccgcctcctcaaatcatgatcaaaaacactcccgttccagccaatcctcccacaaacttcagttctgccaagtttgcttctttcatcacacagtattccacgggccaggtcagcgtggagattgagtgggagctgcagaaggagaacagcaaacgctggaaccccgagatccagtatacttccaactacaacaaatctgttaatgtggactttactgtggacactaatggtgtgtattcagagcctcgccccattggcaccagatacctgactcgtaatctgtaa

SEQ ID NO: 186 - protein, 735 aa, Adeno-associated virus
MAADGYLPDWLEDTLSEGIRQWWKLKPGPPPPKPAERHQDDSRGLVLPGYKYLGPFNGLDKGEPVNEADAAALEHDKAYDRQLDSGDNPYLKYNHADAEFQERLKEDTSFGGNLGRAVFQAKKRVLEPLGLVEEPVKTAPGKKRPVEHSPVEPDSSSGTGKAGHQPARKRLNFGQTGDADSVPDPQPLGQPPAAPTSLGSTTMATGSGAPMADNNEGADGVGNSSGNWHCDSQWLGDRVITTSTRTWALPTYNNHLYKQISSQSGASNDNHYFGYSTPWGYFDFNRFHCHFSPRDWQRLINNNWGFRPKRLNFKLFNIQVKEVTQNDGTTTIANNLTSTVQVFTDSEYQLPYVLGSAHQGCLPPFPADVFMVPQYGYLTLNNGSQAVGRPSFYCLEYFPSQMLRTGNNFTFSYTFEDVPFHSSYAHSQSLDRLMNPLIDQYLYYLNRTQSNSGTLQQSRLLFSQAGPTSMSLQAKNWLPGPCYRQQRLSKQANDNNNSNFPWTAATKYHLNGRDSLVNPGPAMASHKDDEEKFFPMHGTLIFGKQGTNANDADLEHVMITDEEEIRTTNPVATEQYGNVSNNLQNSNTGPTTENVNHQGALPGMVWQDRDVYLQGPIWAKIPHTDGHFHPSPLMGGFGLKHPPPQIMIKNTPVPANPPTNFSSAKFASFITQYSTGQVSVEIEWELQKENSKRWNPEIQYTSNYNKSVNVDFTVDTNGVYSEPRPIGTRYLTRNL

SEQ ID NO: 187 - DNA, 2208 bp, Adeno-associated virus
atggctgccgatggttatcttccagattggctcgaggacactctctctgaaggaataagacagtggtggaagctcaaacctggcccaccaccaccaaagcccgcagagcggcataaggacgacagcaggggtcttgtgcttcctgggtacaagtacctcggacccttcaacggactcgacaagggagagccggtcaacgaggcagacgccgcggccctcgagcacgacaaggcctacgaccggcagctcgacagcggagacaacccgtacctcaagtacaaccacgccgacgcggagtttcaggagcgccttaaagaagatacgtcttttgggggcaacctcggacgagcagtcttccaggcaaaaaagagggttcttgaacctctgggcctggttgaggagcctgttaaaacggctccgggaaaaaagaggccggtagagcactctcctgcggagccagactcctcctcgggaaccggaaaagcgggccagcagcctgcaagaaaaagattgaatttcggtcagactggagacgcagactccgtacctgacccccagcctctcggacagccaccagcagccccctctggtctgggaactaatacgatggcttcaggcagtggcgcaccaatggcagacaataacgagggcgccgacggagtgggtaattcctcgggaaattggcattgcgattccacatggatgggcgacagagtcatcaccaccagcacccgaacttgggccctgcccacctacaacaaccatctctacaagcaaatctccagccaatcaggagccagcaacgacaaccactactttggctacagcaccccttgggggtattttgacttcaacagattccactgccacttttcaccacgtgactggcaaagactcatcaacaacaactggggattccggcccaagagactcaacttcaagctctttaacattcaagtcaaagaggtcacgcagaatgacggtacgacgacgattgccaataaccttaccagcacggttcaggtgtttactgactcggagtaccagctcccgtacgtcctcggctcggcgcatcaaggatgcctcccgccgttcccagcagacgtcttcatggtgccacagtatggatacctcaccctgaacaacgggagtcaggcagtaggacgctcttcattttactgcctggagtactttccttctcagatgctgcgtaccggaaacaactttaccttcagctacacctttgaggacgttcctttccacagcagctacgctcacagccagagtttggaccgtctcatgaatcctctcatcgaccagtacctgtattacttgagcagaacaaacactccaagcggaaccaccacgcagtccaggcttcagttttctcaggccggagcaagtgacattcgggaccagtctaggaactggcttcctggaccctgttaccgccagcagcgagtatcaaagacatctgcggataacaacaacagtgaatactcgtggactggagctaccaagtaccacctcaatggcagagactctctggtgaatccgggcccggccatggccagccacaaggacgatgaagaaaagttttttcctcagagcggggttctcatctttgggaagcaaggctcagagaaaacaaatgtggacattgaaaaggtcatgattacagacgaagaggaaatcaggaccaccaatcccgtggctacggagcagtatggttctgtatctaccaacctgcagggcggcaacacacaagcagctaccgcagatgtcaacacacaaggcgttcttccaggcatggtctggcaggacagagacgtgtacctgcaggggcccatctgggcaaagattccacacacggacggacattttcacccctctcccctcatgggcggattcggacttaaacaccctcctccacagattctcatcaagaacaccccggtacctgcgaatccttcgaccaccttcagtgcggcaaagtttgcttctttcatcacacagtattccacggggcaggtcagcgtggagatcgagtgggagctgcagaaggagaacagcaaacgctggaatcccgagatccagtacacttccaactacaacaaatctgttaatgtggactttactgttgacactaatggcgtgtattcagagcctcgccccattggcaccagatacctgactcgtaatctgtaa

SEQ ID NO: 188 - protein, 735 aa, Adeno-associated virus
MAADGYLPDWLEDTLSEGIRQWWKLKPGPPPPKPAERHKDDSRGLVLPGYKYLGPFNGLDKGEPVNEADAAALEHDKAYDRQLDSGDNPYLKYNHADAEFQERLKEDTSFGGNLGRAVFQAKKRVLEPLGLVEEPVKTAPGKKRPVEHSPAEPDSSSGTGKAGQQPARKRLNFGQTGDADSVPDPQPLGQPPAAPSGLGTNTMASGSGAPMADNNEGADGVGNSSGNWHCDSTWMGDRVITTSTRTWALPTYNNHLYKQISSQSGASNDNHYFGYSTPWGYFDFNRFHCHFSPRDWQRLINNNWGFRPKRLNFKLFNIQVKEVTQNDGTTTIANNLTSTVQVFTDSEYQLPYVLGSAHQGCLPPFPADVFMVPQYGYLTLNNGSQAVGRSSFYCLEYFPSQMLRTGNNFTFSYTFEDVPFHSSYAHSQSLDRLMNPLIDQYLYYLSRTNTPSGTTTQSRLQFSQAGASDIRDQSRNWLPGPCYRQQRVSKTSADNNNSEYSWTGATKYHLNGRDSLVNPGPAMASHKDDEEKFFPQSGVLIFGKQGSEKTNVDIEKVMITDEEEIRTTNPVATEQYGSVSTNLQGGNTQAATADVNTQGVLPGMVWQDRDVYLQGPIWAKIPHTDGHFHPSPLMGGFGLKHPPPQILIKNTPVPANPSTTFSAAKFASFITQYSTGQVSVEIEWELQKENSKRWNPEIQYTSNYNKSVNVDFTVDTNGVYSEPRPIGTRYLTRNL

SEQ ID NO: 189 - DNA, 3161 bp, Adeno-associated virus
gattgaatttagcggccgcgaattcgcccttgctgcgtcaactggaccaatgagaactttccattcaatgattgcgtcgacaagatggtgatctggtgggaggagggaaagatgaccgccaaggtcatggagtcggccaaagccattctcggaggaagcaaggtgcgcgtggaccagaaatgtaagtcctcggcccagatagacccgactcccgtgattgtcacctccaacaccaacatgtgcgccgtgattgacgggaactcaacgaccttcgagcaccagcagccgttgcaagaccggatgttcaaatttgaactcacccgccgtctggatcatgactttgggaaggtcaccaagcaggaagtcaaagactttttccggtgggcaaaggatcacgtggttgaggtggagcatgaattctacgtcaaaaagggtggagccaagaaaagacccgcccccagtgacgcagatataagtgagcccaaacgggcgcgcgggtcagttgcgcagccatcgacgtcagacgcggaagcttcgatcaactacgcggacaggtaccaaaacaaatgttctcgtcacgtgggcatgaatctgatgctgtttccctgcagacaatgcgagagaatgaatcaaaattcaaatatctgcttcactcacggacagaaggactgtttagagtgctttcccgtgtcagaatctcaacccgtttctgtcgtcaaaaaggcgtatcagaaactttgctacattcatcatatcatgggaaaggtgccagacgcttgcactgcctgcgatctggtcaatgtggatttggatgactgcatctctgaacaataaatgatttaaatcaggtatggctgccgatggttatcttccagattggctcaaggacactctctctgaaggaataagacagtggtggaagctcaaacctggcccaccaccaccaaagcccgcagagcggcataaggacgacagcgggggtcttgtgcttcctgggtacaagtacctcggacccttcaacggactcgacaagggagagccggtcaacgaggcagacgccgcggccctcgagtacgacaaggcctacgaccggcagctcgacagcggagacaacccgtacctcaagtacaaccacgccgacgcggagtttcaggagcgccttaaagaagatacgtcttttgggggcaacctcggacgagcagtcttccaggcgaaaaagagggttcttgaacctctgggcctggttgaggaacctgttaagacggctccgggaaaaaagaggccggtagagcactctcctgtggagccagactcctcctcgggaacaggaaaagcgggccagcagcctgcgagaaagagattgaattttggtcagactggagacgcagactccgtacctgacccccagcctctcggacagccaccagcagccccctctggtctgggaactaatacgatggctacaggcagtggcgcaccaatggcagacaataacgagggcgccgacggagtgggtaattcctcgggaagttggcattgcgattccacatggatgggcgacagagtcatcaccaccagcacccgaacctgggctctgcccacctacaacaaccatctgtacaagcagatctccagccaatcaggagccagcaacgacaaccactactttggctacagcaccccttgggggtattttgacttcaacagattccactgccacttttcaccacgtgactggcaaagactcatcaacaacaactggggattccggcccaagagactcaacttcaagctctttaacattcaagtcaaggaggtcacgcagaatgacggtacgacgacgattgccaataaccttaccagcacggttcaggtgtttactgactcggagtaccagctcccgtacgtccccggctcggcgcatcaaggatgcctcccgccgttcccagcagacgtcttcatggtgccacagtatggatacctcaccctgaacaacgggagtcaggcagtaggacgctcttcattttactgcctggagtactttccttctcagatgcttcgtaccggaaacaactttaccttcagctacacctttgaggatgttcctttccacagcagctacgctcacagccagagtttggaccgtctcatgaatcctctcatcgaccagtacctgtattacttgagcagaacaaacactccaagcggaaccaccacgcagtccaggcttcagttttctcaggccggagcaagtgacattcgggaccagtctaggaactggcttcctggaccctgttaccgccagcagcgagtatcaaagacagctgcggacaacaacaacagtgaatactcgtggactggagctaccaagtaccacctcaatggcagagactctctggtgaatccgggcccggccatggccagccacaaggacgatgaagaaaagttttttcctcaaagcggggttctcatctttgggaagcaaggctcagagaaaacaaatgtggacattgaaaaggtcatgattacagacgaagaggaaatcagaaccaccaatcccgtggccacggagcagtatggttctgtatctaccaacctccagagcggcaacacacaagcagctactgcagatgtcaacacacaaggcgttcttccaggcatggtctggcaggacagagacgtgcacctgcaggggcctatctgggcaaagattccacacacggacggacattttcacccctctcccctcatgggcggatttggacttaaacaccctcctccacagattctcatcaagaacaccccggtacctgcaaatccttcgaccaccttcagtgcggcaaagtttgcttccttcatcacacagtattccacagggcaggtcagcgtggagatcgagtgggagctgcagaaggagaacagcaaacgctggaaccccgagatccagtacacttccaactacaacaaatctgttaatgtggactttactgtggacactaatggtgtgtattcagagcctcgccccattggcaccagatacctgactcgtaatctgtaattgcttgttaatcaataaaccgtttaattcgtttcagttgaactttggtctctgcgaagggcgaattcgtttaaaccctgcaggactagtccctttagtgagg

SEQ ID NO: 190 - DNA, 3162 bp, Adeno-associated virus
gaattgaatttagcggccgcgaattcgcccttcgcagagaccaaagttcaactgaaacgaattaaacggtttattgattaacaagcaattacagattacgagtcaggtatctggtgccaatggggcgaggctctgaatacacgccattagtgtccacagtaaagtccacattaacagacttgttgtagttggaagtgtactgaatttcgggattccagcgtttgctgttttccttctgcagctcccactcgatctccacgctgacctgtcccgtggagtactgtgtgatgaaggaagcaaactttgccgcactgaaggtggtcgaaggattcgcaggtaccggggtgttcttgatgagaatctgtggaggagggtgtttaagtccgaatccacccatgaggggagaggggtgaaaatgtccgtccgtgtgtggaatctttgcccagatgggcccctgaaggtacacatctctgtcctgccagaccatgcctggaagaacgccttgtgtgttgacatctgcggtagctgcttgtctgttgcctctctggaggttggtagatacagaaccgtactgctccgtagccacgggattggttgtcctgatttcctcttcgtctgtaatcatgaccttttcaatgtccacatttgttttctctgagccttgcttcccaaagatgagaaccccgctctgaggaaaaaacttttcttcattgtccttgtggcttgccatggccgggcccggattcaccagagagtctctgccattgaggtggtacttggtagctccagtccacgagtattcactgttgttgttatccgcagatgtctttgatactcgctgctggcggtaacagggtccaggaagccagttcctagactggtcccgaatgtcactcgctccggcctgagaaaactgaagccttgactgcgtggtggttccacttggagtgtttgttgtgctcaagtaatacaggtactggtcgatgagaggattcatgagacggtccagactctggctgtgagcgtagccgctgtggaaaggaacgtcctcaaaagtgtagctgaaggtaaagttgtttccggtacgcagcatctgagaaggaaagtactccaggcagtaaaatgaagagcgtcctactgcctgactcccgttgttcagggtgaggtatccatactgtggcaccatgaagacgtctgctgggaacggcgggaggcatccttgatgcgccgagccgaggacgtacgggagctggtactccgagtcagtaaacacctgaaccgtgctggtaaggttattggcaatcgtcgtcgtaccgtcattctgcgtgacctctttgacttgaatgttaaagagcttgaagttgagtctcttgggtcggaatccccagttgttgttgatgagtctttgccagtcacgtggtgaaaagtggcagtggaatctgttgaagtcaaaatacccccaaggggtgctgtagccaaagtagtgattgtcgttcgaggctcctgattggctggaaatttgtttgtagaggtggttgttgtaggtgggcagggcccaggttcgggtgctggtggtgatgactctgtcgcccatccatgtggaatcgcaatgccaatttcccgaggaattacccactccgtcggcgccctcgttattgtctgccattggtgcgccactgcctgtagccatcgtattagttcccagaccagagggggctgctggtggctgtccgagaggctgggggtcaggtactgagtctgcgtctccagtctgaccaaaattcaatctttttcttgcaggctgctggcccgcctttccggttcccgaggaggagtctggctccacaggagagtgctctaccggcctcttttttcctggagccgtcttgacaggttccccaaccaggcccagaggttcaagaaccctctttttcgcctggaagactgctcgtccgaggttgcccccaaaagacgtatcttctttaaggcgctcctgaaactccgcgtcggcgtggttgtacttgaggtacgggttgtctccgctgtcgagctgccggtcgtaggctttgtcgtgctcgagggccgcggcgtctgcctcgttgaccggctctcccttgtcgagtccgttgaagggtccgaggtacttgtacccaggaagcacaagacccctgctgtcgtccttatgccgctctgcgggctttggtggtggtgggccaggtttgagcttccaccactgtcttattccttcagagagagtgtcctcgagccaatctggaagataaccatcggcagccatacctgatttaaatcatttattgttcaaagatgcagtcatccaaatccacattgaccagatcgcaggcagtgcaagcgtctggcacctttcccatgatatgatgaatgtagcacagtttctgatacgcctttttgacgacagaaacgggttgagattctgacacgggaaagcactctaaacagtctttctgtccgtgagtgaagcagatatttgaattctgattcattctctcgcattgtctgcagggaaacagcatcagattcatgcccacgtgacgagaacatttgttttggtacctgtctgcgtagttgatcgaagcttccgcgtctgacgtcgatggctgcgcaactgactcgcgcacccgtttgggctcacttatatctgcgtcactgggggcgggtcttttcttggctccaccctttttgacgtagaattcatgctccacctcaaccacgtgatcctttgcccaccggaaaaagtctttgacttcctgcttggtgaccttcccaaagtcatgatccagacggcgggtgagttcaaatttgaacatccggtcttgcaacggctgctggtgttcgaaggtcgttgagttcccgtcaatcacggcgcacatgttggtgttggaggtgacgatcacgggagtcgggtctatctgggccgaggacttgcatttctggtccacgcgcaccttgcttcctccgagaatggctttggccgactccacgaccttggcggtcatcttcccctcctcccaccagatcaccatcttgtcgacacagtcgttgaagggaaagttctcattggtccagttgacgcagcaagggcgaattcgtttaaacctgcaggactagtccctttagtgaggg

SEQ ID NO: 191 - DNA, 3164 bp, Adeno-associated virus
gcgaattgaatttagcggccgcgaattcgcccttcgcagagaccaaagttcaactgaaacgaattaaacggtttattgattaacaagcaattacaaattacgagtcaggtatctggtgccaatggggcgaggctctgaatacacgccattagtgtccacagtaaagtccacattaacagacttgttgtagttggaagtgtactgaatttcgggattccagcgtttgctgttttccttctgcagctcccactcgatctccacgctgacctgtcccgtggagtactgtgtgatgaaggaagcaaactttgccgcactgaaggtggtcgaaggattcgcaggtaccggggtgttcttgatgagaatctgtggaggagggtgtttaggtccgaatccacccatgaggggagaggggtgaaaatgtccgtccgtgtgtggaatctttgcccagatgggcccctgaaggtacacatctctgtcctgccagaccatgcctggaagaacgccttgtgtgttgacatctgcggtagctgcttgtctgttgcctctctggaggttggtagatacagaaccatactgctccgtagccacgggattggttgtcctgatttcctcttcgtctgtaatcatgaccttttcaatgtccacatttgttttctctgagccttgcttcccaaagatgagaaccccgctctgaggaaaaaacttttcttcattgtccttgtggcttgccatggccgggcccggattcaccagagagtctctgccattgaggtggtacttggtagctccagtccacgagtattcactgttgttgttatccgcagatgtctttgatactcgctgctggcggtaacagggtccaggaagccagttcctagactggtcccgaatgtcactcgctccggcctgagaaaactgaagccttgactgcgtggtggttccacttggagtgtttgttgtgctcaagtaatacaggtactggtcgatgagaggattcatgagacggtccagactctggctgtgagcgtagctgctgtggaaaggaacgtcctcaaaagtgtagctgaaggtaaagttgtttccggtacgcagcatctgagaaggaaagtactccgggcagtaaaatgaagagcgtcctactgcctgactcccgttgctcagggtgaggtatccatactgtggcaccatgaagacgtctgctgggaacggcgggaggcatccttgatgcgccgagccgaggacgtacgggagctggtactccgagtcagtaaacacctgaaccgtgctggtaaggttattggcaatcgtcgtcgtaccgtcattctgcgtgacctctttgacttgaatgttaaagagcttgaagttgagtctcttgggtcggaatccccagttgttgttgatgagtctttgccagtcacgtggtgaaaagtggcagtggaatctgttgaagtcaaaatacccccaaggggtgctgtagccaaagtagtgattgtcgttcgaggctcctgattggctggaaatttgtctgtagaggtggttgttgtaggtgggcagggcccaggttcgggtgctggtggtgatgactctgtcgcccatccatgtggaatcgcaatgccgatttcccgaggaattacccactccgtcggcgccctcgttattgtctgccattggtgcgccactgcctgtagccatcgtattagttcccagaccagagggggctgctggtggctgtccgagaggctgggggtcaggtactgagtctgcgtctccagtctgaccaaaattcaatctttttcttgcaggctgctggcccgcctttccggttcccgaggaggagtctggctccacaggagagtgctctaccggcctcttttttcccggagccgtcttaacaggttccccaaccaggcccagaggttcaagaaccctctttttcgcctggaagactgctcgtccgaggttgcccccaaaagacgtatcttctttaaggcgctcctgaaactccgcgtcggcgtggttgtacttgaggtacgggttgtctccgctgtcgagctgccggtcgtaggctttgtcgtgctcgagggccgcggcgtctgcctcgttgaccggctctcccttgtcgagtccgttgaagggtccgaggtacttgtacccaggaagcacaagacccctgctgtcgtccttatgccgctctgcgggctttggtggtggtgggccaggtttgagcttccaccactgtcttattccttcagagagagtgtcctcgagccaatctggaagataaccatcggcagccatacctgatttaaatcatttattgttcaaagatgcagtcatccaaatccacattgaccagatcgcaggcagtgcaagcgtctggcacctttcccatgatatgatgaatgtagcacagtttctgatacgcctttttgacgacagaaacgggttgagattctgacacgggaaagcactctaaacagtctttctgtccgtgagtgaagcagatatttgaattctgattcattctctcgcattgtctgcagggaaacagcatcagattcatgcccacgtgacgagaacatttgttttggtacctgtctgcgtagttgatcgaagcttccgcgtctgacgtcgatggctgcgcaactgactcgcgcacccgtttgggcccacttatatctgcgtcactgggggcgggtcttttcttggctccaccctttttgacgtagaattcatgctccacctcaaccacgtgatcctttgcccaccggaaaaagtctttgacttcctgcttggtgaccttcccaaagtcatgatccagacggcgggtgagttcaaatttgaacatccggtcttgcaacggctgctggtgttcgaaggtcgttgagttcccgtcaatcacggcgcacatgttggtgttggaggtgacgatcacgggagtcgggtctatctgggccgaggacttgcatttctggtccacgcgcaccttgcttcctccgagaatggctttggccgactccacgaccttggcggtcatcttcccctcctcccaccagatcaccatcttgtcgacacagtcgttgaagggaaagttctcattggtccagttgacgcagcaagggcgaattcgtttaaacctgcaggactagtccctttagtgaggg

SEQ ID NO: 192 - DNA, 3163 bp, Adeno-associated virus
accctcactaaagggactagtcctgcaggtttaaacgaattcgcccttgctgcgtcaactggagcaatgagaactttcccttcaacgactgtgtcgacaagatggtgatttggtgggaggaggggaagatgaccgccaaggtcgtggagtcggccaaagccattctcggaggaagcaaggtgcgcgtggaccagaaatgcaagtcctcggcccagatagatccgactcccgtgatcgtcacctccaacaccaacatgtgcgccgtgattgacgggaactcaacgaccttcgaacaccagcagccgttgcaagaccggatgttcaaatttgaactcacccgccgtctggatcatgactttgggaaggtcaccaagcaggaagtcaaagactttttccggtgggcaaaggatcacgtggttgaggtggagcatggattctacgtcaaaaagggtggagccaagaaaagacccgcccctagtgacgcagatataagtgagcccaaacgggtgcgcgagtcagttgcgcagccatcgacgtcggacgcggaagcttcgatcaactacgcggacaggtaccaaaacaaatgttctcgtcacgtgggcatgaatctgatgctgtttccctgcagacaatgcgagagaatgaatcaaaattcaaatatctgcttcactcacggacagaaagactgtttagagtgctttcccgtgtcagaatctcaacctgtttctgtcgtcaaaaaggcgtatcagaaactgcgctacattcatcatatcatgggaaaggtgccagacgcttgcactgcctgcgatctggtcaatgtggatttggatgactgcatctctgaacaataaatgatttaaatcaggtatggctgccgatggttatcttccagattggctcgaggacactctctctgaaggaataagacagtggtggaagctcaaacctggcccaccaccaccaaagcccgcagagcggcataaggacgacagcaggggtcttgtgcttcctgggtacaagtacctcggacccttcaacggactcgacaagggagagccggtcaacgaggcagacgccgcggccctcgagcacgacaaggcctacgaccggcagctcgacagcggagacaacccgtacctcaagtacaaccacgccgacgcggagtttcaggagcgtcttaaagaagatacgtcttttgggggcaacctcggacgagcagtcttccaggcgaaaaagagggttcttgaacctctgggcctggttgaggaacctgttaagacggctccgggaaaaaagaggccggtagagcactctcctgcggagccagactcctcctcgggaaccggaaaagcgggccagcagcctgcaagaaaaagactgaatttcggtcagactggagacgcagactccgtacctgacccccagcctctcggacagccaccagcagcccccacaagtttgggatctactacaatggctacaggcagtggcgcaccaatggcagacaataacgagggtgccgatggagtgggtaattcctcaggaaattggcattgcgattcccaatggctgggcgacagagtcatcaccaccagcacccgaacctgggccctgcccacctacaacaaccacctttacaagcaaatctccagccaatcaggagcctcaaacgacaaccactactttggctacagcaccccctgggggtattttgacttcaacagattccactgccacttttcaccacgtgactggcaaagactcatcaacaacaactggggattccgacccaagagactcaacttcaagctctttaacattcaagtcaaagaggtcacgcagaatgacggtacgacgacgattgccaataaccttaccagcacggttcaggtgtttactgactcggagtaccagctcccgtacgtcctcggctcggcgcatcaaggatgcctcccgccgtttccagcggacgtcttcatggtcccacagtatggatacctcaccctgaacaacgggagtcaggcggtaggacgctcttccttttactgcctggagtgctttccttctcagatgctgcgtactggaaacaactttcagttcagctacacttttgaagacgtgcctttccacagcagctacgctcacagccagagtttggatcggctgatgaatcctctgatcgaccagtacctgtattatctaaacagaacacaaacagctagtggaactcagcagtctcggctactgtttagccaagctggacccacaagcatgtctcttcaagctaaaaactggctgcctggaccgtgttatcgccagcagcgtttgtcaaagcaggcaaacgacaacaacaacagcaactttccctggactggagctaccaagtaccacctcaatggcagagactctttggtgaacccgggcccggccatggccagccacaaggacgatgaagaaaagtttttccccatgcatggaaccctaatatttggtaaagaaggaacaaatgctaccaacgcggaattggaaaatgtcatgattacagatgaagaggaaatcaggaccaccaatcccgtggctacagagcagtacggatatgtgtcaaataatttgcaaaactcaaatactgctgcaagtactgaaactgtgaatcaccaaggagcattacctggtatggtgtggcaggatcgagacgtgtacctgcagggacccatttgggccaagattcctcacaccgatggacactttcatccttctccactgatgggaggttttggactcaaacacccgcctcctcagattatgatcaaaaacactcccgttccagccaatcctcccacaaacttcagttctgccaagtttgcttccttcatcacacagtattccacgggacaggtcagcgtggagatcgagtgggagctgcagaaggagaacagcaaacgctggaatcccgaaattcagtacacttccaactacaacaaatctgttaatgtggactttactgtggacactaatggtgtgtattcagagcctcgccccattggcaccagatacctgactcgtaatctgtaattgcttgttaatcaataaaccgtttaattcgtttcagttgaactttggtctctgcgaagggcgaattcgcggccgctaaattcaattcgcc

SEQ ID NO: 193 - protein, 735 aa, Adeno-associated virus
MAADGYLPDWLEDTLSEGIRQWWKLKPGPPPPKPAERHKDDSRGLVLPGYKYLGPFNGLYKGEPVDEADAAALEHDKAYDRQLDSGDNPYLKYNHADAEFQERLKEDTSFGGNLGRAVFQAKKRVLEPLGLVGEPVKTAPGKKRPVEHSPVEPDSSSGTGKAGNQPARKRLNFGQTGDADSVPDPQPLGQPPAAPSGLGSTTMATGSGAPVADNNEGADGVGNSSGNWHCDSQWLGDRVITTSTRTWALPTYNNHLYKQISSQSGASNDNHYFGYSTPWGYFDFNRFHCHFSPRDRQRLINNNWGFRPKRLNFKLFNIQVKEVTQNDGTTTIANNLTSTVQVFTDSGYQLPYVLGLAHQGCLPPFPADVFMVPQYGYLTLNNGSQAVGRSSFYCLEYFPSQMLRTGNNFQFSYTFEDVPFHSSYAHSQSLDRLMNPLIDQYLYYLNKTQSNSGTLQQSRLLFSQAGPTSMSLQAKNWLPGPCYRQQRLSKQANDNNNSNFPWTAATKYHLNGRDSLVNPGPAMASHKDDEEKFFPMHGTLIFGKQGTNANDADLDNVMITDEEEIRTTNPVATEQYGYVSNNLQNSNTGPTTGTVNHQGALPGMVWQDRDVYLQGPIWAKIPHTDGHFHPSPLMGGFGLKHPPPQIMIKNTPVPANPPTNFSSAKFASFITQYSTGQVSVEIEWELQKEDSKRWNPEIQYTSNYNKPVNVDFTVDTNGVYSEPRPIGTRYLTRNL

SEQ ID NO: 194 - DNA, 2208 bp, Adeno-associated virus
atggctgccgatggttatcttccagattggctcgaggacactctctctgaaggaataagacagtggtggaagctcaaacctggcccaccaccaccaaagcccgcagagcggcataaggacgacagcaggggtcttgtgcttcctgggtacaagtacctcggacccttcaacggactctacaagggagagccggtcgacgaggcagacgccgcggccctcgagcacgacaaggcctacgaccggcagctcgacagcggagacaacccgtacctcaagtacaaccacgccgacgcggagtttcaggagcgccttaaagaagatacgtcttttgggggcaacctcggacgagcagtcttccaggccaaaaagagggttcttgaacctctgggcttggttggggagcctgttaaaacggctccgggaaaaaagaggccggtagagcactctcctgtggagccagactcctcctcgggaaccggaaaagcgggcaaccagcctgcaagaaaaagattgaattttggtcagactggagacgcagactccgtacctgacccccagcctctcggacagccaccagcagccccctctggtctgggatctactacaatggctacaggcagtggcgcaccagtggcagacaataacgagggtgccgatggagtgggtaattcctcaggaaattggcattgcgattcccaatggctgggcgacagagtcatcaccaccagcacccgaacctgggctctgcccacctacaataaccacctctacaagcaaatctccagccaatcaggagcctcaaacgacaaccactactttggctacagcaccccctgggggtattttgacttcaacagattccactgccacttttcaccacgtgaccggcaaagactcatcaacaacaactggggattccgaccaaaaagactcaacttcaagctctttaacattcaagtcaaagaggtcacgcagaatgacggtacgacgacgattgccaataaccttaccagcacggttcaggtgtttactgactcggggtaccagctcccgtacgtcctcggcttggcgcatcaaggatgcctcccgccgttcccagcagacgtcttcatggtgccacagtatggatacctcaccctgaacaacgggagtcaggcggtaggacgctcttccttttactgcctggagtactttccttctcagatgctgcgtactggaaacaactttcagttcagctacacctttgaagacgttcctttccacagcagctacgctcacagccagagtctggatcggctgatgaatcctctgatcgaccagtacctgtattatctgaacaagacacaatcaaatagtggaactcttcagcagtctcggctactgtttagccaagctggacccaccagcatgtctcttcaagctaaaaactggctgcctggaccttgctacagacagcagcgtctgtcaaagcaggcaaacgacaacaacaacagcaactttccctggactgcggctacaaagtatcatctaaatggccgggactcgttggttaatccaggaccagctatggccagccacaaagacgatgaagaaaagtttttccccatgcatggaaccctgatatttggtaaacaaggaacaaatgctaacgacgcggatttggacaatgtcatgattacagatgaagaagaaatccgcaccaccaatcccgtggctacggagcagtacggatatgtgtcaaataatttgcaaaactcaaatactggtccaactactggaactgtcaatcaccaaggagcgttacctggtatggtgtggcaggatcgagacgtgtacctgcagggacccatttgggccaagattcctcacaccgatggacactttcatccttctccacttatgggaggttttggactcaaacacccacctcctcagatcatgattaaaaacactcccgttccagccaatcctcccacaaacttcagttctgccaagtttgcttctttcatcacacagtattccacgggacaagtcagcgtggagatcgagtgggagctgcagaaggaggacagcaaacgctggaaccccgagatccagtacacttccaactataacaaacctgttaatgtggactttactgtggacactaatggtgtgtattcagagcctcgccccattggcaccagatacctgactcgtaatctgtaa

SEQ ID NO: 195 - DNA, 3161 bp, Adeno-associated virus
cgaattgatttagcggccgcgaattcgcccttcgcagagaccaaagttcaactgaaacgaattaaacggtttattgattaacaagcaattacagattacgagtcaggtatctggtgccaatggggcgaggctctgaatacacaccattagtgtccacagtaaagtccacattaacagatttgttgtagttggaagtgtactggatctcgggattccagcgtttgctgttctccttctgtagctcccactcgatctccacgctgacccgccccgtggaatactgtgtgatgaaggaagcaaactttgccgcactgaaggtggtcgaaggattcgcaggtaccggggtgtttttgatgagaatctgtggaggagggtgtttaagtccgaatccgcccatgaggggagaggggtgaaaatgtccgtccgtgtgcggaatctttgcccagataggcccctgcaggtacacgtctctgtcctgccagaccatgcctggaagaacgccttgtgtgttgacatctgcagtagatgcttgtgtgttgccgctctggaggttggtagatacagaaccatactgctccgtggccacgggattggtggttctgatttcctcttcgtctgtaatcatgaccttttcaatgtccacatttgttttctctgatccttgttttccaaagatgagaaccccgctctgaggaaaaaacttttcttcatcgtccttgtggctggccattgccgggcccggattcaccagagagtctctgccattgaggtggtacttggtagctccaatccacgagtattcactgttgttgttgtccgcagatgtctttgatactcgctgctggcggtaacagggtccaggaagccagttcctagactgatcccgaatgtcactcgctccggcctgagaaaactgaagcctggactgcgtggtggttccgcttggagtgtttgttctgctcaagtaatacaggtactggtcgatgagaggattcatgagacggtccaaactctggctgtgagcgtagctgctgtggaaaggaacatcctcaaaggtgtagctgaaggtaaagttgtttccggtacgcagcatctgagaagggaagtactccaggcagtaaaatgaagagcgtcctactgcctgactcccgttgttcagggtgaggtatccatactgtggcaccatgaagacgtctgctgggaacggcgggaggcatccttgatgcgccgagccgaggacgtacgggagctggtactccgagtcagtaaacacctgaaccgtgctggtaaggttattggcaatcgtcgtcgtaccatcattctgcgtgacctctctgacttgaatgttaaagagcttgaagttgagtctcttgggccggaatccccagttgttgttgatgagtctttgccagtcacgtggtgaaaagtggcagtggaatctgttgaagtcaaaatacccccaaggggtgctgtagccaaagtagtggttgtcgttgctggctcctgattggctggaaatctgcttgtacagatggttgttgtaggtgggcagagcccaggttcgggtgctggtggtgatgactctgtcgcccatccatgtggaatcgcaatgccaatttcccgaggaattacccactccgtcggcgccatcgttattgtctgccattggtgcgccactgcctgtagccatcgtattagttcccagaccagagggggctgctggtggctgtccgagaggctgggggtcaggtacggagtctgcgtctccagtctgaccgaaattcaatctctttcttgcaggctggttgcccgcttttccggttcccgaggaggagtctggctccacaggagagtgctctaccggcctcttttttcccggagccgtcttaacaggctcctcaaccaggcccagaggttcaagaaccctcttttttgcctggaagactgctcgtccgaggttgcccccaaaagacgtatcttctttaaggcgctcctgaaactccgcgtcggcgtggtcgtacttgaggtacgggttgtctccgctgtcgagctgccggtcgtaggccttgtcgtgctcgagggccgcggcgtctgcctcgttgaccggctctcccttgtcgagtccgttgaagggtccgaggtacttgtacccaggaagcacaagacccctgctgtcgtccttatgccgctctgcgggctttggtggtggtgggccaggtttgagcttccaccactgtcttattccttcagagagagtgtcctcgagccaatctggaagataaccatcggcagccatacctgatttaaatcatttattgttcagagatgcagtcatccaaatccacattgaccagatcgcaggcagtgcaagcgtctggcacctttcccatgatatgatgaatgtagcaaagtttctgatacgcctttttgacgacagaaacgggttgagattctgacacgggaaagcactctaaacagtctttctgtccgtgagtgaagcagatatttgaattctgattcattctctcgcattgtctgcagggaaacagcatcagattcatgcccacgtgacgagaacatttgttttggtacctgtccgcgtagttgatcgaagcttccgcgtctgacgtcgatggctgcgcaactgactcgcgcgcccgtttgggctcacttatatctgcgtcactgggggcgggtcttttcttggctccaccctttttgacgtagaattcatgctccacctcaaccacgtgatcctttgcccaccggaaaaagtctttcacttcctgcttggtgaccttcccaaagtcatgatccagacggcgggttagttcaaatttgaacatccggtcttgcaacggctgctggtgttcgaaggtcgttgagttcccgtcaatcacggcgcacatgttggtgttggaggtggcgatcacgggagtcgggtctatctgggccgaggacttgcacttttggtccacgcgcaccttgcttcctccgagaatggcttcggccgattccacgaccttggcggtcatctttccctcctcccaccagatcaccatcttgtcgacacagtcgttgaagggaaagttctcattggtccagttgacgcagcaagggcgaattcgtttaaacctgcaggaactagtcccttagtgagg

SEQ ID NO: 196 - protein, 735 aa, Adeno-associated virus
MAADGYLPDWLEDTLSEGIRQWWKLKPGPPPPKPAERHKDDSRGLVLPGYKYLGPFNGLYKGEPVNEADAAALEHDKAYDRQLDSGDNPYLKYNHAGAEFQERLKEDTSFGGNLGRAVFQAKKRVLEPLGLVEEPVKTAPGKKRPVEHSPVEPDSSSGTGKAGNQPARKRLNFGQTGDADSVPDPQPLGQPPAAPSGLGSTTMATGSGAPVADNNEGADGVGNSSGNWHCDSQWLGDRVITTSTRTWALPTYNNHLYKQISSQSGASNDNHYFGYSTPWGYFDFNRFHCHFSPRDWQRLINNNWGFRPKRLNFKLFNIQVKEVTQNDGTTTIANNLTSTVQVFTDSEYQLPYVLGSAHQGCLPPFPADVFMVPQYGYLTLNNGSQAVGRSSFYCLEYFPSQMLRTGNNFQFSYTFEDVPFHSSYAHSQSLDRLMNPLIDQYLYYLNKTQSNSGTLQQSRLLFSQAGPTSMSLQAKNWLPGPCYRQQRLSKQANDNNNSNFPWTAATKYHLNGRDSLVNPGPAMASHKDDEEKFFPMHGTLIFGKQGTNANDADLDNVMITDEEEIRTTNPVATEQYGYVSNNLQDSNTGPTTGTVNHQGALPGMVWQDRDVYLQGPIWAKIPHTDGHFHPSPLMGGFGLKHPPPQIMIKNTPVPANPPTNFSSAKFASFITQYSTGQVSVEIEWELQKENSKRWNPEIQYTSNYNKSVNVDFTVDTNGVYSEPRPIGTRYLTRNL

SEQ ID NO: 197 - DNA, 2208 bp, Adeno-associated virus
atggctgccgatggttatcttccagattggctcgaggacactctctctgaaggaataagacagtggtggaagctcaaacctggcccaccaccgccaaagcccgcagagcggcataaggacgacagcaggggtcttgtgcttcctgggtacaagtacctcggacccttcaacggactctacaagggagagccggtcaacgaggcagacgccgcggccctcgagcacgacaaggcctacgaccggcagctcgacagcggagacaacccgtacctcaagtacaaccacgccggcgcggagtttcaggagcgccttaaagaagatacgtcttttgggggcaacctcggacgagcagtcttccaggccaaaaagagggttcttgaacctctgggcttggttgaggagcctgttaaaacggctccgggaaaaaagaggccggtagagcactctcctgtggagccagactcctcctcgggaaccggaaaagcgggcaaccagcctgcaagaaaaagattgaattttggtcagactggagacgcagactccgtacctgacccccagcctctcggacagccaccagcagccccctctggtctgggatctactacaatggctacaggcagtggcgcaccagtggcagacaataacgagggtgccgatggagtgggtaattcctcaggaaattggcattgcgattcccaatggctgggcgacagagtcatcaccaccagcacccgaacctgggctctgcccacctacaacaaccacctctacaagcaaatctccagccaatcaggagcctcaaacgacaaccactactttggctacagcaccccctgggggtattttgacttcaacagattccactgccacttttcaccacgtgactggcaaagactcatcaacaacaactggggattccgaccaaagagactcaacttcaagctctttaacattcaagtcaaagaggtcacgcagaatgacggtacgacgacgattgccaataaccttaccagcacggttcaggtgtttactgactcggagtaccagctcccgtacgtcctcggctcggcgcatcaaggatgcctcccgccgttcccagcagacgtcttcatggtgccacagtatggatacctcaccctgaacaacgggagtcaggcggtaggacgctcttccttttactgcctggagtactttccttctcagatgctgcgtactggaaacaactttcagttcagctacacctttgaagacgttcctttccacagcagctacgctcacagccagagtctggatcggctgatgaatcctctgatcgaccagtacctgtattatctgaacaagacacaatcaaatagtggaacccttcagcagtctcggctactgtttagccaagctggacccaccagcatgtctcttcaagctaaaaactggctgcctggaccttgctacagacagcagcgtctgtcaaagcaggcaaacgacaacaacaacagcaactttccctggactgcggctacaaagtatcatctaaatggccgggactcgttggttaatccaggaccagctatggccagccacaaagacgatgaagaaaagtttttccccatgcatggaaccctgatatttggtaaacaaggaacaaatgctaacgacgcggatttggacaatgtcatgattacagatgaagaagaaatccgcaccaccaatcccgtggctacggagcagtacggatatgtgtcaaataatttgcaagactcaaatactggtccaactactggaactgtcaatcaccaaggagcgttacctggtatggtgtggcaggatcgagacgtgtacctgcagggacccatttgggccaagattcctcacaccgatggacactttcatccttctccacttatgggaggttttggactcaaacacccacctcctcagatcatgattaaaaacactcccgttccagccaatcctcccacaaacttcagttctgccaagtttgcttctttcatcacacagtattccacgggacaagtcagcgtagagatcgagtgggagctgcagaaggagaacagcaaacgctggaaccccgagatccagtacacttccaactataacaaatctgttaatgtggactttactgtggacactaatggtgtgtattcagagcctcgccccattggcaccagatacctgactcgtaatctgtaa

SEQ ID NO: 198 - protein, 738 aa, Adeno-associated virus
MAADGYLPDWLEDNLSEGIREWWDLKPGAPKPKANQQKQDDGRGLVLPGCKYLGPFNGLDKGEPVNAADAAALEHDKAYDQQLKAGDNPYLRYNHADAEFQERLQEDTSFGGNLGRAVFQAKKRVLEPLGLVEEGAKTAPGKKRPVEPSPQRSPDSSTGIGKTGQQPAKKRLNFGQTGDSESVPDPQPIGEPPAGPSGLGSGTMAAGGGAPMADNNEGADGVGSSSGNWHCDSTWLGDRVITTSTRTWALPTYNNHLYKQISNGTSGGSTNDNTYFGYSTPWGYFDFNRFHCHFSPRDWQRLINNNWGFRPKRLNFKLFNIQVKEVTQNEGTKTIANNLTSTIQVFTDSEYQLPYVLGSAHQGCPPPFPADVFMIPQYGYLTLNNGSQAVGRSSFYCLEYFPSQMRRTGNNFEFSYQFEDVPFHSSYAHSQSLDRLMNPLIDQYLYYLSRTQSTGGTAGTQQLLFSQAGPNNMSAQAKNWLPGPCYRQQRVSTTLSQNNNSNFAWTGATKYHLNGRDSLVNPGVAMATHKDDEERFFPSSGVLMFGKQGAGKDNVDYSSVMLTSEEEIKTTNPVATEQYGVVADNLQQQNAAPIVGAVNSQGALPGMVWQNRDVYLQGPIWAKIPHTDGNFHPSPLMGGFGLKHPPPQILIKNTPVPADPPTTFSQAKLASFITQYSTGQVSVEIEWELQKENSKRWNPEIQYTSNYNKSVNVDFTVDTNGVYSEPRPIGTRYLTRNL

SEQ ID NO: 199 - DNA, 2217 bp, Adeno-associated virus
atggctgccgatggttatcttccagattggctcgaggacaacctctctgagggcattcgcgagtggtgggacttgaaacctggagccccgaaacccaaagccaaccagcaaaagcaggacgacggccggggtctggtgcttcctggctgcaagtacctcggacccttcaacggactcgacaagggggagcccgtcaacgcggcggacgcagcggccctcgagcacgacaaggcctacgaccagcagctcaaagcgggtgacaatccgtacctgcggtataaccacgccgacgccgagtttcaggagcgtctgcaagaagatacgtcttttgggggcaacctcgggcgagcagtcttccaggccaagaagcgggttctcgaacctctcggtctggttgaggaaggcgctaagacggctcctggaaagaagagaccggtagagccatcaccccagcgttctccagactcctctacgggcatcggcaagacaggccagcagcccgcgaaaaagagactcaactttgggcagactggcgactcagagtcagtgcccgaccctcaaccaatcggagaaccccccgcaggcccctctggtctgggatctggtacaatggctgcaggcggtggcgctccaatggcagacaataacgaaggcgccgacggagtgggtagttcctcaggaaattggcattgcgattccacatggctgggcgacagagtcatcaccaccagcacccgaacctgggccctccccacctacaacaaccacctctacaagcaaatctccaacgggacatcgggaggaagcaccaacgacaacacctacttcggctacagcaccccctgggggtattttgactttaacagattccactgccacttctcaccacgtgactggcagcgactcatcaacaacaactggggattccggcccaagagactcaacttcaagctcttcaacatccaggtcaaggaggtcacgcagaatgaaggcaccaagaccatcgccaataaccttaccagcacgattcaggtctttacggactcggaataccagctcccgtacgtcctcggctctgcgcaccagggctgcccgcctccgttcccggcggacgtcttcatgattcctcagtacgggtacctgactctgaacaacggcagtcaggccgtgggccgttcctccttctactgcctggagtactttccttctcaaatgcggagaacgggcaacaactttgagttcagctaccagtttgaggacgtgccttttcacagcagctacgcgcatagccaaagcctggaccggctgatgaaccccctcatcgaccagtacctgtactacctgtctcggactcagtccacgggaggtaccgcaggaactcagcagttgctattttctcaggccgggcctaataacatgtcggctcaggccaaaaactggctacccgggccctgctaccggcagcaacgcgtctccacgacactgtcgcaaaataacaacagcaactttgcttggaccggtgccaccaagtatcatctgaatggcagagactctctggtaaatcccggtgtcgctatggcaacgcacaaggacgacgaagagcgattttttccatccagcggagtcttgatgtttgggaaacagggagctggaaaagacaacgtggactatagcagcgttatgctaaccagtgaggaagaaatcaaaaccaccaacccagtggccacagaacagtacggcgtggtggccgataacctgcaacagcaaaacgccgctcctattgtaggggccgtcaacagtcaaggagccttacctggcatggtctggcagaaccgggacgtgtacctgcagggtcctatctgggccaagattcctcacacggacggcaactttcatccttcgccgctgatgggaggctttggactgaaacacccgcctcctcagatcctgattaagaatacacctgttcccgcggatcctccaactaccttcagtcaagccaagctggcgtcgttcatcacgcagtacagcaccggacaggtcagcgtggaaattgaatgggagctgcagaaagagaacagcaagcgctggaacccagagattcagtatacttccaactataacaaatctgttaatgtggactttactgtggacactaatggtgtgtattcagagcctcgccccattggcaccagatacctgactcgtaatctgtaa

SEQ ID NO: 200 - DNA, 3167 bp, Adeno-associated virus
attgaatttagcggccgcgaattcgcccttcgcagagaccaaagttcaactgaaacgaattaaacggtttattgattaacaagcaattacagattacgagtcaggtacctggtgccaatggggcgaggctctgaatacacaccattagtgtccacagtaaagtccacattaacagatttgttgtagttggaagtgtactgaatctcgggattccagcgtttgctgttctccttctgcagctcccactcgatctccacgctgacctgccccgtggagtactgtgtaatgaaggaagcaaactttgccgcactgaaggtagtcgaaggattcgcaggtaccggggtgttcttgatgagaatctgcgggggagggtgtttaagtccgaatccgcccatgaggggagaggggtgaaaatgtccgtccgtgtgtggaatctttgcccagatgggcccctgcaggtacacgtctctgtcctgccacaccatgcctggaagaacgccttgtgtgttgacatctgaggtagctgcttgtgtgttgccgctctggaggttggtagatacagaaccatactgctccgtagccacgggattggtggtcctgatttcctcttcgtctgtaatcatgaccttttcaatgtccacattagtttttcccgagtcttgttttccaaagatgagaaccccgctctgaggaaaaaacttttcttcatcgtccttgtggctggccatggccgggcccggattcaccagagagtctcttccattaaggtggtacttggtagctccagtccacgagtattcactgttgttgttatccgcagatgtctttgatactcgctgctggcggtaacagggtccaggaagccagttcctagactggtcccgaatgtcacttgctccggcctgagaaaactgaagccttgactgcgtggtggttccgcttggagtgtttgttctgctcaagtaatacaggtactggtcgatgagaggattcatgagacggtccaaactctggctgtgggcgtagctgctgtggaaaggaacgtcctcaaaggtgtagctgaaggtaaagttgtttccggtacgcagcatctgagaaggaaagtactccaggcagtaaaatgaagagcgtcctactgcctgactcccgttgttcagggtgaggtatccatactgtggcaccatgaagacgtctgctgggaacggcgggaggcatccttgatgcgccgagccgaggacgtacgggagctggtactccgagtcagtaaacacctgaaccgtgctggtaaggttattggcaatcgtcgtcgtaccgtcattctgcgtgacctccttgacttgaatgttaaagagcttgaagttgagtcttttgggccggaatccccaattgttgttgatgagtctttgccagtcacgtggcgaaaagtggcagtggaatctgttgaagtcaaaatacccccaaggggtgctgtagccaaagtagtggttgtcgtttgaggctcctgattggctggaaatctgcttgtagaggtggttgttgtaggtgggcagagcccaggtgcgggtgctggtggtgatgactctgtcgcccatccatgtggaatcgcaatgccaatttcccgaggaattacccactccgtcggcgccctcgttattgtctgccattggtgcgccactgcctgtagccatcgtattagttcccagaccagagggggctgctggtggctgtccgagaggctgggggtcaggtacggagtctgcgtctccagtctgaccgaaattcaatctctttcttgcaggctgctggcccgcttttccggttcccgaggaggagtctggctccgcaggagagtgctctaccggcctcttttttcccggagccgtcttaacaggttcctcaaccaggcccagaggttcaagaaccctctttttcgcctggaagactgctcgtccgaggttgcccccaaaagacgtatcttctttaagacgctcctggaactccgcgtcggcgtggttgtacttggggtacgggttgtctccgctgtcgagctgccggtcgtaggccttgtcgtgctcgagggccgcggcgtctgcctcgttgaccggctctcccttgtcgagtccgttgaagggtccaaggtacttgtacccaggaagcacaagacccctgctgtcgtccttatgccgctctgcgggctttggtggtggtgggccaggtttgagcttccaccactgtcttattccttcagagagagtgtcctcgagccaatctggaagataaccatcggcagccatacctgatttaaatcatttattgttcagagatgcagtcatccaaatccacattgaccagatcgcaagcagtgcaagcgtctggcacctttcccatgatatgatgaatgtagcacagtttctgatacgcctttttgacgacagaaacgggttgagattctgacacgggaaagcactctaaacagtctttctgtccgtgagtgaagcagatatttgaattctgattcattctctcgcattgtctgcagggaaacagcatcagattcatgcccacgtgacgagaacatttgttttggtacctgtccgcgtagttgattgaagcttccgcgtctgacgtcgatggctgcgcaactgactcgcgcgcccgtttgggctcacttatatctgcgtcactgggggcgggtctttttttggctccaccctttttgacgtagaattcatgctctacctcaaccacgtgatcctttgcccaccggaaaaagtctttgacttcctgcttggtgaccttcccaaagtcatgatccagacggcgggtgagttcaaatttgaacatccggtcttgcaacggctgctggtgttcgaaggtcgttgagttcccgtcaatcactgcgcacatgttggtgttggaggtgacaatcacgggagtcgggtctatctgggccgaggacttgcatttctggtccacgcgcaccttgcttcctccgagaatggctttggccgactccacgaccttggcggtcatcttcccctcctcccaccagatcaccatcttgtcgacgcaatcattgaaaggaaagttctcattggtccagttgacgcagccgtagaaagggcgaattcgtttaaacctgcaggactagtccctttagtgagggt

SEQ ID NO: 201 - DNA, 3161 bp, Adeno-associated virus
aattgaatttagcggccgcgaattcgcccttcgcagagaccaaagttcaactgaaacgaattaaacggtttattgattaacaagcaattacagattacgagtcaggtatctggtgccaatggggcgaggctctgaatacacaccattagtgtccacagtaaagtccacattaacagatttgttgtagttggaagtgtactgaatctcgggattccagcgtttgctgttctccttctgcagctcccactcgatctccacgctgacctgccccgtggagtactgtgtaatgaaggaagcaaactttgccgcactgaaggtagtcgaaggattcgcaggtaccggggtgttcttgatgagaatctgcgggggagggtgtttaagtccgaatccgcccatgaggggagaggggtgaaaatgtccgtccgtgtgtggaatctttgcccagatgggcccctgcaggtacacgtctctgtcctgccacaccatgcctggaagaacgccttgtgtgttgacatctgaggtagctgcttgtgtgttgccgctctggaggttggtagatacagaaccatactgctccgtagccacgggattggtggtcctgatttcctcttcgtctgtaatcatgaccttttcaatgtccacattagtttttcccgagtcttgttttccaaagatgagaaccccgctctgaggaaaaaacttttcttcatcgtccttgtggctggccatggccgggcccggattcaccagagagtctcttccattaaggtggtacttggtagctccagtccacgagtattcactgttgttgttatccgcagatgtctttgatactcgctgctggcggtaacagggtccaggaagccagttcctagactggtcccgaatgtcacttgctccggcctgagaaaactgaagccttgactgcgtggtggttccgcttggagtgtttgttctgctcaagtaatacaggtactggtcgacgagaggattcatgagacggtccaaactctggctgtgggcgtagctgctgtggaaaggaacgtcctcaaaggtgtagctgaaggtaaagttgtttccggtacgcagcatctgagaaggaaagtactccaggcagtaaaatgaagagcgtcctactgcctgactcccgttgttcagggtgaggtatccatactgtggcaccatgaagacgtctgctgggaacggcgggaggcatccttgatgcgccgagccgaggacgtacgggagctggtactccgagtcagtaaacacctgaaccgtgctggtaaggttattggcaatcgtcgtcgtaccgtcattctgcgtgacctccttgacttgaatgttaaagagcttgaagttgagtcttttgggccgggatccccaattgttgttgatgagtctttgccagtcacgtggcgaaaagtggcagtggaatctgttgaagtcaaaatacccccaaggggtgctgtagccaaagtagtggttgtcgtttgaggctcctgattggctggaaatctgcctgtagaggtggttgttgtaggtgggcagagcccaggtgcgggtgctggtggtgatgactctgtcgcccatccatgtggaatcgcaatgccaatttcccgaggaattacccactccgtcggcgccctcgttattgtctgccattggtgcgccactgcctgtagccatcgtattagttcccagaccagagggggctgctggtggctgtccgagaggctgggggtcaggtacggagtctgcgtctccagtctgaccgaaattcaatctccttcttgcaggctgctggcccgcttttccggttcccgaggaggagtctggctccgcaagagagtgctctaccggcctcttttttcccggagccgtcttaacaggttcctcaaccaggcccagaggttcaagaaccctctttttcgcctggaagactgctcgtccgaggttgcccccaaaagacgtatcttctttaagacgctcctggaactccgcgtcggcgtggttgtacttgaggtacgggttgtctccgccgtcgagctgccggtcgtaggccttgtcgtgctcgagggccgcggcgtctgcctcgttgaccggctctcccttgtcgagtccgttgaagggtccaaggtacttgtacccaggaagcacaagacccctgctgtcgtccttatgccgctctgcgggctttggtggtggtgggccaggtttgagcttccaccactgtcttattccttcagagagagtgtcctcgagccaatctggaagataaccatcggcagccatacctgatttaaatcatttattgttcagagatgcagtcatccaaatccacattgaccagatcgcaagcagtgcaagcgtctggcacctttcccatgatatgatgaatgtagcacagtttctgatacgcctttttgacgacagaaacgggttgagattctgacacgggaaagcactctaaacagtctttctgtccgtgagtgaagcagatatttgaattctgattcattctctcgcattgtctgcagggaaacagcatcagattcatgcccacgtgacgagaacatttgttttggtacctgtccgcgtagttgattgaagcttccgcgtctgacgtcgatggctgcgcaactgactcgcgcgcccgtttgggctcacttatatctgcgtcactgggggcgggtctttttttggctccaccctttttgacgtagaattcatgctctacctcaaccacgtgatcctttgcccaccggaaaaagtctttgacttcctgcttggtgaccttcccaaagtcatgatccagacggcgggtgagttcaaatttgaacatccggtcttgcaacggctgctggtgttcgaaggtcgttgagttcccgtcaatcactgcgcacatgttggtgttggaggtgacaatcacgggagtcgggtctatctgggccgaggacttgcatttctggtccacgcgcaccttgcttcctccgagaatggctttggccgactccacgaccttggcggtcatcttcccctcctcccaccagatcaccatcttgtcgacgcaatcattgaaaggaaagttctcattggtccagttgacgcagcaagggcgaattcgtttaaacctgcaggactagtccctttagtgaggg

SEQ ID NO: 202 - DNA, 3172 bp, Adeno-associated virus
gattgaatttagcggccgcgaattcgcccttgctgcgtcaactggaccaatgagaactttcccttcaacgattgcgtcgacaagatggtgatctggtgggaggagggcaagatgaccgccaaggtcgtggagtccgccaaggccattctgggtggaagcaaggtgcgcgtggaccaaaagtgcaagtcatcggcccagatcgaccccacgcccgtgatcgtcacctccaacaccaacatgtgcgccgtgatcgacgggaacagcaccaccttcgagcaccagcagcccctgcaggaccgcatgttcaagttcgagctcacccgccgtctggagcacgactttggcaaggtgaccaagcaggaagtcaaagagttcttccgctgggctcaggatcacgtgactgaggtggcgcatgagttctacgtcagaaagggcggagccaccaaaagacccgcccccagtgacgcggatataagcgagcccaagcgggcctgcccctcagttgcggagccatcgacgtcagacgcggaagcaccggtggactttgcggacaggtaccaaaacaaatgttctcgtcacgcgggcatgcttcagatgctgtttccctgcaagacatgcgagagaatgaatcagaatttcaacgtctgcttcacgcacggggtcagagactgctcagagtgcttccccggcgcgtcggaatctcaacccgtcgtcagaaaaaagacgtatcagaaactgtgcgcgattcatcatctgctggggcgggcacccgagattgcgtgttcggcctgcgatctcgtcaacgtggacttggatgactgtgtttctgagcaataaatgacttaaaccaggtatggctgctgacggttatcttccagattggctcgaggacaacctctctgagggcattcgcgagtggtgggacctgaaacctggagcccccaagcccaaggccaaccagcagaagcaggacgacggccggggtctggtgcttcctggctacaagtacctcggacccttcaacggactcgacaagggggagcccgtcaacgcggcggacgcagcggccctcgagcacgacaaggcctacgaccagcagctcaaagcgggtgacaatccgtacctgcggtataaccacgccgacgccgagtttcaggagcgtctgcaagaagatacgtcttttgggggcaacctcgggcgagcagtcttccaggccaagaagcgggttctcgaacctctcggtctggttgaggaagctgctaagacggctcctggaaagaagagaccggtagaaccgtcacctcagcgttcccccgactcctccgcgggcatcggcaagaaaggccagcagcccgctaaaaagagactgaactttggtcagactggcgactcagagtcagtccccgaccctcaaccaatcggagaaccaccagcaggcccctctggtctgggatctggtacaatggctgcaggcggtggcgctccaatggcagacaataacgaaggcgccgacggagtgggtagttcctcaggaaattggcattgcgattccacatggctgggcgacagagtcatcaccaccagcacccgaacctgggccctgcccacctacaacaaccacctctacaagcaaatatccaatgggacatcgggaggaagcaccaacgacaacacctacttcggctacagcaccccctgggggtattttgacttcaacagattccactgccacttctcaccacgtgactggcagcgactcatcaacaacaactggggattccggccaaaaagactcagcttcaagctcttcaacatccaggtcaaggaggtcacgcagaatgaaggcaccgagaccatcgccaataaccttaccagcacgattcaggtatttacggactcggaataccagctgccgtacgtcctcggctccgcgcaccagggctgcctgcctccgttcccggcggacgtcttcatgattccccagtacggctaccttacactgaacaatggaagtcaagccgtaggccgttcctccttctactgcctggaatattttccatctcaaatgctgcgaactggaaacaattttgaattcagctacaccttcgaggacgtgcctttccacagcagctgcgcacacagccagagctcggaccgactgatgaatcctctcatcgaccagtacctgtactacttatccagaactcggtccacaggaggaactcaaggtacccagcaattgttattttctcaagctgggcctgcaaacatgtcggctcaggctaagaactggctacctggaccttgctaccggcagcagcgagtctctacgacactgtcgcaaaacaacaacagcaactttgcttggactggtgccaccaaatatcacctgaacggaagagactctttggtaaatcccggtgtcgccatggcaacccacaaggacgacgaggaacgcttcttcccgtcgagtggagtcctgatgtttggaaaacagggtgctggaagagacaatgtggactacagcagcgttatgctaaccagcgaagaagaaattaaaaccactaaccctgtagccacagaacaatacggtgtggtggctgacaacttgcagcaaaccaatacagggcctattgtgggaaatgtcaacagccaaggagccttacctggcatggtctggcagaaccgagacgtgtacctgcagggtcccatctgggccaagattcctcacacggacggcaacttccacccttcaccgctaatgggaggatttggactgaagcacccacctcctcagatcctgatcaagaacacgccggtacctgcggatcctccaacaacgttcagccaggcgaaattggcttccttcattacgcagtacagcaccggacaggtcagcgtggaaatcgagtgggagctgcagaaggagaacagcaaacgctggaacccagagattcagtacacttcaaactactacaaatctacaaatgtggactttgctgtcaatacagagggaacttattctgagcctcgccccattggtactcgttacctcacccgtaatctgtaattgctggttaatcaataaaccgtttgattcgtttcagttgaactttggtctctgcgaagggcgaattcgtttaaacctgcaggactagtccctttagtgagg

SEQ ID NO: 203 - DNA, 3172 bp, Adeno-associated virus
gattgaatttagcggccgcgaattcgcccttgctgcgtcaactggaccaatgagaactttcccttcaacgattgcgtcgacaagatggtgatctggtgggaggagggcaagatgaccgccaaggtcgtggagtccgccaaggccattctgggtggaagcaaggtgcgcgtggaccaaaagtgcaagtcatcggcccagatcgaccccacgcccgtgatcgtcacctccaacaccaacatgtgcgccgtgatcggcgggaacagcaccaccttcgagcaccagcagcccctgcaggaccgcatgttcaagttcgagctcacccgccgtctggagcacgactttggcaaggtgaccaagcaggaagtcaaagagttcttccgctgggctcaggatcacgtgactgaggtggcgcatgagttctacgtcagaaagggcggagccaccaaaagacccgcccccagtgacgcggatataagcgagcccaagcgggcctgcccctcagttgcggagccatcgacgtcagacgcggaagcaccggtggactttgcggacaggtaccaaaacaaatgttctcgtcacgcgggcatgcttcagatgctgtttccctgcaagacatgcgagagaatgaatcagaatttcaacgtctgcttcacgcacggggtcagagactgctcagagtgcctccccggcgcgtcagaatctcaacccgtcgtcagaaaaaagacgtatcagaaactgtgcgcgattcatcatctgctggggcgggcacccgagattgcgtgttcggcctgcgatctcgtcaacgtggacttggatgactgtgtttctgagcaataaatgacttaaaccaggtatggctgctgacggttatcttccagattggctcgaggacaacctctctgagggcattcgcgagtggtgggacctgaaacctggagcccccaagcccaaggccaaccagcagaagcaggacgacggccggggtctggtgcttcttggctacaagtacctcggacccttcaacggactcgacaagggggagcccgtcaatgcggcggacgcagcggccctcgagcacgacaaggcctacgaccagcagctcaaagcgggtgacaatccgtacctgcggtataaccacgccgacgccgagtttcaggagcgtctgcaagaagatacgtcttttgggggcaacctcgggcgagcagtcttccaggccaagaagcgggttctcgaacctctcggtctggttgaggaagctgctaagacggctcctggaaagaagagaccggtagaaccgtcacctcagcgttcccccgactcctccacgggcatcggcaagaaaggccagcagcccgctaaaaagagactgaactttggtcagactggcgactcagagtcagtccccgaccctcaaccaatcggagaaccaccagcaggcccctctggtctgggatctggtacaatggctgcaggcggtggcgctccaatggcagacaataacgaaggcgccgacggagtgggtagttcctcaggaaattggcattgcgattccacatggctgggcgacagagtcatcaccaccagcacccgaacctgggccctgcccacctacaacaaccacctctacaagcaaatatccaatgggacatcgggaggaagcaccaacgacaacacctacttcggctacagcaccccctgggggtattttgacttcaacagattccactgccacttctcaccacgtgactggcagcgactcatcaacaacaactggggattccggccaaaaagactcagcttcaagctcttcaacatccaggtcaaggaggtcacgcagaatgaaggcaccaagaccatcgccaataaccttaccagcacgattcaggtatttacggactcggaataccagctgccgtacgtcctcggctccgcgcaccagggctgcctgcctccgttcccggcggacgtcttcatgattccccagtacggctaccttacactgaacaatggaagtcaagccgtaggccgttcctccttctactgcctggaatattttccatctcaaatgctgcgaactggaaacaattttgaattcagctacaccttcgaggacgtgcctttccacagcggctacgcacacagccagagcttggaccgactgatgaatcctctcatcgaccagtacctgtactacttatccagaactcagtccacaggaggaactcaaggtacccagcaattgttattttctcaagctgggcctgcaaacatgtcggctcaggctaagaactggctacctggaccttgctaccggcagcagcgagtctctacgacactgtcgcaaaacaacaacagcaactttgcttggactggtgccaccaaatatcacctgaacggaagagactctttggtaaatcccggtgtcgccatggcaacccacaaggacgacgaggaacgcttcttcccgtcgagtggagtcctgatgtttggaaaacagggtgctggaagagacaatgtggactacagcagcgttatgctaaccagcgaagaagaaattaaaaccactaaccctgtagccacagaacaatacggtgtggtggctgacaacttgcagcaaaccaatacagggcctattgtgggaaatgtcaacagccaaggagccttacctggcatggtctggcagaaccgagacgtgtacctgcagggtcccatctgggccaagattcctcacacggacggcaacttccacccttcaccgctaatgggaggatttggactgaagcacccacctcctcagatcctgatcaagaacacgccggtacctgcggatcctccaacgacgttcagccaggcgaaattggcttccttcattacgcagtacagcaccggacaggtcagcgtggaaatcgagtgggagctgcagaaggagaacagcaaacgctggaacccagagattcagtacacttcaaactactacaaatctacaaatgtggactttgctgtcaatacagagggaacttattctgagcctcgccccattggtactcgttacctcacccgtaatctgtaattgctggttaatcaataaaccgtttgattcgtttcagttgaactttggtctctgcgaagggcgaattcgtttaaacctgcaggactagtccctttagtgagg

SEQ ID NO: 204 - DNA, 2208 bp, Adeno-associated virus
atggctgccgatggttatcttccagattggctcgaggacactctctctgaaggaataagacagtggtggaagctcaaacctggcccaccaccaccaaagcccgcagagcggcataaggacgacagcaggggtcttgtgcttcctgggtacaagtacctcggacccttcaacggactcgacaagggagagccggtcaacgaggcagacgccgcggccctcgagcacgacaaggcctacgaccggcagctcgaaagcggagacaacccgtacctcaagtacaaccacgccgacgcggagtttcaggagcgtcttaaagaagatacgtcttttgggggcaacctcggacgagcagtcttccaggcgaaaaagagggttcttgaacctctgggcctggttgaggagcctgttaaaacggctccgggaaaaaagaggccggtagagcactctcctgtggagccagactcctcctcgggaaccggaaaagcgggccagcagcctgcgagaaaaagattgaattttggtcagactggagacgcagactccgtacctgacccccagcctctcggacagccaccagcagccccctctggtctgggatctactacaatggcttcaggcagtggcgcaccagtggcagacaataacgagggtgccgatggagtgggtaattcctcaggaaattggcattgcgattcccaatggctgggcgacagagtcatcaccaccagcacccgaacctgggccctgcccacctacaacaaccacctctacaagcaaatctccagccaatcaggagcctcaaacgacaaccactactttggctacagcaccccctgggggtattttgacttcaacagattccactgccacttttcaccacgtgactggcaaagactcatcaacaacagctggggattccgacccaaaagactcaacttcaagctctttaacattcaagtcaaagaggtcacgcagaatgacggtacgacgacgattgccaataaccttaccagcacggttcaagtgtttaccgactcggagtaccagctcccgtacgtcctcggctcggcgcatcaaggatgcctcccgccgttcccagcagacgtctttatggtcccacagtatggatacctcaccctgaacaacgggagtcaggcggtaggacgctcttccttttactgcctggagtactttccttctcagatgctgcgtactggaaacaactttcagttcagctacacctttgaagacgttcccttccacagcagctacgctcacagccagagtctggatcggctgctgaatcctctgatcgaccagtacctatattatctgaacaagacacaatcaaatagtggaactcttcagcagtctcggctactgtttagccaagctggacccaccagcatgtctcttcaagctaaaaactggctgcctggaccttgctacagacagcagcgtctgtcaaagcaggcaaacgacaacaacaacagcaactttccctggactgcggctacaaagtatcatctaaatggccgggactcgttggttaatccaggaccagctatggccagccacaaagacgatgaagaaaagtttttccccatgcatggaaccctgatatttggtaaacaaggaacaaatgctaacgacgcggatttggacaatgtcatgattacagatgaagaagaaatccgcaccaccaatcccgtggctacggagcagtacggatatgtgtcaaataatttgcaaaactcaaatactggtccaactactggaactgtcaatcaccaaggagcgttacctggtatggtgtggcaggatcgagacgtgtacctgcagggacccatttgggccaagattcctcacacggacgggcactttcatccttctccactaatgggaggttttgggctcaaacacccgcctcctcagatcatgatcaaaaacactcccgttccagccaatcctcctacaaacttcagttcttccaagtttgcttctttcatcacacagtattccacggggcaggtcagcgtggagatcgagtgggagctgcagaaggagaacagcaaacgctggaatcccgaaattcagtatacttccaactacaacaaatctgttaatgtggactttactgtggacactaatggtgtgtattcagagcctcgccccattggcaccagatacccgactcgtaatctgtaa

SEQ ID NO: 205 - protein, 735 aa, Adeno-associated virus
MAADGYLPDWLEDTLSEGIRQWWKLKPGPPPPKPAERHKDDSRGLVLPGYKYLGPFNGLDKGEPVNEADAAALEHDKAYDRQLESGDNPYLKYNHADAEFQERLKEDTSFGGNLGRAVFQAKKRVLEPLGLVEEPVKTAPGKKRPVEHSPVEPDSSSGTGKAGQQPARKRLNFGQTGDADSVPDPQPLGQPPAAPSGLGSTTMASGSGAPVADNNEGADGVGNSSGNWHCDSQWLGDRVITTSTRTWALPTYNNHLYKQISSQSGASNDNHYFGYSTPWGYFDFNRFHCHFSPRDWQRLINNSWGFRPKRLNFKLFNIQVKEVTQNDGTTTIANNLTSTVQVFTDSEYQLPYVLGSAHQGCLPPFPADVFMVPQYGYLTLNNGSQAVGRSSFYCLEYFPSQMLRTGNNFQFSYTFEDVPFHSSYAHSQSLDRLLNPLIDQYLYYLNKTQSNSGTLQQSRLLFSQAGPTSMSLQAKNWLPGPCYRQQRLSKQANDNNNSNFPWTAATKYHLNGRDSLVNPGPAMASHKDDEEKFFPMHGTLIFGKQGTNANDADLDNVMITDEEEIRTTNPVATEQYGYVSNNLQNSNTGPTTGTVNHQGALPGMVWQDRDVYLQGPIWAKIPHTDGHFHPSPLMGGFGLKHPPPQIMIKNTPVPANPPTNFSSSKFASFITQYSTGQVSVEIEWELQKENSKRWNPEIQYTSNYNKSVNVDFTVDTNGVYSEPRPIGTRYPTRNL

SEQ ID NO: 206 - DNA, 2208 bp, Adeno-associated virus
atggctgccgatggttatcttccagattggctcgaggacactctctctgaaggaataagacagtggtggaagctcaaacctggcccaccaccaccaaagcccgcagagcggcataaggacgacagcaggggtcttgtgcttcctgggtacaagtacctcggacccttcaacggactcgacaagggagagccggtcaacgaggcagacgccgcggccctcgagcacgacaaggcctacgaccggcagctcgacagcggagacaacccgtacctcaagtacaaccacgccgacgcggagtttcaggagcgtcttaaagaagatacgtcttttgggggcaacctcggacgagcagtcttccaggccaaaaagaggattcttgaacctctgggcctggttgaggaacctgttaagacggctccgggagaaaagaggccggtagagcactctcctgcggagccagactcctcctcgggaaccggaaaagcgggccagcagcctgcaagaaagagattgaattttggccagactggagacgcagactcagtacctgacccccagcctctcggacagccaccagcagccccctctggtctgggaactaatacgatggcttcaggcagtggcgcaccaatggcagacaataacgagggcgccgacggagtgggtaattcctcgggaaattggtattgcgattccacatggatgggcgacagagtcatcaccaccagcacccgcacctgggccctgcccacctacaacaaccatctgtacaagcaaatctccagccagtctggagccagcaacgacaaccactactttggctacagcaccccctgggggtattttgacttcaacagattccactgccacttctccccacgtgactggcaaagactcatcaacaacaactggggattccggcccaagagactcagcttcaagctctttaacattcaagtcaaagaggtcacgcagaatgacggtacgacgacgattgccaataaccttaccagcacggttcaggtgtttactgactcggagtaccagctcccgtacgtcctcggctcggcgcatcaaggatgcctcccgccgttcccagcagacgtcttcatggtgccacagtatggatacctcaccctgaacaacggcagtcaggcggtaggacgctcttccttttactgcctggagtactttccttctcagatgcttcgtaccggaaacaactttaccttcagctacacctttgaagacgttcctttccatagcagctacgctcacagccaaagtctggaccgtctcatgaatcctctcatcgaccagtacctgtattacttgagcagaacaaacactccaagcggaaccaccacgatgtccaggcttcagttttctcaggccggagcaagtgacattcgggaccagtctagaaactggcttcctggaccctgttaccgccagcagcgagtatcaaagacagctgcggacaacaacaacagtgattactcgtggactggagctaccaagtaccacctcaatggaagagactctctggtgaatccgggcccagctatggccagccacaaggacgatgaagaaaaatattttcctcagagcggggttctcatctttggaaaacaagactcgggaaaaactaatgtggacattgaaaaggttatgattacagacgaagaggaaatcaggaccaccaatcccgtggctacggagcagtatggttctgtatctaccaacctccagagcggcaacacacaagcagctacctcagatgtcaacacacaaggcgttcttccaggcatggtctggcaggacagagacgtgtacctgcaggggcccatctgggcaaagattccacacacggacggacattttcacccctctcccctcgtgggcggattcggacttaaacaccctcctccacaaattctcatcaagaacaccccggtacctgcgaatccttcgaccactttcagtgcggcaaagtttgcttccttcatcacacagtactccacggggcaggtcagcgtggagatcgagtgggagctgcagaaggagaacagcaaacgctggaatcccgaaattcagtacacttccaactacaacaaatctgttaatgtggactttactgtggacactaatggtgtgtattcagagcctcgccccattggcaccagatacctgactcgtaatctgtaa

SEQ ID NO: 207 - protein, 735 aa, Adeno-associated virus
MAADGYLPDWLEDTLSEGIRQWWKLKPGPPPPKPAERHKDDSRGLVLPGYKYLGPFNGLDKGEPVNEADAAALEHDKAYDRQLDSGDNPYLKYNHADAEFQERLKEDTSFGGNLGRAVFQAKKRILEPLGLVEEPVKTAPGEKRPVEHSPAEPDSSSGTGKAGQQPARKRLNFGQTGDADSVPDPQPLGQPPAAPSGLGTNTMASGSGAPMADNNEGADGVGNSSGNWYCDSTWMGDRVITTSTRTWALPTYNNHLYKQISSQSGASNDNHYFGYSTPWGYFDFNRFHCHFSPRDWQRLINNNWGFRPKRLSFKLFNIQVKEVTQNDGTTTIANNLTSTVQVFTDSEYQLPYVLGSAHQGCLPPFPADVFMVPQYGYLTLNNGSQAVGRSSFYCLEYFPSQMLRTGNNFTFSYTFEDVPFHSSYAHSQSLDRLMNPLIDQYLYYLSRTNTPSGTTTMSRLQFSQAGASDIRDQSRNWLPGPCYRQQRVSKTAADNNNSDYSWTGATKYHLNGRDSLVNPGPAMASHKDDEEKYFPQSGVLIFGKQDSGKTNVDIEKVMITDEEEIRTTNPVATEQYGSVSTNLQSGNTQAATSDVNTQGVLPGMVWQDRDVYLQGPIWAKIPHTDGHFHPSPLVGGFGLKHPPPQILIKNTPVPANPSTTFSAAKFASFITQYSTGQVSVEIEWELQKENSKRWNPEIQYTSNYNKSVNVDFTVDTNGVYSEPRPIGTRYLTRNL

SEQ ID NO: 208 - DNA, 2209 bp, Adeno-associated virus
atggctgccgatggttatcctccagattggctcgaggacactctctctgaagggataagacagtggtggaagctcaaacctggcccaccaccaccaaagcccgcagagcggcataaggacgacagcaggggtcttgtgcttcctgggtacaagtacctcggacccttcaacggactcgacaagggggagccggtcaacgaggcagacgccgcggccctcgagcacgacaaggcctacgaccggcagctcgacagcggagacaacccgtacctcaagtacaaccacgccgacgcagagtttcaggagcgccttaaagaagatacgtcttttgggggcaacctcggacgagcagtcttccaggcgaaaaagagggttcttgaacctctgggcctggttgaggaacctgttaagacggctccgggaaaaaagaggccggtagagcactctcctgtggagccagactcctcctcgggaaccggaaaagcgggccagcggcctgcaagaaaaagattaaattttggtcagactggagacgcagactccgtacctgacccccagcctctcggacagccaccagcagccccctctggtctgggatctactacaatggctacaggcagtggcgcaccaatggcagacaataacgagggtgccgatggagtgggtaattcctcaggaaattggcattgcgattcccaatggctgggcgacagagtcatcaccaccagcacccgaacctgggccctgcccacatacaacaaccacctctacaagcaaatctccagccaatcaggagccagcaacgacaaccactactttggctacagcaccccctgggggtattttgacttcaacagattccactgccacttttcaccacgtgactggcaaagactcatcaacaacaactggggattccggcccaaaagactcaacttcaagctctttaatattcaagtcaaagaggtcacgcagaatgacggtacgacgacgattgccaataaccttaccagcacggttcaggtgtttactgactcggagtaccagctcccgtacgtcctgggctcggcgcatcaaggatgcctcccgccgtttccagcggacgtcttcatggtcccacagtatggatacctcaccctgaacaacgggagtcaggcggtaggacgctcttccttttactgcctggagtactttccttctcagatgctgcgtactggaaacaactttcagttcagctacacttttgaagacgtgcctttccacagcagctacgctcacagccagagtctggatcggctgatgaatcctctgatcgaccagtacctgtattatctgaacaagacacaaacaaatagtggaactcttcagcagtctcggctactgtttagccaagctggaccaaccaacatgtctcttcaagctaaaaactggctgcctggaccttgctacagacagcagcgtctgtcaaaacaggcaaacgacaacaacaacagcaactttccctggactgcagctacaaagtatcatctaaatggccgggactcgttggttaatccaggaccagctatggccagtcacaaggatgacgaagaaaagtttttccccatgcatggaaccctgatatttggtaaacaaggaacaaatgccaacgacgcggatttggaaaatgtcatgattacagatgaagaagaaatcagggccaccaatcccgtggctacggagcagtacgggactgtgtcaaataatttgcaaaactcaaacactggtccaactactggaactgtcaatcgccaaggagcgttacctggtatggtgtggcaggatcgagacgtgtacctgcagggacccatttgggccaagattcctcacaccgatggacactttcatccttctccactgatgggaggttttggactcaaacacccgcctcctcagatcatgatcaaaaacactcccgttccagccaatcctcccacaaacttcagttctgccaagtttgcttctttcatcacacagtattccacgggacaggtcagcgtggagatcgagtgggagctgcagaaggagaacagcaaacgctggaatcccgaaattcagtacacttccaactacaacaagtctgttaatgtggactttactgtggacactaatggtgtgtattcagagcctcgccccattggcaccagatacctgactcgtaatctgtaat

SEQ ID NO: 209 - protein, 735 aa, Adeno-associated virus
MAADGYPPDWLEDTLSEGIRQWWKLKPGPPPPKPAERHKDDSRGLVLPGYKYLGPFNGLDKGEPVNEADAAALEHDKAYDRQLDSGDNPYLKYNHADAEFQERLKEDTSFGGNLGRAVFQAKKRVLEPLGLVEEPVKTAPGKKRPVEHSPVEPDSSSGTGKAGQRPARKRLNFGQTGDADSVPDPQPLGQPPAAPSGLGSTTMATGSGAPMADNNEGADGVGNSSGNWHCDSQWLGDRVITTSTRTWALPTYNNHLYKQISSQSGASNDNHYFGYSTPWGYFDFNRFHCHFSPRDWQRLINNNWGFRPKRLNFKLFNIQVKEVTQNDGTTTIANNLTSTVQVFTDSEYQLPYVLGSAHQGCLPPFPADVFMVPQYGYLTLNNGSQAVGRSSFYCLEYFPSQMLRTGNNFQFSYTFEDVPFHSSYAHSQSLDRLMNPLIDQYLYYLNKTQTNSGTLQQSRLLFSQAGPTNMSLQAKNWLPGPCYRQQRLSKQANDNNNSNFPWTAATKYHLNGRDSLVNPGPAMASHKDDEEKFFPMHGTLIFGKQGTNANDADLENVMITDEEEIRATNPVATEQYGTVSNNLQNSNTGPTTGTVNRQGALPGMVWQDRDVYLQGPIWAKIPHTDGHFHPSPLMGGFGLKHPPPQIMIKNTPVPANPPTNFSSAKFASFITQYSTGQVSVEIEWELQKENSKRWNPEIQYTSNYNKSVNVDFTVDTNGVYSEPRPIGTRYLTRNL

SEQ ID NO: 210 - DNA, 2208 bp, Adeno-associated virus
atggctgccgatggttatcttccagattggctcgaggacactctctctgaaggaataagacagtggtggaagctcaaacctggcccaccaccaccaaagcccgcagagcggcataaggacgacagcaggggtcttgtgcttcctgggtacaggtacctcggacccttcaacggactcgacaagggagagccggtcaacgaggcagacgccgcggccctcgagcacgacaaggcctacgaccggcagctcgacagcggagacaacccgtacctcaagtacaaccacgtcgacgcggagtttcaggagcgtcttaaagaagatacgtcttttgggggcaacctcggacgagcagtcttccaggccaaaaagaggattcttgaacctctgggcctggttgaggaacctgttaaggcggctccgggagaaaagaggccggtagagcactctcctgcggagccagactcctcctcgggaaccggaaaagcgggccagcagcctgcaagaaagagattgaattttggtcagactggagacgcagactcagtacctgacccccagcctctcggacagccaccagcagccccctctggtctgggaactaatacgatggcttcaggcagtggcgcaccaatggcagacaataacgagggcgccgacggagtgggtaattcctcgggaaattggcattgcgattccacatggatgggcgacagagtcatcaccaccagcacccgcacctgggccctgcccacctacaacaaccatctgtacaagcaaatctccagccagtctggagccagcaacgacaaccactactttggctacagcaccccctgggggcattttgacttcaacagattccactgccacttctccccacgtgactggcaaagactcatcaacaacaactggggattccggcccaagagactcagcttcaagctctttaacattcaagtcaaagaggtcacgcagaatgacggtacgacgacgattgccaataaccttaccagcacggttcaggtgtttactgactcggagtaccagctcccgtacgtcctcggctcggcgcatcaaggatgcctcccgccgttcccagcagacgtcttcatggtgccacagtatggatacctcaccctgaacaacggcagtcaggcggtaggacgctcttccttttactgcctggagtactttccttctcagatgcttcgtaccggaaacaactttaccttcagctacacctttgaagacgttcctttccatagcagctacgctcacagccaaagtctggaccgtctcatgaatcctctcatcgaccagtacctgtattacttgagcagaacaaacactccaagcggaaccaccacgatgtccaggcttcagttttctcaggccggagcaagtgacattcgggaccagtctagaaactggcttcctggaccctgttaccgccagcagcgagtatcaaagacagctgcggacaacaacaacagtgattactcgtggactggagctaccaagtaccacctcaatggaagagactctctggtgaatccgggcccagctatggccagccacaaggacgatgaagaaaaatattttcctcagagcggggttctcatctttggaaaacaagactcgggaaaaactaatgtggacattgaaaaggttatgattacagacgaagaggaaatcaggaccaccaatcccgtggctacggagcagtatggttctgtatctaccaacctccagagcggcaacacacaagcagctacctcagatgtcaacacacaaggcgttcttccaggcatggtctggcaggacagagacgtgtacctgcaggggcccatctgggcaaagattccacacacggacggacattttcacccctctccccccatgggcggattcggacttaaacaccctcctccacaaattctcatcaagaacaccccggtacctgcgaatccttcgaccactttcagtgcggcaaagtttgcttccttcatcacacagtactccacggggcaggtcagcgtggagatcgagtgggagctgcagaaggagaacagcaaacgctggaatcccgaaattcagtacacttccaactacaacaaatctgttaatgtggactttactgtggacactaatggtgtgtattcagagcctcgccccattggcgccagatacctgactcgtaatctgtaa

SEQ ID NO: 211 - protein, 735 aa, Adeno-associated virus
MAADGYLPDWLEDTLSEGIRQWWKLKPGPPPPKPAERHKDDSRGLVLPGYRYLGPFNGLDKGEPVNEADAAALEHDKAYDRQLDSGDNPYLKYNHVDAEFQERLKEDTSFGGNLGRAVFQAKKRILEPLGLVEEPVKAAPGEKRPVEHSPAEPDSSSGTGKAGQQPARKRLNFGQTGDADSVPDPQPLGQPPAAPSGLGTNTMASGSGAPMADNNEGADGVGNSSGNWHCDSTWMGDRVITTSTRTWALPTYNNHLYKQISSQSGASNDNHYFGYSTPWGHFDFNRFHCHFSPRDWQRLINNNWGFRPKRLSFKLFNIQVKEVTQNDGTTTIANNLTSTVQVFTDSEYQLPYVLGSAHQGCLPPFPADVFMVPQYGYLTLNNGSQAVGRSSFYCLEYFPSQMLRTGNNFTFSYTFEDVPFHSSYAHSQSLDRLMNPLIDQYLYYLSRTNTPSGTTTMSRLQFSQAGASDIRDQSRNWLPGPCYRQQRVSKTAADNNNSDYSWTGATKYHLNGRDSLVNPGPAMASHKDDEEKYFPQSGVLIFGKQDSGKTNVDIEKVMITDEEEIRTTNPVATEQYGSVSTNLQSGNTQAATSDVNTQGVLPGMVWQDRDVYLQGPIWAKIPHTDGHFHPSPPMGGFGLKHPPPQILIKNTPVPANPSTTFSAAKFASFITQYSTGQVSVEIEWELQKENSKRWNPEIQYTSNYNKSVNVDFTVDTNGVYSEPRPIGARYLTRNL

SEQ ID NO: 212 - DNA, 2208 bp, Adeno-associated virus
atggctgccgatggttatcttccagattggctcgaggacaccctctctgaaggaataagacagtggtggaagctcaaacctggcccaccaccaccaaagcccgcagagcggcataaggacgacagcaggggtcttgtgcttcctgggtacaagtacctcggacccttcaacggactcgacaagggagagccggtcaacgaggcagacgccgcggccctcgagcacgacaaggcctacgaccggcagctcgacagcggagataacccgtacctcaagtacaaccacgccgacgcggagtttcaggagcgccttaaagaggatacgtcttttgggggcaacctcggacgagcagtcttccaggccaaaaagaggattcttgaacctctgggcctggttgaggaacctgttaagacggctccgggaaaaaagaggccggtagagcactctcctgcggagccagactcctcctcgggaaccggaaaagcgggccagcagcctgcaagaaagagattgaattttggtcagactggagacgcagactcagtacctgacccccggcctctcggacagccaccagcagccccctctggtctgggaactaatacgatggcttcaggcagtggcgcaccaatggcagacaataacgagggcgccgacggagtgggtaattcctcgggaaattggcattgcgattccacatggatgggcgacagagtcatcaccaccagcacccgcacctgggccctgcccacctacaacaaccatctgtacaagcaaatctccagccagtctggagccagcaacgacaaccactactttggctacagcaccccctgggggtattttgacttcaacagattccactgccacttctccccacgtgactggcaaagactcatcaacaacaactggggattccggcccaagagactcagcttcaagctctttaacattcaagtcaaagaggtcacgcagaatgacggtacgacgacgattgccaataaccttaccagcacggttcaggtgtttactgactcggagtaccagctcccgtacgtcctcggctcggcgcatcaaggatgcctcccgccgttcccagcagacgtcttcatggtgccacagtatggatacctcaccctgaacaacggcagtcaggcggtaggacgctcttccttttactgcctggagtactttccttctcagatgcttcgtaccggaaacaactttaccttcagctacacctttgaagacgttcctttccatagcagctacgctcacagccaaagtctggaccgtctcatgaatcctctcatcgaccagtacctgtattacttgagcagaacaaacactccaagcggaaccaccacgatgtccaggcttcagttttctcaggccggagcaagtgacattcgggaccagtctagaaactggcttcctggaccctgttaccgccagcagcgagtatcaaagacagctgcggacaacaacaacagtgattactcgtggactggagctaccaagtaccacctcaatggaagagactctctggtgaatccgggcccagctatggccagccacaaggacgatgaagaaaaatattttcctcagagcggggttctcatctttggaaaacaagactcgggaaaaactaatgtggacattgaaaaggttatgattacagacgaagaggaaatcaggaccaccaatcccgtggctacggagcagtatggttctgtatctaccaacctccagagcggcaacacacaagcagctacctcagatgtcaacacacaaggcgttcttccaggcatggtctggcaggacagagacgtgtacctgcaggggcccatctgggcaaagattccacacacggacggacattttcacccctctcccctcatgggcggattcggacttaaacaccctcctccacaaattctcatcaagaacaccccggtacctgcgaatccttcgaccactttcagtgcggcaaagtttgcttccttcatcacacagtactccacggggcaggtcagcgtggagatcgagtgggagctgcagaaggagaacagcaaacgctggaatcccgaaattcagtacacttccaactacaacaaatctgttaatgtggactttactgtggacactaatggtgtgtattcagagcctcgccccattggcaccagatacctgactcgtaatctgtaa

SEQ ID NO: 213 - protein, 735 aa, Adeno-associated virus
MAADGYLPDWLEDTLSEGIRQWWKLKPGPPPPKPAERHKDDSRGLVLPGYKYLGPFNGLDKGEPVNEADAAALEHDKAYDRQLDSGDNPYLKYNHADAEFQERLKEDTSFGGNLGRAVFQAKKRILEPLGLVEEPVKTAPGKKRPVEHSPAEPDSSSGTGKAGQQPARKRLNFGQTGDADSVPDPRPLGQPPAAPSGLGTNTMASGSGAPMADNNEGADGVGNSSGNWHCDSTWMGDRVITTSTRTWALPTYNNHLYKQISSQSGASNDNHYFGYSTPWGYFDFNRFHCHFSPRDWQRLINNNWGFRPKRLSFKLFNIQVKEVTQNDGTTTIANNLTSTVQVFTDSEYQLPYVLGSAHQGCLPPFPADVFMVPQYGYLTLNNGSQAVGRSSFYCLEYFPSQMLRTGNNFTFSYTFEDVPFHSSYAHSQSLDRLMNPLIDQYLYYLSRTNTPSGTTTMSRLQFSQAGASDIRDQSRNWLPGPCYRQQRVSKTAADNNNSDYSWTGATKYHLNGRDSLVNPGPAMASHKDDEEKYFPQSGVLIFGKQDSGKTNVDIEKVMITDEEEIRTTNPVATEQYGSVSTNLQSGNTQAATSDVNTQGVLPGMVWQDRDVYLQGPIWAKIPHTDGHFHPSPLMGGFGLKHPPPQILIKNTPVPANPSTTFSAAKFASFITQYSTGQVSVEIEWELQKENSKRWNPEIQYTSNYNKSVNVDFTVDTNGVYSEPRPIGTRYLTRNL

SEQ ID NO: 214 - DNA, 2208 bp, Adeno-associated virus
atggctgccgatggttatcttccagattggctcgaggacactctctctgaaggaataagacagtggtggaagctcaaacctggcccaccaccaccaaagcccgcagagcggcataaggacgacagcaggggtcttgtgcttcctgggtacaagtacctcggacccttcaacggactcgacaagggagagccggtcaacgaggcagacgccgcggccctcgagcacgacaaggcctacgaccggcagctcgacagcggagacaacccgtacctcaagtacaaccacgccgacgcggagtttcaggagcgccttaaaggagatacgtcttttgggggcaacctcggacgagcagtcttccaggccaaaaagaggattcttgaacctctgggcctggttgaggaacctgttaagacggctccgggaaaaaagaggccggtagagcactctcctgcggagccagactcctcctcgggaaccggaaaagcgggccagcagcctgcaagaaagagattgaattttggtcagactggagacgcagactcagtacctgacccccagcctctcggacagccaccagcagccccctctggtctgggaactaatacgatggcttcaggcagtggcgcaccaatggcagacaataacgagggcgccgacggagtgggtaattcctcgggaaattggcattgcgattccacatggatgggcggcagagtcatcaccaccagcacccgcacctgggccctgcccacctacaacaaccatctgtacaagcaaatctccagccagtctggagccagcaacgacaaccactactttggctacagcaccccctgggggtattttgacttcaacagattccactgccacttctccccacgtgactggcaaagactcatcaacaacaactggggattccggcccaagagactcagcttcaagctctttaacattcaagtcaaagaggtcacgcagaatgacggtacgacgacgattgccaataaccttaccagcacggttcaggtgtttactgactcggagtaccagctcccgtacgtcctcggctcggcgcatcaaggatgcctcccgccgttcccagcagacgtcttcatggtgccacagtatggatacctcaccctgaacaacggcagtcaggcggtaggacgctcttccttttactgcctggagtactttccttctcagacgcttcgtaccggaaacaactttaccttcagctacacctttgaagacgttcctttccatagcagctacgctcacagccaaagtctggaccgtctcatgaatcctctcatcgaccagtacctgtattacttgagcagaacaaacactccaagcggaaccaccacgatgtccaggcttcagttttctcaggccggagcaagtgacattcgggaccagtctagaaactggcttcctggaccctgttaccgccagcagcgagtatcaaagacagctgcggacaacaacaacagtgattactcgtggactggagctaccaagtaccacctcaatggaagagactctctggtgaatccgggcccagctatggccagccacaaggacgatgaagaaaaatattttcctcagagcggggttctcatctttggaaaacaagactcgggaaaaactaatgtggacattgaaaaggttatgattacagacgaagaggaaatcaggaccaccaatcccgtggctacggagcagtatggttctgtatctaccaacctccagagcggcaacacacaagcagctacctcagatgtcaacacacaaggcgttcttccaggcatggtctggcaggacagagacgtgtacctgcaggggcccatctgggcaaagattccacacacggacggacattttcacccctctcccctcatgggcggattcggacttaaacaccctcctccacaaattctcatcaagaacaccccggtacctgcgaatccttcgaccactttcagtgcggcaaagtttgcttccttcatcacacagtactccacggggcaggtcagcgtggagatcgagtgggagctgcagaaggagaacagcaaacgctggaatcccgaaattcagtacacttccaactacaacaaatctgttaatgtggactttactgtggacactaatggtgtgtattcagagcctcgccccattggcaccagatacctgactcgtaatctgtaa

SEQ ID NO: 215 - protein, 735 aa, Adeno-associated virus
MAADGYLPDWLEDTLSEGIRQWWKLKPGPPPPKPAERHKDDSRGLVLPGYKYLGPFNGLDKGEPVNEADAAALEHDKAYDRQLDSGDNPYLKYNHADAEFQERLKGDTSFGGNLGRAVFQAKKRILEPLGLVEEPVKTAPGKKRPVEHSPAEPDSSSGTGKAGQQPARKRLNFGQTGDADSVPDPQPLGQPPAAPSGLGTNTMASGSGAPMADNNEGADGVGNSSGNWHCDSTWMGGRVITTSTRTWALPTYNNHLYKQISSQSGASNDNHYFGYSTPWGYFDFNRFHCHFSPRDWQRLINNNWGFRPKRLSFKLFNIQVKEVTQNDGTTTIANNLTSTVQVFTDSEYQLPYVLGSAHQGCLPPFPADVFMVPQYGYLTLNNGSQAVGRSSFYCLEYFPSQTLRTGNNFTFSYTFEDVPFHSSYAHSQSLDRLMNPLIDQYLYYLSRTNTPSGTTTMSRLQFSQAGASDIRDQSRNWLPGPCYRQQRVSKTAADNNNSDYSWTGATKYHLNGRDSLVNPGPAMASHKDDEEKYFPQSGVLIFGKQDSGKTNVDIEKVMITDEEEIRTTNPVATEQYGSVSTNLQSGNTQAATSDVNTQGVLPGMVWQDRDVYLQGPIWAKIPHTDGHFHPSPLMGGFGLKHPPPQILIKNTPVPANPSTTFSAAKFASFITQYSTGQVSVEIEWELQKENSKRWNPEIQYTSNYNKSVNVDFTVDTNGVYSEPRPIGTRYLTRNL

SEQ ID NO: 216 - DNA, 2208 bp, Adeno-associated virus
atggctgccgatggttatcttccagattggctcgaggacactctctctgaaggaataagacagtggtggaagctcaaacctggcccaccaccaccaaagcccgcagagcggcataaggacgacagcaggggtcttgtgcttcctgggtacaagtacctcggacccttcaacggactcgacaagggagagccggtcaacgaggcagacgccgcggccctcgagcacgacaaggcctacgaccggcagctcgacagcggagacaacccgtacctcaagtacaaccacgccgacgcggagtttcaggagcgtcttaaagaagatacgtcttttgggggcaacctcggacgagcagtcttccaggccaaaaagaggattcttgaacctctgggcctggttgaggaacctgttaagacggctccgggaaaaaagaggccggtagagcactctcctgcggagccagactcctcctcgggaaccggaaaagcgggccagcagcctgcaagaaagagattgaattttggtcagactggagacgcagactcagtacctgacccccagcctctcggacagccaccagcagccccctctggtctgggaactaatacgatggcttcaggcagtggcgcaccaatggcagacaataacgagggcgccgacggagtgggtaattcctcgggaaattggcattgcgattccacatggatgggcgacagagtcatcaccaccagcacccgcacctgggccctgcccacctgcaacaaccatctgtacaagcaaatctccagccagtctggagccagcaacgacaaccactactttggctacagcaccccctgggggtattttgacttcaacagattccactgccacttctccccacgtgactggcaaagactcatcaacaacaactggggattccggcccaagagactcagcttcaagctctttaacattcaagtcaaagaggtcacgcagaatgacggtacgacgacgattgccaataaccttaccagcacggttcaggtgtttactgactcggagtaccagctcccgtacgtcctcggctcggcgcatcaaggatgcctcccgccgttcccagcagacgtcttcatggtgccacagtatggatacctcaccctgaacaacggcagtcaggcggtaggacgctcttccttttactgcctggagtattttccttctcagatgcttcgtaccggaaacaactttaccttcagctacacctttgaagacgttcctttccatagcagctacgctcacagccaaagtctggaccgtctcatgaatcctctcatcgaccagtacctgtattacttgagcagaacaaacactccaagcggaaccaccacgatgtccaggcttcagttttctcaggccggagcaagtgacattcgggaccagtctagaaactggcttcctggaccctgttaccgccagcagcgagtatcaaagacagctgcggacaacaacaacagtgattactcgtggactggagctaccaagtaccacctcaatggaagagactctctggtgaatccgggcccagctatggccagccacaaggacgatgaagaaaaatattttcctcagagcggggttctcatctttggaaaacaagactcgggaaaaactaatgtggacattgaaaaggttatgattacagacgaagaggaaatcaggaccaccaatcccgtggctacggagcagtatggttctgtatctacctacctccagagcggcaacacacaagcagctacctcagatgtcaacacacaaggcgttcttccaggcatggtctggcaggacagagacgtgtacctgcgggggcccatctgggcaaagattccacacacggacggacattttcacccctctcccctcatgggcggatttggacttaaacaccctcctccacaaattctcatcaagaacaccccggtacctgcgaatccttcgaccactttcagtgcggcaaagtttgcttccttcatcacacagtactccacggggcaggtcagcgtggagatcgagtgggagctgcagaaggagaacagcaaacgctggaatcccgaaattcagtacacttccaactacaacaaatctgttaatgtggactttactgtggacactaatggtgtgtattcagagcctcgccccattggcaccagatacctgactcgtaatctgtaa

SEQ ID NO: 217 - protein, 735 aa, Adeno-associated virus
MAADGYLPDWLEDTLSEGIRQWWKLKPGPPPPKPAERHKDDSRGLVLPGYKYLGPFNGLDKGEPVNEADAAALEHDKAYDRQLDSGDNPYLKYNHADAEFQERLKEDTSFGGNLGRAVFQAKKRILEPLGLVEEPVKTAPGKKRPVEHSPAEPDSSSGTGKAGQQPARKRLNFGQTGDADSVPDPQPLGQPPAAPSGLGTNTMASGSGAPMADNNEGADGVGNSSGNWHCDSTWMGDRVITTSTRTWALPTCNNHLYKQISSQSGASNDNHYFGYSTPWGYFDFNRFHCHFSPRDWQRLINNNWGFRPKRLSFKLFNIQVKEVTQNDGTTTIANNLTSTVQVFTDSEYQLPYVLGSAHQGCLPPFPADVFMVPQYGYLTLNNGSQAVGRSSFYCLEYFPSQMLRTGNNFTFSYTFEDVPFHSSYAHSQSLDRLMNPLIDQYLYYLSRTNTPSGTTTMSRLQFSQAGASDIRDQSRNWLPGPCYRQQRVSKTAADNNNSDYSWTGATKYHLNGRDSLVNPGPAMASHKDDEEKYFPQSGVLIFGKQDSGKTNVDIEKVMITDEEEIRTTNPVATEQYGSVSTYLQSGNTQAATSDVNTQGVLPGMVWQDRDVYLRGPIWAKIPHTDGHFHPSPLMGGFGLKHPPPQILIKNTPVPANPSTTFSAAKFASFITQYSTGQVSVEIEWELQKENSKRWNPEIQYTSNYNKSVNVDFTVDTNGVYSEPRPIGTRYLTRNL

SEQ ID NO: 218 - DNA, 2208 bp, Adeno-associated virus; identical to SEQ ID NO: 212

SEQ ID NO: 219 - protein, 735 aa, Adeno-associated virus; identical to SEQ ID NO: 213

SEQ ID NO: 220 - DNA, 2208 bp, Adeno-associated virus
atggctgccgatggttatcttccagattggctcgaggacactctctctgaaggaataagacagtggtggaagctcaaacctggcccaccaccaccaaagcccgcagagcggcataaggacggcagcaggggtcttgtgcttcctgggtacaagtacctcggacccttcaacggactcgacaagggagagccggtcaacgaggcagacgccgcggccctcgagcacgacaaggcctacgaccggcagctcaacagcggagacaacccgtacctcaagtacaaccacgccgacgcggagtttcaggagcgccttaaagaagatacgtcttttgggggcaacctcggacgagcagtcttccaggcaaaaaagagggttcttgaacctctgggcctggttgaggagcctgttaaaacggctccgggaaaaaagagaccggtagagcactctcctgcggagccagactcctcctcgggaaccggaaaagcgggccagcagcctgcaagaaagagattgaattttggtcagactggagacgcagactccgtacctgacccccagcctctcggacagccaccagcagccccctctggtctgggatctactacaatggctacaggcagtggcgcaccaatggcagacaataacgagggtgccgatggagtgggtaattcctcaggaaattggcattgcgattcccaatggctgggcgacagagtcatcaccacaagcactcgaacctgggccctgcccacctacaacaaccacctctacaagcaaatctccagccaatcaggagcctcaaacgacaaccactattttggctacagcaccccttgggggtattttgacttcaacagattccactgccacttttcaccacgtgactggcaaagactcatcaacaacaactggggattccgacccaagagactcaacttcaagctctttaacattcaagtcaaagaggtcacgcagaatgacggtacgacgacgattgccaataaccttaccagcacggttcaggtgtttactgactcggagtaccagctcccgtacgtcctcggctcggcgcatcaaggatgcctcccgccgttcccagcggacgtcttcatggtcccacagtatggatacctcaccctgaacaacgggagtcaggcggtaggacgctctcccttttactgcctggagtactttccttctcagatgctgcgtactggaaacaactttcagttcagctacacttttgaagacgtgcctttccacagcagctacgctcacagccagagtctggatcggctgatgaatcctctgatcgaccagtacctgtattatctgaacaagacacaaacaaatagtggaactcttcagcagtctcggctactgtttagccaagctggacccaccaacatgtctcttcaagctaaaaactggctgcctggaccttgctacagacagcagcgtctgtcaaagcaggcaaacgacaacaacaacagcaactttccctggactgcagctacaaagtatcatctaaatggccgggactcgttggttaatccaggaccagctatggccagtcacaaggatgacgaagaaaagtttttccccatgcatggaaccctgatatttggtaaacaaggaacaaatgccaacgacgcggatttggaaaatgtcatgattacagatgaagaagaaatcaggaccaccaatcccgtggctacggagcagtacgggactgtgtcaaataatttgcaaaactcaaacactggtccaactactggaactgtcaatcaccaaggagcgttacctggtatggtgtggcaggatcgagatgtgtaccttcagggacccatttgggccaagattcctcacaccgatggacactttcatccttctccactgatgggaggttttggactcaaacacccgcctcctcagattatgatcaaaaacactcccgttccagccaatcctcctacaaacttcagttctgccaagtttgcttctttcatcacacagtattccacggggcaggtcagcgtggagatcgagtgggagctgcagaaggagaacagcaaacgctggaatcccgaaattcagtacacttccaactacaacaaatctgttaatgtggactttactgtggacaataatggcgtgtactcagagcctcgccccattggcaccagatacctgactcgtaatctgtaa

SEQ ID NO: 221 - protein, 735 aa, Adeno-associated virus
MAADGYLPDWLEDTLSEGIRQWWKLKPGPPPPKPAERHKDGSRGLVLPGYKYLGPFNGLDKGEPVNEADAAALEHDKAYDRQLNSGDNPYLKYNHADAEFQERLKEDTSFGGNLGRAVFQAKKRVLEPLGLVEEPVKTAPGKKRPVEHSPAEPDSSSGTGKAGQQPARKRLNFGQTGDADSVPDPQPLGQPPAAPSGLGSTTMATGSGAPMADNNEGADGVGNSSGNWHCDSQWLGDRVITTSTRTWALPTYNNHLYKQISSQSGASNDNHYFGYSTPWGYFDFNRFHCHFSPRDWQRLINNNWGFRPKRLNFKLFNIQVKEVTQNDGTTTIANNLTSTVQVFTDSEYQLPYVLGSAHQGCLPPFPADVFMVPQYGYLTLNNGSQAVGRSPFYCLEYFPSQMLRTGNNFQFSYTFEDVPFHSSYAHSQSLDRLMNPLIDQYLYYLNKTQTNSGTLQQSRLLFSQAGPTNMSLQAKNWLPGPCYRQQRLSKQANDNNNSNFPWTAATKYHLNGRDSLVNPGPAMASHKDDEEKFFPMHGTLIFGKQGTNANDADLENVMITDEEEIRTTNPVATEQYGTVSNNLQNSNTGPTTGTVNHQGALPGMVWQDRDVYLQGPIWAKIPHTDGHFHPSPLMGGFGLKHPPPQIMIKNTPVPANPPTNFSSAKFASFITQYSTGQVSVEIEWELQKENSKRWNPEIQYTSNYNKSVNVDFTVDNNGVYSEPRPIGTRYLTRNL

SEQ ID NO: 222 - DNA, 2208 bp, Adeno-associated virus
atggctgccgatggttatcttccagattggctcgaggacactctctctgaaggaataagacagtggtggaagctcaaacctggcccaccaccaccaaagcccgcagagcggcataaggacgacagcaggggtcttgtgcttcctgggtacaagtacctcggacccttcaacggactcgacaagggagagccggtcaacgaggcagacgccgcggccctcgagcacgacaaggcctacgaccggcagctcgacagcggagacaacccgtacctcaagtacaaccacgccgacgcggagtttcaggagcgtcttaaagaagatacgtcttttgggggcaacctcggacgagcagtcttccaggccaaaaagaggattcttgaacctctgggcctggttgaggaacctgttaagacggctccgggaaaaaagaggccggtagagcactctcctgcggagccagactcctcctcgggaaccggaaaagcgggccagcagcctgcaagaaagagattgaattttggtcagactggagacgcagactcagtacctgacccccagcctctcggacagccaccagcagccccctctggtctgggaactaatacgatggcttcaggcagtggcgcaccaatggcagacaataacgagggcgccgacggagtgggtaattcctcgggaaattggcattgcgattccacatggatgggcgacagagtcatcaccaccagcacccgcacctgggccctgcccacctacaacaaccatctgtacaagcaaatctccagccagtctggagccagcaacgacaaccactactttggctacagcaccccctgggggtattttgacttcaacagattccactgccacttctccccacgtgactggcaaagactcatcaacaacaactggggattccggcccaagagactcagcttcaagctctttaacattcaagtcaaagaggtcacgcagaatgacggtacgacgacgattgccaataaccttaccagcacggttcaggtgtttactgactcggagtaccagctcccgtacgtcctcggctcggcgcatcaaggatgcctcccgccgttcccagcagacgtcttcatggtgccacagtatggatacctcaccctgaacaacggcagtcaggcggtaggacgctcttccttttactgcctggagtactttccttctcagatgcttcgtaccggaaacaactttaccttcagctacacctttgaagacgttcctttccatagcagctacgctcacagccaaagtctggaccgtctcatgaatcctctcatcgaccagtacctgtattacttgagcagaacaaacactccaagcggaaccaccacgatgtccaggcttcagttttctcaggccggagcaagtgacattcgggaccagtctagaaactggcttcctggaccctgttaccgccagcagcgagtatcaaagacagctgcggacaacaacaacagtgattactcgtggactggagctaccaagtaccacctcaatggaagagactctctggtgaatccgggcccagctatggccagccacaaggacgatgaagaaaaatattttcctcagagcggggttctcatctttggaaaacaagactcgggaaaaactaatgtggacattgaaaaggttatgattacagacgaagaggaaatcaggaccaccaatcccgtggctacggagcagtatggttctgtatctaccaacctccagagcggcaacacacaagcagctacctcagatgtcaacacacaaggcgttcttccaggcatggtctggcaggacagagacgtgtacctgcaggggcccatctgggcaaagattccacacacggacggacattttcacccctctcccctcatgggcggattcggacttaaacaccctcctccacaaattctcatcaagaacaccccggtacctgcgaatccttcgaccactttcagtgcggcaaagtttgcttccttcatcacacagtactccacggggcaggtcagcgtggagatcgagtgggagctgcagaaggagaacagcaaacgctggaatcccgaaattcagtacacttccaactacaacaaatctgttaatgtggactttactgtggacactaatggtgtgtattcagagcctcgccccattggcaccagatacctgactcgtaatctgtaa

SEQ ID NO: 223 - protein, 735 aa, Adeno-associated virus
MAADGYLPDWLEDTLSEGIRQWWKLKPGPPPPKPAERHKDDSRGLVLPGYKYLGPFNGLDKGEPVNEADAAALEHDKAYDRQLDSGDNPYLKYNHADAEFQERLKEDTSFGGNLGRAVFQAKKRILEPLGLVEEPVKTAPGKKRPVEHSPAEPDSSSGTGKAGQQPARKRLNFGQTGDADSVPDPQPLGQPPAAPSGLGTNTMASGSGAPMADNNEGADGVGNSSGNWHCDSTWMGDRVITTSTRTWALPTYNNHLYKQISSQSGASNDNHYFGYSTPWGYFDFNRFHCHFSPRDWQRLINNNWGFRPKRLSFKLFNIQVKEVTQNDGTTTIANNLTSTVQVFTDSEYQLPYVLGSAHQGCLPPFPADVFMVPQYGYLTLNNGSQAVGRSSFYCLEYFPSQMLRTGNNFTFSYTFEDVPFHSSYAHSQSLDRLMNPLIDQYLYYLSRTNTPSGTTTMSRLQFSQAGASDIRDQSRNWLPGPCYRQQRVSKTAADNNNSDYSWTGATKYHLNGRDSLVNPGPAMASHKDDEEKYFPQSGVLIFGKQDSGKTNVDIEKVMITDEEEIRTTNPVATEQYGSVSTNLQSGNTQAATSDVNTQGVLPGMVWQDRDVYLQGPIWAKIPHTDGHFHPSPLMGGFGLKHPPPQILIKNTPVPANPSTTFSAAKFASFITQYSTGQVSVEIEWELQKENSKRWNPEIQYTSNYNKSVNVDFTVDTNGVYSEPRPIGTRYLTRNL

SEQ ID NO: 224 - DNA, 2208 bp, Adeno-associated virus
atggctgccgatggttatcttccagattggctcgaggacactctctctgaaggaataagacagtggtggaagctcaaacctggcccaccaccaccaaagcccgcagagcggcataaggacgacagcaggggtcttgtgcttcctgggtacaagtacctcggacccttcaacggactcgacaagggagagccggtcaacgaggcagacgccgcggccctcgagcacgacaaggcctacgaccggcagctcgacagcggagacaacccgtacctcaagtacaaccacgccgacgcggagtttcaggagcgtcttaaagaagatacgtcttttgggggcaacctcggacgagcagtcttccaggccaaaaagaggattcttgaacctctgggcctggttgaggaacctgttaagacggctccgggaaaaaagaggccggtagagcactctcctgcggagccagactcctcctcgggaaccggaaaagcgggccagcagcctgcaagaaagagattgaattttggtcagactggagacgcagactcagtacctgacccccagcctctcggacagccaccagcagccccctctggtctgggaactaatacgatggcttcaggcagtggcgcaccaatggcagacaataacgagggcgccgacggagtgggtaattcctcgggaaattggcattgcgattccacatggatgggcgacagagtcatcaccaccagcacccgcacctgggccctgcccacctacaacaaccatctgtacaagcaaatctccagccagtctggagccagcaacgacaaccactactttggctacagcaccccctgggggtatttcgacttcaacagattccactgccacttctccccacgtgactggcaaagactcatcaacaacaactggggattccggcccaagagactcagcttcaagctctttaacattcaagtcaaagaggtcacgcagaatgacggtacgacgacgattgccaataaccttaccagcacggttcaggtgtttactgactcggggtaccagctcccgtacgtcctcggctcggcgcatcaaggatgccttccgccgttcccagcagacgtcttcatggtgccacagtatggatacctcaccctgaacaacggcagtcaggcggtaggacgctcttccttttactgcctggagtactttccttctcagatgcttcgtaccggaaacaactttaccttcagctacacctttgaagacgttcctttccatagcagctacgctcacggccaaagtctggaccgtctcatgaatcctctcatcgaccagtacctgtattacttgagcagaacaaacactccaagcggaaccaccacgatgtccaggcttcagttttctcaggccggagcaagtgacgttcgggaccagtctagaaactggcttcctggaccctgttaccgccagcagcgagtatcaaagacagctgcggacaacaacaacagtgattactcgtggactggagctaccaagtaccacctcaatggaagagactctctggtgaatccgggcccagctatggccagccacaaggacgatgaagaaaaatattttcctcagagcggggttctcgtctttggaaaacaagactcgggaaaaactaatgtggacattgaaaaggttatgattacagacgaagaggaaatcaggaccaccaatcccgcggctacggagcagtatggttctgtatctaccaacctccagagcggcaacacacaagcagctacctcagatgtcaacacacaaggcgttcttccaggcatggtctggcaggacagagacgtgtacctgcaggggcccatctgggcaaagattccacacacggacggacattttcacccctctcccctcatgggcggattcggacttaaacaccctcctccacaaattctcatcaagaacaccccggtacctgcgaatccttcgaccactttcagtgcggcaaagtttgtttccttcatcacacagtactccacggggcaggtcagcgtggagatcgagtgggagctgcagaaggagaacagcaaacgctggaatcccgaaattcagtacacttccaactacaacaaatctgttaatgtggactttactgtggacactaatggtgtgtattcagagcctcgccccattggcaccagatacctgactcgtaatctgtaa

SEQ ID NO: 225 - protein, 735 aa, Adeno-associated virus
MAADGYLPDWLEDTLSEGIRQWWKLKPGPPPPKPAERHKDDSRGLVLPGYKYLGPFNGLDKGEPVNEADAAALEHDKAYDRQLDSGDNPYLKYNHADAEFQERLKEDTSFGGNLGRAVFQAKKRILEPLGLVEEPVKTAPGKKRPVEHSPAEPDSSSGTGKAGQQPARKRLNFGQTGDADSVPDPQPLGQPPAAPSGLGTNTMASGSGAPMADNNEGADGVGNSSGNWHCDSTWMGDRVITTSTRTWALPTYNNHLYKQISSQSGASNDNHYFGYSTPWGYFDFNRFHCHFSPRDWQRLINNNWGFRPKRLSFKLFNIQVKEVTQNDGTTTIANNLTSTVQVFTDSGYQLPYVLGSAHQGCLPPFPADVFMVPQYGYLTLNNGSQAVGRSSFYCLEYFPSQMLRTGNNFTFSYTFEDVPFHSSYAHGQSLDRLMNPLIDQYLYYLSRTNTPSGTTTMSRLQFSQAGASDVRDQSRNWLPGPCYRQQRVSKTAADNNNSDYSWTGATKYHLNGRDSLVNPGPAMASHKDDEEKYFPQSGVLVFGKQDSGKTNVDIEKVMITDEEEIRTTNPAATEQYGSVSTNLQSGNTQAATSDVNTQGVLPGMVWQDRDVYLQGPIWAKIPHTDGHFHPSPLMGGFGLKHPPPQILIKNTPVPANPSTTFSAAKFVSFITQYSTGQVSVEIEWELQKENSKRWNPEIQYTSNYNKSVNVDFTVDTNGVYSEPRPIGTRYLTRNL

SEQ ID NO: 226 - DNA, 2208 bp, Adeno-associated virus
atggctgccgatggttatcttccagattggctcgaggacactctctctgaaggaataagacagtggtggaaactcaaacctggcccaccaccaccaaagcccgcagagcggcataaggacgacagcaggggtcttgtgcttcctgggtacaagtacctcggacccttcaacggactcgacaagggagagccggtcaacgaggcagacgccgcggccctcgagcacgacaaggcctacgaccggcagctcgacagcggagacaacccgtacctcaagtacaaccacgccgacgcggagtttcaggagcgccttaaagaagatacgtcttttgggggcaacctcggacgagcagtcttccaggcaaaaaagagggttctggaacctctgagcctggttgaggagcctgttaagacggctccgggaaaaaagaggccggtagagcactctcccgcagagccagattcctcctccggaactggaaagtcgggcaaccagcctgcaagaaagagattgaatttcggtcagactggagactcagactccgtacctgacccccagcctctcggacagccaccagcagccccctctggtctgggaactaatacgatggctacaggcagtggcgcaccaatggcagacaataacgagggcgccgacggagtgggtaattcctcgggaaattggcattgcgattccacatggatgggcgacagagtcatcaccaccagcacccgaacctgggccctgcccacctacaacaaccatctgtacaagcaaatatccagccagtctggagccagcaacgacaatcactactttggctacagcaccccctgggggtattttgacttcaacagattccactgccacttttcaccacgtgactggcaaagactcatcaacaacaactggggattccgacccaagagactcaacttcaagctctttaacattcaagtcaaagaggtcacgcagaatgacggtacgacgacgattgccaataaccttaccagcacggttcaggtgtttactgactcggagtaccagctcccgtacgtcctcggctcggcgcatcaaggatgcctcccgccgttcccagcagacgtcttcatggtgccacagtatggatacctcaccctgaacaacgggagtcaggcagtaggacgctcttcattttactgcctagagtactttccttctcagatgctgcgtaccggaaacaactttaccttcagctacacctttgaggacgttcctttccacagcagctacgctcacagccagagtttggaccgtctcatgaatcctctcatcgaccagtacctgtattacttgagcagaacaaacactccaagcggaaccaccacgcagtccaggcttcagttttctcaggccggagcgagtgacattcaggaccagtctaggaactggcttcctggaccctgttaccgtcagcagcgagtatcaaagacatctgcggataacaacaacagtgaatactcgtggactggagctaccaagtaccacctcaatggcagagactctctggtgaatccgggcccggccatggccagccacaaagacgatgaagaaaagttttttcctcagagcggggttcttatctttgggaagcaaggctcagagaaaacaaatgtggatattgaaaaggtcatgattacagacgaagaggaaatcaggaccaccaatcccgtggctacggagcagtatggttctgtatctaccaacctccagagcggcaacacacaagcagctaccgcagatgtcaacacacaaggcgttcttccaggcatggtcgggcaagacagagacgtgtacctgcaggggcctacttgggcaaagattccacacacggacggacattttcacccctctcccctcatgggcggatttggacttaaacaccctcctccacagattctcatcaagaacaccccggtacctgcgaatccttcgaccaccttcagtgcggcaaagtttgcttccttcattacacagtactccacggggcaggtcagcgtggagatcgagtgggagctgcagaaggagaacagcaaacgctggaatcccgagatccagtacacttccaactacaacaagtctgttaatgtggactttactgtggacactaatggcgtgtattcagagcctcgccccattggcaccagatacctgactcgtaatctgtaa

SEQ ID NO: 227 - protein, 735 aa, Adeno-associated virus
MAADGYLPDWLEDTLSEGIRQWWKLKPGPPPPKPAERHKDDSRGLVLPGYKYLGPFNGLDKGEPVNEADAAALEHDKAYDRQLDSGDNPYLKYNHADAEFQERLKEDTSFGGNLGRAVFQAKKRVLEPLSLVEEPVKTAPGKKRPVEHSPAEPDSSSGTGKSGNQPARKRLNFGQTGDSDSVPDPQPLGQPPAAPSGLGTNTMATGSGAPMADNNEGADGVGNSSGNWHCDSTWMGDRVITTSTRTWALPTYNNHLYKQISSQSGASNDNHYFGYSTPWGYFDFNRFHCHFSPRDWQRLINNNWGFRPKRLNFKLFNIQVKEVTQNDGTTTIANNLTSTVQVFTDSEYQLPYVLGSAHQGCLPPFPADVFMVPQYGYLTLNNGSQAVGRSSFYCLEYFPSQMLRTGNNFTFSYTFEDVPFHSSYAHSQSLDRLMNPLIDQYLYYLSRTNTPSGTTTQSRLQFSQAGASDIQDQSRNWLPGPCYRQQRVSKTSADNNNSEYSWTGATKYHLNGRDSLVNPGPAMASHKDDEEKFFPQSGVLIFGKQGSEKTNVDIEKVMITDEEEIRTTNPVATEQYGSVSTNLQSGNTQAATADVNTQGVLPGMVGQDRDVYLQGPTWAKIPHTDGHFHPSPLMGGFGLKHPPPQILIKNTPVPANPSTTFSAAKFASFITQYSTGQVSVEIEWELQKENSKRWNPEIQYTSNYNKSVNVDFTVDTNGVYSEPRPIGTRYLTRNL

SEQ ID NO: 228 - DNA, 2208 bp, Adeno-associated virus
atggctgccgatggttatcttccagattggctcgaggacactctctctgaaggaataagacagtggtggaagctcaaacctggcccaccaccaccaaagcccgcagagcggcataaggacgacagcaggggtcttgtgcttcctgggtacaagtacctcggacccttcaacggactcgacaagggagagccggtcaacgaggcagacgccgcggccctcgagcacgacaaggcctacgaccggcagctcgacagcggagacaacccgtacctcaagtacaaccacgccgacgcagagtttcaggagcgccttaaagaagatacgtcttttgggggcaacctcggacgagcagtcttccaggcaaaaaagagggttctggaacctctgggcctggttgaggagcctgttaagacggctccgggaaaaaagaggccggtagagcactctcctgcagagccagattcctcctccggaactggaaagtcgggcaaccagcctgcaagaaagagattgaatttcggtcagactggagactcagactccgtacctgacccccagcctctcggacagccaccagcagccccctctggtctgggaactaatacgatggctacaggcagtggcgcaccaatggcagacaataacgagggcgccgacggagtgggtaattcctcgggaaattggcattgcgattccacatggatgggcgacagagtcatcaccaccagcacccgaacctgggccctgcccacctacaacaaccatctgtacaagcaaatatccagccagtctggagccagcaacgacaatcactactttggctacagcaccccctgggggtattttgacttcaacagattccactgccacttttcaccacgtgactggcaaagactcatcaacaacaactggggattccgacccaagagactcaacttcaagctctttaacattcaagtcaaagaggtcacgcagaatgacggtacgacgacgattgccaataaccttaccagcacggttcaggtgtttactgactcggagtaccagctcccgtacgtcctcggctcggcgcatcaaggatgcctcccgccgttcccagcagacgtcttcatggtgccacagtatggatacctcaccctgaacaacgggagtcaggcagtaggacgctcttcattttactgcctagggtactttccttctcagatgctgcgtaccggaaacaactttaccttcagctacacctttgaggacgttcctttccacagcagctacgctcacagccagagtttggaccgtctcatgaatcctctcatcgaccagtacctgtattacttgagcagaacaaacactccaagcggaaccaccacgcagtccaggcttcagttttctcaggccggagcgagtgacattcgggaccagtctaggaactggcttcctggaccctgttaccgtcagcagcgagtatcaaagacatctgcggataacaacaacagtgaatactcgtggactggagctaccaagtaccacctcaatggcagagactctctggtgaatccgggcccggccatggccagccacaaagacgatgaagaaaagttttttcctcagagcggggttcttatctttgggaagcaaggcccagagaaaacaaatgtggatattgaaaaggtcatgattacagacgaagaggaaatcaggaccaccaatcccgtggctacggagcagtatggttctgtatctaccaacctccagagcggcaacacacaagcagctaccgcagatgtcaacacacaaggcgttcttccaggcatggtctggcaagacagagacgtgtacctgcaggggcctatttgggcaaagattccacacacggacggacattttcacccctctcccctcatgggcggatttggacttaaacaccctcctccacagattctcatcaagaacaccccggtacctgcgaatccttcgaccaccttcagtgcggcaaagtttgcttccttcattacacagtactccacggggcaggtcagcgtggagatcgagtgggagctgcagaaggagaacagcaaacgctggaatcccgagatccagtacacttccaactacaacaagtctgttaatgtggactttactgtggacactaatggcgtgtattcagagcctcgccccattggcaccagatacctgactcgtaatctgtaa

SEQ ID NO: 229 - protein, 735 aa, Adeno-associated virus
MAADGYLPDWLEDTLSEGIRQWWKLKPGPPPPKPAERHKDDSRGLVLPGYKYLGPFNGLDKGEPVNEADAAALEHDKAYDRQLDSGDNPYLKYNHADAEFQERLKEDTSFGGNLGRAVFQAKKRVLEPLGLVEEPVKTAPGKKRPVEHSPAEPDSSSGTGKSGNQPARKRLNFGQTGDSDSVPDPQPLGQPPAAPSGLGTNTMATGSGAPMADNNEGADGVGNSSGNWHCDSTWMGDRVITTSTRTWALPTYNNHLYKQISSQSGASNDNHYFGYSTPWGYFDFNRFHCHFSPRDWQRLINNNWGFRPKRLNFKLFNIQVKEVTQNDGTTTIANNLTSTVQVFTDSEYQLPYVLGSAHQGCLPPFPADVFMVPQYGYLTLNNGSQAVGRSSFYCLGYFPSQMLRTGNNFTFSYTFEDVPFHSSYAHSQSLDRLMNPLIDQYLYYLSRTNTPSGTTTQSRLQFSQAGASDIRDQSRNWLPGPCYRQQRVSKTSADNNNSEYSWTGATKYHLNGRDSLVNPGPAMASHKDDEEKFFPQSGVLIFGKQGPEKTNVDIEKVMITDEEEIRTTNPVATEQYGSVSTNLQSGNTQAATADVNTQGVLPGMVWQDRDVYLQGPIWAKIPHTDGHFHPSPLMGGFGLKHPPPQILIKNTPVPANPSTTFSAAKFASFITQYSTGQVSVEIEWELQKENSKRWNPEIQYTSNYNKSVNVDFTVDTNGVYSEPRPIGTRYLTRNL

SEQ ID NO: 230 - protein, 735 aa, Adeno-associated virus
MAADGYLPDWLEDTLSEGIRQWWKLKPGPPPPKPAERHKDDSRGLVLPGYKYLGPFNGLDKGEPVNEADAAALEHDKAYDRQLDSGDNPYLKYNHADAEFQERLKEDTSFGGNLGRAVFQAKKRVLEPLGLVEEPVKTAPGKKRPVEHSPAEPDSSSGTGKSGNQPARKRLNFGQTGDSDSVPDPQPLGQPPAAPSGLGTNTMATGSGAPMADNNEGADGVGNSSGNWHCDSTWMGDRVITTSTRTWALPTYNNHLYKQISSQSGASNDNHYFGYSTPWGYFDFNRFHCHFSPRDWQRLINNNWGFRPKRLNFKLFNIQVKEVTQNDGTTTIANNLTSTVQVFTDSEYQLPYVLGSAHQGCLPPFPADVFMVPQYGYLTLNNGSQAVGRSSFYCLEYFPSQMLRTGNNFTFSYTFEDVPFHSSYAHSQSLDRLMNPLIDQYLYYLSRTNTPSGTTTQSRLQFSQAGASDIRDQSRNWLPGPCYRQQRVSKTSADNNNSEYSWTGATKYHLNGRDSLVNPGPAMASHKDDEEKFFPQSGVLIFGKQGPEKTNVDIEKVMITDEEEIRTTNPVATEQYGSVSTNLQSGNTQAATADVNTQGVLPGMVWQDRDVYLQGPIWAKIPHTDGHFHPSPLMGGFGLKHPPPQILIKNTPVPANPSTTFSAAKFASFITQYSTGQVSVEIEWELQKENSKRWNPEIQYTSNYNKSVNVDFTVDTNGVYSEPRPIGTRYLTRNL

SEQ ID NO: 231 - protein, 735 aa, Adeno-associated virus; identical to SEQ ID NO: 230

SEQ ID NO: 232 - DNA, 2211 bp, Adeno-associated virus
atggctgccgatggttatcttccagattggctcgaggacactctctctgaaggaataagacagtggtggaagctcaaacctggcccaccaccaccaaagcccgcagagcggcataaggacgacagcaggggtcttgtgcttcctgggtacaagtacctcggacccttcaacggactcgacaagggggagccggtcaacgaggcagacgccgcggccctcgagcacgacaaggcctacgaccggcagctcgacagcggagacaacccgtacctcaagtacaaccacgccgacgcagagtttcaggagcgccttaaagaagatacgtcttttgggggcaacctcggacgagcagtcttccaggcgaaaaagagggttcttgaacctctgcggcctggtttgaggaaacctgttaagacggctccgggaaaaaagaggccggtagagcactctcctgtggagccagactcctcctcgggaaccggaaaagcgggccagcagcctgcaagaaaaagattaaattttggtcagactggagacgcagactccgtacctgacccccagcctctcggacagccaccagcagccccctctggtctgggatctactacaatggctacaggcagtggcgcaccaatggcagacaataacgagggtgccgatggagtgggtaattcctcaggaaattggcattgcgattcccaatggctggacgacagagtcatcgccaccagcacccgaacctgggccctgcccacatacaacaaccacctctacaagcaaatctccagccaatcaggagcctgcaacgacaaccactactttggctacagcaccccctgggggtattttgacttcaacagattccactgccacttttcaccacgtgactggcaaagactcatcaacagcaactggggattccggcccaaaagactcaacttcaagctctttaatattcaagtcaaagaggtcacgcagaatgacggtacgacgacgattgccaataaccttaccagcacggttcaggtgtttactgactcggagtaccagctcccgtacgtcccgggctcggcgcatcaaggatgcctcccgccgtttccagcggacgtcttcatggtcccacagtatggatacctcaccctgaacaacgggagtcaggcggtaggacgctcttccttttactgcctggagtactttccttctcagatgctgcgtactggaaacaactttcagttcagctacacttttgaagacgtgcctttccacagcagctacgctcactgccagagtctggatcggctgatgaatcctctgatcgaccagtacctgtattatctgaacaagacacaaacaaatagtggaactcttcagcagtctcggctactgtttagccaagctggaccaaccaacatgtctcttcaagctaaaaactggctgcctggaccttgctacagacagcagcgtctgtcaaaacaggcaaacgacaataacaactgcaactttccctggactgcagctacaaagtatcatctaaatggccgggactcgttggttaatccaggaccagctatggccagtcacaaggatgacgaagaaaagtttttccccatgcatggaaccctgatatttggtaaacaaggaacaaatgccaacgacgcggatttggaaaatgtcatgattacagatgaagaagaaatcaggcccaccaatcccgtggctacggagcagtacgggactgtgtcaaataatttgcaaaactcaaacactggtccaactacaggaactgtcaatcaccaaggagcgttacctggtatggtgtggcaggatcgagacgtgtacctgcagggacccatttgggccaagattcctcacaccgatggacactttcatccttctccactgatgggaggttttggactcaaacacccgcctcctcagatcatgatcaaaagcactcccgttccagccaatcctcccacaaacttcagttctgccaagtttgcttcttccatcacacagtattccacgggacaggtcagcgtggagatcgagtgggagctgcagaaggagaacagcaaacgctggaatcccgaaattcagtacacttccaactacaacaagtctgttaatgtggactttactgtggacactaatggtgtgtattcagagcctcgccccattggcaccagatacctgactcgtaatctgtaa

SEQ ID NO: 233 - protein, 736 aa, Adeno-associated virus
MAADGYLPDWLEDTLSEGIRQWWKLKPGPPPPKPAERHKDDSRGLVLPGYKYLGPFNGLDKGEPVNEADAAALEHDKAYDRQLDSGDNPYLKYNHADAEFQERLKEDTSFGGNLGRAVFQAKKRVLEPLRPGLRKPVKTAPGKKRPVEHSPVEPDSSSGTGKAGQQPARKRLNFGQTGDADSVPDPQPLGQPPAAPSGLGSTTMATGSGAPMADNNEGADGVGNSSGNWHCDSQWLDDRVIATSTRTWALPTYNNHLYKQISSQSGACNDNHYFGYSTPWGYFDFNRFHCHFSPRDWQRLINSNWGFRPKRLNFKLFNIQVKEVTQNDGTTTIANNLTSTVQVFTDSEYQLPYVPGSAHQGCLPPFPADVFMVPQYGYLTLNNGSQAVGRSSFYCLEYFPSQMLRTGNNFQFSYTFEDVPFHSSYAHCQSLDRLMNPLIDQYLYYLNKTQTNSGTLQQSRLLFSQAGPTNMSLQAKNWLPGPCYRQQRLSKQANDNNNCNFPWTAATKYHLNGRDSLVNPGPAMASHKDDEEKFFPMHGTLIFGKQGTNANDADLENVMITDEEEIRPTNPVATEQYGTVSNNLQNSNTGPTTGTVNHQGALPGMVWQDRDVYLQGPIWAKIPHTDGHFHPSPLMGGFGLKHPPPQIMIKSTPVPANPPTNFSSAKFASSITQYSTGQVSVEIEWELQKENSKRWNPEIQYTSNYNKSVNVDFTVDTNGVYSEPRPIGTRYLTRNL

SEQ ID NO: 234 - DNA, 2208 bp, Adeno-associated virus
atggctgccgatggttatcttccagattggctcgaggacactctctctgaaggaataagacagtggtggaagctcaaacctggcccaccaccaccaaagcccgcagagcggcataaggacgacagcaggggtcttgtgcttcctgggtacaagtacctcggacccttcaacggactcgacaagggagagccggtcaacgaggcagacgccgcggccctcgagcacgacaaggcctacgaccggcagctcgacagcggagacaacccgtacctcaagtacaaccacgccgacgcggagtttcaggagcgccttaaagaggatacgtcttttgggggcaacctcggacgagcagtcttccaggcaaaaaagagggttctggaacctctgggcctggttgaggagcctgttaagacggctccgggaaaaaagaggccggtagagcactctcctgcagagccagattcctcctccggaactggaaagtcgggcaaccagcctgcaagaaagagattgaatttcggtcagactggagactcagactccgtacctgacccccagcctctcggacagccaccagcagccccctctggtctgggaactaatacgatggctacaggcagtggcgcaccaatggcagacaataacgagggcgccgacggagtgggtaattcctcgggaaattggcattgcgattccacatggatgggcgacagagtcatcaccaccagcacccgaacctgggccctgcccacctacaacaaccatctgtacaagcaaatatccagccagtctggagccagcaacgacaatcactactttggctacagcaccccctgggggtattttgacttcaacagattccactgccacttttcaccacgtgactggcaaagactcatcaacaacaactggggattccgacccaagagactcaacttcaagctctttaacattcaagtcaaagaggtcacgcagaatgacggtacgacgacgattgccaataaccttaccagcacggttcaggtgtttactgactcggagtaccagctcccgtacgtcctcggctcggcgcatcaaggatgcctcccgccgttcccagcagacgtcttcatggtgccacagtatggatacctcaccctgaacaacgggagtcaggcagtaggacgctcttcattttactgcctagagtactttccttctcagatgctgcgtaccggaaacagctttaccttcagctacacctttgaggacgttcctttccacagcagctacgctcacagccagagtttggaccgtctcatgaatcctctcatcgaccagtacctgtattacttgagcagaacaaacactccaagcggaaccaccacgcagtccaggcttcagttttctcaggccggagcgagtgacattcgggaccagtctaggaactggcttcctggaccctgttaccgtcagcagcgagtatcaaagacatctgcggataacaacaacagtgaatactcgtggactggagctaccaagtaccacctcaatggcagagactctctggtgaatccgggcccggccatggccagccacaaagacgatgaagaaaagttctttcctcagagcggggttcttatctttgggaagcaaggctcagagaaaacaaatgtggatattgaaaaggtcatgattacagacgaagaggaaatcaggaccaccaatcccgtggctacggagcagtatggttctgtatctaccaacctccagagcggcaacacacaagcagctaccgcagatgtcaacacacaaggcgttcttccaggcatggtctggcaagacagagacgtgtacctgcaggggcctatttgggcaaagattccacacacggacggacattttcacccctctcccctcatgggcggatttggacttaaacaccctcctccacagattctcatcaagaacaccccggtacctgcgaatccttcgaccaccttcagtgcggcaaagtttgcttccttcattacacagtactccacggggcaggtcagcgtggagatcgagtgggagctgcagaaggagaacagcaaacgctggaatcccgagatccagtacacttccaactacaacaagtctgttaatgtggactttactgtggacactaatggcgtgtattcagagcctcgccccattggcaccagatacctgactcgtaatctgtaa

SEQ ID NO: 235 - protein, 735 aa, Adeno-associated virus
MAADGYLPDWLEDTLSEGIRQWWKLKPGPPPPKPAERHKDDSRGLVLPGYKYLGPFNGLDKGEPVNEADAAALEHDKAYDRQLDSGDNPYLKYNHADAEFQERLKEDTSFGGNLGRAVFQAKKRVLEPLGLVEEPVKTAPGKKRPVEHSPAEPDSSSGTGKSGNQPARKRLNFGQTGDSDSVPDPQPLGQPPAAPSGLGTNTMATGSGAPMADNNEGADGVGNSSGNWHCDSTWMGDRVITTSTRTWALPTYNNHLYKQISSQSGASNDNHYFGYSTPWGYFDFNRFHCHFSPRDWQRLINNNWGFRPKRLNFKLFNIQVKEVTQNDGTTTIANNLTSTVQVFTDSEYQLPYVLGSAHQGCLPPFPADVFMVPQYGYLTLNNGSQAVGRSSFYCLEYFPSQMLRTGNSFTFSYTFEDVPFHSSYAHSQSLDRLMNPLIDQYLYYLSRTNTPSGTTTQSRLQFSQAGASDIRDQSRNWLPGPCYRQQRVSKTSADNNNSEYSWTGATKYHLNGRDSLVNPGPAMASHKDDEEKFFPQSGVLIFGKQGSEKTNVDIEKVMITDEEEIRTTNPVATEQYGSVSTNLQSGNTQAATADVNTQGVLPGMVWQDRDVYLQGPIWAKIPHTDGHFHPSPLMGGFGLKHPPPQILIKNTPVPANPSTTFSAAKFASFITQYSTGQVSVEIEWELQKENSKRWNPEIQYTSNYNKSVNVDFTVDTNGVYSEPRPIGTRYLTRNL

SEQ ID NO: 236 - DNA, 2211 bp, Adeno-associated virus; identical to SEQ ID NO: 126

SEQ ID NO: 237 - protein, 736 aa, Adeno-associated virus
MAADGYLPDWLEDTLSEGIRQWWKLKPGPPPPKPAERHKDDSRGLVLPGYKYLGPGNGLDKGEPVNAADAAALEHDKAYDQQLKAGDNPYLKYNHADAEFQERLKEDTSFGGNLGRAVFQAKKRLLEPLGLVEEAAKTAPGKKRPVEQSPQEPDSSAGIGKSGSQPAKKKLNFGQTGDTESVPDPQPIGEPPAAPSGVGSLTMASGGGAPVADNNEGADGVGSSSGNWHCDSQWLGDRVITTSTRTWALPTYNNHLYKQISNSTSGGSSNDNAYFGYSTPWGYFDFNRFHCHFSPRDWQRLINNNWGFRPKRLNFKLFNIQVKEVTDNNGVKTIANNLTSTVQVFTDSDYQLPYVLGSAHEGCLPPFPADVFMIPQYGYLTLNDGGQAVGRSSFYCLEYFPSQMLRTGNNFQFSYEFENVPFHSSYAHSQSLDRLMNPLIDQYLYYLSKTINGSGQNQQTLKFSVAGPSNMAVQGRNYIPGPSYRQQRVSTTVTQNNNSEFAWPGASSWALNGRNSLMNPGPAMASHKEGEDRFFPLSGSLIFGKQGTGRDNVDADKVMITNEEEIKTTNPVATESYGQVATNHQSAQAQAQTGWVQNQGILPGMVWQDRDVYLQGPIWAKIPHTDGNFHPSPLMGGFGMKHPPPQILIKNTPVPADPPTAFNKDKLNSFITQYSTGQVSVEIEWELQKENSKRWNPEIQYTSNYYKSNNVEFAVSTEGVYSEPRPIGTRYLTRNL

SEQ ID NO: 238 - DNA, 2211 bp, Adeno-associated virus
atggctgccgatggttatcttccagattggctcgaggacactctctctgaaggaataagacagtggtggaagctcaaacctggcccaccaccaccaaagcccgcagagcggcataaggacgacagcaggggtcttgtgcttcctgggtacaagtacctcggacccggcaacggactcgacaagggggagccggtcaacgcagcagacgcggcggccctcgagcacgacaaggcctacgaccagcagctcaaggccggagacaacccgtacctcaagtacaaccacgccgacgccgagttccaggagcggctcaaagaagatacgtcttttgggggcaacctcgggcgagcagtcttccaggccaaaaagaggcttcttgaacctcttggtctggttgaggaagcggctaagacggctcctggaaagaagaggcctgtagagcagtctcctcaggaaccggactcctccgcgggtattggcaaatcgggttcacagcccgctaaaaagaaactcaatttcggtcagactggcgacacagagtcagtccccgaccctcaaccaatcggagaacctcccgcagccccctcaggtgtgggatctcttacaatggcttcaggtggtggcgcaccagtggcagacaataacgaaggtgccgatggagtgggtagttcctcgggaaattggcattgcgattcccaatggctgggggacagagtcatcaccaccagcacccgaacctgggccctgcccacctacaacaatcacctctacaagcaaatctccaacagcacatctggaggatcttcaaatgacaacgcctacttcggctacagcaccccctgggggtattttgacttcaacagattccactgccacttctcaccacgtgactggcagcgactcatcaacaacaactggggattccggcctaagcgactcaacttcaagctcttcaacattcaggtcaaagaggttacggacaacaatggagtcaagaccatcgccaataaccttaccagcacggtccaggtcttcacggactcagactatcagctcccgtacgtgctcgggtcggctcacgagggctgcctcccgccgttcccagcggacgttttcatgattcctcagtacgggtatctgacgcttaatgatgggagccaggccgtgggtcgttcgtccttttactgcctggaatatttcccgtcgcaaatgctaagaacgggtaacaacttccagttcagctacgagtttgagaacgtacctttccatagcagctacgctcacagccaaagcctggaccgactaatgaatccactcatcgaccaatacttgtactatctctcaaagactattaacggttctggacagaatcaacaaacgctaaaattcagcgtggccggacccagcaacatggctgtccagggaagaaactacatacctggacccagctaccgacaacaacgtgtctcaaccactgtgactcaaaacaacaacagcgaatttgcttggcctggagcttcttcttgggctctcaatggacgtaatagcttgatgaatcctggacctgctatggccagccacaaagaaggagaggaccgtttctttcctttgtctggatctttaatttttggcaaacaaggaactggaagagacaacgtggatgcggacaaagtcatgataaccaacgaagaagaaattaaaactactaacccggtagcaacggagtcctatggacaagtggccacaaaccaccagagtgcccaagcacaggcgcagaccggctgggttcaaaaccaaggaatacttccgggtatggtttggcaggacagagatgtgtacctgcaaggacccatttgggccaaaattcctcacacggacggcaactttcacccttctccgctaatgggagggtttggaatgaagcacccgcctcctcagatcctcatcaaaaacacacctgtacctgcggatcctccaacggctttcaataaggacaagctgaactctttcatcacccagtattctactggccaagtcagcgtggagattgagtgggagctgcagaaggaaaacagcaagcgctggaacccggagatccagtacacttccaactattacaagtctaataatgttgaatttgctgttaatactgaaggtgtatatagtgaaccccgccccattggcaccagatacctgactcgtaatctgtaa

SEQ ID NO: 239 - protein, 736 aa, Adeno-associated virus
MAADGYLPDWLEDTLSEGIRQWWKLKPGPPPPKPAERHKDDSRGLVLPGYKYLGPGNGLDKGEPVNAADAAALEHDKAYDQQLKAGDNPYLKYNHADAEFQERLKEDTSFGGNLGRAVFQAKKRLLEPLGLVEEAAKTAPGKKRPVEQSPQEPDSSAGIGKSGSQPAKKKLNFGQTGDTESVPDPQPIGEPPAAPSGVGSLTMASGGGAPVADNNEGADGVGSSSGNWHCDSQWLGDRVITTSTRTWALPTYNNHLYKQISNSTSGGSSNDNAYFGYSTPWGYFDFNRFHCHFSPRDWQRLINNNWGFRPKRLNFKLFNIQVKEVTDNNGVKTIANNLTSTVQVFTDSDYQLPYVLGSAHEGCLPPFPADVFMIPQYGYLTLNDGSQAVGRSSFYCLEYFPSQMLRTGNNFQFSYEFENVPFHSSYAHSQSLDRLMNPLIDQYLYYLSKTINGSGQNQQTLKFSVAGPSNMAVQGRNYIPGPSYRQQRVSTTVTQNNNSEFAWPGASSWALNGRNSLMNPGPAMASHKEGEDRFFPLSGSLIFGKQGTGRDNVDADKVMITNEEEIKTTNPVATESYGQVATNHQSAQAQAQTGWVQNQGILPGMVWQDRDVYLQGPIWAKIPHTDGNFHPSPLMGGFGMKHPPPQILIKNTPVPADPPTAFNKDKLNSFITQYSTGQVSVEIEWELQKENSKRWNPEIQYTSNYYKSNNVEFAVNTEGVYSEPRPIGTRYLTRNL

SEQ ID NO: 240 - DNA, 2208 bp, Adeno-associated virus
atggctgccgatggttatcttccagattggctcgaggacactctctctgaaggaataagacagcggtggaagctcaaacctggcccaccaccaccagagcccgcagagcggcataaggacgacagcaggggtcttgtgcttcctgggtacaagtacctcggacccttcaacggactcgacaagggagagccggtcaacgaggcagacgccgcggccctcgagcacgacaaagcctacgaccggcagctcgacagcggagacaacccgtacctcaagtacaaccacgccgacgcggagtttcaggagcgccttaaagaagatacgtcttttgggggcaacctcggacgagcagtcttccaggcgaaaaagagggtacttgaacctctgggcctggttgaggaacctgttaagacggctccgggaaaaaagaggccggtagagcactctcctgtggagccagactcctcctcgggaaccggaaaggcgggccagcagcctgcaagaaaaagattgaattttggtcagactggagacgcagactcagtacctgacccccagcctctcggacagccaccagcagccccctctggtctgggaactaatacgatggctacaggcagtggcgcaccaatggcagacaataacgagggcgccgacggagtgggtaattcctcgggaaattggcattgcgattccacatggatgggcgacagagtcatcaccaccagcacccgaacctgggccctgcccacctacaacaaccacctctacaaacaaatttccagccaatcaggagcctcgaacgacaatcactactttggctacagcaccccttgggggtattttgacttcaacagattccactgccacttttcaccacgtgactggcaaagactcatcaacaacaactggggattccgacccaagagactcaacttcaagctctttaacattcaagtcaaagaggtcacgcagaatgacggtacgacgacgattgccaataaccttaccggcacggttcaggtgtttactgactcggagtaccagctcccgtacgtcctcggctcggcgcatcaaggatgcctcccgccgttcccagcagacgtcttcatggtgccacagtatggatacctcaccctgaacaacgggagtcaggcagtaggacgctcttcattttactgcctggagtactttccttctcagatgctgcgtaccggaaacaactttaccttcagctacacttttgaggacgttcctttccacagcagctacgctcacagccagagtctgggccgtctcatgaatcctctcatcgaccagtacctgtattacttgagcagaacaaacactccaagtggaaccaccacgcagtcaaggcttcagttttctcaggccggagcgagtgacattcgggaccagtctaggaactggcttcctggaccctgttaccgccagcagcgagtatcaaagacatctgcggataacaacaacagtgaatactcgtggactggagctaccaagtaccacctcaatggcagagactctctggtgaatccgggcccggccatggcaagccacaaggacgatgaagaaaagttttttcctcagagcggggttctcatctttgggaagcaaggctcagagaaaacaaatgtggacattgaaaaggtcatgattacagacgaagaggaaatcaggacaaccaatcccgtggctacggagcagtatggttctgtatctaccaacctccagagaggcaacagacaagcagctaccgcagatgtcaacacacaaggcgttcttccaggcatggtctggcaggacagagatgtgtaccttcaggggcccatctgggcaaagattccacacacggacggacattttcacccctctcccctcatgggtggattcggacttaaacaccctcctccacagattctcatcaagaacaccccggtacctgcgaatccttcgaccaccttcagtgcggcaaagtttgcttccttcatcacacagtactccacgggacaggtcagcgtggagatcgagtgggagctgcagaaggaaaacagcaaacgctggaatcccgaaattcagtacacttccaactacaacaagtctgttaatgtggactttactgtggacactaatggcgtgtattcagagcctcgccccattggcaccagatacctgactcgtaatctgtaa

SEQ ID NO: 241 - protein, 735 aa, Adeno-associated virus
MAADGYLPDWLEDTLSEGIRQRWKLKPGPPPPEPAERHKDDSRGLVLPGYKYLGPFNGLDKGEPVNEADAAALEHDKAYDRQLDSGDNPYLKYNHADAEFQERLKEDTSFGGNLGRAVFQAKKRVLEPLGLVEEPVKTAPGKKRPVEHSPVEPDSSSGTGKAGQQPARKRLNFGQTGDADSVPDPQPLGQPPAAPSGLGTNTMATGSGAPMADNNEGADGVGNSSGNWHCDSTWMGDRVITTSTRTWALPTYNNHLYKQISSQSGASNDNHYFGYSTPWGYFDFNRFHCHFSPRDWQRLINNNWGFRPKRLNFKLFNIQVKEVTQNDGTTTIANNLTGTVQVFTDSEYQLPYVLGSAHQGCLPPFPADVFMVPQYGYLTLNNGSQAVGRSSFYCLEYFPSQMLRTGNNFTFSYTFEDVPFHSSYAHSQSLGRLMNPLIDQYLYYLSRTNTPSGTTTQSRLQFSQAGASDIRDQSRNWLPGPCYRQQRVSKTSADNNNSEYSWTGATKYHLNGRDSLVNPGPAMASHKDDEEKFFPQSGVLIFGKQGSEKTNVDIEKVMITDEEEIRTTNPVATEQYGSVSTNLQRGNRQAATADVNTQGVLPGMVWQDRDVYLQGPIWAKIPHTDGHFHPSPLMGGFGLKHPPPQILIKNTPVPANPSTTFSAAKFASFITQYSTGQVSVEIEWELQKENSKRWNPEIQYTSNYNKSVNVDFTVDTNGVYSEPRPIGTRYLTRNL

SEQ ID NO: 242 - DNA, 2208 bp, Adeno-associated virus
atggctgccgatggttatcttccagattggctcgaggacactctctctgaaggaataagacagcggtggaagctcaaacctggcccaccaccaccagagcccgcagagcggcataaggacgacagcaggggtcttgtgcttcctgggtacaagtacctcggacccttcaacggactcgacaagggagagccggtcaacgaggcagacgccgcggccctcgagcacgacaaagcctacgaccggcagctcgacagcggagacaacccgtacctcaagtacaaccacgccgacgcggagtttcaggagcgccttaaagaagatacgtcctttgggggcaacctcggacgagcagtcttccaggcgaaaaagagggtacttgaacctctgggcctggttgaggaacctgttaagacggctccgggaaaaaagaggccggtagagcactctcctgtggagccagactcctcctcgggaaccggaaaggcgggccagcagcctgcaagaaaaagattgaattttggtcagactggagacgcagactcagtacctgacccccagcctctcggacagccaccagcagccccctctggtctgggaactaatacgatggctacaggcagtggcgcaccaatggcagacaataacgagggcgccgacggagtgggtaattcctcgggaaattggcattgcgattccacatggatgggcgacagagtcatcaccaccagcacccgaacctgggccctgcccacctacaacaaccacctctacaaacaaatttccagccaatcaggagcctcgaacgacaatcactactttggctacagcaccccttgggggtattttgacttcaacagattccactgccacttttcaccacgtgactggcaaagactcatcaacaacaactggggattccgacccaagagactcaacttcaagctctttaacattcaagtcaaagaggtcacgcagaatgacggtacgacgacgattgccaataaccttaccagcacggttcaggtgtttactgactcggagtaccagctcccgtacgtcctcggctcggcgcatcaaggatgcctcccgccgttcccagcagacgtcttcatggtgccacagtatggatacctcaccctgaacaacgagagtcaggcagtaggacgctcttcattttactgcctggagtactttccttctcagatgctgcgtaccggaaacaactttaccttcagctacacttttgaggacgttcctttccacagcagctacgctcacagccagagtctgggccgtctcatgaatcctctcatcgaccagtacctgtattacttgagcagaacaaacactccaagtggaaccaccacgcagtcaaggcttcagttttctcaggccggagcgagtgacattcgggaccagtctaggaactggcttcctggaccctgttaccgccagcagcgagtatcaaagacatctgcggataacaacaacagtgaatactcgtggactggagctaccaagtaccacctcaatggcagagactctctggtgaatccgggcccggccatggcaagccacaaggacgatgaagaaaagttttttcctcagagcggggttctcatctttgggaagcaaggctcagagaaaacaaatgtggacattgaaaaggtcatgattacagacgaagaggaaatcaggacaaccaatcccgtggctacggagcagtatggttctgtatctaccaacctccagagaggcaacagacaagcagctaccgcagatgtcaacacacaaggcgttcttccaggcatggtctggcaggacagagatgtgtaccttcaggggcccatctgggcaaagattccacacacggacggacattttcacccctctcccctcatgggtggattcggacttaaacaccctcctccacagattctcatcaagaacaccccggtacctgcgaatccttcgaccaccttcagtgcggcaaagtttgcttccttcatcacacagtactccacgggacaggtcagcgtggagatcgagtgggagctgcagaaggaaaacagcaaacgctggaatcccgaaattcagtacacttccaactacaacaagtctgttaatgtggactttactgtggacactaatggcgtgtattcagagcctcgccccattggcaccagatacctgactcgtaatctgtaa

SEQ ID NO: 243 - protein, 735 aa, Adeno-associated virus
MAADGYLPDWLEDTLSEGIRQRWKLKPGPPPPEPAERHKDDSRGLVLPGYKYLGPFNGLDKGEPVNEADAAALEHDKAYDRQLDSGDNPYLKYNHADAEFQERLKEDTSFGGNLGRAVFQAKKRVLEPLGLVEEPVKTAPGKKRPVEHSPVEPDSSSGTGKAGQQPARKRLNFGQTGDADSVPDPQPLGQPPAAPSGLGTNTMATGSGAPMADNNEGADGVGNSSGNWHCDSTWMGDRVITTSTRTWALPTYNNHLYKQISSQSGASNDNHYFGYSTPWGYFDFNRFHCHFSPRDWQRLINNNWGFRPKRLNFKLFNIQVKEVTQNDGTTTIANNLTSTVQVFTDSEYQLPYVLGSAHQGCLPPFPADVFMVPQYGYLTLNNESQAVGRSSFYCLEYFPSQMLRTGNNFTFSYTFEDVPFHSSYAHSQSLGRLMNPLIDQYLYYLSRTNTPSGTTTQSRLQFSQAGASDIRDQSRNWLPGPCYRQQRVSKTSADNNNSEYSWTGATKYHLNGRDSLVNPGPAMASHKDDEEKFFPQSGVLIFGKQGSEKTNVDIEKVMITDEEEIRTTNPVATEQYGSVSTNLQRGNRQAATADVNTQGVLPGMVWQDRDVYLQGPIWAKIPHTDGHFHPSPLMGGFGLKHPPPQILIKNTPVPANPSTTFSAAKFASFITQYSTGQVSVEIEWELQKENSKRWNPEIQYTSNYNKSVNVDFTVDTNGVYSEPRPIGTRYLTRNL

SEQ ID NO: 244 - DNA, 2208 bp, Adeno-associated virus
atggctgccgatggttatcttccagattggctcgaggacactctctctgaaggaataagacagcggtggaagctcaaacctggcccaccaccaccagagcccgcagagcggcataaggacgacagcaggggtcttgtgcttcctgggtacaagtacctcggacccttcaacggactcgacaagggagagccggtcaacgaggcagacgccgcggccctcgagcacgacaaagcctacgaccggcagctcgacagcggagacaacccgtacctcaagtacaaccacgccgacgcggagtttcaggagcgccttaaagaagatacgtcttttgggggcaacctcggacgagcagtcttccaggcgaaaaagagggtacttgaacctctgggcctggttgaggaacctgttaagacggctccgggaaaaaagaggccggtagagcactctcctgtggagccagactcctcctcgggaaccggaaaggcgggccagcagcctgcaagaaaaagattgaattttggtcagactggagacgcagactcagtacctgacccccagcctctcggacagccaccagcagccccctctggtctgggaactaatacgatggctacaggcagtggcgcaccaatggcagacaataacgagggcgccgacggagtgggtaattcctcgggaaattggcattgcgattccacatggatgggcgacagagtcatcaccaccagcacccgaacctgggccctgcccacctacaacaaccacctctacaaacaaatttccagccaatcaggagcctcgaacgacaatcactactttggctacagcaccccttgggggtattttgacttcaacagattccactgccacttttcaccacgtgactggcaaagactcatcaacaacaactggggattccgacccaagagactcaacttcaagctctttaacattcaagtcaaagaggtcacgcagaatgacggtacgacgacgattgccaataaccttaccagcacggttcaggtgtttactgactcggagtaccagctcccgtacgtcctcggctcggcgcatcaaggatgcctcccgccgttcccagcagacgtcttcatggtaccacagtatggatacctcaccctgaacaacgggagtcaggcagtaggacgctcttcattttactgcctggagtactttccttctcagatgctgcgtaccggaaacaactttaccttcagctacacttttgaggacgttcctttccacagcagctacgctcacagccagagtctgggccgtctcatgaatcctctcatcgaccagtacctgtattacttgagcagaacaaacactccaagtggaaccaccacgcagtcaaggcttcagttttctcaggccggagcgagtgacattcgggaccagtctaggaactggcttcctggaccctgttaccgccagcagcgagtatcaaagacatctgcggataacaacaacagtgaatactcgtggactggagctaccaagtaccacctcaatggcagagactctctggtgaatccgggcccggccatggcaagccacaaggacgatgaagaaaagttttttcctcagagcggggttctcatctttgggaagcaaggctcagagaaaacaaatgtggacattgaaaaggtcatgattacagacgaagaggaaatcaggacaaccaatcccgtggctacggagcagtatggttctgtatctaccaacctccagagaggcaacagacaagcagctaccgcagatgtcaacacacaaggcgttcttccaggcatggtctggcaggacagagatgtgtaccttcaggggcccatctgggcaaagattccacacacggacggacattttcacccctctcccctcatgggtggattcggacttaaacaccctcctccacagattctcatcaagaacaccccggtacctgcgaatccttcgaccaccttcagtgcggcaaagtttgcttccttcatcacacagtactccacgggacaggtcagcgtggagatcgagtgggagctgcagaaggaaaacagcaaacgctggaatcccgaaattcagtacacttccaactacaacaagtctgttaatgtggactttactgtggacactaatggcgtgtattcagagcctcgccccattggcaccagatacctgactcgtaatctgtaa

SEQ ID NO: 245 - protein, 735 aa, Adeno-associated virus
MAADGYLPDWLEDTLSEGIRQRWKLKPGPPPPEPAERHKDDSRGLVLPGYKYLGPFNGLDKGEPVNEADAAALEHDKAYDRQLDSGDNPYLKYNHADAEFQERLKEDTSFGGNLGRAVFQAKKRVLEPLGLVEEPVKTAPGKKRPVEHSPVEPDSSSGTGKAGQQPARKRLNFGQTGDADSVPDPQPLGQPPAAPSGLGTNTMATGSGAPMADNNEGADGVGNSSGNWHCDSTWMGDRVITTSTRTWALPTYNNHLYKQISSQSGASNDNHYFGYSTPWGYFDFNRFHCHFSPRDWQRLINNNWGFRPKRLNFKLFNIQVKEVTQNDGTTTIANNLTSTVQVFTDSEYQLPYVLGSAHQGCLPPFPADVFMVPQYGYLTLNNGSQAVGRSSFYCLEYFPSQMLRTGNNFTFSYTFEDVPFHSSYAHSQSLGRLMNPLIDQYLYYLSRTNTPSGTTTQSRLQFSQAGASDIRDQSRNWLPGPCYRQQRVSKTSADNNNSEYSWTGATKYHLNGRDSLVNPGPAMASHKDDEEKFFPQSGVLIFGKQGSEKTNVDIEKVMITDEEEIRTTNPVATEQYGSVSTNLQRGNRQAATADVNTQGVLPGMVWQDRDVYLQGPIWAKIPHTDGHFHPSPLMGGFGLKHPPPQILIKNTPVPANPSTTFSAAKFASFITQYSTGQVSVEIEWELQKENSKRWNPEIQYTSNYNKSVNVDFTVDTNGVYSEPRPIGTRYLTRNL

SEQ ID NO: 246 - DNA, 2208 bp, Adeno-associated virus
atggctgccgatggttatcttccagattggctcgaggacactctctctgaaggaataagacagcggtggaagctcaaacctggcccaccaccaccagagcccgcagagcggcataaggacgacagcaggggtcttgtgcttcctgggtacaagtacctcggacccttcaacggactcgacaagggagagccggtcaacgaggcagacgccgcggccctcgagcacgacaaagcctacgaccggcagctcgacagcggagacaacccgtacctcaagtacaaccacgccgacgcggagtttcaggagcgccttaaagaagatacgtcttttgggggcaacctcggacgagcagtcttccaggcgaaaaagagggtactcgaacctctgggcctggttgaggaacctgttaagacggctccgggaaaaaagaggccggtagagcactctcctgtggagccagactcctcctcgggaaccggaaaggcgggccagcagcctgcaagaaaaagattgaattttggtcagactggagacgcagactcagtacctgacccccagcctctcggacagccaccagcagccccctctggtctgggaactaatacgatggctacaggcagtggcgcaccaatggcagacaataacgagggcgccgacggagtgggtaattcctcgggaaattggcattgcgattccacatggatgggcgacagagtcatcaccaccagcacccgaacctgggccctgcccacctacaacaaccacctctacaaacaaatttccagccaatcaggagcctcgaacgacaatcactactttggctacagcaccccttgggggtattttgacttcaacagattccactgccacttttcaccacgtgactggcaaagactcatcaacaacaactggggattccgacccaagagactcaacttcaagctctttaacattcaagtcaaagaggtcacgcagaatgacggtacgacgacgattgccaataaccttaccagcacggttcaggtgtttactgactcggagtaccagctcccgtacgtcctcggctcggcgcatcaaggatgcctcccgccgttcccagcagacgtcttcatggtgccacagtatggatacctcaccctgaacaacgggagtcaggcagcaggacgctcttcattttactgcctggagtactttccttctcagatgctgcgtaccggaaacaactttaccttcagctacacttttgaggacgttcctttccacagcagctacgctcacagccagagtctgggccgtctcatgaatcctctcatcgaccagtacctgtattacttgagcagaacaaacactccaagtggaaccaccacgcagtcaaggcttcagttttctcaggccggagcgagtgacattcgggaccagtctaggaactggcttcctggaccctgttaccgccagcagcgagtatcaaagacatctgcggataacaacaacagtgaatactcgtggactggagctaccaagtaccacctcaatggcagagactctctggtgaatccgggcccggccatggcaagccacaaggacgatgaagaaaagttttttcctcagagcggggttctcatctttgggaagcaaggctcagagaaaacaaatgtggacattgaaaaggtcatgattacagacgaagaggaaatcaggacaaccaatcccgtggctacggagcagtatggttctgtatctaccaacctccagagaggcaacagacaagcagctaccgcagatgtcaacacacaaggcgttcttccaggcatggtctggcaggacagagatgtgtaccttcaggggcccatctgggcaaagattccacacacggacggacattttcacccctctcccctcatgggtggattcggacttaaacaccctcctccacagattctcatcaagaacaccccggtacctgcgaatccttcgaccaccttcagtgcggcaaagtttgcttccttcatcacacagtactccacgggacaggtcagcgtggagatcgagtgggagctgcagaaggaaaacagcaaacgctggaatcccgaaattcagtacacttccaactacaacaagtccgttaatgtggactttactgtggacactaatggcgtgtattcagagcctcgccccattggcaccagatacctgactcgtaatctgtaa

SEQ ID NO: 247 - protein, 735 aa, Adeno-associated virus
MAADGYLPDWLEDTLSEGIRQRWKLKPGPPPPEPAERHKDDSRGLVLPGYKYLGPFNGLDKGEPVNEADAAALEHDKAYDRQLDSGDNPYLKYNHADAEFQERLKEDTSFGGNLGRAVFQAKKRVLEPLGLVEEPVKTAPGKKRPVEHSPVEPDSSSGTGKAGQQPARKRLNFGQTGDADSVPDPQPLGQPPAAPSGLGTNTMATGSGAPMADNNEGADGVGNSSGNWHCDSTWMGDRVITTSTRTWALPTYNNHLYKQISSQSGASNDNHYFGYSTPWGYFDFNRFHCHFSPRDWQRLINNNWGFRPKRLNFKLFNIQVKEVTQNDGTTTIANNLTSTVQVFTDSEYQLPYVLGSAHQGCLPPFPADVFMVPQYGYLTLNNGSQAAGRSSFYCLEYFPSQMLRTGNNFTFSYTFEDVPFHSSYAHSQSLGRLMNPLIDQYLYYLSRTNTPSGTTTQSRLQFSQAGASDIRDQSRNWLPGPCYRQQRVSKTSADNNNSEYSWTGATKYHLNGRDSLVNPGPAMASHKDDEEKFFPQSGVLIFGKQGSEKTNVDIEKVMITDEEEIRTTNPVATEQYGSVSTNLQRGNRQAATADVNTQGVLPGMVWQDRDVYLQGPIWAKIPHTDGHFHPSPLMGGFGLKHPPPQILIKNTPVPANPSTTFSAAKFASFITQYSTGQVSVEIEWELQKENSKRWNPEIQYTSNYNKSVNVDFTVDTNGVYSEPRPIGTRYLTRNL

SEQ ID NO: 248 - protein, 738 aa, Adeno-associated virus; identical to SEQ ID NO: 90

SEQ ID NO: 249 - DNA, 2217 bp, Adeno-associated virus
atggctgctgacggttatcttccagattggctcgaggacaacctctctgagggcattcgcgagtggtgggacctgaaacctggagcccccaagcccaaggccaaccagcagaagcaggacgacggccggggtctggtgcttcctggctacaagtacctcggacccttcaacggactcgacaagggggagcccgtcaacgcggcggacgcagcggccctcgagcacgacaaggcctacgaccagcagctcaaagcgggtgacaatccgtacctgcggtataaccacgccgacgccgagtttcaggagcgtctgcaagaagatacgtcttttgggggcaacctcgggcgagcagtcttccaggccaagaagcgggttctcgaacctctcggtctggttgaggaagctgctaagacggctcctggaaagaagagaccggtagaaccgtcacctcagcgttcccccgactcctccacgggcatcggcaagaaaggccagcagcccgctaaaaagagactgaactttggtcagactggcgactcagagtcagtccccgaccctcaaccaatcggagaaccaccagcaggcccctctggtctgggatctggtacaatggctgcaggcggtggcgctccaatggcagacaataacgaaggcgccgacggagtgggtagttcctcaggaaattggcattgcgattccacatggctgggcgacagagtcatcaccaccagcacccgaacctgggccctgcccacctacaacaaccacctctacaagcaaatatccaatgggacatcgggaggaagcaccaacgacaacacctacttcggctacagcaccccctgggggtattttgacttcaacagattccactgccacttctcaccacgtgactggcagcgactcatcaacaacaactggggattccggccaaaaagactcagcttcaagctcttcaacatccaggtcaaggaggtcacgcagaatgaaggcaccaagaccatcgccaataaccttaccagcacgattcaggtatttacggactcggaataccagctgccgtacgtcctcggctccgcgcaccagggctgcctgcctccgttcccggcggacgtcttcatgattccccagtacggctaccttacactgaacaatggaagtcaagccgtaggccgttcctccttctactgcctggaatattttccatctcaaatgctgcgaactggaaacaattttgaattcagctacaccttcgaggacgtgcctttccacagcagctacgcacacagccagagcttggaccgactgatgaatcctctcatcgaccagtacctgtactacttatccagaactcagtccacaggaggaactcaaggtacccagcaattgttattttctcaagctgggcctgcaaacatgtcggctcaggctaagaactggctacctggaccttgctaccggcagcagcgagtctctacgacactgtcgcaaaacaacaacagcaactttgcttggactggtgccaccaaatatcacctgaacggaagagactctttggtaaatcccggtgtcgccatggcaacccacaaggacgacgaggaacgcttcttcccgtcgagtggagtcctgatgttcggaaaacagggtgctggaagagacaatgtggactacagcagcgttatgctaaccagcgaagaagaaattaaaaccactaaccccgtagccacagaacaatacggtgtggtggctgacaacttgcagcaaaccaatacagggcctattgtgggaaatgtcaacagccaaggagccttacctggcatggtctggcagaaccgagacgtgtacctgcagggtcccatctgggccaagattcctcacacggacggcaacttccacccttcaccgctaatgggaggatttggactgaagcacccacctcctcagatcctgatcaagaacacgccggtacctgcggatcctccaacaacgttcagccaggcgaaattggcttccttcattacgcagtacagcaccggacaggtcagcgtggaaatcgagtgggagctgcagaaggagaacagcaaacgctggaacccagagattcagtacacttcaaactactacaaatctacaaatgtggactttgctgtcaatacagagggaacttattctgagcctcgccccattggtactcgttacctcacccgtaatctgtaa

SEQ ID NO: 250 - protein, 738 aa, Adeno-associated virus
MAADGYLPDWLEDNLSEGIREWWDLKPGAPKPKANQQKQDDGRGLVLPGYKYLGPFNGLDKGEPVNAADAAALEHDKAYDQQLKAGDNPYLRYNHADAEFQERLQEDTSFGGNLGRAVFQAKKRVLEPLGLVEEAAKTAPGKKRPVEPSPQRSPDSSTGIGKKGQQPAKKRLNFGQTGDSESVPDPQPIGEPPAGPSGLGSGTMAAGGGAPMADNNEGADGVGSSSGNWHCDSTWLGDRVITTSTRTWALPTYNNHLYKQISNGTSGGSTNDNTYFGYSTPWGYFDFNRFHCHFSPRDWQRLINNNWGFRPKRLSFKLFNIQVKEVTQNEGTKTIANNLTSTIQVFTDSEYQLPYVLGSAHQGCLPPFPADVFMIPQYGYLTLNNGSQAVGRSSFYCLEYFPSQMLRTGNNFEFSYTFEDVPFHSSYAHSQSLDRLMNPLIDQYLYYLSRTQSTGGTQGTQQLLFSQAGPANMSAQAKNWLPGPCYRQQRVSTTLSQNNNSNFAWTGATKYHLNGRDSLVNPGVAMATHKDDEERFFPSSGVLMFGKQGAGRDNVDYSSVMLTSEEEIKTTNPVATEQYGVVADNLQQTNTGPIVGNVNSQGALPGMVWQNRDVYLQGPIWAKIPHTDGNCHPSPLMGGFGLKHPPPQILIKNTPVPADPPTTFSQAKLASFITQYSTGQVSVEIEWELQKENSKRWNPEIQYTSNYYKSTNVDFAVNTEGTYSEPRPIGTRYLTRNL

SEQ ID NO: 251 - protein, 738 aa, Adeno-associated virus
MAADGYLPDWLEDNLSEGIREWWDLKPGAPKPKANQQKQDDGRGLVLPGYKYLGPFNGLDKGEPVNAADAAALEHDKAYDQQLKAGDNPYLRYNHADAEFQERLQEDTSFGGNLGRAVFQAKKRVLEPLGLVEEGAKTAPGKKRPVEPSPQRSPDSSTGIGKKGQQPARKRLNFGRTGDSESVPDPQPIGEPPAAPSSVGSGTMAAGGGAPMADNNEGADGVGSSSGNWHCDSTWLGDRVITTSTRTWALPTYNNHLYKQISNGTSGGSTNDNTYFGYSTPWGYLDFNRFHCHFSPRDWQRLINNNWGFRPKRLSFKLFNIQVKEVTQNEGTKTIANNLASTIQVFTDSEYQPPYVLGSAHQGCLPPFPADVFMIPQYGYLTLNNGSQAVGRSSFYCLEYFPSQMLRTGNNFSFSYTFEDVPFHSSYAHSQSLDRLMNPLIDQYLYYLSRTQSTGGTAGTQQLLFSRAGPSNMSAQARNWLPGPCYRQQRVSTTLSQNNNSNFAWTGATKYHLNGRDSLVNPGVAMATNKDDEDRFFPSSGILMFGKQGAGKDNVDYSNVMLTSEEEIKTTNPVATEQYGVVADNLQQQNTAPTVGAVNSQGALPGMVWQNRDVYLQGPIWAKIPHTDGNFHPSPLMGGFGLKHPPPQILIKNTPVPADPPTAFNQAKLNSFIAQYSTGQVSVEIEWELQKENSKRWNPEIQYTSNYYKSTNADFAVNTEGVYSEPRPIGTRYLTRNL

SEQ ID NO: 252 - DNA, 2217 bp, Adeno-associated virus
atggctgccgatggttatcttccagattggctcgaggacaacctctctgagggcattcgcgagtggtgggacctgaaacctggagccccgaaacccaaagccaaccagcaaaagcaggacgacggccggggtctggtgcttcctggctacaagtacctcggacccttcaacggactcgacaagggggagcccgtcaacgcggcggacgcagcggccctcgagcacgacaaggcctacgaccagcagctcaaagcgggtgacaatccgtacctgcggtataatcacgccgacgccgagtttcaggagcgtctgcaagaagatacgtcttttgggggcaacctcgggcgagcagtcttccaggccaagaagcgggttctcgaacctctcggtctggttgaggaaggcgctaagacggctcctggaaagaagagaccggtagagccgtcaccacagcgttcccccgactcctccacgggcatcggcaagaaaggccagcagcccgccagaaagagactcaatttcggtcggactggcgactcagagtcagtccccgaccctcaacctatcggagaacctccagcagcgccctctagtgtgggatctggtacaatggctgcaggcggtggcgcaccaatggcagacaataacgaaggtgccgacggagtgggtagttcctcgggaaattggcattgcgattccacatggctgggcgacagagttatcaccaccagcacccgaacctgggccctgcccacctacaacaaccacctctacaagcaaatctccaacgggacctcgggaggcagcaccaacgacaacacctactttggctacagcaccccctgggggtatcttgactttaacagattccactgccacttctcaccacgtgactggcagcgactcatcaacaacaactggggattccggcccaagagactcagcttcaagctcttcaacatccaggtcaaagaggtcacgcagaatgaaggcaccaagaccatcgccaataacctcgccagcaccatccaggtgtttacggactcggaataccagccgccgtacgtcctcggctctgcccaccagggctgcctgcctccgttcccggcggacgtcttcatgattcctcagtacggctacctgactctcaacaacggtagtcaggccgtgggacgttcctccttctactgcctggagtacttcccctctcagatgctgagaacgggcaacaacttttccttcagctacactttcgaggacgtgcctttccacagcagctacgcgcacagccagagtttggacaggctgatgaatcctctcatcgaccagtacctgtactacctgtcaagaacccagtctacgggaggcacagcgggaacccagcagttgctgttttctcgggccgggcctagcaacatgtcggctcaggccagaaactggctgcctggaccctgctacagacagcagcgcgtctccacgacactgtcgcaaaacaacaacagcaactttgcctggactggtgccaccaagtatcatctgaacggcagagactctctggtgaatccgggcgtcgccatggcaaccaacaaggacgacgaggaccgcttcttcccatccagcggcatcctcatgtttggcaagcagggagctggaaaagacaacgtggactatagcaacgtgatgctaaccagcgaggaagaaatcaagaccaccaaccccgtggccacagaacagtatggcgtggtggctgataacctacagcagcaaaacaccgctcctactgtgggggccgtcaacagccagggagccttacctggcatggtctggcagaaccgggacgtgtacctgcagggtcctatttgggccaagattcctcacacagatggcaactttcacccgtctcctttaatgggcggctttggacttaaacatccgcctcctcagatcctcatcaaaaacactcctgttcctgcggatcctccaacagcgttcaaccaggccaagctgaattctttcatcgcgcagtacagcaccggacaagtcagcgtggagatcgagtgggagctgcagaaggagaacagcaagcgctggaacccagagattcagtatacttccaactactacaaatctacaaatgcggactttgctgttaatactgagggtgtttactctgagcctcgccccattggcactcgttacctcacccgtaatctgtaa

SEQ ID NO: 253 - DNA, 2208 bp, Adeno-associated virus
atggctgccgatggttatcttccagattggctcgaggacactctctctgaaggaataagacagtggtggaagctcaaacctggcccaccaccaccaaagcccgcagagcggcataaggacgacagcaggggtcttgtgcttcctgggtacaagtacctcggacccttcaacggactcgacaagggggagccggtcaacgaggcagacgccgcggccctcgagcacgacaaggcctacgaccggcagctcgacagcggagacaacccgtacctcaagtacaaccacgccgacgcagagtttcaggagcgccttaaagaagatacgtcttttgggggcaacctcggacgagcagtcttccaggcgaaaaagagggttcttgaacctctgggcctggttgaggagcctgttaagacggctccgggaaaaaagaggccggtagagcactctcctgtggagccagactcctcctcgggaaccggaaaagcgggccagcagcctgcaagaaaaagattaaattttggtcagactggagacgcagactccgtacctgacccccagcctctcggacagccaccagcagccccctctggtctgggatctactacaatggctacaggcagtggcgcaccaatggcagacaataacgagggtgccgatggagtgggtaattcctcaggaaattggcattgcgattcccaatggctgggcgacagagtcatcaccaccagcacccgaacctgggccctgcccacatacaacaaccacctctacaagcaaatctccagccaatcaggagccagcaacgacaaccactactttggctacagcaccccctgggggtattttgacttcaacagattccactgccacttttcaccacgtgactggcaaagactcgtcaacaacaaccggggattccggcccaaaagactcaacttcaagctctttaatattcaagtcaaagaggtcacgcagaatgacggtacgacgacgattgccaataaccttaccagcacggttcaggtgtttactgactcggagtaccagctcccgtacgtcctgggctcggcgcatcaaggatgcctcccgccgtttccagcggacgtcttcatggtcccacagtatggatacctcaccctgaacaacgggagtcaggcggtaggacgctcttccttttactgcctggagtactttccttctcagatgctgcgtactggaaacaactttcagttcagctacacttttgaagacgtgcctttccacagcagctacgctcacagccagagtctggatcggctgatgaatcctctgatcgaccagtacctgtattatctgaacaagacacaaacaaatagtggaactcttcagcagtctcggctactgtttagccaagctggaccaaccaacatgtctcttcaagctaaaaactggctgcctggaccttgctacagacagcagcgtctgtcaaaacaggcaaacgacaacaacaacagcaactttccctggactgcagctacaaagtatcatctaaatggccgggactcgttggttaatccaggaccagctatggccagtcacaaggatgacgaagaaaagtttttccccatgcatggaaccctgatatttggtaaacaaggaacaaatgccaacgacgcggatttggaaaatgtcatgattacagatgaagaagaaatcagggccaccaatcccgtggctacggagcagtacgggactgtgtcaaataatttgcaaaactcaaacactggtccaactactggaactgtcaatcaccaaggagcgttacctggtatggtgtggcaggatcgagacgtgtacctgcagggacccatttgggccaagattcctcacaccgatggacactttcatccttctccactgatgggaggttttggactcaaacacccgcctcctcagatcatgatcaaaaacactcccgttccagccaatcctcccacaaacttcagttctgccaagtttgcttctttcatcacacagtattccacgggacaggtcagcgtggagatcgagtgggagctgcagaaggagaacagcaaacgctggaatcccgaaattcagtacacttccaactacaacaagtctgttaatgtggactttactgtggacactaatggtgtgtattcagagcctcgccccattggcaccagatacctgactcgtaatctgtaa

SEQ ID NO: 254 - protein, 735 aa, Adeno-associated virus
MAADGYLPDWLEDTLSEGIRQWWKLKPGPPPPKPAERHKDDSRGLVLPGYKYLGPFNGLDKGEPVNEADAAALEHDKAYDRQLDSGDNPYLKYNHADAEFQERLKEDTSFGGNLGRAVFQAKKRVLEPLGLVEEPVKTAPGKKRPVEHSPVEPDSSSGTGKAGQQPARKRLNFGQTGDADSVPDPQPLGQPPAAPSGLGSTTMATGSGAPMADNNEGADGVGNSSGNWHCDSQWLGDRVITTSTRTWALPTYNNHLYKQISSQSGASNDNHYFGYSTPWGYFDFNRFHCHFSPRDWQRLVNNNRGFRPKRLNFKLFNIQVKEVTQNDGTTTIANNLTSTVQVFTDSEYQLPYVLGSAHQGCLPPFPADVFMVPQYGYLTLNNGSQAVGRSSFYCLEYFPSQMLRTGNNFQFSYTFEDVPFHSSYAHSQSLDRLMNPLIDQYLYYLNKTQTNSGTLQQSRLLFSQAGPTNMSLQAKNWLPGPCYRQQRLSKQANDNNNSNFPWTAATKYHLNGRDSLVNPGPAMASHKDDEEKFFPMHGTLIFGKQGTNANDADLENVMITDEEEIRATNPVATEQYGTVSNNLQNSNTGPTTGTVNHQGALPGMVWQDRDVYLQGPIWAKIPHTDGHFHPSPLMGGFGLKHPPPQIMIKNTPVPANPPTNFSSAKFASFITQYSTGQVSVEIEWELQKENSKRWNPEIQYTSNYNKSVNVDFTVDTNGVYSEPRPIGTRYLTRNL

SEQ ID NO: 255 - protein, 738 aa, Adeno-associated virus
MAADGYLPDWLEDNLSEGIREWWDLKPGAPKPKANQQKQDDGRGLVLPGYKYLGPFNGLDKGEPVNAADAAALEHDKAYDQQLKAGDNPYLRYNHADAEFQERLQEDTSFGGNLGRAVFQAKKRVLEPLGLVEEAAKTAPGKKRPVEPSPQRSPDSSTGIGKKGQQPAKKRLSFGQTGDSESVPDPQPIGEPPAGPSGLGSGTMAAGGGAPMADNNEGADGVGSSSGNWHCDSTWLGDRVITTSTRTWALPTYNNHLYKQISNGTSGGSTNDNTYFGYSTPWGYFDFNRFHCHFSPRDWQRLINNNWGFRPKRLSFKLFNIQVKEVTQNEGTKTIANNLTSTIQVFTDSEYQLPYVLGSAHQGCLPPFPADVFMIPQYGYLTLNNGSQAVGRSSFYCLEYFPSQMLRTGNNSEFSYTFEDVPFHSSYAHSQSLDRLMNPLIDQYLYYLSRTQSTGGTQGTQQLLFSQAGPANMSAQAKNWLPGPCYRQQRVSTTLSQNNNSNFAWTGATKYHLNGRDSLVNPGVAMATHKDDEERFFPSSGVLMFGKQGAGRDNVDYSSVMLTSEEEIKTTNPVATEQYGVVADNLQQTNTGPIVGNVNSQGALPGMVWQNRDVYLQGPIWAKIPHTDGNFHPSPLMGGFGLKHPPPQILIKNTPVPADPPTTFSQAKLASFITQYSTGQVSVEIEWELQKENSKRWNPEIQYTSNYYKSTNVDFAVNTEGTYSEPRPIGTRYLTRNL

SEQ ID NO: 256 - DNA, 2217 bp, Adeno-associated virus
atggctgctgacggttatcttccagattggctcgaggacaacctctctgagggcattcgcgagtggtgggacctgaaacctggagcccccaagcccaaggccaaccagcagaagcaggacgacggccggggtctggtgcttcctggctacaagtacctcggacccttcaacggactcgacaagggggagcccgtcaacgcggcggacgcagcggccctcgagcacgacaaggcctacgaccagcagctcaaagcgggtgacaatccgtacctgcggtataaccacgccgacgccgagtttcaggagcgtctgcaagaagatacgtcttttgggggcaacctcgggcgagcagtcttccaggccaagaagcgggttctcgaacctctcggtctggttgaggaagctgctaagacggctcctggaaagaagagaccggtagaaccgtcacctcagcgttcccccgactcctccacgggcatcggcaagaaaggccagcagcccgctaaaaagagactgagctttggtcagactggcgactcagagtcagtccccgaccctcaaccaatcggagaaccaccagcaggcccctctggtctgggatctggtacaatggctgcaggcggtggcgctccaatggcagacaataacgaaggcgccgacggagtgggtagttcctcaggaaattggcattgcgattccacatggctgggcgacagagtcatcaccaccagcacccgaacctgggccctgcccacctacaacaaccacctctacaagcaaatatccaatgggacatcgggaggaagcaccaacgacaacacctacttcggctacagcaccccctgggggtattttgacttcaacagattccactgccacttctcaccacgtgactggcagcgactcatcaacaacaactggggattccggccaaaaagactcagcttcaagctcttcaacatccaggtcaaggaggtcacgcagaatgaaggcaccaagaccatcgccaataaccttaccagcacgattcaggtatttacggactcggaataccagctgccgtacgtcctcggctccgcgcaccagggctgcctgcctccgttcccggcggacgtcttcatgattccccagtacggctaccttacactgaacaatggaagtcaagccgtaggccgttcctccttctactgcctggaatattttccatctcaaatgctgcgaactggaaacaattctgaattcagctacaccttcgaggacgtgcctttccacagcagctacgcacacagccagagcttggaccgactgatgaatcctctcatcgaccagtacctgtactacttatccagaactcagtccacaggaggaactcaaggtacccagcaattgttattttctcaagctgggcctgcaaacatgtcggctcaggctaagaactggctacctggaccttgctaccggcagcagcgagtctctacgacactgtcgcaaaacaacaacagcaactttgcttggactggtgccaccaaatatcacctgaacggaagagactctttggtaaatcccggtgtcgccatggcaacccacaaggacgacgaggaacgcttcttcccgtcgagtggagtcctgatgtttggaaaacagggtgctggaagagacaatgtggactacagcagcgttatgctaaccagcgaagaagaaattaaaaccactaaccctgtagccacagaacaatacggtgtggtggctgacaacttgcagcaaaccaatacagggcctattgtgggaaatgtcaacagccaaggagccttacctggcatggtctggcagaaccgagacgtgtacctgcagggtcccatctgggccaagattcctcacacggacggcaacttccacccttcaccgctaatgggaggatttggactgaagcacccacctcctcagatcctgatcaagaacacgccggtacctgcggatcctccaacaacgttcagccaggcgaaattggcttccttcattacgcagtacagcaccggacaggtcagcgtggaaatcgagtgggagctgcagaaggagaacagcaaacgctggaacccagagattcagtacacttcaaactactacaaatctacaaatgtggactttgctgtcaatacagagggaacttattctgagcctcgccccattggtactcgttacctcacccgtaatctgtaa

SEQ ID NO: 257 - protein, 738 aa, Adeno-associated virus
MAADGYLPDWLEDNLSEGIREWWDLKPGAPKPKANQQKQDDGRGLVLPGYKYLGPFNGLDKGEPVNAADAAALEHDKAYDQQLKAGDNPYLRYNHADAEFQERLQEDTSFGGNLGRAVFQAKKRVLEPLGPVEEAAKTAPGKKRPVEPPPQRSPDSSTGIGKKGQQPAKKRLNFGQTGDSESVPDPQPIGEPPAGPSGLGSGTMAAGGGAPMADNNEGADGVGSSSGNWHCDSTWLGDRVITTSTRTWALPTYNNHLYKQISNGTSGGSTNDNTYFGYSTPWGYFDFNRFHCHFSPRDWQRLINNNWGFRPKRLSFKLFNIQVKEVTQNEGTKTVANNLTSTIQVFTDSEYQLPYVLGSAHQGCLPPFPADVFMIPQYGYLTLNNGSQAVGRSSFYCLEYFPSQMLRTGNNFEFSYTFEDVPFHSSYAHSQSLDRLMNPLIDQYLYYLSRTQSTGGTQGTQQLLFSQAGPANMSAQAKNWLPGPCYRQQRVSTTLSQNNNSNFAWTGATKYHLNGRDSLVNPGVAMATHKDDEERFFPSSGVLMFGKQGAGRDNVDYSSVMLTSEEEIKTTNPVATEQYGVVADNLQQTNTGPIVGNVNSQGALPGMVWQNRDVYLQGPIWAKIPHTDGNFHPSPLMGGFGLKHPPPQILIKNTPVPADPPTTFSQAKLASFITQYSTGQVSVEIEWELQKENSKRWNPEIQYTSNYYKSTNVDFAVNTEGTYSEPRPIGTRYLTRNL

SEQ ID NO: 258 - DNA, 2217 bp, Adeno-associated virus
atggctgctgacggttatcttccagattggctcgaggacaacctctctgagggcattcgcgagtggtgggacctgaaacctggagcccccaagcccaaggccaaccagcagaagcaggacgacggccggggtctggtgcttcctggctacaagtacctcggacccttcaacggactcgacaagggggagcccgtcaacgcggcggacgcagcggccctcgagcacgacaaggcctacgaccagcagctcaaagcgggtgacaatccgtacctgcggtataaccacgccgacgccgagtttcaggagcgtctacaagaagatacgtcttttgggggcaacctcgggcgagcagtcttccaggccaagaagcgggttctcgaacctctcggtccggttgaggaagctgctaagacggctcctggaaagaagagaccggtagaaccgccacctcagcgttcccccgactcctccacgggcatcggcaagaaaggccagcagcccgctaaaaagagactgaactttggtcagactggcgactcagagtcagtccccgaccctcaaccaatcggagaaccaccagcaggcccctctggtctgggatctggtacaatggctgcaggcggtggcgctccaatggcagacaataacgaaggcgccgacggagtgggtagttcctcaggaaattggcattgcgattccacatggctgggcgacagagtcatcaccaccagcacccgaacctgggccctgcccacctacaacaaccacctctacaagcaaatatccaatgggacatcgggaggaagcaccaacgacaacacctacttcggctacagcaccccctgggggtattttgacttcaacagattccactgccacttctcaccacgtgactggcagcgactcatcaacaacaactggggattccggccaaaaagactcagcttcaagctcttcaacatccaggtcaaggaggtcacgcagaatgaaggcaccaagaccgtcgccaataaccttaccagcacgattcaggtatttacggactcggaataccagctgccgtacgtcctcggctccgcgcaccagggctgcctgcctccgttcccggcggacgtcttcatgattccccagtacggctaccttacactgaacaatggaagtcaagccgtaggccgttcctccttctactgcctggaatattttccatctcaaatgctgcgaactggaaacaattttgaattcagctacaccttcgaggacgtgcctttccacagcagctacgcacacagccagagcttggaccgactgatgaatcctctcatcgaccagtacctgtactacttatccagaactcagtccacaggaggaactcaaggtacccagcaattgttattttctcaagctgggcctgcaaacatgtcggctcaggctaagaactggctacctggaccttgctaccggcagcagcgagtctctacgacactgtcgcaaaacaacaacagcaactttgcttggactggtgccaccaaatatcacctgaacggaagagactctttggtaaatcccggtgtcgccatggcaacccacaaggacgacgaggaacgcttcttcccgtcgagtggagtcctgatgtttggaaaacagggtgctggaagagacaatgtggactacagcagcgttatgctaaccagcgaagaagaaattaaaaccactaaccctgtagccacagaacaatacggtgtggtggctgacaacttgcagcaaaccaatacagggcctattgtgggaaatgtcaacagccaaggagccttacctggcatggtctggcagaaccgagacgtgtacctgcagggtcccatctgggccaagattcctcacacggacggcaacttccacccttcaccgctaatgggaggatttggactgaagcacccacctcctcagatcctgatcaagaacacgccggtacctgcggatcctccaacaacgttcagccaggcgaaattggcttccttcattacgcagtacagcaccggacaggtcagcgtggaaatcgagtgggagctgcagaaggagaacagcaaacgttggaacccagagattcagtacacttcaaactactacaaatctacaaatgtggactttgctgtcaatacagagggaacttattctgagcctcgccccattggtactcgttacctcacccgtaatctgtaa

SEQ ID NO: 259 - protein, 738 aa, Adeno-associated virus
MAADGYLPDWLEDNLSEGIREWWDLKPGAPKPKANQQKQDDGRGLVLPGYKYLGPFNGLDKGEPVNAADAAALEHDKAYDQQLKAGDNPYLRYNHADAEFQERLQEDTSFGGNLGRAVFQAKKRVLEPLGLVEEAAKTAPGKKRPVEPSPQRSPDSSTGIGKKGQQPAKKRLNFGQTGDSESVPDPQPIGEPPAGPSGLGSGTMAAGGGAPMADNNEGADGVGSSSGNWHCDSTWLGDRVITTSTRTWALPTYNNHLYKQISNGTSGGSTNDNTYFGYSTPWGYFDFNRFHCHFSPRDWQRLINNNWGFRPKRLSFKLFNIQVKEVTQNEGTKTIANNLTSTIQVFTDSEYQLPYVLGSAHQGCLPPFPADVFMIPQYGYLTLNNGSQAVGRSSFYCLEYFPSQMLRTGNNFEFSYTFEDVPFHSSYAHSQSLDRLMNPLIDQYLYYLSRTQSTGGTQGTQQLLFSQAGPANMSAQAKNWLPGPCYRQQRVSTTLSQSNNSNFAWTGATKYHLNGRDSLVNPGVAMATHKDDEERFFPSSGVLMFGKQGAGRDNVDYSSVMLTSEEEIKTTNPVATEQYGVVADNLQQTNTGPIVGNVNSQGALPGMVWQNRDVYLQGPIWAKIPHTDGNFHPSPLMGGLGLKHPPPQILIKNTPVPADPPTTFSQAKLASFITQYSTGQVSVEIEWELQKENSKRWNPEIQYTSNYYKSTNVDFAVNTEGTYSEPRPIGTRYLTRNL

SEQ ID NO: 260 - DNA, 2217 bp, Adeno-associated virus
atggctgctgacggttatcttccagattggctcgaggacaacctctctgagggcattcgcgagtggtgggacctgaaacctggagcccccaagcccaaggccaaccagcagaagcaggacgacggccggggtctggtgcttcctggctacaagtacctcggacccttcaacggactcgacaagggggagcccgtcaacgcggcggacgcagcggccctcgagcacgacaaggcctacgaccagcagctcaaagcgggtgacaatccgtacctgcggtataaccacgccgacgccgagtttcaggagcgtctgcaagaagatacgtcttttgggggcaacctcgggcgagcagtcttccaggccaagaagcgggttctcgaacctctcggtctggttgaggaagcggctaagacggctcctggaaagaagagaccggtagaaccgtcacctcagcgttcccccgactcctccacgggcatcggcaagaaaggccagcagcccgctaaaaagagactgaactttggtcagactggcgactcagagtcagtccccgaccctcaaccaatcggagaaccaccagcaggcccctctggtctgggatctggtacaatggctgcaggcggtggcgctccaatggcagacaataacgaaggcgccgacggagtgggtagttcctcaggaaattggcattgcgattccacatggctgggcgacagagtcatcaccaccagcacccgaacctgggccctgcccacctacaacaaccacctctacaagcaaatatccaatgggacatcgggaggaagcaccaacgacaacacctacttcggctacagcaccccctgggggtattttgacttcaacagattccactgccacttctcaccacgtgactggcagcgactcatcaacaacaactggggattccggccaaaaagactcagcttcaagctcttcaacatccaggtcaaggaggtcacgcagaatgaaggcaccaagaccatcgccaataaccttaccagcacgattcaggtatttacggactcggaataccagctgccgtacgtcctcggctccgcgcaccagggctgcctgcctccgttcccggcggacgtcttcatgattccccagtacggctaccttacactgaacaatggaagtcaagccgtaggccgttcctccttctactgcctggaatattttccatctcaaatgctgcgaactggaaacaattttgaattcagctacaccttcgaggacgtgcctttccacagcagctacgcacacagccagagcttggaccgactgatgaatcctctcatcgaccagtacctgtactacttatccagaactcagtccacaggaggaactcaaggtacccagcaattgttattttctcaagctgggcctgcaaacatgtcggctcaggctaagaactggctacctggaccttgctaccggcagcagcgagtctctacgacactgtcgcaaagcaacaacagcaactttgcttggactggtgccaccaaatatcacctgaacggaagagactctttggtaaatcccggtgtcgccatggcaacccacaaggacgacgaggaacgcttcttcccgtcgagtggagtcctgatgtttggaaaacagggtgctggaagagacaatgtggactacagcagcgttatgctaaccagcgaagaagaaattaaaaccactaaccctgtagccacagaacaatacggtgtggtggctgacaacttgcagcaaaccaatacagggcctattgtgggaaatgtcaacagccaaggagccttacctggcatggtctggcagaaccgagacgtgtacctgcagggtcccatctgggccaagattcctcacacggacggcaacttccacccttcaccgctaatgggaggacttggactgaagcacccacctcctcagatcctgatcaagaacacgccggtacctgcggatcctccaacaacgttcagccaggcgaaattggcttccttcattacgcagtacagcaccggacaggtcagcgtggaaatcgagtgggagctgcagaaggagaacagcaaacgctggaacccagagattcagtacacttcaaactactacaaatctacaaatgtggactttgctgtcaatacagagggaacttattctgagcctcgccccattggtactcgttacctcacccgtaatctgtaa

SEQ ID NO: 261 - protein, 737 aa, Adeno-associated virus
MAADGYLPDWLEDNLSEGIREWWDLKPGAPKPKANQQKQDDGRGLVLPGYKYLGPFNGLDKGEPVNAADAAALEHDKAYDQQLKAGDNPYPRYNHADAEFQERLQEDTPFGGNLGRAVFQAKKRVLEPLGLVEEAAKTAPGKKRPVEPSPQRSPDSSTGIGKKGQQPAKKRLNFGQTGDSESVPDPQPIGEPPAGPSGLGSGTMAAGGGAPMADNNEGADGVGNASGNWHCDSTWLGDRVITTSTRTWALPTYNNHLYKQISSASTGASNDNHYFGYSTPWGYFDFNRFHCHFSPRDWQRLINNNWGFRPKRLNFKLFNIQVKEVTTNDGVTTIANNLTSTVQVFSDSEYQLPYVLGSAHQGCLPPFPADVFMIPQYGYLTLNNGSQAVGRSSFYCLEYFPSQMLRTGNNFTFSYTFEEVPLHSSYAHSQSLDRLMNPLIVQYLYYLNRTQNQSGSAQNKDLLFSRGSPAGMSVQPKNWLPGPCYRQQRVSKTKTDNNNSNFTWTGASKYNLNGRESIINPGTAMASHKDDEDKFFPMSGVMIFGKESAGASNTALDNVMITDEEEIKATNPVATERFGTVAVNFQSSSTDPATGDVHAMGALPGMVWQDRDVYLQGPIWAKIPHTDGHFHPSPLMGGFGLKNPPPQILIKNTPVPANPPAEFSATKFASFITQYSTGQVSVEIEWELQKENSKRWNPEVQYTSNYAKSASVDFTVDNNGLYTEPRPIGTRYLTRPL

SEQ ID NO: 262 - protein, 737 aa, Adeno-associated virus
MAADGYLPDWLEDNLSEGIREWWDLKPGAPKPKANQQKQDDGRGLVLPGYKYLGPFNGLDKGEPVNAADAAALEHDKAYDQQLKAGDNPYPRYNHADAEFQERLQEDTSFGGNLGRAVFQAKKRVLEPLGLVEEAAKTAPGKKRPVEPSPQRSPDSSTGIGKKGQQPAKKRLNFGQTGDSESVPDPQPIGEPPAGPSGLGSGTMAAGGGAPMADNNEGADGVGNASGNWHCDSTWLGDRVITTSTRTWALPTYNNHLYKQISSASTGASNDNHYFGYSTPWGYFDFNRFHCHFSPRDWQRLINNNWGFRPKRLNFKLFNIQVKEVTTNDGVTTIANNLTSTVQVFSDSEYQLPYVLGSAHQGCLPPFPADVFMIPQYGYLTLNNGSQAVGRSSFYCLEYFPSQMLRTGNNFTFSYTFEEVPLHSSYAHSQSLDRLMNPLIDQYLYYLNRTQNQSGSAQNKDLLFSRGSPAGMSVQPKNWLPGPCYRQQRVSKTKTDNNNSNFTWTGASKYNLNGRESIINPGTAMASHKDDEDKFFPMSGVMIFGKESAGASNTALDNVMITDEEEIKATNPVATERFGTVAVNFQSSSTDPATGDVHAMGALPGMVWQDRDVYLQGPIWAKIPHTDGHFHPSPLMGGFGLKNPPPQILIKNTPVPANPPAEFSATKFASFITQYSTGQVSVEIEWELQKENSKRWNPEVQYTSNYAKSASVDFTVDNNGLYTEPRPIGTRYLTRPL

SEQ ID NO: 263 - DNA, 2214 bp, Adeno-associated virus
atggctgctgacggttatcttccagattggctcgaggacaacctctctgagggcattcgcgagtggtgggacctgaaacctggagcccccaagcccaaggccaaccagcagaagcaggacgacggccggggtctggtgcttcctggctacaagtacctcggacccttcaacggactcgacaagggggagcccgtcaacgcggcggacgcagcggccctcgagcacgacaaggcctacgaccagcagctcaaagcgggtgacaatccgtacccgcggtataaccacgccgacgccgagtttcaggagcgtctgcaagaagatacgccttttgggggcaacctcgggcgagcagtcttccaggccaagaagcgggttctcgaacctctcggtctggttgaggaagctgctaagacggctcctggaaagaagagaccggtagaaccgtcacctcagcgttcccccgactcctccacgggcatcggcaagaaaggccagcagcccgctaaaaagagactgaactttggtcagactggcgactcagagtcagtccccgaccctcaaccaatcggagaaccaccagcaggcccctctggtctgggatctggtacaatggctgcaggcggtggcgctccaatggcagacaataacgaaggcgccgacggagtgggtaatgcctcaggaaattggcattgcgattccacatggctgggcgacagagtcatcaccaccagcacccgcacctgggccttgcccacctacaataaccacctctacaagcaaatctccagtgcttcaacgggggccagcaacgacaaccactacttcggctacagcaccccctgggggtattttgatttcaacagattccactgccacttttcaccacgtgactggcagcgactcatcaacaacaattggggattccggcccaagagactcaacttcaaactcttcaacatccaagtcaaggaggtcacgacgaatgatggcgtcacaaccatcgctaataaccttaccagcacggttcaagtcttctcggactcggagtaccagcttccgtacgtcctcggctctgcgcaccagggctgcctccctccgttcccggcggacgtgttcatgattccgcaatacggctacctgacgctcaacaatggcagccaagccgtgggacgttcatccttttactgcctggaatatttcccttctcagatgctgagaacgggcaacaactttaccttcagctacacctttgaggaagtgcctctccacagcagctacgcgcacagccagagcctggaccggctgatgaatcctctcatcgtccaatacctgtattacctgaacagaactcaaaatcagtccggaagtgcccaaaacaaggacttgctgttcagccgtgggtctccagctggcatgtctgttcagcccaaaaactggctacctggaccctgttatcggcagcagcgcgtttctaaaacaaaaacagacaacaacaacagcaattttacctggactggtgcttcaaaatataacctcaatgggcgtgaatccatcatcaaccctggcactgctatggcctcacacaaagacgacgaagacaagttctttcccatgagcggtgtcatgatttttggaaaagagagcgccggagcttcaaacactgcattggacaatgtcatgattacagacgaagaggaaattaaagccactaaccctgtggccaccgaaagatttgggaccgtggcagtcaatttccagagcagcagcacagaccctgcgaccggagatgtgcatgctatgggagcattacctggcatggtgtggcaagatagagacgtgtacctgcagggtcccatttgggccaaaattcctcacacagatggacactttcacccgtctcctcttatgggcggctttggactcaagaacccgcctcctcagatcctcatcaaaaacacgcctgttcctgcgaatcctccggcggagttttcagctacaaagtttgcttcattcatcacccaatactccacaggacaagtgagtgtggaaattgaatgggagctgcagaaagaaaacagcaagcgctggaatcccgaagtgcagtacacatccaattatgcaaaatctgccagcgttgattttactgtggacaacaatggactttatactgagcctcgccccattggcacccgttaccttacccgtcccctgtaa

SEQ ID NO: 264 - protein, 736 aa, Adeno-associated virus
MAADGYLPDWLEDTLSEGIRQWWKLRPGPPPPKPAERHKDDSRGLVLPGYKYLGPFNGLDKGEPVNEADAAALEHDKAYDRQLDSGDNPYLKYNHADAEFQERLKEDTSFGGNLGRAVFQAKKRVLEPLGLVEEGAETAPGKKRPVEQSPQGPDSSSGIGKTGQQPAKKRLNFGQTGDSESVPDPQPLGEPPATPAAVGPTTMASGGGAPMADNNEGADGVGNASGNWHCDSTWLGDRVITTSTRTWALPTYNNHLYKQISSASTGASNDNHYFGYSTPWGYFDFNRFHCHFSPRDWQRLINNNWGFRPKRLNFKLFNIQVKEVTTNDGVTTIANNLTSTVQVFSDSEYQLPYVLGSAHQGCLPPFPADVFMIPQYGYLTLNNGSQAVGRSSFYCLEYFPSQMLRTGNNFTFSYTFEEVPFHSSYAHSQSLDRLMNPLIDQYLYYPNRTQNQSGSAQNKDLLFSRGSPAGMSVQPKNWLPGPCYRQQRVSKTKTDNNNSNFTWTGASKYNLNGRESIINPGTAMASHKDDEDKFFPMSGVMIFGKESAGASNTALDNVMITDEEEIKATNPVATERFGTVAVNFQSSSTDPATGDVHAMGALPGMVWQGRDVYLQGPIWAKIPHTDGHFHPSPLMGGFGLKNPPPQILIKNTPVPANPPAEFSATKFASFITQYSTGQVSVEIEWELQKENSKRWNPEVQYTSNYAKSANVDFTVDNNGLYTEPRPIGTRYLTRPL

SEQ ID NO: 265 - DNA, 2211 bp, Adeno-associated virus
atggctgccgatggttatcttccagattggctcgaggacactctctctgaaggaataagacagtggtggaagctcagacctggcccaccaccaccaaagcccgcagagcggcataaggacgacagcaggggtcttgtgcttcctgggtacaagtacctcggacccttcaacggactcgacaagggagagccggtcaacgaggcagacgccgcggccctcgagcacgacaaagcctacgaccggcagctcgacagcggagacaacccgtacctcaagtacaaccacgccgacgcggagtttcaggagcgccttaaagaagatacgtcttttgggggcaacctcgggcgagcagtcttccaggccaagaagcgggttctcgaacctctcggtctggttgaggaaggcgctgagacggctcctggaaagaaacgtccggtagagcagtcgccacaagggccagactcctcctcgggcatcggcaagacaggccagcagcccgctaaaaagagactcaattttggtcagactggcgactcagagtcagtccccgatccacaacctctcggagaacctccagcaacccccgctgctgtgggacctactacaatggcttcaggcggtggcgcaccaatggcagacaataacgaaggcgccgacggagtgggtaatgcctcaggaaattggcattgcgattccacatggctgggcgacagagtcatcaccaccagcacccgcacctgggccttgcccacctacaataaccacctctacaagcaaatctccagtgcttcaacgggggccagcaacgacaaccactacttcggctacagcaccccctgggggtattttgatttcaacagattccactgccacttttcaccacgtgactggcagcgactcatcaacaacaattggggattccggcccaagagactcaacttcaaactcttcaacatccaagtcaaggaggtcacgacgaatgatggcgtcacaaccatcgctaataaccttaccagcacggttcaagtcttctcggactcggagtaccagcttccgtacgtcctcggctctgcgcaccagggctgcctccctccgttcccggcggacgtgttcatgattccgcaatacggctacctgacgctcaacaatggcagccaagccgtgggacgttcatccttttactgcctggaatatttcccttctcagatgctgagaacgggcaacaactttaccttcagctacacctttgaggaagtgcctttccacagcagctacgcgcacagccagagcctggaccggctgatgaatcctctcatcgaccaatacctgtattacccgaacagaactcaaaatcagtccggaagtgcccaaaacaaggacttgctgtttagccgtgggtctccagctggcatgtctgttcagcccaaaaactggctacctggaccctgttatcggcagcagcgcgtttctaaaacaaaaacagacaacaacaacagcaattttacctggactggtgcttcaaaatataacctcaatgggcgtgaatccatcatcaaccctggcactgctatggcctcacacaaagacgacgaagacaagttctttcccatgagcggtgtcatgatttttggaaaagagagcgccggagcttcaaacactgcattggacaatgtcatgattacagacgaagaggaaattaaagccactaaccctgtggccaccgaaagatttgggaccgtggcagtcaatttccagagcagcagcacagaccctgcgaccggagatgtgcatgctatgggagcattacctggcatggtgtggcaaggtagagacgtgtacctgcagggtcccatttgggccaaaattcctcacacagatggacactttcacccgtctcctcttatgggcggctttggactcaagaacccgcctcctcagatcctcatcaaaaacacgcctgttcctgcgaatcctccggcggagttttcagctacaaagtttgcttcattcatcacccaatactccacaggacaagtgagtgtggaaattgaatgggagctgcagaaagaaaacagcaagcgctggaatcccgaagtgcagtacacatccaattatgcaaaatctgccaacgttgattttactgtggacaacaatggactttatactgagcctcgccccattggcacccgttaccttacccgtcccctgtaa

SEQ ID NO: 266 - protein, 736 aa, Adeno-associated virus
MAADGYLPDWLEDTLSEGIRQWWKLRPGPPPPKPAERHKDDSRGLVLPGYKYLGPFNGLDKGEPVNEADAAALEHDKAYDRQLDSGDNPYLKYNHADAEFQERLKEDTSFGGNLGRAVFQAKKRVLEPLGLVEEGAKTAPGKKRPVEQSPQGPDSSSGIGKTGQQPAKKRLNFGQTGDSESVPDPQPLGEPPATPAAVGPTTMASGGGAPMADNNEGADGVGNASGNWHCDSTWLGDRVITTSTRTWALPTYNNHLYKQISSASTGASNDNHYFGYSTPWGYFDFNRFHCHFSPRDWQRLINNNWGFRPKRLNFKLFNIQVKEVTTNDGVTTIANNLTSTVQVFSDSEYQLPYVLGSAHQGCLPPFPADVFMIPQYGYLTLNNGSQAVGRSSFYCLEYFPSQMLRTGNNFTFSYTFEEVPFHSSYAHSQSLDRLMNPLIDQYLYYPNRTQNQSGSAQNKDLLFSRGSPAGMSVQPKNWLPGPCYRQQRVSKTKTDNNNSNFTWTGASKYNLNGRESIINPGTAMASHKDDEDKFFPMSGVMIFGKESAGASNTALDNVMITDEEEIKATNPVATERFGTVAVNFQSSSTDPATGDVHAMGALPGMVWQGRDVYLQGPIWAKIPHTDGHFHPSPLMGGFGLKNPPPQILIKNTPVPANPPAEFSATKFASFITQYSTGQVSVEIEWELQKENSKRWNPEVQYTSNYAKSANVDFTVDNNGLYTEPRPIGTRYLTRPL

SEQ ID NO: 267 - protein, 736 aa, Adeno-associated virus
MAADGYLPDWLEDTLSEGIRQWWKLRPGPPPPKPAERHKDDSRGLVLPGYKYLGPFNGLDKGEPVNEADAAALEHDKAYDRQLDSGDNPYLKYNHADAEFQERLKEDTSFGGNLGRAVFQAKKRVLEPLGLVEEGAKTAPGKKRPVEQSPQGPDSSSGIGKTGQQPAKKRLNFGQTGDSESVPDPQPLGEPPATPAAVGPTTMASGGGAPMADNNEGADGVGNASGNWHCDSTWLGDRVITTSTRTWALPTYNNHLYKQISSASTGASNDNHYFGYSTPWGYFDFNRFHCHFSPRDWQRLINNNWGFRPKRLNFKLFNIQVKEVTTNDGVTTIANNLTSTVQVFSDSEYQLPYVLGSAHQGCLPPFPADVFMIPQYGYLTLNNGSQAVGRSSFYCLEYFPSQMLRTGNNFTFSYTFEEVPFHSSYAHSQSLDRLMNPLIDQYLYYLNRTQNQSGSAQNKDLLFSRGSPAGMSVQPKNWLPGPCYRQQRVSKTKTDNNNSNFTWTGASKYNLNGRESIINPGTAMASHKDDEDKFFPMSGVMIFGKESAGASNTALDNVMITDEEEIKATNPVATERFGTVAVNFQSSSTDPATGDVHAMGALPGMVWQGRDVYLQGPIWAKIPHTDGHFHPSPLMGGFGLKNPPPQILIKNTPVPANPPAEFSATKFASFITQYSTGQVSVEIEWELQKENSKRWNPEVQYTSNYAKSANVDFTVDNNGLYTEPRPIGTRYLTRPL

SEQ ID NO: 268 - protein, 736 aa, Adeno-associated virus
MAADGYLPDWLEDTLSEGIRQWWKLRPGPPPPKPAERHKDDSRGLVLPGYKYLGPFNGLDKGEPVNEADAAALEHDKAYDRQLDSGDNPYLKYNHADAEFQERLKEDTSFGGNLGRAVFQAKKRVLEPLGLVEEGAKTAPGKKRPVEQSPQGPDSSSGIGKTGQQPAKKRLNFGQTGDSESVPDPQPLGEPPATPAAVGPTTMASGGGAPMADNNEGADGVGNASGNWHCDSTWLGDRVITTSTRTWALPTYNNHLYKQISSASTGASNDNHYFGYSTPWGYFDFNRFHCHFSPRDWQRLINNNWGFRPKRLNFKLFNIQVKEVTTNDGVTTIANNLTSTVQVFSDSEYQLPYVLGSAHQGCLPPFPADVFMIPQYGYLTLNNGSQAVGRSSFYCLEYFPSQMLRTGNNFTFSYTFEEVPFHSSYAHSQSLDRLMNPLIDQYLYYLNRTQNQSGSAQNKDLLFSRGSPAGMSVQPKNWLPGPCYRQQRVSKTKTDNNNSNFTWTGASKYNLNGRESIINPGTAMASHKDDEDKFFPMSGVMIFGKESAGASNTALDNVMITDEEEIKATNPVATERFGTVAVNFQSSSTDPATGDVHAMGALPGMVWQDRDVYLQGPIWAKIPHTDGHFHPSPLMGGFGLKNPPPQILIKNTPVPANPPAEFSATKFASFITQYSTGQVSVEIEWELQKENSKRWNPEVQYTSNYAKSANVDFTVDNNGLYTEPRPIGTRYLTRPL

SEQ ID NO: 269 - DNA, 2208 bp, Adeno-associated virus
atggctgccgatggctatcttccagattggctcgaggacactctctctgaaggaataagacagtggtggaagctcaaacctggcccaccaccaccaaagcccgcagagcggcatagggacgacagcaggggtcttgtgcttcctgggtacaagtacctcggacccttcaacggactcgacaagggagagccggtcaacgaggcagacgccgcggccctcgagcacgacaaagcctacgaccggcagctcgacagcggagacaacccgtacctcaagtacaaccacgccgacgcggagtttcaggagcgccttaaagaagatacgtcttttgggggcaacctcggacgagcagtcttccaggcgaaaaagagggttcttgaacctctgggcctggttgaggaacctgttaagacggctccgggaaaaaagaggccggtagagcactctcctgtggagccagactcctcctcgggaaccggaaaggcgggccagcagcctgcaagaaaaagattgaattttggtcagactggagacgcagactcagtacctgacccccagcctctcggacagccaccagcagccccctctggtctgggaactaatacgatggctacaggcagtggcgcaccaatggcagacaataacgagggcgccgacggagtgggtaattcctcgggaaattggcattgcgattccacatggatgggcgacagagtcatcaccaccagcacccgaacctgggccctgcccacctacaacaaccacctctacaaacaaatttccagccaatcaggagcctcgaacgacaatcactactttggctacagcaccccttgggggtattttgacttcaacagattccactgccacttttcaccacgtgactggcaaagactcatcaacaacaactggggattccgacccaagagactcaacttcaagctctttaacattcaagtcaaagaggtcacgcagaatgacggtacgacgacgattgccaataaccttaccagcacggttcaggtgtttactgactcggggtaccagctcccgtacgtcctcggctcggcgcatcaaggatgcctcccgccgttcccagcagacgtcttcatggtgccacagtatggataccccaccctgaacaacgggagtcaggcagtaggacgctcttcattttactgcctggagtactttccttctcagatgctgcgtaccggaaacaactttaccttcagctacacttttgaggacgttcctttccacagcagctacgctcacagccagagtctggaccgtctcatgaatcctctcatcgaccagtacctgtattacttgagcacaacaaacactccaagtggaaccaccacgcagtcaaggcttcagttttctcaggccggagcgagtgacattcgggaccagtctaggaactggcttcctggaccctgttaccgccagcagcgagtatcaaagacatctgcggataacaacaacagtgaatactcgtggactggagctaccaagtaccacctcaatggcagagactctctggtgaatccgggcccggccgtggcaagccacaaggacgatgaagaaaagttttttcctcagagcggggttctcatctttgggaagcaaggctcagagaaaacaaatgtggacattgaaaaggtcatgattacagacgaagaggaaatcaggacaaccaatcccgtggctacggagcagtatggttctgtatctaccaacctccagagaggcaacagacaagcagctaccgcagatgtcaacacacaaggcgttcttccaggcatggtctggcaggacagagatgtgtaccttcaggggcccatctgggcaaagattccacacacggacggacattttcacccctctcccctcatgggtggattcggacttaaacaccctcctccacagattctcatcaagaacaccccggtacctgcgaatccttcgaccaccttcagtgcggcaaagtttgcttccttcatcacacagtactccacgggacaggtcagcgtggagatcgagtgggagctgcagaaggaaaacagcaaacgctggaatcccgaaattcagtacacttccaactacaacaagtctgttaatgtggactttactgtggacactaatggcgtgtattcagagcctcgccccattggcaccagatacctgactcgtaatctgtaa

SEQ ID NO: 270 - protein, 735 aa, Adeno-associated virus
MAADGYLPDWLEDTLSEGIRQWWKLKPGPPPPKPAERHRDDSRGLVLPGYKYLGPFNGLDKGEPVNEADAAALEHDKAYDRQLDSGDNPYLKYNHADAEFQERLKEDTSFGGNLGRAVFQAKKRVLEPLGLVEEPVKTAPGKKRPVEHSPVEPDSSSGTGKAGQQPARKRLNFGQTGDADSVPDPQPLGQPPAAPSGLGTNTMATGSGAPMADNNEGADGVGNSSGNWHCDSTWMGDRVITTSTRTWALPTYNNHLYKQISSQSGASNDNHYFGYSTPWGYFDFNRFHCHFSPRDWQRLINNNWGFRPKRLNFKLFNIQVKEVTQNDGTTTIANNLTSTVQVFTDSGYQLPYVLGSAHQGCLPPFPADVFMVPQYGYPTLNNGSQAVGRSSFYCLEYFPSQMLRTGNNFTFSYTFEDVPFHSSYAHSQSLDRLMNPLIDQYLYYLSTTNTPSGTTTQSRLQFSQAGASDIRDQSRNWLPGPCYRQQRVSKTSADNNNSEYSWTGATKYHLNGRDSLVNPGPAVASHKDDEEKFFPQSGVLIFGKQGSEKTNVDIEKVMITDEEEIRTTNPVATEQYGSVSTNLQRGNRQAATADVNTQGVLPGMVWQDRDVYLQGPIWAKIPHTDGHFHPSPLMGGFGLKHPPPQILIKNTPVPANPSTTFSAAKFASFITQYSTGQVSVEIEWELQKENSKRWNPEIQYTSNYNKSVNVDFTVDTNGVYSEPRPIGTRYLTRNL

SEQ ID NO: 271 - DNA, 2211 bp, Adeno-associated virus
atggctgccgacggttatcttccagattggctcgaggacactctctctgaaggaataagacagtggtggaagctcaaacctggcccaccaccaccaaagcccgcagagcggcataaggacgacagcaggggtcttgtgcttcctgggtacaagtacctcggacccttcaacggactcgacaagggagagccggtcaacgaggcagacgccgcggccctcgagcacgacaaagcctacgaccggcagctcgacagcggagacaacccgtacctcaagtacaaccacgccgacgcggagtttcaggagcgccttaaagaagatacgtcttttgggggcaacctcgggcgggcagtcttccaggccaagaagcgggttctcgaacctctcggtctggttgaggaaggcgctaagacggctcctggaaagaaacgtccggtagagcagtcgccacaagagccagactccccctcgggcatcggcaagacaggccagcagcccgctaaaaagagactcaattttggtcagactggcgactcagagtcagtccccgatccacaacctctcggagaacctccagcaacccccgctgctgtgggacctactacaatggcttcaggcggtggcgcaccaatggcagacaataacgaaggcgccgacggagtgggtaatgcctcaggaaattggcactgcgattccacatggctgggcgacagagtcatcaccaccagcacccgcacctgggccttgcccacctacaataaccacctctacaagcaaatctccagtgcttcaacgggggccagcaacgacaaccactacttcggctacagcaccccctgggggtattttgatttcaacagattccactgccacttttcaccacgtgactggcagcgactcatcaacaacaattggggattccggcccaagagactcaacttcaaactcttcaacatccaagtcaaggaggtcacgacgaatgatggcgtcacaaccatcgctaataaccttaccagcacggttcaagtcttctcggactcggagtaccagcttccgtacgtcctcggctctgcgcaccagggccgcctccctccgttcccggcggacgtgttcatgattccgcaatacggctacctgacgctcaacaatggcagccaagccgtgggacgttcatcctcttactgcctggaatatttcccttctcagatgctgagaacgggcaacaactttaccttcagctacacctttgaggaagtgcctctccacagcagctgcgcgcacagccagagcctggaccggctgatgaatcctctcatcgaccaatacctgtattacctgaacagaactcaaaatcagtccggaagtgcccaaaacagggacttgctgttcagccgtgggtctccagctggcatgtctgttcagcccaaaaactggctacctggaccctgttatcggcagcagcgcgtttctaaaacaaaaacagacaacaacaacagcaattttacctggactggtgcttcaaaatataacctcaatgggcgtgaatccatcatcaaccctggcactgctatggcctcacacaaagacgacgaagacaagttctttcccatgagcggtgtcatgatttttggaaaagagagcgccggagcttcaaacactgcattggacaatgtcatgattacagacgaagaggaaattaaagccactaaccctgtggccaccgaaagatttgggaccgtggcagtcaatttccagagcagcagcacagaccctgcgaccggagatgtgcatgctatgggagcattacctggcatggtgtggcaagatagagacgtgtacctgcagggtcccatttgggccaaaattcctcacacagatggacactttcacccgtctcctcttatgggcggctttggactcaagaacccgcctcctcagatcctcatcaaaaacacgcctgttcctgcgaatcctccggcggagttttcagctacaaagtttgcttcattcatcacccaatactccgcaggacaagtgagtgtggaaattgaatgggagctgcagaaagaaaacagcaagcgctggaatcccgaagtgcagtacacatccaattatgcaaaatctgccaacgttgattttactgtggacaacaatggactttatactgagcctcgccccattggcacccgttaccttacccgtcccctgtaa

SEQ ID NO: 272 - protein, 736 aa, Adeno-associated virus
MAADGYLPDWLEDTLSEGIRQWWKLKPGPPPPKPAERHKDDSRGLVLPGYKYLGPFNGLDKGEPVNEADAAALEHDKAYDRQLDSGDNPYLKYNHADAEFQERLKEDTSFGGNLGRAVFQAKKRVLEPLGLVEEGAKTAPGKKRPVEQSPQEPDSPSGIGKTGQQPAKKRLNFGQTGDSESVPDPQPLGEPPATPAAVGPTTMASGGGAPMADNNEGADGVGNASGNWHCDSTWLGDRVITTSTRTWALPTYNNHLYKQISSASTGASNDNHYFGYSTPWGYFDFNRFHCHFSPRDWQRLINNNWGFRPKRLNFKLFNIQVKEVTTNDGVTTIANNLTSTVQVFSDSEYQLPYVLGSAHQGRLPPFPADVFMIPQYGYLTLNNGSQAVGRSSSYCLEYFPSQMLRTGNNFTFSYTFEEVPLHSSCAHSQSLDRLMNPLIDQYLYYLNRTQNQSGSAQNRDLLFSRGSPAGMSVQPKNWLPGPCYRQQRVSKTKTDNNNSNFTWTGASKYNLNGRESIINPGTAMASHKDDEDKFFPMSGVMIFGKESAGASNTALDNVMITDEEEIKATNPVATERFGTVAVNFQSSSTDPATGDVHAMGALPGMVWQDRDVYLQGPIWAKIPHTDGHFHPSPLMGGFGLKNPPPQILIKNTPVPANPPAEFSATKFASFITQYSAGQVSVEIEWELQKENSKRWNPEVQYTSNYAKSANVDFTVDNNGLYTEPRPIGTRYLTRPL

SEQ ID NO: 273 - protein, 736 aa, Adeno-associated virus
MAADGYLPDWLEDTLSEGIRQWWKLKPGPPPPKPAERHKDDSRGLVLPGYKYLGPFNGLDKGEPVNEADAAALEHDKAYDRQLDSGDNPYLKYNHADAEFQERLKEDTSFGGNLGRAVFQAKKRVLEPLGLVEEGAKTAPGKKRPVEQSPQEPDSSSGIGKTGQQPAKKRLNFGQTGDSESVPDPQPLGEPPATPAAVGPTTMASGGGAPMADNNEGADGVGNASGNWHCDSTWLGDRVITTSTRTWALPTYNNHLYKQISSASTGASNDNHYFGYSTPWGYFDFNRFHCHFSPRDWQRLINNNWGFRPKRLNFKLFNIQVKEVTTNDGVTTIANNLTSTVQVFSDSEYQLPYVLGSAHQGCLPPFPADVFMIPQYGYLTLNNGSQAVGRSSFYCLEYFPSQMLRTGNNFTFSYTFEEVPLHSSCAHSQSLDRLMNPLIDQYLYYLNRTQNQSGSAQNRDLLFSRGSPAGMSVQPKNWLPGPCYRQQRVSKTKTDNNNSNFTWTGASKYNLNGRESIINPGTAMASHKDDEDKFFPMSGVMIFGKESAGASNTALDNVMITDEEEIKATNPVATERFGTVAVNFQSSSTDPATGDVHAMGALPGMVWQDRDVYLQGPIWAKIPHTDGHFHPSPLMGGFGLKNPPPQILIKNTPVPANPPAEFSATKFASFITQYSTGQVSVEIEWELQKENSKRWNPEVQYTSNYAKSANVDFTVDNNGLYTEPRPIGTRYLTRPL

SEQ ID NO: 274 - DNA, 2208 bp, Adeno-associated virus
atggctgccgatggctatcttccagattggctcgaggacactctctctgaaggaataagacagtggtggaagctcaaacctggcccaccaccaccaaagcccgcagagcggcatagggacgacagcaggggtcttgtgcttcctgggtacaagtacctcggacccttcaacggactcgacaagggagagccggtcaacgaggcagacgccgcggccctcgagcacgacaaagcctacgaccggcagctcgacagcggagacaacccgtacctcaagtacaaccacgccgacgcggagtttcaggagcgccttaaagaagatacgtcttttgggggcaacctcggacgagcagtcttccaggcgaaaaagagggttcttgaacctctgggcctggttggggaacctgttaagacggctccgggaaaaaagaggccggtagagcactctcctgtggagccagactcctcctcgggaaccggaaaggcgggccagcagcctgcaagaaaaagattgaattttggtcagactggagacgcagactcagtacctgacccccagcctctcggacagccaccagcagccccctctggtctgggaactaatacgatggctacaggcagtggcgcaccaatggcagacaataacgagggcgccgacggagtgggtaattcctcgggaaattggcattgcgattccacatggatgggcgacagagtcatcaccaccagcacccgaacctgggccctgcccacctacaacaaccacctctacaaacaaatttccagccaatcaggagcctcgaacgacagtcactactttggctacagcaccccttgggggtattttgacttcaacagattccactgccacttttcaccacgtgactggcaaagactcatcaacaacaactggggattccgacccaagagactcaacttcaagctctttaacattcaagtcaaagaggtcacgcagaatgacggtacgacgacgattgccaataaccttaccagcacggttcaggtgtttactgactcggagtaccagctcccgtacgtcctcggctcggcgcatcaaggatgcctcccgccgttcccagcagacgtcttcatggtgccacagtatggatacctcaccctgaacaacgggagtcaggcagtaggacgctcttcattttactgcctggagtactttccttctcagatgctgcgtaccggaaacaactttaccttcagctacacttttgaggacgttcctttccacagcagctacgctcacagccagagtctggaccgtctcatgaatcctctcatcgaccagtacctgtattacttgagcacaacaaacactccaagtggaaccaccacgcagtcaaggctccagttttctcaggccggagcgagtgacattcgggaccagtctaggaactggcttcctggaccctgttaccgccagcagcgagtatcaaagacatctgcggataacaacaacagtgaatactcgtggactggagctaccaagtaccacctcaatggcagagactctctggtgaatccgggcccggccatggcaagccacaaggacaatgaagaaaagttttttcctcagagcggggttctcatctttgggaagcaaggctcagagaaaacaaatgtggacattgaaaaggtcatgattacagacgaagaggaaatcaggacaaccaatcccgtggctacggagcagtatggttctgtatctaccaacctccagagaggcaacagacaagcagctaccgcagatgtcaacacacaaggcgttcttccaggcatggtctggcaggacagagatgtgtaccttcaggggcccatctgggcaaagattccacacacggacggacattttcacccctctcccctcatgggtggattcggacttaaacaccctcctccacagattctcatcaagaacaccccggtacctgcgaatccttcgaccaccttcagtgcggcaaagtttgcttccttcatcacacagtactccacgggacaggtcagcgtggagatcgagtgggagctgcagaaggaaaacagcaaacgctggaatcccgaaattcagtacacttccaactacaacaagtctgttaatgtggactttactgtggacactaatggcgtgtattcagagcctcgccccattggcaccagatacctgactcgtaatctgtaa

SEQ ID NO: 275 - protein, 735 aa, Adeno-associated virus
MAADGYLPDWLEDTLSEGIRQWWKLKPGPPPPKPAERHRDDSRGLVLPGYKYLGPFNGLDKGEPVNEADAAALEHDKAYDRQLDSGDNPYLKYNHADAEFQERLKEDTSFGGNLGRAVFQAKKRVLEPLGLVGEPVKTAPGKKRPVEHSPVEPDSSSGTGKAGQQPARKRLNFGQTGDADSVPDPQPLGQPPAAPSGLGTNTMATGSGAPMADNNEGADGVGNSSGNWHCDSTWMGDRVITTSTRTWALPTYNNHLYKQISSQSGASNDSHYFGYSTPWGYFDFNRFHCHFSPRDWQRLINNNWGFRPKRLNFKLFNIQVKEVTQNDGTTTIANNLTSTVQVFTDSEYQLPYVLGSAHQGCLPPFPADVFMVPQYGYLTLNNGSQAVGRSSFYCLEYFPSQMLRTGNNFTFSYTFEDVPFHSSYAHSQSLDRLMNPLIDQYLYYLSTTNTPSGTTTQSRLQFSQAGASDIRDQSRNWLPGPCYRQQRVSKTSADNNNSEYSWTGATKYHLNGRDSLVNPGPAMASHKDNEEKFFPQSGVLIFGKQGSEKTNVDIEKVMITDEEEIRTTNPVATEQYGSVSTNLQRGNRQAATADVNTQGVLPGMVWQDRDVYLQGPIWAKIPHTDGHFHPSPLMGGFGLKHPPPQILIKNTPVPANPSTTFSAAKFASFITQYSTGQVSVEIEWELQKENSKRWNPEIQYTSNYNKSVNVDFTVDTNGVYSEPRPIGTRYLTRNL

SEQ ID NO: 276 - protein, 737 aa, Adeno-associated virus
RMAADGYLPDWLEDNLSEGIREWWDLKPGAPKPKANQQKQDDGRGLVLPGYKYLGPFNGLDKGEPVNAADAAALEHDKAYDQQLKAGDNPYLRYNHADAEFQERLQEDTSFGGNLGRAVFQAKKRVLEPLGLVEEGAKTAPGKKRPVEQSPQEPDSSSGIGKTGQQPAKKRLNFGQTGDSESVPDPQPLGEPPATPAAVGPTTMASGGGAPMADNNEGADGVGNASGNWHCDSTWLGDRVITTSTRTWALPTYNNHLYKQISSTSTGASNDNHYFGYGTPWGYFDFNRFHCHFSPRDWQRLINNNWGFRPKRLNFKLFNIQVEEVTTNDGVTTIANNLTSTVQVFSDSEYQLPYVLGSAHQGCLPPFPADVFMIPQYGYLTLNNGSQAVGRSSFYCLEYFPSQMLRTGNNFTFSYTFEEVPFHSSYAHSQSLDRLMNPLIDQYLYYLNRTQNQSGSAQNKDLLFSRGSPAGMSVQPKNWLPGPCYRQQRVSKTKTDNNNSNFTWTGASKYNLNGRESIINPGTAVASHKDDEDKFFPMSGVMIFGKESAGASSTALDNVMITDEEEIKATNPVATERFGTVAVNFQSSSTDPATGDVHAMGALPGMVWQDRDVYLQGPIWAKIPHTDGHFHPSPLMGGFGLKNPPPQILIKNTPVPANPPAEFSATKFASFITQYSTGQVSVEIEWELQKENSKRWNPEVQYTSNYAKSANVDFTVDNNGLYTEPRPIGTRYLTRPL

SEQ ID NO: 277 - protein, 736 aa, Adeno-associated virus
MAADGYLPDWLEDNLSEGIREWWDLKPGAPKPKANQQKQDDGRGLVLPGYKYLGPFNGLDKGEPVNAADAAALEHDKAYDQQLKAGDNPYLRYNHADAEFQERLQEDTSFGGNLGRAVFQAKKRVLEPLGLVEEGAKTAPGKKRPVEQSPQEPDSSSGIGKTGQQPAKKRLNFGQTGDSESVPDPQPLGEPPATPAAVGPTTMASGGGAPMADNNEGADGVGNASGNWHCDSTWLGDRVITTSTRTWALPTYNNHLYKQISSTSTGASNDNHYFGYGTPWGYFDFNRFHCHFSPRDWQRLINNNWGFRPKRLNFKLFNIQVEEVTTNDGVTTIANNLTSTVQVFSDSEYQLPYVLGSAHQGCLPPFPADVFMIPQYGYLTLNNGSQAVGRSSFYCLEYFPSQMLRTGNNFTFSYTFEEVPFHSSYAHSQSLDRLMNPLIDQYLYYLNRTQNQSGSAQNKDLLFSRGSPAGMSVQPKNWLPGPCYRQQRVSKTKTDNNNSNFTWTGASKYNLNGRESIINPGTAVASHKDDEDKFFPMSGVMIFGKESAGASSTALDNVMITDEEEIKATNPVATERFGTVAVNFQSSSTDPATGDVHAMGALPGMVWQDRDVYLQGPIWAKIPHTDGHFHPSPLMGGFGLKNPPPQILIKNTPVPANPPAEFSATKFASFITQYSTGQVSVEIEWELQKENSKRWNPEVQYTSNYAKSANVDFTVDNNGLYTEPRPIGTRYLTRPL

SEQ ID NO: 278 - DNA, 2211 bp, Adeno-associated virus
atggctgccgatggttatcttccagattggctcgaggacaacctctctgagggcattcgcgagtggtgggacttgaaacctggagccccgaagcccaaagccaaccagcaaaagcaggacgacggccggggtctggtgcttcctggctacaagtacctcggacccttcaacggactcgacaagggggagcccgtcaacgcggcggacgcagcggccctcgagcacgacaaggcctacgaccagcagctcaaagcgggtgacaatccgtacctgcggtataaccacgccgacgccgagtttcaggagcgtctgcaagaagatacgtcttttgggggcaacctcgggcgagcagtcttccaggccaagaagcgggttctcgaacctctcggtctggttgaggaaggcgctaagacggctcctggaaagaaacgtccggtagagcagtcgccacaagagccagactcctcctcgggcatcggcaagacaggccagcagcccgctaaaaagagactcaattttggccagactggcgactcagagtcagtccccgatccacaacctctcggagaacctccagcaacccccgctgctgtgggacctactacaatggcttcaggcggtggcgcaccaatggcagacaataacgaaggcgccgacggagtgggtaatgcctcaggaaattggcattgcgattccacatggctgggcgacagagtcatcaccaccagcacccgcacctgggccttgcccacctacaataaccacctctacaagcaaatctccagtacttcaacgggggccagcaacgacaaccactacttcggctacggcaccccctgggggtattttgatttcaacagattccactgccacttttcaccacgtgactggcagcgactcatcaacaacaattggggattccggcccaagagactcaacttcaaactcttcaacatccaagtcgaggaggtcacgacgaatgatggcgtcacaaccatcgctaataaccttaccagcacggttcaagtcttctcggactcggagtaccagcttccgtacgtcctcggctctgcgcaccagggctgcctccctccgttcccggcggacgtgttcatgattccgcaatacggctacctgacgctcaacaatggcagccaagccgtgggacgttcatccttttactgcctggaatatttcccttctcagatgctgagaacgggcaacaactttaccttcagctacacctttgaggaagtgcctttccacagcagctacgcgcacagccagagcctggaccggctgatgaatcctctcatcgaccaatacctgtattacctgaacagaacacaaaatcagtccggaagtgcccaaaacaaggacttgctgtttagccgtgggtctccagctggcatgtctgttcagcccaaaaactggctacctggaccctgttatcggcagcagcgcgtttctaaaacaaaaacagacaacaacaacagcaattttacctggactggtgcttcaaaatataacctcaatgggcgtgaatccatcatcaaccctggcaccgctgtggcctcacacaaagacgacgaagacaagttctttcccatgagcggtgtcatgatttttggaaaagagagcgccggagcttcaagcactgcattggacaatgtcatgattacagacgaagaggaaattaaagccactaaccctgtggccaccgaaagatttgggaccgtggcagtcaatttccagagcagcagcacagaccctgcgaccggagatgtgcatgctatgggagcattacctggcatggtgtggcaagatagagacgtgtacctgcagggtcccatttgggccaaaattcctcacacagatggacactttcacccgtctcctcttatgggcggctttggactcaagaacccgcctcctcagatcctcatcaaaaacacgcctgttcctgcgaatcctccggcggagttttcagctacaaagtttgcttcattcatcacccaatactccacaggacaagtgagtgtggaaattgaatgggagctgcagaaagaaaacagcaagcgctggaatcccgaagtgcagtacacatccaattatgcaaaatctgccaacgttgattttactgtggacaacaatggactttatactgagcctcgccccattggcacccgttaccttacccgtcccctgtaa

SEQ ID NO: 279 - protein, 737 aa, Adeno-associated virus
RMAADGYLPDWLEDNLSEGIREWWDLKPGAPKPKANQQKQDDGRGLVLPGYKYLGPFNGLDKGEPVNAADAAALEHDKAYDQQLKAGDNPYLRYNHADAEFQERLQEDTSFGGNLGRAVFQAKKRVLEPLGLVEEGAKTAPGKKRPVEQSPQEPDSSSGIGKTGQQPAKKRLNFGQTGDSESVPDPQPLGEPPATPAAVGPTTMASGGGAPMADNNEGADGVGNASGNWHCDSTWLGDRVITTSTRTWALPTYNNHLYKQISSTSTGASNDNHYFGYSTPWGYFDFNRFHCHFSPRDWQRLINNNWGFRPKRLNFKLFNIQVEEVTTNDGVTTIANNLTSTVQVFSDSEYQLPYVLGSAHQGCLPPFPADVFMIPQYGYLTLNNGSQAVGRSSFYCLEYFPSQMLRTGNNFTFSYTFEEVPFHSSYAHSQSLDRLMNPLIDQYLYYLNRTQNQSGSAQNKDLLFSRGSPAGMSVQPKNWLPGPCYRQQRVSKTKTDNNNSNFTWTGASKYNLNGRESIINPGTAVASHKDDEDKFFPMSGVMIFGKESAGASSTALDNVMITDEEEIKATNPVATERFGTVAVNFQSSSTDPATGDVHAMGALPGMVWQDRDVYLQGPIWAKIPHTDGHFHPSPLMGGFGLKNPPPQILIKNTPVPANPPAEFSATKFASFITQYSTGQVSVEIEWELQKENSKRWNPEVQYTSNYAKSANVDFTVDNNGLYTEPRPIGTRYLTRPL

SEQ ID NO: 280 - protein, 737 aa, Adeno-associated virus
RMAADGYLPDWLEDNLSEGIREWWDLKPGAPKPKANQQKQDDGRGLVLPGYKYLGPFNGLDKGEPVNAADAAALEHDKAYDQQLKAGDNPYLRYNHADAEFQERLQEDTSFGGNLGRAVFQAKKRVLEPLGLVEEGAKTAPGKKRPVEQSPQEPDSSSGIGKTGQQPAKKRLNFGQTGDSESVPDPQPLGEPPATPAAVGPTTMASGGGAPMADNNEGADGVGNASGNWHCDSTWLGDRVITTSTRTWALPTYNNHLYKQISSTSTGASNDNHYFGYSTPWGYFDFNRFHCHFSPRDWQRLINNNWGFRPKRLNFKLFNIQVKEVTTNDGVTTIANNLTSTVQVFSDSEYQLPYVLGSAHQGCLPPFPADVFMIPQYGYLTLNNGSQAVGRSSFYCLEYFPSQMLRTGNNFTFSYTFEEVPFHSSYAHSQSLDRLMNPLIDQYLYYLNRTQNQSGSAQNKDLLFSRGSPAGMSVQPKNWLPGPCYRQQRVSKTKTDNNNSNFTWTGASKYNLNGRESIINPGTAVASHKDDEDKFFPMSGVMIFGKESAGASSTALDNVMITDEEEIKATNPVATERFGTVAVNFQSSSTDPATGDVHAMGALPGMVWQDRDVYLQGPIWAKIPHTDGHFHPSPLMGGFGLKNPPPQILIKNTPVPANPPAEFSATKFASFITQYSTGQVSVEIEWELQKENSKRWNPEVQYTSNYAKSANVDFTVDNNGLYTEPRPIGTRYLTRPL

SEQ ID NO: 281 - protein, 737 aa, Adeno-associated virus
RMAADGYLPDWLEDNLSEGIREWWDLKPGAPKPKANQQKQDDGRGLVLPGYKYLGPFNGLDKGEPVNAADAAALEHDKAYDQQLKAGDNPYLRYNHADAEFQERLQEDTSFGGNLGRAVFQAKKRVLEPLGLVEEGAKTAPGKKRPVEQSPQEPDSSSGIGKTGQQPAKKRLNFGQTGDSESVPDPQPLGEPPATPAAVGPTTMASGGGAPMADNNEGADGVGNASGNWHCDSTWLGDRVITTSTRTWALPTYNNHLYKQISSTSTGASNDNHYFGYSTPWGYFDFNRFHCHFSPRDWQRLINNNWGFRPKRLNFKLFNIQVKEVTTNDGVTTIANNLTSTVQVFSDSEYQLPYVLGSAHQGCLPPFPADVFMIPQYGYLTLNNGSQAVGRSSFYCLEYFPSQMLRTGNNFTFSYTFEEVPFHSSYAHSQSLDRLMNPLIDQYLYYLNRTQNQSGSAQNKDLLFSRGSPAGMSVQPKNWLPGPCYRQQRVSKTKTDNNNSNFTWTGASKYNLNGRESIINPGTAVASHKDDEDKFFPMSGVMIFGKESAGANSTALDNVMITDEEEIKATNPVATERFGTVAVNFQSSSTDPATGDVHAMGALPGMVWQDRDVYLQGPIWAKIPHTDGHFHPSPLMGGFGLKNPPPQILIKNTPVPANPPAEFSATKFASFITQYSTGQVSVEIEWELQKENSKRWNPEVQYTSNYAKSANVDFTVDNNGLYTEPRPIGTRYLTRPL

SEQ ID NO: 282 - DNA, 2208 bp, Adeno-associated virus
atggctgccgatggttatcttccagattggctcaaggacactctctctgaaggaataagacagtggtggaagctcaaacctggcccaccaccaccaaagcccgcagagcggcataaggacgacagcgggggtcttgtgcttcctgggtacaagtacctcggacccttcaacggactcgacaagggagagccggtcaacgaggcagacgccgcggccctcgagtacgacaaggcctacgaccggcagctcgacagcggagacaacccgtacctcaagtacaaccacgccgacgcggagtttcaggagcgccttaaagaagatacgtcttttgggggcaacctcggacgagcagtcttccaggcgaaaaagagggttcttgaacctctgggcctggttgaggaacctgttaagacggctccgggaaaaaagaggccggtagagcactctcctgtggagccagactcctcctcgggaacaggaaaagcgggccagcagcctgcgagaaagagattgaattttggtcagactggagacgcagactccgtacctgacccccagcctctcggacagccaccagcagccccctctggtctgggaactaatacgatggctacaggcagtggcgcaccaatggcagacaataacgagggcgccgacggagtgggtaattcctcgggaagttggcattgcgattccacatggatgggcgacagagtcatcaccaccagcacccgaacctgggctctgcccacctacaacaaccatctgtacaagcagatctccagccaatcaggagccagcaacgacaaccactactttggctacagcaccccttgggggtattttgacttcaacagattccactgccacttttcaccacgtgactggcaaagactcatcaacaacaactggggattccggcccaagagactcaacttcaagctctttaacattcaagtcaaggaggtcacgcagaatgacggtacgacgacgattgccaataaccttaccagcacggttcaggtgtttactgactcggagtaccagctcccgtacgtccccggctcggcgcatcaaggatgcctcccgccgttcccagcagacgtcttcatggtgccacagtatggatacctcaccctgaacaacgggagtcaggcagtaggacgctcttcattttactgcctggagtactttccttctcagatgcttcgtaccggaaacaactttaccttcagctacacctttgaggatgttcctttccacagcagctacgctcacagccagagtttggaccgtctcatgaatcctctcatcgaccagtacctgtattacttgagcagaacaaacactccaagcggaaccaccacgcagtccaggcttcagttttctcaggccggagcaagtgacattcgggaccagtctaggaactggcttcctggaccctgttaccgccagcagcgagtatcaaagacagctgcggacaacaacaacagtgaatactcgtggactggagctaccaagtaccacctcaatggcagagactctctggtgaatccgggcccggccatggccagccacaaggacgatgaagaaaagttttttcctcaaagcggggttctcatctttgggaagcaaggctcagagaaaacaaatgtggacattgaaaaggtcatgattacagacgaagaggaaatcagaaccaccaatcccgtggccacggagcagtatggttctgtatctaccaacctccagagcggcaacacacaagcagctactgcagatgtcaacacacaaggcgttcttccaggcatggtctggcaggacagagacgtgcacctgcaggggcctatctgggcaaagattccacacacggacggacattttcacccctctcccctcatgggcggatttggacttaaacaccctcctccacagattctcatcaagaacaccccggtacctgcaaatccttcgaccaccttcagtgcggcaaagtttgcttccttcatcacacagtattccacagggcaggtcagcgtggagatcgagtgggagctgcagaaggagaacagcaaacgctggaaccccgagatccagtacacttccaactacaacaaatctgttaatgtggactttactgtggacactaatggtgtgtattcagagcctcgccccattggcaccagatacctgactcgtaatctgtaa

SEQ ID NO: 283 - protein, 735 aa, Adeno-associated virus
MAADGYLPDWLKDTLSEGIRQWWKLKPGPPPPKPAERHKDDSGGLVLPGYKYLGPFNGLDKGEPVNEADAAALEYDKAYDRQLDSGDNPYLKYNHADAEFQERLKEDTSFGGNLGRAVFQAKKRVLEPLGLVEEPVKTAPGKKRPVEHSPVEPDSSSGTGKAGQQPARKRLNFGQTGDADSVPDPQPLGQPPAAPSGLGTNTMATGSGAPMADNNEGADGVGNSSGSWHCDSTWMGDRVITTSTRTWALPTYNNHLYKQISSQSGASNDNHYFGYSTPWGYFDFNRFHCHFSPRDWQRLINNNWGFRPKRLNFKLFNIQVKEVTQNDGTTTIANNLTSTVQVFTDSEYQLPYVPGSAHQGCLPPFPADVFMVPQYGYLTLNNGSQAVGRSSFYCLEYFPSQMLRTGNNFTFSYTFEDVPFHSSYAHSQSLDRLMNPLIDQYLYYLSRTNTPSGTTTQSRLQFSQAGASDIRDQSRNWLPGPCYRQQRVSKTAADNNNSEYSWTGATKYHLNGRDSLVNPGPAMASHKDDEEKFFPQSGVLIFGKQGSEKTNVDIEKVMITDEEEIRTTNPVATEQYGSVSTNLQSGNTQAATADVNTQGVLPGMVWQDRDVHLQGPIWAKIPHTDGHFHPSPLMGGFGLKHPPPQILIKNTPVPANPSTTFSAAKFASFITQYSTGQVSVEIEWELQKENSKRWNPEIQYTSNYNKSVNVDFTVDTNGVYSEPRPIGTRYLTRNL

SEQ ID NO: 284 - DNA, 2208 bp, Adeno-associated virus
atggctgccgatggttatcttccagattggctcgaggacactctctctgaaggaataagacagtggtggaagctcaaacctggcccaccaccaccaaagcccgcagagcggcataaggacgacagcaggggtcttgtgcttcctgggtacaagtacctcggacccttcaacggactcgacaagggggagccggtcaacgaggcagacgccgcggccctcgagcacgacaaggcctacgaccggcagctcgacagcggagacaacccgtacctcaagtacaaccacgccgacgcagagtttcaggagcgccttaaagaagatacgtcttttgggggcaacctcggacgagcagtcttccaggcgaaaaagagggttcttgaacctctgggcctggttgaggaacctgttaagacggctccgggaaaaaagaggccggtagagcactctcctgtggagccagactcctcctcgggaaccggaaaagcgggccagcagcctgcaagaaaaagattaaattttggtcagactggagacgcagactccgtacctgacccccagcctctcggacagccaccagcagccccctctggtctgggatctactacaatggctacaggcagtggcgcaccaatggcagacaataacgagggtgccgatggagtgggtaattcctcaggaaattggcattgcgattcccaatggctgggcgacagagtcatcaccaccagcacccgaacctgggccctgcccacatacaacaaccacctctacaagcaaatctccagccaatcaggagccagcaacgacaaccactactttggctacagcaccccctgggggtattttgacttcaacagattccactgccacttttcaccacgtgactggcaaagactcatcaacaacaactggggattccggcccaaaagactcaacttcaagctctttaatattcaagtcaaagaggtcacgcagaatgacggtacgacgacgattgccaataaccttaccagcacggttcaggtgtttactgactcggagtaccagctcccgtacgtcctgggctcggcgcatcaaggatgcctcccgccgtttccagcggacgtcttcatggtcccacagtatggatacctcaccctgaacaacgggagtcaggcggtaggacgctcttccttttactgcctggagtactttccttctcagatgctgcgtactggaaacaactttcagttcagctacacttttgaagacgtgcctttccacagcagctacgctcacagccagagtctggatcggctgatgaatcctctgatcgaccagtacctgtattatctgaacaagacacaaacaaatagtggaactcttcagcagtctcggctactgtttagccaagctggaccaaccaacatgtctcttcaagctaaaaactggctgcctggaccttgctacagacagcagcgtctgtcaaaacaggcaaacgacaacaacaacagcaactttccctggactgcagctacaaagtatcatctaaatggccgggactcgttggttaatccaggaccagctatggccagtcgcaaggatgacgaagaaaagtttttccccatgcatggaaccctgatatttggtaaacaaggaacaaatgccaacgacgcggatttggaaaatgtcatgattacagatgaagaagaaatcagggccaccaatcccgtggctacggagcagtacgggactgtgtcaaataatttgcaaaactcaaacactggtccaactactggaactgtcaatcaccaaggagcgttacctggtatggtgtggcaggatcgagacgtgtacctgcagggacccatttgggccaagattcctcacaccgatggacactttcatccttctccactgatgggaggttttggactcaaacacccgcctcctcagatcatgatcaaaaacactcccgttccagccaatcctcccacaaacttcagttctgccaagtttgcttctttcatcacacagtattccacgggacaggtcagcgtggagatcgagtgggagctgcagaaggagaacagcaaacgctggaatcccgaaattcagtacacttccaactacaacaagtctgttaatgtggactttactgtggacactaatggtgtgtattcagagcctcgccccattggcaccagatacctgactcgtaatctgtaa

SEQ ID NO: 285 - protein, 735 aa, Adeno-associated virus
MAADGYLPDWLEDTLSEGIRQWWKLKPGPPPPKPAERHKDDSRGLVLPGYKYLGPFNGLDKGEPVNEADAAALEHDKAYDRQLDSGDNPYLKYNHADAEFQERLKEDTSFGGNLGRAVFQAKKRVLEPLGLVEEPVKTAPGKKRPVEHSPVEPDSSSGTGKAGQQPARKRLNFGQTGDADSVPDPQPLGQPPAAPSGLGSTTMATGSGAPMADNNEGADGVGNSSGNWHCDSQWLGDRVITTSTRTWALPTYNNHLYKQISSQSGASNDNHYFGYSTPWGYFDFNRFHCHFSPRDWQRLINNNWGFRPKRLNFKLFNIQVKEVTQNDGTTTIANNLTSTVQVFTDSEYQLPYVLGSAHQGCLPPFPADVFMVPQYGYLTLNNGSQAVGRSSFYCLEYFPSQMLRTGNNFQFSYTFEDVPFHSSYAHSQSLDRLMNPLIDQYLYYLNKTQTNSGTLQQSRLLFSQAGPTNMSLQAKNWLPGPCYRQQRLSKQANDNNNSNFPWTAATKYHLNGRDSLVNPGPAMASRKDDEEKFFPMHGTLIFGKQGTNANDADLENVMITDEEEIRATNPVATEQYGTVSNNLQNSNTGPTTGTVNHQGALPGMVWQDRDVYLQGPIWAKIPHTDGHFHPSPLMGGFGLKHPPPQIMIKNTPVPANPPTNFSSAKFASFITQYSTGQVSVEIEWELQKENSKRWNPEIQYTSNYNKSVNVDFTVDTNGVYSEPRPIGTRYLTRNL

SEQ ID NO: 286 - DNA, 2208 bp, Adeno-associated virus
atggctgccgatggttatcttccagattggctcgaggacactctctctgaaggaataagacagtggtggaagctcaaacctggcccaccaccaccaaagcccgcagagcggcataaggacgacagcaggggtcttgtgcttcctgggtacaagtacctcggacccttcaacggactcgacaagggagagccggtcaacgaggcagacgccgcggccctcgagcacgacaaagcctacgaccggcagctcgacagcggagacaacccgtacctcaagtacaaccacgccgacgcggagtttcaggagcgccttaaagaagatacgtcttttgggggcaacctcggacgagcagtcttccaggcgaaaaagagggttcttgaacctctgggcctggttggggaacctgtcaagacggctccaggaaaaaagaggccggtagagcactctcctgtggagccagactcctcctcgggaaccggaaaggcgggccagcagcctgcaagaaaaagattgaattttggtcagactggagacgcagactcagtacctgacccccagcctctcggacagccaccagcagccccctctggtctgggaactaatacgatggctacaggcagtggcgcaccaatggcagacaataacgagggcgccgacggagtgggtaattcctcgggaaattggcattgcgattccacatggatgggcgacagagtcatcaccaccagcacccgaacctgggccctgcccacctacaacaaccacctctacaaacaaatttccagccaatcaggagcctcgaacgacaatcactactttggctacagcaccccttgggggtattttgacttcaacagattccactgccacttttcaccacgtgactggcaaagactcatcaacaacaactggggattccgacccaagagactcaacttcaagctctttaacattcaagtcaaagaggtcacgcagaatgacggtacgacgacgattgccaataaccttaccagcacggttcaggtgtttactgactcggagtaccagctcccgtacgtcctcggctcggcgcatcaaggatgcctcccgccgttcccagcagacgtcttcatggtgccacagtatggatacctcaccctgaacaacgggagtcaggcagtaggacgctcttcattttactgcctggagtactttccttctcagatgctgcgtaccggaaacaactttaccttcagctacacttttgaggacgttcctttccacagcggctacgctcacagccagagtctggaccgtctcatgaatcctctcatcgaccagtacctgtattacttgagcacaacaaacactccaagtggaaccaccacgcagtcaaggcttcagttttctcaggccggagcgagtgacattcgggaccagtctaggaactggcttcctggaccctgttaccgccagcagcgagtatcaaagacatctgcggataacaacaacagtgaatactcgtggactggagctaccaagtaccacctcaatggcagagactctctggtgaatccgggcccggccatggcaagccacaaggacaatgaagaaaagttttttcctcagagcggggttctcatctttgggaagcaaggctcagagaaaacaaatgtggacattgaaaaggtcatgattacagacgaagaggaaatcaggacaaccaatcccgtggctacggagcagtacggttctgtatctaccaacctccagagaggcaacagacaagcagctaccgcagatgtcaacacacaaggcgttcttccaggcatggtctggcaggacagagatgtgtaccttcaggggcccatctgggcaaagattccacacacggacggacattttcacccctctcccctcatgggtggattcggacttaaacaccctcctccacagattctcatcaagaacaccccggtacctgcgaatccttcgaccaccttcagtgcggcaaagtttgcttccttcatcacacagtactccacgggacaggtcagcgtggagatcgagtgggagctgcagaaggaaaacagcaaacgctggaatcccgaaattcagtacacttccaactacaacaagtctgttaatgtggactttactgtggacactaatggcgtgtattcagagcctcgccccattggcaccagatacctgactcgtaatctgtaa

SEQ ID NO: 287 - protein, 735 aa, Adeno-associated virus
MAADGYLPDWLEDTLSEGIRQWWKLKPGPPPPKPAERHKDDSRGLVLPGYKYLGPFNGLDKGEPVNEADAAALEHDKAYDRQLDSGDNPYLKYNHADAEFQERLKEDTSFGGNLGRAVFQAKKRVLEPLGLVGEPVKTAPGKKRPVEHSPVEPDSSSGTGKAGQQPARKRLNFGQTGDADSVPDPQPLGQPPAAPSGLGTNTMATGSGAPMADNNEGADGVGNSSGNWHCDSTWMGDRVITTSTRTWALPTYNNHLYKQISSQSGASNDNHYFGYSTPWGYFDFNRFHCHFSPRDWQRLINNNWGFRPKRLNFKLFNIQVKEVTQNDGTTTIANNLTSTVQVFTDSEYQLPYVLGSAHQGCLPPFPADVFMVPQYGYLTLNNGSQAVGRSSFYCLEYFPSQMLRTGNNFTFSYTFEDVPFHSGYAHSQSLDRLMNPLIDQYLYYLSTTNTPSGTTTQSRLQFSQAGASDIRDQSRNWLPGPCYRQQRVSKTSADNNNSEYSWTGATKYHLNGRDSLVNPGPAMASHKDNEEKFFPQSGVLIFGKQGSEKTNVDIEKVMITDEEEIRTTNPVATEQYGSVSTNLQRGNRQAATADVNTQGVLPGMVWQDRDVYLQGPIWAKIPHTDGHFHPSPLMGGFGLKHPPPQILIKNTPVPANPSTTFSAAKFASFITQYSTGQVSVEIEWELQKENSKRWNPEIQYTSNYNKSVNVDFTVDTNGVYSEPRPIGTRYLTRNL

SEQ ID NO: 288 - DNA, 2208 bp, Adeno-associated virus
atggctgccgatggttatcttccagattggctcgaggacactctctctgaaggaataagacagtggtggaagctcaaacctggcccaccaccaccaaagcccgcagagcggcataaggacgacagcaggggtcttgtgcttcctgggtacaagtacctcggacccttcaacggactcgacaagggagagccggtcaacgaggcagacgccgcggccctcgagcacgacaaagcctacgaccggcagctcgacagcggagacaacccgtacctcaagtacaaccacgccgacgcggagtttcaggagcgccttaaagaagatacgtcttttgggggcaacctcggacgagcagtcttccaggcgaaaaagagggttcttgaacctctgggcctggttggggaacctgttaagacggctccgggaaaaaagaggccggtagagcactctcctgtggagccagactcctcctcgggaaccggaaaggcgggccagcagcctgcaagaaaaagattgaattttggtcagactggagacgcagactcagtacctgacccccagcctctcggacagccaccagcagccccctctggtctgggaactaatacgatggctacaggcagtggcgcaccaatggcagacaataacgagggcgccgacggagtgggtaattcctcgggaaatcggcattgcgattccacatggatgggcgacagagtcatcaccaccagcacccgaacctgggccctgcccacctacaacaaccacctctacagacaaatttccagccaatcaggagcctcgaacgacaatcactactttggctacagcaccccttgggggtattttgacttcaacagattccactgccacttttcaccacgtgactggcaaagactcatcaacaacaactggggattccgacccaagagactcaacttcaagctctttaacattcaagtcaaagaggtcacgcagaatgacggtacgacgacgattgccaataaccttaccagcacggttcaggtgtttactgactcggagtaccagctcccgtacgtcctcggctcggcgcatcaaggatgcctcccgccgttcccagcagacgtcttcatggtgccacagtatggatacctcaccctgagcaacgggagtcaggcagtaggacgctcttcattttactgcccggagtactttccttctcagatgctgcgtaccggaaacaactttaccttcagctacacttttgaggacgttcctttccacagcagctacgctcacagccagagtctggaccgtctcatgaatcctctcatcgaccagtacctgtattacttgagcacaacaaacactccaagtggaaccaccacgcagtcaaggcttcagttttctcaggccggagcgagtgacattcgggaccagtctaggaactggcttcctggaccctgttaccgccagcagcgagtatcaaagacatctgcggataacaacaacagtgaatactcgtggactggagctaccaagtaccacctcaatggcagagactctctggtgaatccgggcccggccatggcaagccacaaggacaatgaagaaaagttttttcctcagagcggggttctcatctttgggaagcaaggctcagagaaaacaaatgtggacattgaaaaggtcatgattacagacgaagaggaaatcaggacaaccaatcccgtggctacggagcagtatggttctgtatctaccaacctccagagaggcaacagacaagcagctaccgcagatgtcaacacacaaggcgttcttccaggcatggtctggcaggacagagatgtgtaccttcaggggcccatctgggcaaagattccacacacggacggacattttcacccctctcccctcatgggtggattcggacctaaacaccctcctccacagattctcatcaagaacaccccggtacctgcgaatccttcgaccaccttcagtgcggcaaagtttgcttccttcatcacacagtactccacgggacaggtcagcgtggagatcgagtgggagctgcagaaggaaaacagcaaacgctggaatcccgaaattcagtacacttccaactacaacaagtctgttaatgtggactttactgtggacactaatggcgtgtattcagagcctcgccccattggcaccagatacctgactcgtaatttgtaa

SEQ ID NO: 289 - protein, 735 aa, Adeno-associated virus
MAADGYLPDWLEDTLSEGIRQWWKLKPGPPPPKPAERHKDDSRGLVLPGYKYLGPFNGLDKGEPVNEADAAALEHDKAYDRQLDSGDNPYLKYNHADAEFQERLKEDTSFGGNLGRAVFQAKKRVLEPLGLVGEPVKTAPGKKRPVEHSPVEPDSSSGTGKAGQQPARKRLNFGQTGDADSVPDPQPLGQPPAAPSGLGTNTMATGSGAPMADNNEGADGVGNSSGNRHCDSTWMGDRVITTSTRTWALPTYNNHLYRQISSQSGASNDNHYFGYSTPWGYFDFNRFHCHFSPRDWQRLINNNWGFRPKRLNFKLFNIQVKEVTQNDGTTTIANNLTSTVQVFTDSEYQLPYVLGSAHQGCLPPFPADVFMVPQYGYLTLSNGSQAVGRSSFYCPEYFPSQMLRTGNNFTFSYTFEDVPFHSSYAHSQSLDRLMNPLIDQYLYYLSTTNTPSGTTTQSRLQFSQAGASDIRDQSRNWLPGPCYRQQRVSKTSADNNNSEYSWTGATKYHLNGRDSLVNPGPAMASHKDNEEKFFPQSGVLIFGKQGSEKTNVDIEKVMITDEEEIRTTNPVATEQYGSVSTNLQRGNRQAATADVNTQGVLPGMVWQDRDVYLQGPIWAKIPHTDGHFHPSPLMGGFGPKHPPPQILIKNTPVPANPSTTFSAAKFASFITQYSTGQVSVEIEWELQKENSKRWNPEIQYTSNYNKSVNVDFTVDTNGVYSEPRPIGTRYLTRNL

SEQ ID NO: 290 - DNA, 2205 bp, Adeno-associated virus
atggctgccgatggttatcttccagattggctcgaggacactctctctgaaggaataagacagtggtggaagctcaaacctggcccaccaccaccaaagcccgcagagcggcataaggacgacagcaggggtcttgtgcttcctgggtacaagtacctcggacccttcaacggactcgacaagggagagccggtcaacgaggcagacgccgcggccctcgagcacgacaaggcctacgaccggcagctcgacagcggagacaacccgtacctcaagtacaaccacgccgacgcggagtttcaggagcgtcttaaagaagatacgtcttttgggggcaacctcggacgagcagtcttccaggcgaaaaagagggttcttgaacctctgggcctggttgaggaacctgttaagacggctccgggaaaaaagaggccggtagagcactctcctgcggagccagactcctcctcgggaaccggaaaagcgggccagcagcctgcaagaaaaagactgaatttcggtcagactggagacgcagactccgtacctgacccccagcctctcagacagccaccagcagcccccacaagtttgggatctactacaatggctacaggcagtggcgcaccaatggcagacaataacgagggtgccgatggagtgggtaattcctcaggaaattggcattgcgattcccaatggctgggcgacagagtcatcaccaccagcacccgaacctgggccctgcccacctacaacaaccacctttacaagcaaatctccagccaatcaggagcctcaaacgacaaccactactttggctacagcaccccctgggggtattttgacttcaacagattccactgccacttttcaccacgtgactggcaaagactcatcaacaacaactggggattccgacccaagagactcaacttcaagctctttaacattcaagtcaaagaggtcacgcagaatgacggtacgacgacgattgccaataaccttaccagcacggttcaggtgtttactgactcggagtaccagctcccgtacgtcctcggctcggcgcatcaaggatgcctcccgccgtttccagcggacgtcttcatggtcccacagtatggatacctcaccctgaacaacgggagtcaggcggtaggacgctcttccttttactgcctggagtactttccttctcagatgctgcgtactggaaacaactttcagttcagctacacttttgaagacgtgcctttccacagcagctacgctcacagccagagtttggatcggctgatgaatcctctgatcgaccagtacctgtattatctaaacagaacacaaacagctagtggaactcagcagtctcggctactgtttagccaagctggacccacaagcatgtctcttcaagctaaaaactggctgcctggaccgtgttatcgccagcagcgtttgtcaaagcaggcaaacgacaacaacaacagcaactttccctggactggagctaccaagtactacctcaatggcagagactctttggtgaacccgggcccggccatggccagccacaaggacgatgaagaaaagtttttccccatgcatggaaccctaatatttggtaaagaaggaacaaatgctaccaacgcggaattggaaaatgtcatgattacagatgaagaggaaatcaggaccaccaatcccgtggctacagagcagtacggatatgtgtcaaataatttgcaaaactcaaatactgctgcaagtactgaaactgtgaatcaccaaggagcattacctggtatggtgtggcaggatcgagacgtgtacctgcagggacccatttgggccaagattcctcacaccgatggacactttcatccttctccactgatgggaggttttggactcaaacacccgcctcctcagattatgatcaaaaacactcccgttccagccaatcctcccacaaacttcagttctgccaagtttgcttccttcatcacacagtattccacgggacaggtcagcgtggagatcgagtgggagctgcagaaggagaacagcaaacgctggaatcccgaaattcagtacacttccaactacaacaaatctgttaatgtggactttactgtggacactaatggtgtgtattcagagcctcgccccattggcaccagatacctgactcgtaatctgtaa

SEQ ID NO: 291 - protein, 734 aa, Adeno-associated virus
MAADGYLPDWLEDTLSEGIRQWWKLKPGPPPPKPAERHKDDSRGLVLPGYKYLGPFNGLDKGEPVNEADAAALEHDKAYDRQLDSGDNPYLKYNHADAEFQERLKEDTSFGGNLGRAVFQAKKRVLEPLGLVEEPVKTAPGKKRPVEHSPAEPDSSSGTGKAGQQPARKRLNFGQTGDADSVPDPQPLRQPPAAPTSLGSTTMATGSGAPMADNNEGADGVGNSSGNWHCDSQWLGDRVITTSTRTWALPTYNNHLYKQISSQSGASNDNHYFGYSTPWGYFDFNRFHCHFSPRDWQRLINNNWGFRPKRLNFKLFNIQVKEVTQNDGTTTIANNLTSTVQVFTDSEYQLPYVLGSAHQGCLPPFPADVFMVPQYGYLTLNNGSQAVGRSSFYCLEYFPSQMLRTGNNFQFSYTFEDVPFHSSYAHSQSLDRLMNPLIDQYLYYLNRTQTASGTQQSRLLFSQAGPTSMSLQAKNWLPGPCYRQQRLSKQANDNNNSNFPWTGATKYYLNGRDSLVNPGPAMASHKDDEEKFFPMHGTLIFGKEGTNATNAELENVMITDEEEIRTTNPVATEQYGYVSNNLQNSNTAASTETVNHQGALPGMVWQDRDVYLQGPIWAKIPHTDGHFHPSPLMGGFGLKHPPPQIMIKNTPVPANPPTNFSSAKFASFITQYSTGQVSVEIEWELQKENSKRWNPEIQYTSNYNKSVNVDFTVDTNGVYSEPRPIGTRYLTRNL

SEQ ID NO: 292 - DNA, 3160 bp, Adeno-associated virus
acccttcactaaagggactagtcctgcaggtttaaacgaattcgcccttgctgcgtcaactggaccaatgagaactttcccttcaacgactgtgtcgacaagatggtgatttggtgggaggaggggaagatgaccgccaaggtcgtggagtcggccaaagccattctcggaggaagcaaggtgcgcgtggaccagaaatgcaagtcctcggcccagatagatccgactcccgtgatcgtcacctccaacaccaacatgtgcgccgtgattgacgggaactcaacgaccttcgaacaccagcagccgttgcaagaccggatgttcaaatttgaactcacccgccgtctggatcatgactttgggaaggtcaccaagcgggaagtcaaagactttttccggtgggcaaaggatcacgtggttgaggtggagcatgaattctacgtcaaaaagggtggagccaagaaaagacccgcccctagtgacgcagatataagtgagcccaaacgggtgcgcgagtcagttgcgcagccatcgacgtcagacgcggaagcttcgatcaactacgcggacaggtaccaaaacaaatgttctcgtcacgtgggcatgaatctgatgctgtttccctgcagacaatgcgagagaatgaatcaaaattcaaatatctgcttcactcacggacagaaagactgtttagagtgctttcccgtgtcagaatctcaacctgtttctgtcgtcaaaaaggcgtatcagaaactgtgctacattcatcatatcatgggaaaggtgccagacgcttgcactgcctgcgatctggtcaatgtggatttggatgactgcatctctgaacaataaatgatttaaatcaggtatggctgccgatggttatcttccagattggctcgaggacactctctctgaaggaataagacagtggtggaagctcaaacctggcccaccaccaccaaagcccgcagagcggcataaggacgacagcaggggtcttgtgcttcctgggtacaagtacctcggacccttcaacggactcgacaagggagagccggtcaacgaggcagacgccgcggccctcgagcacgacaaggcctacgaccggcagctcgacagcggagacaacccgtacctcaagtacaaccacgccgacgcggagtttcaggagcgtcttaaagaagatacgtcttttgggggcaacctcggacgagcagtcttccaggcgaaaaagagggttcttgaacctctgggcctggttgaggaacctgttaagacggctccgggaaaaaagaggccggtagagcactctcctgcggagccagactcctcctcgggaaccggaaaagcgggccagcagcctgcaagaaaaagactgaatttcggtcagactggagacgcagactccgtacctgacccccagcctctcagacagccaccagcagcccccacaagtttgggatctactacaatggctacaggcagtggcgcaccaatggcagacaataacgagggtgccgatggagtgggtaattcctcaggaaattggcattgcgattcccaatggctgggcgacagagtcatcaccaccagcacccgaacctgggccctgcccacctacaacaaccacctttacaagcaaatctccagccaatcaggagcctcaaacgacaaccactactttggctacagcaccccctgggggtattttgacttcaacagattccactgccacttttcaccacgtgactggcaaagactcatcaacaacaactggggattccgacccaagagactcaacttcaagctctttaacattcaagtcaaagaggtcacgcagaatgacggtacgacgacgattgccaataaccttaccagcacggttcaggtgtttactgactcggagtaccagctcccgtacgtcctcggctcggcgcatcaaggatgcctcccgccgtttccagcggacgtcttcatggtcccacagtatggatacctcaccctgaacaacgggagtcaggcggtaggacgctcttccttttactgcctggagtactttccttctcagatgctgcgtactggaaacaactttcagttcagctacacttttgaagacgtgcctttccacagcagctacgctcacagccagagtttggatcggctgatgaatcctctgatcgaccagtacctgtattatctaaacagaacacaaacagctagtggaactcagcagtctcggctactgtttagccaagctggacccacaagcatgtctcttcaagctaaaaactggctgcctggaccgtgttatcgccagcagcgtttgtcaaagcaggcaaacgacaacaacaacagcaactttccctggactggagctaccaagtactacctcaatggcagagactctttggtgaacccgggcccggccatggccagccacaaggacgatgaagaaaagtttttccccatgcatggaaccctaatatttggtaaagaaggaacaaatgctaccaacgcggaattggaaaatgtcatgattacagatgaagaggaaatcaggaccaccaatcccgtggctacagagcagtacggatatgtgtcaaataatttgcaaaactcaaatactgctgcaagtactgaaactgtgaatcaccaaggagcattacctggtatggtgtggcaggatcgagacgtgtacctgcagggacccatttgggccaagattcctcacaccgatggacactttcatccttctccactgatgggaggttttggactcaaacacccgcctcctcagattatgatcaaaaacactcccgttccagccaatcctcccacaaacttcagttctgccaagtttgcttccttcatcacacagtattccacgggacaggtcagcgtggagatcgagtgggagctgcagaaggagaacagcaaacgctggaatcccgaaattcagtacacttccaactacaacaaatctgttaatgtggactttactgtggacactaatggtgtgtattcagagcctcgccccattggcaccagatacctgactcgtaatctgtaattgcttgttaatcaataaaccgtttaattcgtttcagttgaactttggtctctgcgaagggcgaattcgcggccgctaaatcaatcg

SEQ ID NO: 293 - protein, 734 aa, Adeno-associated virus
MAADGYLPDWLEDTLSEGIRQWWKLKPGPPPPKPAERHKDDSRGLVLPGYKYLGPFNGLDKGEPVNEADAAALEHDKAYDRQLDSGDNPYLKYNHADAEFQERLKEDTSFGGNLGRAVFQAKKRVLEPLGLVEEPVKTAPGKKRPVEHSPAEPDSSSGTGKAGQQPARKRLNFGQTGDADSVPDPQPLGQPPAAPTSLGSTTMATGSGAPMADNNEGADGVGNSSGNWHCDSQWLGDRVITTSTRTWALPTYNNHLYKQISSQSGASNDNHYFGYSTPWGYFDFNRFHCRFSPRDWQRLINNNWGFRPKRLNFKLFNIQVKEVTQNDGTTTIANNLTSTVQVFTDSEYQLPYVLGSAHQGCLPPFPADVFMVPQYGYLTLNNGSQAVGRSSFYCLEYFPSQMLRTGNNFQFSYTFEDVPFHSSYAHSQGLDRLMNPLIDQYLYYLNRTQTASGTQQSRLLFSQAGPTSMSLQAKNWLPGPCYRQQRLSKQANDNNNSNFPWTGATKYHLNGGDSLVNPGPAMASHKDDEEKFFPMHGTLIFGKEGTNATNAELENVMITDEEEIRTTNPVATEQYGYVSNNLQNSNTAASTETVNHQGALPGMVWQDRDVYLRGPIWAKIPHADGHFHPSPLMGGFGLKHPPPQIMIKNTPVPANPPTNFSSAKFASFITQYSTGQVSVEIEWELQKENSKRWNPEIQYTSNYNKSVNVDFTVDTNGVYSEPRPIGTRYLTRNL

SEQ ID NO: 294 - DNA, 3157 bp, Adeno-associated virus
ctcactaagggactagtcctgcaggtttaaacgaattcgcccttgctgcgtcaactggaccaatgagaactttcccttcaacgactgtgtcgacaagatggtgatttggtgggaggaggggaagatgaccgccaaggtcgtggagtcggccaaagccactctcggaggaagcaaggtgcgcgtggaccagaaacgcaagtcctcggcccagatagatccgactcccgtgatcgtcacctccaacaccaacatgtgcgccgtgattgacgggaactcaacgaccttcgaacaccagcagccgttgcaagaccgaatgttcaaatttgaactcacccgccgtctggatcatgacttcgggaaggtcaccaagcaggaagtcaaagactttttccggtgggcaaaggatcacgtggttgaggtggagcatgaattctacgtcaaaaagggtggagccaagaaaagacccgcccctagtgacgcagatataagtgagcccaaacgggtgcgcgagtcagttgcgcagccatcgacgtcagacgcggaagcttcgatcaactacgcggacaggtaccaaaacaaatgttctcgtcacgtgggcatgaatctgatgctgtttccctgcagacaatgcgagagaatgaatcaaaattcaaatatctgcttcactcacggacagaaagactgtttagagtgctttcccgtgtcagaatctcaacctgtttctgtcgtcaaaaaggcgtatcagaaactgtgctacattcatcatatcatgggaaaggtgccagacgcttgcactgcctgcgatctggtcaatgtggatttggatgactgcatctctgaacaataaatgatttaaatcaggtatggctgccgatggttatcttccagattggctcgaggacactctctctgaaggaataagacagtggtggaagctcaaacctggcccaccaccaccaaagcccgcagagcggcataaggacgacagcaggggtcttgtgcttcctgggtacaagtacctcggacccttcaacggactcgacaagggagagccggtcaacgaggcagacgccgcggctctcgagcacgacaaggcctacgaccggcagctcgacagcggagacaacccgtacctcaagtacaaccacgccgacgcggagtttcaggagcgtcttaaagaagatacgtcttttgggggcaacctcggacgagcagtcttccaggcgaaaaagagggttcttgaacctctgggcctggttgaggaacctgttaagacggctccgggaaaaaagaggccggtagagcactctcctgcggagccagactcctcctcgggaaccggaaaagcgggccagcagcctgcaagaaaaagactgaatttcggtcagactggagacgcagactccgtacctgacccccagcctctcggacagccaccagcagcccccacaagtttgggatctactacaatggctacaggcagtggcgcaccaatggcagacaataacgagggtgccgatggagtgggtaattcctcaggaaattggcattgcgattcccaatggctgggcgacagagtcatcaccaccagcacccgaacctgggccctgcccacctacaacaaccacctttacaagcaaatctccagccaatcaggagcctcaaacgacaaccactactttggctacagcaccccctgggggtattttgacttcaacagattccactgccgcttttcaccacgtgactggcaaagactcatcaacaacaactggggattccgacccaagagactcaacttcaagctctttaacattcaagtcaaagaggtcacgcagaatgacggtacgacgacgattgccaataaccttaccagcacggttcaggtgtttactgactcggagtaccagctcccgtacgtcctcggctcggcgcatcaaggatgcctcccgccgtttccagcggacgtcttcatggtcccacagtatggatacctcaccctgaacaacgggagtcaggcggtaggacgctcttccttttactgcctggagtactttccttctcagatgctgcgtactggaaacaactttcagttcagctacacttttgaagacgtgcctttccacagcagctacgctcacagccagggtttggatcggctgatgaatcctctgatcgaccagtacctgtattatctaaacagaacacaaacagctagtggaactcagcagtctcggctactgtttagccaagctggacccacaagcatgtctcttcaagctaaaaactggctgcctggaccgtgttatcgccagcagcgtttgtcaaagcaggcaaacgacaacaacaacagcaactttccctggactggagctaccaagtaccacctcaatggcggagactctttggtgaacccgggcccggccatggccagccacaaggacgatgaagaaaagtttttccccatgcatggaaccctaatatttggtaaagaaggaacaaatgctaccaacgcggaattggaaaatgtcatgattacagatgaagaggaaatcaggaccaccaatcccgtggctacagagcagtacggatatgtgtcaaataatttgcaaaactcaaatactgctgcaagtactgaaactgtgaatcaccaaggagcattacctggtatggtgtggcaggatcgagacgtgtacctgcggggacccatttgggccaagattcctcacgccgatggacactttcatccttctccactgatgggaggttttggactcaaacacccgcctcctcagattatgatcaaaaacactcccgttccagccaatcctcccacaaacttcagttctgccaagtttgcttccttcatcacacagtattccacgggacaggtcagcgtggagatcgagtgggagctgcagaaggagaacagcaaacgctggaatcccgaaattcagtacacttccaactacaacaaatctgttaatgtggactttactgtggacactaatggtgtgtattcagagcctcgccccattggcaccagatacctgactcgtaatctgtaattgcttgttaatcaataaaccgtttaattcgtttcagttgaactttggtctctgcgaagggcgaattcgcggccgctaaattcaattcg

SEQ ID NO: 295 - protein, 734 aa, Adeno-associated virus
MAADGYLPDWLEDTLSEGIRQWWKLKPGPPPPKPAERHKDDSRGLVLPGYKYLGPFNGLDKGEPVNEADAAALEHDKAYDRQLDSGDNPYLKYNHADAEFQERLKEDTSFGGNLGRAVFQAKKRVLEPLGLVEEPVKTAPGKKRPVEHSPAEPDSSSGTGKAGQQPARKRLNFGQTGDADSVPDPQPLGQPPAAPTSLGSTTMATGSGAPMADNNEGADGVGNSSGNWHCDSQWLGDRVITTSTRTWALPTYNNHLYKQISSQSGASNDNHYFGYSTPWGYFDFNRFHCHFSPRDWQRLINNNWGFRPKRLNFKLFNIQVKEVTQNDGTTTIANNLTSTVQVFTDSEYQLPYVLGSAHQGCLPPFPADVFMVPQYGYLTLNNGSQAVGRSSFYCLECFPSQMLRTGNNFQFSYTFEDVPFHSSYAHSQSLDRLMNPLIDQYLYYLNRTQTASGTQQSRLLFSQAGPTSMSLQAKNWLPGPCYRQQRLSKQANDNNNSNFPWTGATKYHLNGRDSLVNPGPAMASHKDDEEKFFPMHGTLIFGKEGTNATNAELENVMITDEEEIRTTNPVATEQYGYVSNNLQNSNTAASTETVNHQGALPGMVWQDRDVYLQGPIWAKIPHTDGHFHPSPLMGGFGLKHPPPQIMIKNTPVPANPPTNFSSAKFASFITQYSTGQVSVEIEWELQKENSKRWNPEIQYTSNYNKSVNVDFTVDTNGVYSEPRPIGTRYLTRNL

SEQ ID NO: 296 - DNA, 2208 bp, Adeno-associated virus
atggctgccgatggttatcttccagattggctcgaggacactctctctgaaggaataagacagtggtggaagctcaaacctggcccaccaccaccaaagcccgcagagcggcataaggacgacagcaggggtcttgtgcttcctggatacaagtacctcggacccttcaacggactcgacaagggagagccggtcaacgaggcagacgccgcggccctcgagcacgacaaggcctacgaccggcagctcgacagcggagacaacccgtacctcaagtacaaccacgccgacgcggagtttcaggagcgccttaaagaagatacgtcttttgggggcaacctcggacgagcagtcttccaggcgaaaaagagggttcttgaacctctgggcctggttgaggaacctgttaagacggctccgggaaaaaagaggccggtagagcactctcctgtggagccagactcctcctcgggaaccggaaaagcgggcaaccagcctgcaagaaaaagattgaatttcggtcagactggagacgcagactccgtacctgacccccagcctctcggacagccaccagcatccccctctggtctgggaactaatacgatggctacaggcagtggcgcaccaatggcagacaataacgagggcgccgacggagtgggtaattcctcgggaaattggcattgcgattccacatggatgggcgacagagtcgtcaccaccagcacccgcacctgggccctgcccacctacaacaaccacctctacaagcagatttccagccaatcaggagccagcaacgacaaccactactttggctacagcaccccttgggggtattttgacttcaacagattccactgccacttttcgccacgcgactggcagagactcatcaacaacaactggggattccggcccaaaagactcaacttcaagctgtttaacattcaagtcaaggaggtcacgcagaatgacggtacgacgacgattgccaataaccttaccagcacggttcaggtgtttactgacttggagtaccagctcccgtacgtcctcggctcggcgcatcaaggatgcctcccgccgttcccagcagacgtcttcatggtgccacagtatggatacctcaccctgaacaacgggagtcaggcggtaggacgctcttccttttactgcctggagtactttccttctcagatgcttcgcaccggaaacaactttaccttcagctacacttttgaagacgttcctttccacagcagctacgctcacagtcaaagtctggaccgtctcatgaatcctctcatcgaccagtacctgtattacttgagcagaacaaacactccaagcggaaccactacgcagtccaggcttcagttttctcaggccggagcgagtgacattcgggaccagtctaggaactggcttcctggaccctgttaccgccagcagcgagtatcaaagacagctgcggataacaacaacagtgaatactcgtggactggagctaccaagtaccacctcaatggcagagactctctggtgaatccgggcccggccatggccagccacaaggacgatgaagaaaagttttttcctcaaagcggggttctcatctttgggaagcaaggctcagagaaaacaaatgtggacattgaaaaggtcatgattacagacgaagaggaaatcaggaccaccaatcccgtggctacggagcagtatggttctgtatctaccaacctccagagcggcaacacacaagcagctacctcagatgtcaacacacaaggcgttcttccaggcatggtctggcaggacagagacgtgtacctgcaggggcccatctgggcaaaaattccacacacggacggacattttcacccctctcccctcatgggcggatttggacttaaacaccctcctccacagattctcattaagaataccccggtacctgcgaatccttcgaccaccttcagcgcggcaaagtttgcttccttcatcacacagtattccacggggcaggtcagcgtggagatcgagtgggagctgcagaaggagaacagcaaacgctggaatcccgaaattcagtacacttccaactacaacaaatctgttaatgtggactttactgtggacactaatggggtgtattcagagcctcgccctattggcaccagatacctgactcgtaatctgtaa

SEQ ID NO: 297 - DNA, 3159 bp, Adeno-associated virus
gattgatttagcggccgcgaattcgcccttgctgcgtcaactggaccaatgagaactttcccttcaacgattgcgtcgacaagatggtgatctggtgggaggagggaaagatgaccgccaaggtcgtggagtcggccaaagccattctcggaggaagcaaggtgcgtgtggaccaaaagtgcaagtcttcggcccagatcgacccgactcccgtgatcgtcacctccaacaccaacatgtgcgccgtgattgatggaaactcaacgaccttcgagcaccagcagccgttgcaagaccggatgttcaaatttgaacttacccgccgtctggatcatgactttggaaaggtcaccaagcaggaagtgaaagactttttccggtgggcaaaggatcacgtggttgaggtggagcatgagttctacgtcaaaaagggtggagccaaaaaaagacccgcccccagtgacgcagatataagtgagcccaaacgggcgcgcgagtcagttgcgcagccatcgacgtcagacgcggaagcttcgatcaactacgcggacaggtaccaaaacaaatgttctcgtcacgtgggcatgaatctgatgctgtttccctgcagacaatgcgagagaatgaatcagaattcaaatatctgcttcactcacggacagaaagactgtccatagtgctttcccgtgtcagaatctcaacccgtttctgtcgtcaaaaaggcgtatcagaaactgtgctacattcatcacatcatgggaaaggtgccagacgcttgcactgcttgcgacctggtcaatgtggatttggatgactgcatctctgaacaataaatgatttaaatcaggtatggctgccgatggttatcttccagattggctcgaggacactctctctgaaggaataagacagtggtggaagctcaaacctggcccaccaccaccaaagcccgcagagcggcataaggacgacagcaggggtcttgtgcttcctggatacaagtacctcggacccttcaacggactcgacaagggagagccggtcaacgaggcagacgccgcggccctcgagcacgacaaggcctacgaccggcagctcgacagcggagacaacccgtacctcaagtacaaccacgccgacgcggagtttcaggagcgccttaaagaagatacgtcttttgggggcaacctcggacgagcagtcttccaggcgaaaaagagggttcttgaacctctgggcctggttgaggaacctgttaagacggctccgggaaaaaagaggccggtagagcactctcctgtggagccagactcctcctcgggaaccggaaaagcgggcaaccagcctgcaagaaaaagattgaatttcggtcagactggagacgcagactccgtacctgacccccagcctctcggacagccaccagcatccccctctggtctgggaactaatacgatggctacaggcagtggcgcaccaatggcagacaataacgagggcgccgacggagtgggtaattcctcgggaaattggcattgcgattccacatggatgggcgacagagtcgtcaccaccagcacccgcacctgggccctgcccacctacaacaaccacctctacaagcagatttccagccaatcaggagccagcaacgacaaccactactttggctacagcaccccttgggggtattttgacttcaacagattccactgccacttttcgccacgcgactggcagagactcatcaacaacaactggggattccggcccaaaagactcaacttcaagctgtttaacattcaagtcaaggaggtcacgcagaatgacggtacgacgacgattgccaataaccttaccagcacggttcaggtgtttactgacttggagtaccagctcccgtacgtcctcggctcggcgcatcaaggatgcctcccgccgttcccagcagacgtcttcatggtgccacagtatggatacctcaccctgaacaacgggagtcaggcggtaggacgctcttccttttactgcctggagtactttccttctcagatgcttcgcaccggaaacaactttaccttcagctacacttttgaagacgttcctttccacagcagctacgctcacagtcaaagtctggaccgtctcatgaatcctctcatcgaccagtacctgtattacttgagcagaacaaacactccaagcggaaccactacgcagtccaggcttcagttttctcaggccggagcgagtgacattcgggaccagtctaggaactggcttcctggaccctgttaccgccagcagcgagtatcaaagacagctgcggataacaacaacagtgaatactcgtggactggagctaccaagtaccacctcaatggcagagactctctggtgaatccgggcccggccatggccagccacaaggacgatgaagaaaagttttttcctcaaagcggggttctcatctttgggaagcaaggctcagagaaaacaaatgtggacattgaaaaggtcatgattacagacgaagaggaaatcaggaccaccaatcccgtggctacggagcagtatggttctgtatctaccaacctccagagcggcaacacacaagcagctacctcagatgtcaacacacaaggcgttcttccaggcatggtctggcaggacagagacgtgtacctgcaggggcccatctgggcaaaaattccacacacggacggacattttcacccctctcccctcatgggcggatttggacttaaacaccctcctccacagattctcattaagaataccccggtacctgcgaatccttcgaccaccttcagcgcggcaaagtttgcttccttcatcacacagtattccacggggcaggtcagcgtggagatcgagtgggagctgcagaaggagaacagcaaacgctggaatcccgaaattcagtacacttccaactacaacaaatctgttaatgtggactttactgtggacactaatggggtgtattcagagcctcgccctattggcaccagatacctgactcgtaatctgtaattgcttgttaatcaataaaccgtttaattcgtttcagttgaactttggtctctgcgaagggcgaattcgtttaaacctgcaggactagtccctttagtgagg

SEQ ID NO: 298 - protein, 735 aa, Adeno-associated virus
MAADGYLPDWLEDTLSEGIRQWWKLKPGPPPPKPAERHKDDSRGLVLPGYKYLGPFNGLDKGEPVNEADAAALEHDKAYDRQLDSGDNPYLKYNHADAEFQERLKEDTSFGGNLGRAVFQAKKRVLEPLGLVEEPVKTAPGKKRPVEHSPVEPDSSSGTGKAGNQPARKRLNFGQTGDADSVPDPQPLGQPPASPSGLGTNTMATGSGAPMADNNEGADGVGNSSGNWHCDSTWMGDRVVTTSTRTWALPTYNNHLYKQISSQSGASNDNHYFGYSTPWGYFDFNRFHCHFSPRDWQRLINNNWGFRPKRLNFKLFNIQVKEVTQNDGTTTIANNLTSTVQVFTDLEYQLPYVLGSAHQGCLPPFPADVFMVPQYGYLTLNNGSQAVGRSSFYCLEYFPSQMLRTGNNFTFSYTFEDVPFHSSYAHSQSLDRLMNPLIDQYLYYLSRTNTPSGTTTQSRLQFSQAGASDIRDQSRNWLPGPCYRQQRVSKTAADNNNSEYSWTGATKYHLNGRDSLVNPGPAMASHKDDEEKFFPQSGVLIFGKQGSEKTNVDIEKVMITDEEEIRTTNPVATEQYGSVSTNLQSGNTQAATSDVNTQGVLPGMVWQDRDVYLQGPIWAKIPHTDGHFHPSPLMGGFGLKHPPPQILIKNTPVPANPSTTFSAAKFASFITQYSTGQVSVEIEWELQKENSKRWNPEIQYTSNYNKSVNVDFTVDTNGVYSEPRPIGTRYLTRNL

SEQ ID NO: 299 - DNA, 2205 bp, Adeno-associated virus
atggctgccgatggttatcttccagattggctcgaggacactctctctgaaggaataagacagtggtggaagctcaaacctggcccaccaccaaagcccgcagagcggcataaggacgacagcaggggtcttgtgcttcctggatacaagtacctcggacccttcaacggactcgacaagggagagccggtcaacgaggcagacgccgcggccctcgagcacgacaaggcctacgaccggcagctcgacagcggagacaacccgtacctcaagtacaaccacgccgacgcggagtttcaggagcgccttaaagaagatacgtcttttgggggcaacctcggacgagcagtcttccaggcgaaaaagagggttcttgaacctctgggcctggttgaggaacctgttaagacggctccgggaaaaaagaggcccgtagagcactctcctgtggagccagactcctcctcgggaaccggaaaagcgggcaaccagcctgcaagaaaaagattgaatttcggtcagactggagacgcagactccgtacctgacccccagcctctcggacagccaccagcagccccctctggtctgggaactaatacgatggctacaggcagtggcgcaccaatggcagacaataacgagggcgccgacggagtgggtaattcctcgggagattggcattgcgattccacatggatgggcgacagagtcatcaccaccagcacccgcacctgggccctgcccacctacaacaaccacctctacaagcagatttccagccaatcaggagccagcaatgacaaccactactttggctacagcaccccttgggggtattttgacttcaacagattccactgccacttttcgccacgcgactggcagagactcatcaacaacaactggggattccggcccaaaagactcaacctcaagctgtttaacattcaagtcaaggaggtcacgcagaatgacggtacgacgacgattgccaataaccttaccagcacggttcaggtgtttactgacttggagtaccagctcccgtacgtcctcggctcggcgcatcaaggatgcctcccgccgttcccagcagacgtcttcatggtgccacagtatggatacctcaccctgaacaacgggagtcaggcggtaggacgctcttccttttactgcctggagtactttccttctcagatgcttcgtaccggaaacaactttaccttcagctacacttttgaagacgttcctttccacagcagctacgctcacagtcaaagtctggaccgtctcatgaatcctctcatcgaccagtacctgtattacttgagcagaacaaacactccaagcggaaccactacgcagtccaggcttcagttttctcaggccggagcgagtgacattcgggaccagtctaggaactggcttcctggaccctgttaccgccagcagcgagtatcaaagacagctgcggataacaacaacggtgaatactcgtggactggagctaccaagtaccacctcaatggcagagactctctggtgaatccgggcccggccatggccagccacaaggacgatgaagaaaagttttttcctcaaagcggggttctcatctttgggaagcaaggctcagagaaaacaaatgtggacattgaaaaggtcatgattacagacgaagaggaaatcaggaccaccaatcccgtggctacggagcagtatggttctgtatctaccaacctccagagcggcaacacacgagcagctacctcagatgtcaacacacaaggcgttcttccaggcatggtctggcaggacagagacgtgtacctgcaggggcccatctgggcaaaaattccacacacggacggacattttcacccctctcccctcatgggcggatttggacttaaacaccctcctccacagattctcattaagaataccccggtacctgcgaatccttcgaccaccttcagcgcggcaaagtttgcttccttcatcacacagtattccacggggcaggtcagcgtggagatcgagtgggagctgcagaaggagaacagcaaacgctggaatcccgaaattcagtacacttccaactacaacaaatctgttaatgtggactttactgtggacactaatggggtgtattcagagcctcgccctattggcaccagatacctgactcgtaatctgtaa

SEQ ID NO: 300 - DNA, 3156 bp, Adeno-associated virus
cgattgaatttagcggccgcgaattcgcccttgctgcgtcaacggaccaatgagaactttcccttcaacgattgcgtcgacaagatggtgatctggtgggaggagggaaagatgaccgccaaggtcgtggagtcggccaaagccattctcggaggaagcaaggtgcgtgtggaccaaaagtgcaagtcttcggcccagatcgacccgactcccgtgatcgtcacctccaacaccaacatgtgcgccgtgattgatggaaactcaacgaccttcgagcaccagcagccgttgcaagaccggatgttcaaatttgaacttacccgccgtctggatcatgactttggaaaggtcaccaagcaggaagtgaaagactttttccggtgggcaaaggatcacgtggttgaggtggagcatgagttctacgtcaaaaagggtggagccaaaaaaagacccgcccccagtgacgcagatataagtgagcccaaacgggcgcgcgagtcagttgcgcagccatcgacgtcagacgcggaagcttcgatcaactacgcggacaggtaccaaaacaaatgttctcgtcacgtgggcatgaatctgatgctgtttccctgcagacaatgcgagcgaatgaatcagaattcaaatatctgcttcactcacggacagaaagactgtttagagtgctttcccgtgtcagaatctcaacccgtttctgtcgtcaaaaaggcgtatcagaaactgtgctacattcatcacatcatgggaaaggtgccagacgcttgcactgcttgcgacctggtcaatgtggatttggatgactgcatctctgaacaataaatgatttaaatcaggtatggctgccgatggttatcttccagattggctcgaggacactctctctgaaggaataagacagtggtggaagctcaaacctggcccaccaccaaagcccgcagagcggcataaggacgacagcaggggtcttgtgcttcctggatacaagtacctcggacccttcaacggactcgacaagggagagccggtcaacgaggcagacgccgcggccctcgagcacgacaaggcctacgaccggcagctcgacagcggagacaacccgtacctcaagtacaaccacgccgacgcggagtttcaggagcgccttaaagaagatacgtcttttgggggcaacctcggacgagcagtcttccaggcgaaaaagagggttcttgaacctctgggcctggttgaggaacctgttaagacggctccgggaaaaaagaggcccgtagagcactctcctgtggagccagactcctcctcgggaaccggaaaagcgggcaaccagcctgcaagaaaaagattgaatttcggtcagactggagacgcagactccgtacctgacccccagcctctcggacagccaccagcagccccctctggtctgggaactaatacgatggctacaggcagtggcgcaccaatggcagacaataacgagggcgccgacggagtgggtaattcctcgggagattggcattgcgattccacatggatgggcgacagagtcatcaccaccagcacccgcacctgggccctgcccacctacaacaaccacctctacaagcagatttccagccaatcaggagccagcaatgacaaccactactttggctacagcaccccttgggggtattttgacttcaacagattccactgccacttttcgccacgcgactggcagagactcatcaacaacaactggggattccggcccaaaagactcaacctcaagctgtttaacattcaagtcaaggaggtcacgcagaatgacggtacgacgacgattgccaataaccttaccagcacggttcaggtgtttactgacttggagtaccagctcccgtacgtcctcggctcggcgcatcaaggatgcctcccgccgttcccagcagacgtcttcatggtgccacagtatggatacctcaccctgaacaacgggagtcaggcggtaggacgctcttccttttactgcctggagtactttccttctcagatgcttcgtaccggaaacaactttaccttcagctacacttttgaagacgttcctttccacagcagctacgctcacagtcaaagtctggaccgtctcatgaatcctctcatcgaccagtacctgtattacttgagcagaacaaacactccaagcggaaccactacgcagtccaggcttcagttttctcaggccggagcgagtgacattcgggaccagtctaggaactggcttcctggaccctgttaccgccagcagcgagtatcaaagacagctgcggataacaacaacggtgaatactcgtggactggagctaccaagtaccacctcaatggcagagactctctggtgaatccgggcccggccatggccagccacaaggacgatgaagaaaagttttttcctcaaagcggggttctcatctttgggaagcaaggctcagagaaaacaaatgtggacattgaaaaggtcatgattacagacgaagaggaaatcaggaccaccaatcccgtggctacggagcagtatggttctgtatctaccaacctccagagcggcaacacacgagcagctacctcagatgtcaacacacaaggcgttcttccaggcatggtctggcaggacagagacgtgtacctgcaggggcccatctgggcaaaaattccacacacggacggacattttcacccctctcccctcatgggcggatttggacttaaacaccctcctccacagattctcattaagaataccccggtacctgcgaatccttcgaccaccttcagcgcggcaaagtttgcttccttcatcacacagtattccacggggcaggtcagcgtggagatcgagtgggagctgcagaaggagaacagcaaacgctggaatcccgaaattcagtacacttccaactacaacaaatctgttaatgtggactttactgtggacactaatggggtgtattcagagcctcgccctattggcaccagatacctgactcgtaatctgtaattgcttgttaatcaataaaccgtttaattcgtttcagttgaactttggtctctgcgaagggcgaattcgtttaaacctgcaggactagtccctttagtgag

SEQ ID NO: 301 - protein, 734 aa, Adeno-associated virus
MAADGYLPDWLEDTLSEGIRQWWKLKPGPPPKPAERHKDDSRGLVLPGYKYLGPFNGLDKGEPVNEADAAALEHDKAYDRQLDSGDNPYLKYNHADAEFQERLKEDTSFGGNLGRAVFQAKKRVLEPLGLVEEPVKTAPGKKRPVEHSPVEPDSSSGTGKAGNQPARKRLNFGQTGDADSVPDPQPLGQPPAAPSGLGTNTMATGSGAPMADNNEGADGVGNSSGDWHCDSTWMGDRVITTSTRTWALPTYNNHLYKQISSQSGASNDNHYFGYSTPWGYFDFNRFHCHFSPRDWQRLINNNWGFRPKRLNLKLFNIQVKEVTQNDGTTTIANNLTSTVQVFTDLEYQLPYVLGSAHQGCLPPFPADVFMVPQYGYLTLNNGSQAVGRSSFYCLEYFPSQMLRTGNNFTFSYTFEDVPFHSSYAHSQSLDRLMNPLIDQYLYYLSRTNTPSGTTTQSRLQFSQAGASDIRDQSRNWLPGPCYRQQRVSKTAADNNNGEYSWTGATKYHLNGRDSLVNPGPAMASHKDDEEKFFPQSGVLIFGKQGSEKTNVDIEKVMITDEEEIRTTNPVATEQYGSVSTNLQSGNTRAATSDVNTQGVLPGMVWQDRDVYLQGPIWAKIPHTDGHFHPSPLMGGFGLKHPPPQILIKNTPVPANPSTTFSAAKFASFITQYSTGQVSVEIEWELQKENSKRWNPEIQYTSNYNKSVNVDFTVDTNGVYSEPRPIGTRYLTRNL

SEQ ID NO: 302 - DNA, 2208 bp, Adeno-associated virus
atggctgccgatggttatcttccagattggctcgaggacactctctctgaaggaataagacagtggtggaagctcaaacctggcccaccaccaccaaagcccgcagagcggcataaggacgacagcaggggtcttgtgcttcctgggtacaagtacctcggacccttcaacggactcgacaagggagagccggtcaacgaggcagacgccgcggccctcgagcacgacaaggcctacgaccggcagctcgacagcggagacaacccgtacctcaagtacgaccacgccgacgcggagtttcaggagcgccttaaagaagatacgtcttttgggggcaacctcggacgagcagtcttccaggcaaaaaagagggttcttgaacctctgggcctggttgaggagcctgttaagacggctccgggaaaaaagaggccggtagagcactctcctgtggagccagactcctcctcgggaaccggaaaagcgggcaaccagcctgcaagaaagagattgaatttcggtcagactggagacgcagactccgtacctgacccccagcctctcggacagccaccagcagccccctctggtctgggaactaatacgatggctacaggcagtggcgcaccaatggcagacaataacgatggcgccgacggagtgggtaattcctcgggaaattggcattgcgattccacatggatgggcgacagagtcatcaccaccagcacccgaacctgggctctgcccacctacaacaaccatctgtacaagcagatttccagccaatcaggagccagcaacgacaaccactactttggctacagcaccccttgggggtattttgacttcaacagattccactgccacttttcaccacgtgactggcaaagactcatcaacaacaactggggattccggcccaagagactcaacttcaagctctttaacattcaagtcagagaggtcacgcagaatgatggtacgacgacgattgccaataaccttaccagcacggttcaggtgtttactgactcggagtaccagctcccgtacgtcctcggctcggcgcatcaaggatgcctcccgccgttcccagcagacgtcttcatggtgccacagtatggatacctcaccctgaacaacgggagtcaggcagtaggacgctcttcattttactgcctggagtacttcccttctcagatgctgcgtaccggaaacaactttaccttcagctacacctttgaggatgttcctttccacagcagctacgctcacagccagagtttggaccgtctcatgaatcctctcatcgaccagtacctgtattacttgagcagaacaaacactccaagcggaaccaccacgcagtccaggcttcagttttctcaggccggagcgagtgacattcgggatcagtctaggaactggcttcctggaccctgttaccgccagcagcgagtatcaaagacatctgcggacaacaacaacagtgaatactcgtggattggagctaccaagtaccacctcaatggcagagactctctggtgaatccgggcccggcaatggccagccacaaggacgatgaagaaaagttttttcctcagagcggggttctcatctttggaaaacaaggatcagagaaaacaaatgtggacattgaaaaggtcatgattacagacgaagaggaaatcagaaccaccaatcccgtggccacggagcagtatggttctgtatctaccaacctccagagcggcaacacacaagcatctactgcagatgtcaacacacaaggcgttcttccaggcatggtctggcaggacagagacgtgtacctgcaggggcctatctgggcaaagattccgcacacggacggacattttcacccctctcccctcatgggcggattcggacttaaacaccctcctccacagattctcatcaaaaacaccccggtacctgcgaatccttcgaccaccttcagtgcggcaaagtttgcttccttcatcacacagtattccacggggcgggtcagcgtggagatcgagtgggagctacagaaggagaacagcaaacgctggaatcccgagatccagtacacttccaactacaacaaatctgttaatgtggactttactgtggacactaatggtgtgtattcagagcctcgccccattggcaccagatacctgactcgtaatctgtaa

SEQ ID NO: 303 - protein, 735 aa, Adeno-associated virus
MAADGYLPDWLEDTLSEGIRQWWKLKPGPPPPKPAERHKDDSRGLVLPGYKYLGPFNGLDKGEPVNEADAAALEHDKAYDRQLDSGDNPYLKYDHADAEFQERLKEDTSFGGNLGRAVFQAKKRVLEPLGLVEEPVKTAPGKKRPVEHSPVEPDSSSGTGKAGNQPARKRLNFGQTGDADSVPDPQPLGQPPAAPSGLGTNTMATGSGAPMADNNDGADGVGNSSGNWHCDSTWMGDRVITTSTRTWALPTYNNHLYKQISSQSGASNDNHYFGYSTPWGYFDFNRFHCHFSPRDWQRLINNNWGFRPKRLNFKLFNIQVREVTQNDGTTTIANNLTSTVQVFTDSEYQLPYVLGSAHQGCLPPFPADVFMVPQYGYLTLNNGSQAVGRSSFYCLEYFPSQMLRTGNNFTFSYTFEDVPFHSSYAHSQSLDRLMNPLIDQYLYYLSRTNTPSGTTTQSRLQFSQAGASDIRDQSRNWLPGPCYRQQRVSKTSADNNNSEYSWIGATKYHLNGRDSLVNPGPAMASHKDDEEKFFPQSGVLIFGKQGSEKTNVDIEKVMITDEEEIRTTNPVATEQYGSVSTNLQSGNTQASTADVNTQGVLPGMVWQDRDVYLQGPIWAKIPHTDGHFHPSPLMGGFGLKHPPPQILIKNTPVPANPSTTFSAAKFASFITQYSTGRVSVEIEWELQKENSKRWNPEIQYTSNYNKSVNVDFTVDTNGVYSEPRPIGTRYLTRNL

SEQ ID NO: 304 - DNA, 2217 bp, Adeno-associated virus
atggctgccgatggttatcttccagattggctcgaggacaacctctctgagggcattcgcgagtggtgggacttgaaacctggagccccgaaacccaaagccaaccagcaaaagcaggacgacggccggggtctggtgcttcctggctacaagtacctcggacccttcaacggactcgacaagggggagcccgtcaacgcggcggacgcagcggccctcgagcacgacaaggcctacgaccagcagctcaaagcgggtgacaatccgtacctgcggtataaccacgccgacgccgagtttcaggagcgtctgcaagaagatacgtcttttgggggcaacctcgggcgagcagtcttccaggccaagaagcgggttctcgaacctctcggtctggttgaggaaggcgctaagacggctcctggaaagaagagaccggtagagccatcaccccagcgttctccagactcctctacgggcatcggcaagacaggccagcagcccgcgaaaaagagactcaactttgggcagactggcgactcagagtcagtgcccgaccctcaaccaatcggagaaccccccgcaggcccctctggtctgggatctggtacaatggctgcaggcggtggcgctccaatggcagacaataacgaaggcgccgacggagtgggtagttcctcaggaaattggcattgcgattccgcatggctgggcgacagagtcatcaccaccagcacccgaccctgggccctccccacctacaacaaccacctctacaagcaaatctccaacgggacatcgggaggaagcaccaacgacaacacctacttcggctacagcaccccctgggggtattttgactttaacagattccactgccacttctcaccacgtgactggcagcgactcatcaacaacaactggggattccggcccaagagactcaacttcaagctcttcaacatccaggtcaaggaggtcacgcagaatgaaggcaccaagaccatcgccaataaccttaccagcacgattcaggtctttacggactcggaataccagctcccgtacgtcctcggctctgcgcaccagggctgcccgcctccgttcccggcggacgtcttcatgattcctcagtacgggtacctgactctgaacaacggcagtcaggccgtgggccgttcctccttctactgcctggagtactttccttctcaaatgcggagaacgggcaacaactttgagttcagctaccagtttgaggacgtgccttttcacagcagctacgcgcatagccaaagcctggaccggctgatgaaccccctcatcgaccagtacctgtactacctgtctcggactcagtccacgggaggtaccgcaggaactcagcagttgctattttctcaggccgggcctaataacatgtcggctcaggccaaaaactggctacccgggccctgctaccggcagcaacgcgtctccacgacactgtcgcaaaataacaacagcaactttgcttggaccggtgccaccaagtatcatctgaatggcagagactctctggtaaatcccggtgtcgctatggcaacgcacaaggacgacgaagagcgattttttccatccagcggagtcttgatgtttgggaaacagggagctggaaaagacaacgtggactatagcagcgttatgctaaccagtgaggaagaaatcaaaaccaccaacccagtggccacagaacagtacggcgtggtggccgataacctgcaacagcaaaacgccgctcctattgtaggggccgtcaacagtcaaggagccttacctggcatggtctggcagaaccgggacgtgtacctgcagggtcctatctgggccaagattcctcacacggacggcaactttcatccttcgccgctgatgggaggctttggactgaaacacccgcctcctcagatcctgattaagaatacacctgttcccgcggatcctccaactaccttcagtcaagccaagctggcgtcgttcatcacgcagtacagcaccggacaggtcagcgtggaaattgaatgggagctgcagaaagagaacagcaagcgctggaacccagagattcagtatacttccaactactacaaatctacaaatgtggactttgctgtcaatactgagggtacttattcagagcctcgccccattggcacccgttacctcacccgtaacctgtaa

SEQ ID NO: 305 - protein, 738 aa, Adeno-associated virus
MAADGYLPDWLEDNLSEGIREWWDLKPGAPKPKANQQKQDDGRGLVLPGYKYLGPFNGLDKGEPVNAADAAALEHDKAYDQQLKAGDNPYLRYNHADAEFQERLQEDTSFGGNLGRAVFQAKKRVLEPLGLVEEGAKTAPGKKRPVEPSPQRSPDSSTGIGKTGQQPAKKRLNFGQTGDSESVPDPQPIGEPPAGPSGLGSGTMAAGGGAPMADNNEGADGVGSSSGNWHCDSAWLGDRVITTSTRPWALPTYNNHLYKQISNGTSGGSTNDNTYFGYSTPWGYFDFNRFHCHFSPRDWQRLINNNWGFRPKRLNFKLFNIQVKEVTQNEGTKTIANNLTSTIQVFTDSEYQLPYVLGSAHQGCPPPFPADVFMIPQYGYLTLNNGSQAVGRSSFYCLEYFPSQMRRTGNNFEFSYQFEDVPFHSSYAHSQSLDRLMNPLIDQYLYYLSRTQSTGGTAGTQQLLFSQAGPNNMSAQAKNWLPGPCYRQQRVSTTLSQNNNSNFAWTGATKYHLNGRDSLVNPGVAMATHKDDEERFFPSSGVLMFGKQGAGKDNVDYSSVMLTSEEEIKTTNPVATEQYGVVADNLQQQNAAPIVGAVNSQGALPGMVWQNRDVYLQGPIWAKIPHTDGNFHPSPLMGGFGLKHPPPQILIKNTPVPADPPTTFSQAKLASFITQYSTGQVSVEIEWELQKENSKRWNPEIQYTSNYYKSTNVDFAVNTEGTYSEPRPIGTRYLTRNL

SEQ ID NO: 306 - protein, 735 aa, Adeno-associated virus
MAADGYLPDWLEDTLSEGIRQWWKLKPGPPPPKPAERHKDDSRGLVLPGYKYLGPFNGLDKGEPVNEADAAALEHDKAYDRQLDSGDNPYLKYNHADAEFQERLKEDTSFGGNLGRAVFQAKKRVLEPLGLVEEPVKTAPGKKRPVEHSPVEPDSSSGTGKAGQQPARKRLNFGQTGDADSVPDPQPLGQPPAAPSGLGSTTMATGSGAPMADNNEGADGVGNSSGNWHCDSQWLGDRVITTSTRTWALPTYNNHLYKQISSQSGASNDNHYFGYSTPWGYFDFNRFHCHFSPRDWQRLINNNWGFRPKRLNFKLFNIQVKEVTQNDGTTTIANNLTSTVQVFTDSEYQLPYVLGSAHQGCLPPFPADVFMVPQYGYLTLNNGSQAVGRSSFYCLEYFPSQMLRTGNNFQFSYTFEDVPFHSSYAHSQSLDRLMNPLVDQYLYYLNKTQTNSGTLQQSRLLFSQAGPTNMSLQAKNWLPGPCYRQQRLSKQANDNNNSNFPWTAATKYHLNGRDSLVNPGPAMASHKDDEEKFFPMHGTLIFGKQGTNANDADLENVMITDEEEIRTTNPVATEQYGTVSNNLQNSNTGPTTGTVNHQGALPGMVWQDRDVYLQGPIWAKIPHTDGHFHPSPLMGGFGLKHPPPQIMIKNTPVPANPPTNFSSAKFASFITQYSTGQVSVEIEWELQKENSKRWNPEIQYTSNYNKSVNVDFTVDTNGVYSEPRPIGTRYLTRNL

SEQ ID NO: 307 - DNA, 3158 bp, Adeno-associated virus
gattgaatttagcggccgcgaattcgcccttgctgcgtcaactggaccaatgagaactttcctttcaatgattgcgtcgacaagatggtgatctggtgggaggagggaaagatgaccgccaaggtcgtggagtcggccaaagccattctcggaggaagcaaggtgcgcgcggaccagaaatgcaagtcctcggcccagatagacccgactcccgtgattgtcacctccaacaccaacatgtgcgccgtgattgacgggaactcaacgaccttcgaacaccagcagccgttgcaagaccggatgttcaaatttgaactcacccgccgtctggatcatgactttgggaaggtcaccaagcaggaagtcaaagactttttccggtgggcaaaggatcacgtggttgaggtggagcatgaattctacgtcaaaaagggtggagctaagaaaagacccgcccccagtgacgcagatataagtgagcccaaacgggcgcgcgagtcagttgcgcagccatcgacgtcagacgcggaagcttcgatcaactacgcgggcaggtaccaaaacaaatgttctcgtcacgtgggcatgaatctgatgctgtttccctgcagacaatgcgagagaatgaatcagaattcaaatatctgcttcactcacggacagaaagactgtttagagtgctttcccgtgtcagaatctcaacccgtttctgtcgtcaaaaaggcgtatcagaaactttgctacattcatcatatcatgggaaaggtgccagacgcttgcactgcctgcgatctggtcaatgtggatttggatgactgcatctctgaacaataaatgatttaaatcaggtatggctgccgatggttatcttccagattggctcgaggacactctctctgaaggaataagacagtggtggaagctcaaacctggcccaccaccaccaaagcccgcagagcggcataaggacgacagcaggggtcttgtgcttcctgggtacaagtacctcggacccttcaacggactcgacaagggggagccggtcaacgaggcagacgccgcggccctcgagcacgacaaggcctacgaccggcagctcgacagcggagacaacccgtacctcaagtacaaccacgccgacgcggagtttcaggagcgccttaaagaagatacgtcttttgggggcaacctcggacgagcagtcttccaggcaaaaaagagggttcttgaacctctgggcctggttgaggaacctgttaaaacggctccgggaaaaaagaggccggtagagcactctcctgtggagccagactcctcctcgggaaccggaaaagcgggccagcagcctgcaagaaaaagattgaatttcggtcagactggagacgcagactccgtacctgacccccagcctctcggacagccaccagcagccccctctggtctgggatctactacaatggctacaggcagtggcgcaccaatggcagacaataacgagggtgccgatggagtgggtaattcctcgggaaattggcattgcgattcccaatggctgggcgacagagtcatcaccaccagcacccgcacctgggccctgcccacctacaacaaccacctctacaagcaaatctccagccaatcaggagcctcaaacgacaaccactactttggctacagcaccccctgggggtattttgacttcaacagattccactgccacttttcaccacgtgactggcaaagactcatcaacaacaactggggattccgacccaagagactcaacttcaagctctttaacattcaagtcaaagaggtcacgcagaatgacggtacgacgacgattgccaataaccttaccagcacggttcaggtgtttactgactcggagtaccagctcccgtacgtcctcggctcggcgcatcaaggatgcctcccgccgtttccagcggacgtcttcatggtcccacagtatggatacctcaccctgaacaacgggagtcaggcagtaggacgctcttcattttactgcctggagtactttccttctcagatgctgcgtaccggaaacaactttcaattcagctacacttttgaagacgtgcctttccacagcagctacgctcacagccagagtctggatcggctgatgaatcctctggtcgaccagtacctgtattatctgaacaagacacaaacaaatagtggaactcttcagcagtctcggctactgtttagccaagctggacccaccaacatgtctcttcaagctaaaaactggctgcctggaccttgctacagacagcagcgtctgtcaaagcaggcaaacgacaacaacaacagcaactttccctggactgcagctacaaagtatcatctaaatggccgggactcgttggttaatccaggaccagctatggccagtcacaaggatgacgaagaaaagtttttccccatgcatggaacccttatatttggtaaacaaggaacaaatgccaacgacgcggatttggaaaatgtcatgattacagatgaagaagaaatcaggaccaccaatcccgtggctacggagcagtacggaactgtatcaaataatttgcaaaactcaaacactggtccaactactggaactgtcaatcaccaaggagcgttacctggtatggtgtggcaggatcgagacgtgtacctgcagggacccatttgggccaagattcctcacaccgatggacactttcatccttctccactgatgggaggttttggactcaaacacccacctcctcaaatcatgatcaaaaacactcccgttccagccaatcctcccacaaacttcagttctgccaagtttgcttctttcatcacacagtattccacggggcaggtcagcgtggagatcgagtgggagctgcagaaggagaacagcaaacgctggaatcccgaaattcagtacacttccaactacaacaaatctgttaatgtggactttactgtggacactaatggtgtgtattcagagcctcgccccattggcaccagatacctgactcgtaatctgtaattgcttgttaatcaataaaccgtttaattcgtttcagttgaactttggtctctgcgaagggcgaattcgtttaaacctgcaggactagtccctttagtga

SEQ ID NO: 308 - protein, 735 aa, Adeno-associated virus
MAADGYLPDWLEDTLSEGIRQWWKLKPGPPPPKPAERHKDDSRGLVLPGYKYLGPFNGLDKGEPVNEADAAALEHDKAYDRQLDSGDNPYLKYNHADAEFQERLKEDTSFGGNLGRAVFQAKKRVLEPLGLVEEPVKTAPGKKRPVEHPPVEPDSSSGTGKAGQQPARKRLNFGQTGDADSVPDPQPLGQPPAAPSGLGSTTMATGSGAPMADNNEGADGVGNSSGNWHCDSQWLGDRVITTSTRTWALPTYNNHLYKQISSQSGASNDNHYFGYSTPWGYFDFNRFHCHFSPRDWQRLINNNWGFRPKRLNFKLFNIQVKEVTQNDGTTTIANNLTSTVQVFTDSEYQLPYVLGSAHQGCLPPFPADVFMVPQYGYLTLNNGSQAVGRSSFYCLEYFPSQMLRTGNNFQFSYTFEDVPFHSSYAHSQSLDRLMNPLIDQYLYYLNKTQTNSGTLQQSRLLFSQAGPTNMSLQAKNRLPGPCYRQQRLSKQANDNNNSNFPWTAATKYHLNGRDSLVNPGPAMASHKDDEEKFFPMHGTLIFGKQGTNANDADLENVMITDEEEIRTTNPVATEQYGTVSNNLQNSNTGPTTGTVNHQGALPGMVWQDRDVYLQGPIWAKIPHTDGHFHPSPLVGGFGLKHPPPQIMIKNTPVPANPPTNFSSAKFASFITQYSTGQVSVEIEWELQKENSKRWNPEIQYTSNYNKSVNVDFTVDTNGVYSEPRPIGTRYLTRNL

SEQ ID NO: 309 - DNA, 3159 bp, Adeno-associated virus
gattgaatttagcggccgcgaattcgcccttgctgcgtcaactggaccaatgagaactttcctttcaatgattgcgtcgacaagatggtgatctggtgggaggagggaaagatgaccgccaaggtcgtggagtcggccaaagccattctcggaggaagcaaggtgcgcgtggaccagaaatgcaagtcctcggcccagatagacccgactcccgtgattgtcacctccaacaccgacatgtgcgccgtgattgacgggaactcaacgaccttcgaacaccagcagccgttgcaagaccggatgttcaaatttgaactcacccgccgtctggatcatgactttgggaaggtcaccaagcaggaagtcaaagactttttccggtgggcaaaggatcacgtggttgaggtggagcatgaattctacgtcaaaaagggtggagctaagaaaagacccgcccccagtgacgcagatataagtgagcccaaacgggcgcgcgagtcagttgcgcagccatcgacgtcagacgcggaagcttcgatcaactacgcggacaggtaccaaaacaaatgttctcgtcacgtgggcatgaatctgatgctgtttccctgcagacaatgcgagagaatgaatcagaattcaaatatctgcttcactcacggacagaaagactgtttagagtgctttcccgtgtcagaatctcaacccgtttctgtcgtcaaaaaggcgtatcagaaactttgctacattcatcatatcatgggaaaggtgccagacgcttgcactgcctgcgatctggtcaatgtggatttggatgactgcatctctgaacaataaatgatttaaatcaggtatggctgccgatggttatcttccagattggctcgaggacactctctctgaaggaataagacagtggtggaagctcaaacctggcccaccaccaccaaagcccgcagagcggcataaggacgacagcaggggtcttgtgcttcctgggtacaagtacctcggacccttcaacggactcgacaagggggagccggtcaacgaggcagacgccgcggccctcgagcacgacaaggcctacgaccggcagctcgacagcggagacaacccgtacctcaagtacaaccacgccgacgcggagtttcaggagcgccttaaagaagatacgtcttttgggggcaacctcggacgagcagtcttccaggcaaaaaagagggttcttgaacctctgggcctggttgaggaacctgttaaaacggctccgggaaaaaagaggccggtagagcaccctcctgtggagccagactcctcctcgggaaccggaaaagcgggccagcagcctgcaagaaaaagattgaatttcggtcagactggagacgcagactccgtacctgacccccagcctctcggacagccaccagcagccccctctggtctgggatctactacaatggctacaggcagtggcgcaccaatggcagacaataacgagggtgccgatggagtgggtaattcctcgggaaattggcattgcgattcccaatggctgggcgacagagtcatcaccaccagcacccgcacctgggccctgcccacctacaacaaccacctctacaagcaaatctccagccaatcaggagcctcaaacgacaaccactactttggctacagcaccccctgggggtattttgacttcaacagattccactgccacttttcaccacgtgactggcaaagactcatcaacaacaactggggattccgacccaagagactcaacttcaagctctttaacattcaagtcaaagaggtcacgcagaatgacggtacgacgacgattgccaataaccttaccagcacggttcaggtgtttactgactcggagtaccagctcccgtacgtcctcggctcggcgcatcaaggatgcctcccgccgtttccagcggacgtcttcatggtcccacagtatggatacctcaccctgaacaacgggagtcaggcagtaggacgctcttcattttactgcctggagtactttccttctcagatgctgcgtaccggaaacaactttcagttcagctacacttttgaagacgtgcctttccacagcagctacgctcacagccagagtctggatcggctgatgaatcctctgatcgaccagtacctgtattatctgaacaagacacaaacaaatagtggaactcttcagcagtctcggctactgtttagccaagctggacccaccaacatgtctcttcaagctaaaaaccggctgcctggaccttgctacagacagcagcgtctgtcaaagcaggcaaacgacaacaacaacagcaactttccctggaccgcagctacaaagtatcatctaaatggccgggactcgttggttaatccaggaccagctatggccagtcacaaggatgacgaagaaaagtttttccccatgcatggaacccttatatttggtaaacaaggaacaaatgccaacgacgcggatttggaaaatgtcatgattacagatgaagaagaaatcaggaccaccaatcccgtggctacggagcagtacggaactgtatcaaataatttgcaaaactcaaacactggtccaactactggaactgtcaatcaccaaggagcgttacctggtatggtgtggcaggatcgagacgtgtacctgcagggacccatttgggccaagattcctcacaccgatggacactttcatccttctccactggtgggaggttttggactcaaacacccacctcctcaaatcatgatcaaaaacactcccgttccagccaatcctcccacaaacttcagttctgccaagtttgcttctttcatcacacagtattccacggggcaggtcagcgtggagatcgagtgggagctgcagaaggagaacagcaaacgctggaatcccgaaattcagtacacttccaactacaacaaatctgttaatgtggactttactgtggacactaatggtgtgtattcagagcctcgccccattggcaccagatacctgactcgtaatctgtaattgcttgttaatcaataaaccgtttaattcgtttcagttgaactttggtctctgcgaagggcgaattcgtttaaacctgcaggactagtccctttagtgag

SEQ ID NO: 310 - DNA, 2208 bp, Adeno-associated virus
atggctgccgatggttatcttccagattggctcgaggacactctctctgaaggaataagacagtggtggaagctcaaacctggcccaccaccaccaaagcccgcagagcggcataaggacgacagcaggggtcttgtgcttcctgggtacaagtaccttggacccttcaacggactcgacaagggagagccggtcaacgaggcagacgccgcggccctcgagcacgacaaggcctacgaccggcagctcgacagcggagacaacccgtaccccaagtacaaccacgccgacgcggagttccaggagcgtcttaaagaagatacgtcttttgggggcaacctcggacgagcagtcttccaggcgaaaaagagggttcttgaacctctgggcctggttgaggaacctgttaagacggctccgggaaaaaagaggccggtagagcactctcctgcggagccagactcctcctcgggaaccggaaaagcgggccagcagcctgcaagaaagagattgaatttcggtcagactggagacgcagactccgtacctgacccccagcctctcggacagccaccagcagccccctctggtctgggaactaatacgatggctacaggcagtggcgcaccaatggcagacaataacgagggcgccgacggagtgggtaattcctcgggaaattggcattgcgattccacatggatgggcgacagagtcatcaccaccagcacccgcacctgggctctgcccacctacaacaaccacctctacaagcagatttccagccaatcaggagcctcaaacgacaaccactactttggctacagcaccccttgggggtattttgacttcaacagattccactgccacttttcgccacgtgactggcaaagactcatcaacaacaattggggattccggcccaaaagactcaacttcaagctctttaacattcaagtcaaggaggtcacgcagaatgacggtacgacgacgattgccaataaccttaccagcacggttcaggtgtttactgactcggagtaccagctcccgtacgtcctcggctcggcgcatcaaggatgcctcccgccgttcccagcagacgtcttcatggtgccacagtatggatacctcaccctgaacaacgggagtcaggcagtaggacgctcttcattttactgcctggagtactttccttctcagatgctgcgtaccggaaacaactttaccttcagctacacctttgaggacgttcctttccacagcagctacgcccacagccagagtttggaccgtctcatgaatcctctcatcgaccagtacctgtattacttgagcagaacaaacactccaagcggaaccaccacgcagtcaaggcttcagttttctcaggccggagcaagtgacattcgggaccagtctaggaactggcttcctggaccctgttaccgccagcagcgagtatcaaagacatctgcggataacaacaacagtgaatactcgtggactggagctaccaagtaccaccttaatggaagagactctctggtgaatccgggcccggccatggccagccacaaggacgatgaagaaaagttttttcctcagagcggggttctcatctttggaaaacaagactcgggaaaaactaatgtggacattgaaaaggtcatgattacagacgaagaggaaatcaggaccaccaatcccgtggctacggagcagtatggttctgtatctaccaacctccagagcggcaacacacaagcagctacctcagatgtcaacacacaaggcgttcttccaggcatggtgtggcaggacagagacgtgtacctgcaggggcccatctgggcaaagattccacacacggacggacattttcacccctctcccctcatgggcggattcggacttaaacaccctcccccgcagattctcatcaagaacaccccggtacctgcgaatccttcgactaccttcagtgcggcaaagtttgcttccttcattacacagtactccacggggcaggtcagcgtggagatcgagtgggagctgcagaaggagaacagcaaacgctggaatcccgagattcagtacacttccaactacaacaaatctgttaatgtggactttactgtggacactaatggtgtgtattcagagcctcgccccattggcaccaggtacctgactcgtaatctgtaa

SEQ ID NO: 311 - protein, 735 aa, Adeno-associated virus
MAADGYLPDWLEDTLSEGIRQWWKLKPGPPPPKPAERHKDDSRGLVLPGYKYLGPFNGLDKGEPVNEADAAALEHDKAYDRQLDSGDNPYPKYNHADAEFQERLKEDTSFGGNLGRAVFQAKKRVLEPLGLVEEPVKTAPGKKRPVEHSPAEPDSSSGTGKAGQQPARKRLNFGQTGDADSVPDPQPLGQPPAAPSGLGTNTMATGSGAPMADNNEGADGVGNSSGNWHCDSTWMGDRVITTSTRTWALPTYNNHLYKQISSQSGASNDNHYFGYSTPWGYFDFNRFHCHFSPRDWQRLINNNWGFRPKRLNFKLFNIQVKEVTQNDGTTTIANNLTSTVQVFTDSEYQLPYVLGSAHQGCLPPFPADVFMVPQYGYLTLNNGSQAVGRSSFYCLEYFPSQMLRTGNNFTFSYTFEDVPFHSSYAHSQSLDRLMNPLIDQYLYYLSRTNTPSGTTTQSRLQFSQAGASDIRDQSRNWLPGPCYRQQRVSKTSADNNNSEYSWTGATKYHLNGRDSLVNPGPAMASHKDDEEKFFPQSGVLIFGKQDSGKTNVDIEKVMITDEEEIRTTNPVATEQYGSVSTNLQSGNTQAATSDVNTQGVLPGMVWQDRDVYLQGPIWAKIPHTDGHFHPSPLMGGFGLKHPPPQILIKNTPVPANPSTTFSAAKFASFITQYSTGQVSVEIEWELQKENSKRWNPEIQYTSNYNKSVNVDFTVDTNGVYSEPRPIGTRYLTRNL

SEQ ID NO: 312 - DNA, 2208 bp, Adeno-associated virus
atggctgccgatggttatcttccagattggctcgaggacactctctctgaaggaataagacagtggtggaagctcaaacctggcccaccaccaccaaagcccgcagagcggcataaggacgacagcaggggtcttgtgcttcctgggtacaagtaccttggacccttcaacggactcgacaagggagagccggtcaacgaggcagacgccgcggccctcgagcacgacaaggcctacgaccggcagctcgacggcggagacaacccgtacctcaagtacaaccacgccgacgcggagttccaggagcgtcttaaagaagatacgtcttttgggggcaacctcggacgagcagtcttccaggcgaaaaagagggttcttgaacctctgggcctggttgaggaacctgttaagacggctccgggaaaaaagaggccggtagagcactctcttgcggagccagactcctcctcgggaaccggaaaagcgggccagcagcctgcaagaaggagattgaatttcggtcagactggagacgcagactccgtacctgacccccagcctctcggacagccaccagcagccccctctggtctgggaactaatacgatggctacaggcagtggcgcaccaatggcagacaataacgagggcgccgacggagtgggtaattcctcgggaaattggcattgcgattccacatggatgggcgacagagtcatcaccaccagcacccgcacctgggctctgcccacctacaacaaccacctctacaggcagatttccagccaatcaggagcctcaaacgacaaccactactttggctacagcaccccttgggggtattttgacttcaacagattccactgccacttttcgccacgtgactggcaaagactcatcaacaacaattggggatcccggcccaaaagactcaacttcaagctctttaacattcaagtcaaggaggtcacgcagaatgacggtacgacgacgattgccaataaccttaccagcacggttcaggtgtttactgactcggagtaccagctcccgtacgtcctcggctcggcgcatcaaggatgcctcccgccgttcccagcagacgtcttcatggtgccacagtatggatacctcaccctgaacaacgggagtcaggcagtaggacgctcttcattttactgcctggagtactttccttctcagatgctgcgtaccggaaacaactttaccttcagctacacctttgaggacgttcctttccacagcagctacgcccacagccagagtttggaccgtctcatgaatcctctcgtcgaccagtacctgtattacttgagcagaacaaacactccaagcggaaccaccacgcagtcaaggcttcagttttctcaggccggagcaagtgacattcgggaccagtctaggaactggcttcctggaccctgttaccgccagcagcgagtatcaaagacatctgcggataacaacaacagtgaatactcgtggactggagctaccaagtaccaccttaatggaagagactctctggtgaatccgggcccggccatggccagccacaaggacgatgaagaaaagttttttcctcagagcggggttctcatctttggaaaacaagactcgggaaaaactaatgtggacattgaaaaggtcatgattacagacgaagaggaaatcaggaccaccaatcccgtggctacggagcagtatggttctgtatctaccaacctccagagcggcaacacacaagcagctacctcagatgtcaacacacaaggcgttcttccaggcatggtgtggcaggacagagacgtgtacctgcaggggcccatctgggcaaagattccacacacggacggacattttcacccctctcccctcatgggcggattcggacttaaacaccctcccccgcagattctcatcaagaacaccccggtacctgcgaatccttcgactaccttcagtgcggcaaagtttgcttccttcattacacagtactccacggggcaggtcagcgtggagatcgagtgggagctgcagaaggagaacagcaaacgctggaatcccgagattcagtacacttccaactacaacaaatctgttaatgtggactttactgtggacactaatggtgtgtattcagagcctcgccccattggcaccagatacctgactcgtaatctgtaa

SEQ ID NO: 313 - protein, 735 aa, Adeno-associated virus
MAADGYLPDWLEDTLSEGIRQWWKLKPGPPPPKPAERHKDDSRGLVLPGYKYLGPFNGLDKGEPVNEADAAALEHDKAYDRQLDGGDNPYLKYNHADAEFQERLKEDTSFGGNLGRAVFQAKKRVLEPLGLVEEPVKTAPGKKRPVEHSLAEPDSSSGTGKAGQQPARRRLNFGQTGDADSVPDPQPLGQPPAAPSGLGTNTMATGSGAPMADNNEGADGVGNSSGNWHCDSTWMGDRVITTSTRTWALPTYNNHLYRQISSQSGASNDNHYFGYSTPWGYFDFNRFHCHFSPRDWQRLINNNWGSRPKRLNFKLFNIQVKEVTQNDGTTTIANNLTSTVQVFTDSEYQLPYVLGSAHQGCLPPFPADVFMVPQYGYLTLNNGSQAVGRSSFYCLEYFPSQMLRTGNNFTFSYTFEDVPFHSSYAHSQSLDRLMNPLVDQYLYYLSRTNTPSGTTTQSRLQFSQAGASDIRDQSRNWLPGPCYRQQRVSKTSADNNNSEYSWTGATKYHLNGRDSLVNPGPAMASHKDDEEKFFPQSGVLIFGKQDSGKTNVDIEKVMITDEEEIRTTNPVATEQYGSVSTNLQSGNTQAATSDVNTQGVLPGMVWQDRDVYLQGPIWAKIPHTDGHFHPSPLMGGFGLKHPPPQILIKNTPVPANPSTTFSAAKFASFITQYSTGQVSVEIEWELQKENSKRWNPEIQYTSNYNKSVNVDFTVDTNGVYSEPRPIGTRYLTRNL

SEQ ID NO: 314 - protein, 738 aa, Adeno-associated virus
MAADGYLPDWLEDNLSEGIREWWDLKPGAPKPKANQQKQDDGRGLVLPGYKYLGPFNGLDKGEPVNAADAAALEHDKAYDQQLKAGDNPYLRYNHADAEFQERLQEDTSFGGNLGRAVFQAKKRVLEPLGLVEEAAKTAPGKKRPVEPSPQRSPDSSAGIGKKGQQPAKKRLNFGQTGDSESVPDPQPIGEPPAGPSGLGSGTMAAGGGAPMADNNEGADGVGSSSGNWHCDSTWLGDRVITTSTRTWALPTYNNHLYKQISNGTSGGSTNDNTYFGYSTPWGYFDFNRFHCHFSPRDWQRLINNNWGFRPKRLSFKLFNIQVKEVTQNEGTETIANNLTSTIQVFTDSEYQLPYVLGSAHQGCLPPFPADVFMIPQYGYLTLNNGSQAVGRSSFYCLEYFPSQMLRTGNNFEFSYTFEDVPFHSSCAHSQSSDRLMNPLIDQYLYYLSRTRSTGGTQGTQQLLFSQAGPANMSAQAKNWLPGPCYRQQRVSTTLSQNNNSNFAWTGATKYHLNGRDSLVNPGVAMATHKDDEERFFPSSGVLMFGKQGAGRDNVDYSSVMLTSEEEIKTTNPVATEQYGVVADNLQQTNTGPIVGNVNSQGALPGMVWQNRDVYLQGPIWAKIPHTDGNFHPSPLMGGFGLKHPPPQILIKNTPVPADPPTTFSQAKLASFITQYSTGQVSVEIEWELQKENSKRWNPEIQYTSNYYKSTNVDFAVNTEGTYSEPRPIGTRYLTRNL

SEQ ID NO: 315 - DNA, 2217 bp, Adeno-associated virus
atggctgctgacggttatcttccagattggctcgaggacaacctctctgagggcattcgcgagtggtgggacctgaaacctggagcccccaagcccaaggccaaccagcagaagcaggacgacggccggggtctggtgcttcttggctacaagtacctcggacccttcaacggactcgacaagggggagcccgtcaatgcggcggacgcagcggccctcgagcacgacaaggcctacgaccagcagctcaaagcgggtgacaatccgtacctgcggtataaccacgccgacgccgagtttcaggagcgtctgcaagaagatacgtcttttgggggcaacctcgggcgagcagtcttccaggccaagaagcgggttctcgaacctctcggtctggttgaggaagctgctaagacggctcctggaaagaagagaccggtagaaccgtcacctcagcgttcccccgactcctccacgggcatcggcaagaaaggccagcagcccgctaaaaagagactgaactttggtcagactggcgactcagagtcagtccccgaccctcaaccaatcggagaaccaccagcaggcccctctggtctgggatctggtacaatggctgcaggcggtggcgctccaatggcagacaataacgaaggcgccgacggagtgggtagttcctcaggaaattggcattgcgattccacatggctgggcgacagagtcatcaccaccagcacccgaacctgggccctgcccacctacaacaaccacctctacaagcaaatatccaatgggacatcgggaggaagcaccaacgacaacacctacttcggctacagcaccccctgggggtattttgacttcaacagattccactgccacttctcaccacgtgactggcagcgactcatcaacaacaactggggattccggccaaaaagactcagcttcaagctcttcaacatccaggtcaaggaggtcacgcagaatgaaggcaccaagaccatcgccaataaccttaccagcacgattcaggtatttacggactcggaataccagctgccgtacgtcctcggctccgcgcaccagggctgcctgcctccgttcccggcggacgtcttcatgattccccagtacggctaccttacactgaacaatggaagtcaagccgtaggccgttcctccttctactgcctggaatattttccatctcaaatgctgcgaactggaaacaattttgaattcagctacaccttcgaggacgtgcctttccacagcggctacgcacacagccagagcttggaccgactgatgaatcctctcatcgaccagtacctgtactacttatccagaactcagtccacaggaggaactcaaggtacccagcaattgttattttctcaagctgggcctgcaaacatgtcggctcaggctaagaactggctacctggaccttgctaccggcagcagcgagtctctacgacactgtcgcaaaacaacaacagcaactttgcttggactggtgccaccaaatatcacctgaacggaagagactctttggtaaatcccggtgtcgccatggcaacccacaaggacgacgaggaacgcttcttcccgtcgagtggagtcctgatgtttggaaaacagggtgctggaagagacaatgtggactacagcagcgttatgctaaccagcgaagaagaaattaaaaccactaaccctgtagccacagaacaatacggtgtggtggctgacaacttgcagcaaaccaatacagggcctattgtgggaaatgtcaacagccaaggagccttacctggcatggtctggcagaaccgagacgtgtacctgcagggtcccatctgggccaagattcctcacacggacggcaacttccacccttcaccgctaatgggaggatttggactgaagcacccacctcctcagatcctgatcaagaacacgccggtacctgcggatcctccaacgacgttcagccaggcgaaattggcttccttcattacgcagtacagcaccggacaggtcagcgtggaaatcgagtgggagctgcagaaggagaacagcaaacgctggaacccagagattcagtacacttcaaactactacaaatctacaaatgtggactttgctgtcaatacagagggaacttattctgagcctcgccccattggtactcgttacctcacccgtaatctgtaa

SEQ ID NO: 316 - protein, 738 aa, Adeno-associated virus
MAADGYLPDWLEDNLSEGIREWWDLKPGAPKPKANQQKQDDGRGLVLLGYKYLGPFNGLDKGEPVNAADAAALEHDKAYDQQLKAGDNPYLRYNHADAEFQERLQEDTSFGGNLGRAVFQAKKRVLEPLGLVEEAAKTAPGKKRPVEPSPQRSPDSSTGIGKKGQQPAKKRLNFGQTGDSESVPDPQPIGEPPAGPSGLGSGTMAAGGGAPMADNNEGADGVGSSSGNWHCDSTWLGDRVITTSTRTWALPTYNNHLYKQISNGTSGGSTNDNTYFGYSTPWGYFDFNRFHCHFSPRDWQRLINNNWGFRPKRLSFKLFNIQVKEVTQNEGTKTIANNLTSTIQVFTDSEYQLPYVLGSAHQGCLPPFPADVFMIPQYGYLTLNNGSQAVGRSSFYCLEYFPSQMLRTGNNFEFSYTFEDVPFHSGYAHSQSLDRLMNPLIDQYLYYLSRTQSTGGTQGTQQLLFSQAGPANMSAQAKNWLPGPCYRQQRVSTTLSQNNNSNFAWTGATKYHLNGRDSLVNPGVAMATHKDDEERFFPSSGVLMFGKQGAGRDNVDYSSVMLTSEEEIKTTNPVATEQYGVVADNLQQTNTGPIVGNVNSQGALPGMVWQNRDVYLQGPIWAKIPHTDGNFHPSPLMGGFGLKHPPPQILIKNTPVPADPPTTFSQAKLASFITQYSTGQVSVEIEWELQKENSKRWNPEIQYTSNYYKSTNVDFAVNTEGTYSEPRPIGTRYLTRNL

SEQ ID NO: 317 - protein, 735 aa, Adeno-associated virus
MAADGYLPDWLEDTLSEGIRQWWKLKPGPPPPKPAERHKDDSRGLVLPGYKYLGPFNGLDKGEPVNEADAAALEHDKAYDRQLDSGDNPYLKYNHADAEFQERLKEDTSFGGNLGRAVFQAKKRVLEPLGLVEPPVKTAPGKKRPVEHSPAEPDSSSGTGKAGQQPARKRLNFGQTGDADSVPDPQPLGQPPAAPSGLGSTTMATGSGAPMADNNEGADGVGNSSGNWHCDSQWLGDRVITTSTRTWALPTYNNHLYKQISSQSGASNDNHYFGYSTPWGYFDFNRFHCHFSPRDWQRLINNNWGFRPKRLNFKLFNIQVKEVTQNDGTTTIANNLTSTVQVFTDSEYQLPYVLGSAHQGCLPPFPADVFMVPQYGYLTLNNGSQAVGRSSFYCLEYFPSQMLRTGNNFQFSYTFEDVPFHSSYAHSQSLDRLMNPLIDQYLYYLNKTQSNSGTLQQSRLLFSQAGPTSMSLQAKNWLPGPCYRQQRLSKQANDNNNSNFPWTAATKYHLNGRDSLVNPGPAMASHKDDEEKFFPMHGTLIFGKQGTNANDADLDNVMITDEEEIRTTNPVATEQYGYVSNNLQNSNTGPTTGTVNHQGALPGMVWQDRDVYLQGPIWAKIPHTDGHFHPSPLMGGFGLKHPPPQIMIKNTPVPANPPTNFSSAKFASFITQYSTGQVSVEIEWELQKENSKRWNPEIQYTSNYNKSVNVDFTVDTNGVYSEPRPIGTRYLTRNL

SEQ ID NO: 318 - protein, 735 aa, Adeno-associated virus
MAADGYLPDWLEDTLSEGIRQWWKLKPGPPPPKPAERHKDDSRGLVLPGYKYLGPFNGLDKGEPVNEADAAALEHDKAYDRQLDSGDNPYLKYNHADAEFQERLKEDTSFGGNLGRAVFQAKKRVLEPLGLVEGPVKTAPGKKRPVEHSPAEPDSSSGTGKAGQQPARKRLNFGQTGDADSVPDPQPLGQPPAAPSGLGSTTMATGSGAPMADNNEGADGVGNSSGNWHCDSQWLGDRVITTSTRTWALPTYNNHLYKQISSQSGASNDNHYFGYSTPWGYFDFNRFHCHFSPRDWQRLINNNWGFRPKRLNFKLFNIQVKEVTQNDGTTTIANNLTSTVQVFTDSEYQLPYVLGSAHQGCLPPFPADVFMVPQYGYLTLNNGSQAVGRSSFYCLEYFPSQMLRTGNNFQFSYTFEDVPFHSSYAHSQSLDRLMNPLIDQYLYYLNKTQSNSGTLQQSRLLFSQAGPTSMSLQAKNWLPGPCYRQQRLSKQANDNNNSNFPWTAATKYHLNGRDSLVNPGPAMASHKDDEEKFFPMHGTLIFGKQGTNANDADLDNVMITDEEEIRTTNPVATEQYGYVSNNLQNSNTGPTTGTVNHQGALPGMVWQDRDVYLQGPIWAKIPHTDGHFHPSPLMGGFGLKHPPPQIMIKNTPVPANPPTNFSSAKFASFITQYSTGQVSVEIEWELQKENSKRWNPEIQYTSNYNKSVNVDFTVDTNGVYSEPRPIGTRYLTRNL

SEQ ID NO: 319 - DNA, 2208 bp, Adeno-associated virus
atggctgccgatggttatcttccagattggctcgaggacactctctctgaaggaataagacagtggtggaagctcaaacctggcccaccaccaccaaagcccgcagagcggcataaggacgacagcaggggtcttgtgcttcctgggtacaagtacctcggacccttcaacggactcgacaagggggagccggtcaacgaggcagacgccgcggccctcgagcacgacaaggcctacgaccggcagctcgacagcggagacaacccgtacctcaagtacaaccacgccgacgcggagtttcaggagcgtcttaaagaagatacgtcttttgggggcaacctcggacgagcagtcttccaggcgaaaaagagggttcttgaacctctgggcctggttgagggacctgttaagacggctccgggaaaaaagaggccggtagagcactctcctgcggagccagactcctcctcgggaaccggaaaagcgggccagcagcctgcaagaaaaagattgaattttggtcagactggagacgcagactccgtacctgacccccagcctctcggacagccaccagcagccccctctggtttgggatctactacaatggctacaggcagtggcgcaccaatggcagacaataacgagggtgccgatggagtgggtaattcctcaggaaattggcattgcgattcccaatggctgggcgacagagtcatcaccaccagcacccgaacctgggccctgcccacctacaacaaccacctctacaagcaaatctcaagccaatcaggagcctcaaacgacaaccactactttggctacagcaccccttgggggtattttgacttcaacagattccactgccacttttcaccacgtgactggcaaagactcatcaacaacaactggggattccgacccaagagactcaacttcaagctctttaacattcaagtcaaagaggtcacgcagaatgacggtacgacgacgattgccaataaccttaccagcacggttcaggtgtttactgactcggagtaccagctcccgtacgtcctcgggtcggcgcatcaaggatgcctcccgccgtttccagcggacgtcttcatggtcccacagtatggatacctcaccctgaacaacgggagtcaggcggtaggacgctcttccttttactgcctggagtactttccttctcagatgcttcgtactggaaacaactttcagttcagctacacctttgaagacgttcctttccacagcagctacgctcacagccagagtctggatcggctgatgaatcctctgatcgaccagtacctgtattatctgaacaaaacacaatcaaatagtggaactcttcagcagtctcggctactgtttagtcaagctggacccaccagcatgtctcttcaagctaaaaactggctacctggaccttgctacagacagcagcgtctgtcaaagcaggcaaacgacaacaacaacagcaactttccctggactgcggctacaaagtatcacctaaatggccgggactcgttggttaatccaggaccagctatggccagtcacaaagacgatgaagaaaagtttttccccatgcatggaaccctgatatttggtaaacaaggaacaaatgctaacgacgcggatttggacaatgtcatgattacagatgaagaagaaatccgcaccaccaatcccgtggctacggagcagtacggatatgtgtcaaataatttgcaaaactcaaatactggtccaactactggaactgtcaatcaccaaggagcgttacctggcatggtgtggcaggatcgagacgtgtacctgcagggacccatttgggccaagattcctcacaccgatggacactttcatccttctccactgatgggaggttttgggctcaaacacccgcctcctcagatcatgatcaaaaacactcccgttccagccaatcctcccacaaacttcagttctgccaagtttgcttctttcatcacacagtattccacggggcaggtcagcgtggagatcgagtgggagctgcagaaagagaacagcaaacgctggaatcccgaaattcagtacacttccaactacaacaaatctgttaatgtggactttactgtggacactaatggcgtgtattcagagcctcgccccattggcaccagatacctgactcgtaatctgtaa

SEQ ID NO: 320 - DNA, 2211 bp, Adeno-associated virus; identical to SEQ ID NO: 1

SEQ ID NO: 321 - DNA, 2208 bp, Adeno-associated virus
atggctgccgatggttatcttccagattggctcgaggacactctctctgaaggaacaagacagtggtggaagctcaaacctggcccaccaccaccaaagcccgcagagcggcataaggacgacagcaggggtcttgtgcttcctgggtacaagtacctcggacccttcaacggactcgacaagggggagccggtcaacgaggcagacgccgcggccctcgagcacgacaaggcctacgaccggcagctcgacagcggagacaacccgtacctcaagtacaaccacgccgacgcggagtttcaggagcgtcttaaagaagatacgtcttttgggggcaacctcggacgagcagtcttccaggcgaaaaagagggttcttgaacctctgggcctggttgaggaacctgttaagacggctccgggaaaaaagaggccggtagagcactctcctgcggagccagactcctcctcgggaaccggaaaagcgggccagcagcctgcaagaaaaagattgaattttggtcagactggagacgcagactccgtacctgacccccagcctctcggacagccaccagcagccccctctggtttgggatctactacaatggctacaggcagtggcgcaccaatggcagacaataacgagggtgccgatggagtgggtaattcctcaggaaattggcattgcgattcccaatggctgggcgacagagtcatcaccaccagcacccgaacctgggccctgcccacctacaacaaccacctctacaagcaaatctcaagccaatcaggagcctcaaacgacaaccactactttggctacagcaccccttgggggtattttgacttcaacagattccactgccacttttcaccacgtgactggcaaagactcatcaacaacaactggggattccgacccaagagactcaacttcaagctctttaacattcaagtcaaagaggtcacgcagaatgacggtacgacgacgattgccaataaccttaccagcacggttcaggtgtttactgactcggagtaccagctcccgtacgtcctcgggtcggcgcatcaaggatgcctcccgccgtttccagcggacgtcttcatggtcccacagtatggatacctcaccctgaacaacgggagtcaggcggtaggacgctcttccttttactgcctggagtactttccttctcagatgcttcgtactggaaacaactttcagttcagctacacctttgaagacgttcctttccacagcagctacgctcacagccagagtctggatcggctgatgaatcctctgatcgaccagtacctgtattatctgaacaaaacacaatcaaatagtggaactcttcagcagtctcggctactgtttagtcaagctggacccaccagcatgtctcttcaagctaaaaactggctacctggaccttgctacagacagcagcgtctgtcaaagcaggcaaacgacaacaacaacagcaactttccctggactgcggctacaaagtaccacctaaatggccgggactcgttggttaatccaggaccagctatggccagtcacaaagacgatgaagaaaagtttttccccatgcatggaaccctgatatttggtaaacaaggaacaaatgctaacgacgcggatttggacaatgtcatgattacagatgaagaagaaatccgcaccaccaatcccgtggctacggagcagtacggatatgtgtcaaataatttgcaaaactcaaatactggtccaactactggaactgtcaatcaccaaggagcgttacctggcatggtgtggcaggatcgagacgtgtacctgcagggacccatttgggccaagattcctcacaccgatggacactttcatccttctccactgatgggaggttttgggctcaaacacccgcctcctcagatcatgatcaaaaacactcccgttccagccaatcctcccacaaacttcagttctgccaagtttgcttctttcatcacacagtattccacggggcaggtcagcgtggagatcgagtgggagctgcagaaagagaacagcaaacgctggaatcccgaaattcagtacacttccaactacaacaaatctgttaatgtggactttactgtggacactaatggcgtgtattcagagcctcgccccattggcaccagatacctgactcgtaatctgtaa

SEQ ID NO: 322 - DNA, 2217 bp, Adeno-associated virus
atggctgctgacggttatcttccagattggctcgaggacaacctctctgagggcattcgcgagtggtgggacctgaaacctggagcccccaagcccaaggccaaccagcagaagcaggacgacggccggggtctggtgcttcctggctacaagtacctcggacccttcaacggactcgacaagggggagcccgtcaacgcggcggacgcagcggccctcgagcacgacaaggcctacgaccagcagctcaaagcgggtgacaatccgtacctgcggtataaccacgccgacgccgagtttcaggagcgtctgcaagaagatacgtcttttgggggcaacctcgggcgagcagtcttccaggccaagaagcgggttctcgaacctctcggtctggttgaggaagctgctaagacggctcctggaaagaagagaccggtagaaccgtcacctcagcgttcccccgactcctccacgggcatcggcaagaaaggccagcagcccgctaaaaagagactgaactttggtcagactggcgactcagagtcagtccccgaccctcaaccaatcggagaaccacctgcaggcccctctggtctgggatctggtacaatggctgcaggcggtggcgctccaatggcagacaataacgaaggcgccgacggagtgggtagttcctcaggaaattggcattgcgattccacatggctgggcgacagagtcatcaccaccagcacccgaacctgggccctgcccacctacaacaaccacctctacaagcaaatatccaatgggacatcgggagggagcaccaacgacaacacctacttcggctacagcaccccctgggggtattttgacttcaacagattccactgccacttctcaccacgtgactggcagcgactcatcaacaacaactggggattccggccaaaaagactcagcttcaagctcttcaacatccaggtcaaggaggtcacgcagaatgaaggcaccaagaccatcgccaataaccttaccagcacgattcaggtatttacggactcggaataccagctgccgtacgtcctcggctccgcgcaccagggctgcctgcctccgttcccggcggacgtcttcatgattccccagtacggctaccttacactgaacaatggaagtcaagccgtaggccgttcctccttctactgcctggaatattttccatctcaaatgctgcgaactggaaacaattttgaattcagctacaccttcgaggacgtgcctttccacagcagctacgcacacagccagagcttggaccgactgatgaatcctctcatcgaccagtacctgtactacttatccagaactcagtccacaggaggaactcaaggtacccagcaattgttattttctcaagctgggcctgcaaacatgtcggctcaggctaagaactggctacctggaccttgctaccggcagcagcgagtctctacgacactgtcgcaaaacaacaacagcaactttgcttggactggtgccaccaaatatcacctgaacggaagagactctttggtaaatcccggtgtcgccatggcaacccacaaggacgacgaggaacgcttcttcccgtcgagtggagtcctgatgtttggaaaacagggtgctggaagagacaatgtggactacagcagcgttatgctaaccagcgaagaagaaattaaaaccactaaccctgtagccacagaacaatacggtgtggtggctgacaacttgcagcaaaccaatacagggcctattgtgggaaatgtcaacagccaaggagccttacctggcatggtctggcagaaccgagacgtgtacctgcagggtcccatctgggccaagattcctcacacggacggcaactgccacccttcaccgctaatgggaggatttggactgaagcacccacctcctcagatcctgatcaagaacacgccggtacctgcggatcctccaacaacgttcagccaggcgaaattggcttccttcattacgcagtacagcaccggacaggtcagcgtggaaatcgagtgggagctgcagaaggagaacagcaaacgctggaacccagagattcagtacacttcaaactactacaaatctacaaatgtggactttgctgtcaatacagagggaacttattctgagcctcgccccattggtactcgttacctcacccgtaatctgtaa

SEQ ID NO: 323 - protein, 735 aa, Adeno-associated virus
MAADGYLPDWLEDTLSEGTRQWWKLKPGPPPPKPAERHKDDSRGLVLPGYKYLGPFNGLDKGEPVNEADAAALEHDKAYDRQLDSGDNPYLKYNHADAEFQERLKEDTSFGGNLGRAVFQAKKRVLEPLGLVEEPVKTAPGKKRPVEHSPAEPDSSSGTGKAGQQPARKRLNFGQTGDADSVPDPQPLGQPPAAPSGLGSTTMATGSGAPMADNNEGADGVGNSSGNWHCDSQWLGDRVITTSTRTWALPTYNNHLYKQISSQSGASNDNHYFGYSTPWGYFDFNRFHCHFSPRDWQRLINNNWGFRPKRLNFKLFNIQVKEVTQNDGTTTIANNLTSTVQVFTDSEYQLPYVLGSAHQGCLPPFPADVFMVPQYGYLTLNNGSQAVGRSSFYCLEYFPSQMLRTGNNFQFSYTFEDVPFHSSYAHSQSLDRLMNPLIDQYLYYLNKTQSNSGTLQQSRLLFSQAGPTSMSLQAKNWLPGPCYRQQRLSKQANDNNNSNFPWTAATKYHLNGRDSLVNPGPAMASHKDDEEKFFPMHGTLIFGKQGTNANDADLDNVMITDEEEIRTTNPVATEQYGYVSNNLQNSNTGPTTGTVNHQGALPGMVWQDRDVYLQGPIWAKIPHTDGHFHPSPLMGGFGLKHPPPQIMIKNTPVPANPPTNFSSAKFASFITQYSTGQVSVEIEWELQKENSKRWNPEIQYTSNYNKSVNVDFTVDTNGVYSEPRPIGTRYLTRNL

SEQ ID NO: 324 - DNA, 2208 bp, Adeno-associated virus
atggctgccgatggttatcttccagattggctcgaggacactctctctgaaggaataagacagtggtggaagctcaaacctggcccaccaccaccaaagcccgcagagcggcatcaggacaacagcaggggtcttgtgcttcctgggtacaagtacctcggaccctccaacggactcgacaaaggagagccggtcaacgaggcagacgccgcggccctcgagcacgacaaggcctacgaccggcagctcgacagcggagacaacccgtacctcaagtacaaccacgccgacgcggagtttcaggagcgtcttaaagaagatacgtcttttgggggcaacctcggacgagcagtcttccaggcgaaaaagagggttcttgaacctctgggcctggttgaggaacctgttaagacggctccgggaaaaaagaggccggtagagcactctcctgtggagccagactcctcctcgggaaccggaaaagcgggccatcagcctgcgagaaagagattgaattttggtcagactggagacgcagactccgtacctgacccccagcctctcggacagccaccagcagcccccacaagtttgggatctactacaatggctacaggcagtggcgcaccaatggcagacaataacgagggtgccgatggagtgggtaattcctcaggaaattggcattgcgattcccaatggctgggcgacagagtcatcaccaccagcacccgaacctgggccctgcccacctacaacaaccacctctacaagcaaatctccagccaatcaggagcctcgaacgacaaccactactttggctgcagcaccccctgggggtattttgacttcaacagattccactgtcacttctccccacgtgattggcaaagactcatcaacaacaactggggattccgacccaagagactcaacttcaagctctttaacattcaagtcaaagaggtcacgcagaatgacggtacgacgacgattgccaataaccttaccagcacggttcaggtgtttactgactcggagtacccgctcccgtacgtcctcggctcggcgcatcaaggatgcctcccgccgtttccagcggacgtcttcatggtcccacagtatggatacctcaccctgaacaacgggagtcaggcggtaggacgctcttccttttactgcctggagtactttccttctcagatgctgcgtaccggaaacaactttaccttcagctacacctttgaggacgttcctttccacagcagctacgctcacagccagagtttggaccggctgatgaatcctctgatcgaccagtatctatattatctgaacaggacacaatcaaatagtggaactcttcagcagtctaggctactgtttagccaagctggacccaccagcatgtctcttcaagctaaaaactggctgcctggaccttgctacagacagcagcgtctttcaaagcaggcaaacgacaacaacaacagcaactttccctggactgcggctacaaagtatcatctaaatggccgggactcgttggttaatccaggaccagctatggccagccacaaagacgatgaagaaaagtttttccccatgcatggaaccctgatatttggtaaacaaggaacaaatgctaacgacgcggatttggagcatgttatgattacagatgaagaagaaatcaggaccaccaatcctgtggctacagagcagtacggaaacgtgtcaaataatttgcaaaactcaaatactggtccaactacagaaaatgtcaatcaccagggagcgttacctggtatggtgtggcaggatcgagacgtgtacctgcagggacccatttgggccaagattcctcacaccgacggacactttcacccttctccactgatgggaggttttggactcaaacacccgcctcctcaaatcatgatcaaaaacactcccgttccagccaatcctcccacaaacttcagttctgccaagtttgcttctttcatcacacagtattccacgggccaggtcagcgtggagattgagtgggagctgcagaaggagaacagcaaacgctggaaccccgagatccagtatacttccaactacaacaaatctgttaatgtggactttactgtggacactaatggtgtgtattcagagccttgccccattggcaccagatacctgactcgtaatctgtaa

SEQ ID NO: 325 - protein, 735 aa, Adeno-associated virus
MAADGYLPDWLEDTLSEGIRQWWKLKPGPPPPKPAERHQDNSRGLVLPGYKYLGPSNGLDKGEPVNEADAAALEHDKAYDRQLDSGDNPYLKYNHADAEFQERLKEDTSFGGNLGRAVFQAKKRVLEPLGLVEEPVKTAPGKKRPVEHSPVEPDSSSGTGKAGHQPARKRLNFGQTGDADSVPDPQPLGQPPAAPTSLGSTTMATGSGAPMADNNEGADGVGNSSGNWHCDSQWLGDRVITTSTRTWALPTYNNHLYKQISSQSGASNDNHYFGCSTPWGYFDFNRFHCHFSPRDWQRLINNNWGFRPKRLNFKLFNIQVKEVTQNDGTTTIANNLTSTVQVFTDSEYPLPYVLGSAHQGCLPPFPADVFMVPQYGYLTLNNGSQAVGRSSFYCLEYFPSQMLRTGNNFTFSYTFEDVPFHSSYAHSQSLDRLMNPLIDQYLYYLNRTQSNSGTLQQSRLLFSQAGPTSMSLQAKNWLPGPCYRQQRLSKQANDNNNSNFPWTAATKYHLNGRDSLVNPGPAMASHKDDEEKFFPMHGTLIFGKQGTNANDADLEHVMITDEEEIRTTNPVATEQYGNVSNNLQNSNTGPTTENVNHQGALPGMVWQDRDVYLQGPIWAKIPHTDGHFHPSPLMGGFGLKHPPPQIMIKNTPVPANPPTNFSSAKFASFITQYSTGQVSVEIEWELQKENSKRWNPEIQYTSNYNKSVNVDFTVDTNGVYSEPCPIGTRYLTRNL

SEQ ID NO: 326 - DNA, 2214 bp, Artificial Sequence
  source: /note="Description of Artificial Sequence: Synthetic polynucleotide"
atggctgccgatggttatcttccagattggctcgaggacaaccttagtgaaggaattcgcgagtggtgggctttgaaacctggagcccctcaacccaaggcaaatcaacaacatcaagacaacgctcgaggtcttgtgcttccgggttacaaataccttggacccggcaacggactcgacaagggggagccggtcaacgcagcagacgcggcggccctcgagcacgacaaggcctacgaccagcagctgcaggcgggtgacaatccgtacctgcggtataaccacgccgacgccgagtttcaggagcgtctgcaagaagatacgtcttttgggggcaaccttggcagagcagtcttccaggccaaaaagaggatccttgagcctcttggtctggttgaggaagcagctaaaacggctcctggaaagaagaggcctgtagatcagtctcctcaggaaccggactcatcatctggtgttggcaaatcgggcaaacagcctgccagaaaaagactaaatttcggtcagactggcgactcagagtcagtcccagaccctcaacctctcggagaaccaccagcagcccccacaagtttgggatctaatacaatggcttcaggcggtggcgcaccaatggcagacaataacgagggtgccgatggggtgggtagttcctcgggaaattggcattgcgattcccaatggctgggggacagagtcatcaccaccagcacccgaacctgggccctgcccacctacaacaatcacctctacaagcaaatctccaacgggacatcgggaggagccaccaacgacaacacctacttcggctacagcaccccctgggggtattttgactttaacagattccactgccacttttcaccacgtgactggcagcgactcatcaacaacaactggggattccggcccaagagactcagcttcaagctcttcaacatccaggtcaaggaggtcacgcagaatgaaggcaccaagaccatcgccaataacctcaccagcaccatccaggtgtttacggactcggagtaccagctgccgtacgttctcggctctgcgcaccagggctgcctccctccgttcccggcggacgtgttcatgattccgcaatacggctacctgacgctcaacaatggcagccaagccgtgggacgttcatccttttactgcctggaatatttcccttctcagatgctgagaacgggcaacaactttaccttcagctacacctttgaggaagtgcctttccacagcagctacgcgcacagccagagcttggaccggctgatgaatcctctgattgaccagtacctgtactacttgtctcggactcaaacaacaggaggcacggcaaatacgcagactctgggcttcagccaaggtgggcctaatacaatggccaatcaggcaaagaactggctgccaggaccctgttaccgccaacaacgcgtctcaacgacaaccgggcaaaacaacaatagcaactttgcctggactgctgggaccaaataccatctgaatggaagaaattcattggctaatcctggcatcgctatggcaacacacaaagacgacgaggagcgtttttttcccagtaacgggatcctgatttttggcaaacaaaatgctgccagagacaatgcggattacagcgatgtcatgctcaccagcgaggaagaaatcaaaaccactaaccctgtggctacagaggaatacggtatcgtggcagataacttgcagcagcaaaacacggctcctcaaattggaactgtcaacagccagggggccttacccggtatggtctggcagaaccgggacgtgtacctgcagggtcccatctgggccaagattcctcacacggacggcaacttccacccgtctccgctgatgggcggctttggcctgaaacatcctccgcctcagatcctgatcaagaacacgcctgtacctgcggatcctccgaccaccttcaaccagtcaaagctgaactctttcatcacgcaatacagcaccggacaggtcagcgtggagatcgagtgggagctgcagaaggaaaacagcaagcgctggaacccggagatccagtacacttccaactattacaagtctaataatgttgaatttgctgttaatactgaaggtgtatatagtgaaccccgccccattggcaccagatacctgactcgtaatctgtaa

SEQ ID NO: 327 - protein, 737 aa, Artificial Sequence
  source: /note="Description of Artificial Sequence: Synthetic polypeptide"
MAADGYLPDWLEDNLSEGIREWWALKPGAPQPKANQQHQDNARGLVLPGYKYLGPGNGLDKGEPVNAADAAALEHDKAYDQQLQAGDNPYLRYNHADAEFQERLQEDTSFGGNLGRAVFQAKKRILEPLGLVEEAAKTAPGKKRPVDQSPQEPDSSSGVGKSGKQPARKRLNFGQTGDSESVPDPQPLGEPPAAPTSLGSNTMASGGGAPMADNNEGADGVGSSSGNWHCDSQWLGDRVITTSTRTWALPTYNNHLYKQISNGTSGGATNDNTYFGYSTPWGYFDFNRFHCHFSPRDWQRLINNNWGFRPKRLSFKLFNIQVKEVTQNEGTKTIANNLTSTIQVFTDSEYQLPYVLGSAHQGCLPPFPADVFMIPQYGYLTLNNGSQAVGRSSFYCLEYFPSQMLRTGNNFTFSYTFEEVPFHSSYAHSQSLDRLMNPLIDQYLYYLSRTQTTGGTANTQTLGFSQGGPNTMANQAKNWLPGPCYRQQRVSTTTGQNNNSNFAWTAGTKYHLNGRNSLANPGIAMATHKDDEERFFPSNGILIFGKQNAARDNADYSDVMLTSEEEIKTTNPVATEEYGIVADNLQQQNTAPQIGTVNSQGALPGMVWQNRDVYLQGPIWAKIPHTDGNFHPSPLMGGFGLKHPPPQILIKNTPVPADPPTTFNQSKLNSFITQYSTGQVSVEIEWELQKENSKRWNPEIQYTSNYYKSNNVEFAVNTEGVYSEPRPIGTRYLTRNL

SEQ ID NO: 328 - DNA, 2211 bp, Artificial Sequence
  source: /note="Description of Artificial Sequence: Synthetic polynucleotide"
atggctgccgatggttatcttccagattggctcgaggacaacctctctgagggcattcgcgagtggtgggacttgaaacctggagccccgaagcccaaagccaaccagcaaaagcaggacgacggccggggtctggtgcttcctggctacaagtacctcggacccttcaacggactcgacaagggggagcccgtcaacgcggcggacgcagcggccctcgagcacgacaaggcctacgaccagcagctcaaagcgggtgacaatccgtacctgcggtataaccacgccgacgccgagtttcaggagcgtctgcaagaagatacgtcttttgggggcaacctcgggcgagcagtcttccaggccaagaagcgggttctcgaacctctcggtctggttgaggaaggcgctaagacggctcctggaaagaaacgtccggtagagcagtcgccacaagagccagactcctcctcgggcatcggcaagacaggccagcagcccgctaaaaagagactcaattttggtcagactggcgactcagagtcagtccccgacccacaacctctcggagaacctccagcaacccccgctgctgtgggacctactacaatggcttcaggcggtggcgcaccaatggcagacaataacgaaggcgccgacggagtgggtaatgcctcaggaaattggcattgcgattccacatggctgggcgacagagtcatcaccaccagcacccgaacatgggccttgcccacctataacaaccacctctacaagcaaatctccagtgcttcaacgggggccagcaacgacaaccactacttcggctacagcaccccctgggggtattttgatttcaacagattccactgccatttctcaccacgtgactggcagcgactcatcaacaacaattggggattccggcccaagagactcaacttcaagctcttcaacatccaagtcaaggaggtcacgacgaatgatggcgtcacgaccatcgctaataaccttaccagcacggttcaagtcttctcggactcggagtaccagctgccgtacgttctcggctctgcccaccagggctgcctgcctccgttcccggcggacgtgttcatgattccccagtacggctacctaacactcaacaacggtagtcaggccgtgggacgctcctccttctactgcctggaatactttccttcgcagatgctgagaaccggcaacaacttccagtttacttacaccttcgaggacgtgcctttccacagcagctacgcccacagccagagcttggaccggctgatgaatcctctgattgaccagtacctgtactacttgtctcggactcaaacaacaggaggcacggcaaatacgcagactctgggcttcagccaaggtgggcctaatacaatggccaatcaggcaaagaactggctgccaggaccctgttaccgccaacaacgcgtctcaacgacaaccgggcaaaacaacaatagcaattttacctggactggtgcttcaaaatataacctcaatgggcgtgaatccatcatcaaccctggcactgctatggcctcacacaaagacgacgaagacaagttctttcccatgagcggtgtcatgatttttggaaaagagagcgccggagcttcaaacactgcattggacaatgtcatgattacagacgaagaggaaattaaagccactaaccctgtggccaccgaaagatttgggaccgtggcagtcaatttccagagcagcagcacagaccctgcgaccggagatgtgcatgctatgggagcattacctggcatggtgtggcaagatagagacgtgtacctgcagggtcccatttgggccaaaattcctcacacagatggacactttcacccgtctcctcttatgggcggctttggactcaagaacccgcctcctcagatcctcatcaaaaacacgcctgttcctgcgaatcctccggcggagttttcagctacaaagtttgcttcattcatcacccaatactccacaggacaagtgagtgtggaaattgaatgggagctgcagaaagaaaacagcaagcgctggaatcccgaagtgcagtacacatccaattatgcaaaatctgccaacgttgattttactgtggacaacaatggactttatactgagcctcgccccattggcacccgttacctcacccgtcccctgtaa

SEQ ID NO: 329 - protein, 736 aa, Artificial Sequence
  source: /note="Description of Artificial Sequence: Synthetic polypeptide"
MAADGYLPDWLEDNLSEGIREWWDLKPGAPKPKANQQKQDDGRGLVLPGYKYLGPFNGLDKGEPVNAADAAALEHDKAYDQQLKAGDNPYLRYNHADAEFQERLQEDTSFGGNLGRAVFQAKKRVLEPLGLVEEGAKTAPGKKRPVEQSPQEPDSSSGIGKTGQQPAKKRLNFGQTGDSESVPDPQPLGEPPATPAAVGPTTMASGGGAPMADNNEGADGVGNASGNWHCDSTWLGDRVITTSTRTWALPTYNNHLYKQISSASTGASNDNHYFGYSTPWGYFDFNRFHCHFSPRDWQRLINNNWGFRPKRLNFKLFNIQVKEVTTNDGVTTIANNLTSTVQVFSDSEYQLPYVLGSAHQGCLPPFPADVFMIPQYGYLTLNNGSQAVGRSSFYCLEYFPSQMLRTGNNFQFTYTFEDVPFHSSYAHSQSLDRLMNPLIDQYLYYLSRTQTTGGTANTQTLGFSQGGPNTMANQAKNWLPGPCYRQQRVSTTTGQNNNSNFTWTGASKYNLNGRESIINPGTAMASHKDDEDKFFPMSGVMIFGKESAGASNTALDNVMITDEEEIKATNPVATERFGTVAVNFQSSSTDPATGDVHAMGALPGMVWQDRDVYLQGPIWAKIPHTDGHFHPSPLMGGFGLKNPPPQILIKNTPVPANPPAEFSATKFASFITQYSTGQVSVEIEWELQKENSKRWNPEVQYTSNYAKSANVDFTVDNNGLYTEPRPIGTRYLTRPL

SEQ ID NO: 330 - DNA, 2211 bp, Artificial Sequence
  source: /note="Description of Artificial Sequence: Synthetic polynucleotide"
atggctgctgacggttatcttccagattggctcgaggacaacctttctgaaggcattcgagagtggtgggcgctgcaacctggagcccctaaacccaaggcaaatcaacaacatcaggacaacgctcggggtcttgtgcttccgggttacaaatacctcggacccggcaacggactcgacaagggggaacccgtcaacgcagcggacgcggcagccctcgagcacgacaaggcctacgaccagcagctcaaggccggtgacaacccctacctcaagtacaaccacgccgacgccgagttccaggagcggctcaaagaagatacgtcttttgggggcaacctcgggcgagcagtcttccaggccaaaaagaggcttcttgaacctcttggtctggttgaggaagcggctaagacggctcctggaaagaagaggcctgtagatcagtctcctcaggaaccggactcatcatctggtgttggcaaatcgggcaaacagcctgccagaaaaagactaaatttcggtcagactggcgactcagagtcagtcccagaccctcaacctctcggagaaccaccagcagcccccacaagtttgggatctaatacaatggcttcaggcggtggcgcaccaatggcagacaataacgagggtgccgatggagtgggtaattcctcaggaaattggcattgcgattcccaatggctgggcgacagagtcatcaccaccagcaccagaacctgggccctgcccacttacaacaaccatctctacaagcaaatctccagccaatcaggagcttcaaacgacaaccactactttggctacagcaccccttgggggtattttgactttaacagattccactgccacttctcaccacgtgactggcagcgactcattaacaacaactggggattccggcccaagaaactcagcttcaagctcttcaacatccaagttaaagaggtcacgcagaacgatggcacgacgactattgccaataaccttaccagcacggttcaagtgtttacggactcggagtatcagctcccgtacgtgctcgggtcggcgcaccaaggctgtctcccgccgtttccagcggacgtcttcatggtccctcagtatggatacctcaccctgaacaacggaagtcaagcggtgggacgctcatccttttactgcctggagtacttcccttcgcagatgctaaggactggaaataacttccaattcagctataccttcgaggatgtaccttttcacagcagctacgctcacagccagagtttggatcgcttgatgaatcctcttattgatcagtatctgtactacctgaacagaacgcaaggaacaacctctggaacaaccaaccaatcacggctgctttttagccaggctgggcctcagtctatgtctttgcaggccagaaattggctacctgggccctgctaccggcaacagagactttcaaagactgctaacgacaacaacaacagtaactttccttggacagcggccagcaaatatcatctcaatggccgcgactcgctggtgaatccaggaccagctatggccagtcacaaggacgatgaagaaaaatttttccctatgcacggcaatctaatatttggcaaagaagggacaacggcaagtaacgcagaattagataatgtaatgattacggatgaagaagagattcgtaccaccaatcctgtggcaacagagcagtatggaactgtggcaaataacttgcagagctcaaatacagctcccacgactagaactgtcaatgatcagggggccttacctggcatggtgtggcaagatcgtgacgtgtaccttcaaggacctatctgggcaaagattcctcacacggatggacactttcatccttctcctctgatgggaggctttggactgaaacatccgcctcctcaaatcatgatcaaaaatactccggtaccggcaaatcctccgacgactttcagcccggccaagtttgcttcatttatcactcagtactccactggacaggtcagcgtggaaattgagtgggagctacagaaagaaaacagcaaacgttggaatccagagattcagtacacttccaactacaacaagtctgttaatgtggactttactgtagacactaatggtgtttatagtgaacctcgccccattggcacccgttaccttacccgtcccctgtaa

SEQ ID NO: 331 - protein, 736 aa, Artificial Sequence
  source: /note="Description of Artificial Sequence: Synthetic polypeptide"
MAADGYLPDWLEDNLSEGIREWWALQPGAPKPKANQQHQDNARGLVLPGYKYLGPGNGLDKGEPVNAADAAALEHDKAYDQQLKAGDNPYLKYNHADAEFQERLKEDTSFGGNLGRAVFQAKKRLLEPLGLVEEAAKTAPGKKRPVDQSPQEPDSSSGVGKSGKQPARKRLNFGQTGDSESVPDPQPLGEPPAAPTSLGSNTMASGGGAPMADNNEGADGVGNSSGNWHCDSQWLGDRVITTSTRTWALPTYNNHLYKQISSQSGASNDNHYFGYSTPWGYFDFNRFHCHFSPRDWQRLINNNWGFRPKKLSFKLFNIQVKEVTQNDGTTTIANNLTSTVQVFTDSEYQLPYVLGSAHQGCLPPFPADVFMVPQYGYLTLNNGSQAVGRSSFYCLEYFPSQMLRTGNNFQFSYTFEDVPFHSSYAHSQSLDRLMNPLIDQYLYYLNRTQGTTSGTTNQSRLLFSQAGPQSMSLQARNWLPGPCYRQQRLSKTANDNNNSNFPWTAASKYHLNGRDSLVNPGPAMASHKDDEEKFFPMHGNLIFGKEGTTASNAELDNVMITDEEEIRTTNPVATEQYGTVANNLQSSNTAPTTRTVNDQGALPGMVWQDRDVYLQGPIWAKIPHTDGHFHPSPLMGGFGLKHPPPQIMIKNTPVPANPPTTFSPAKFASFITQYSTGQVSVEIEWELQKENSKRWNPEIQYTSNYNKSVNVDFTVDTNGVYSEPRPIGTRYLTRPL

SEQ ID NO: 332 - DNA, 2211 bp, Artificial Sequence
  source: /note="Description of Artificial Sequence: Synthetic polynucleotide"
atggctgccgatggttatcttccagattggctcgaggacaaccttagtgaaggaattcgcgagtggtgggctttgaaacctggagcccctcaacccaaggcaaatcaacaacatcaagacaacgctcgaggtcttgtgcttccgggttacaaataccttggacccggcaacggactcgacaagggggagccggtcaacgcagcagacgcggcggccctcgagcacgacaaggcctacgaccagcagctcaaggccggagacaacccgtacctcaagtacaaccacgccgacgccgagttccaggagcggctcaaagaagatacgtcttttgggggcaacctcgggcgagcagtcttccaggccaaaaagaggcttcttgaacctcttggtctggttgaggaagcggctaagacggctcctggaaagaagagaccggtagagccatcaccccagcgttctccagactcctctacgggcatcggcaagaaaggccaacagcccgctaaaaagagactcaattttggtcagactggcgactcagagtcagtccccgacccacaacctctcggagaacctccagcaacccccgctgctgtgggacctactacaatggcttcaggcggtggcgcaccaatggcagacaataacgagggtgccgatggagtgggtaattcctcaggaaattggcattgcgattcccaatggctgggcgacagagtcatcaccaccagcaccagaacctgggccctgcccacttacaacaaccatctctacaagcaaatctccagccaatcaggagcttcaaacgacaaccactactttggctacagcaccccttgggggtattttgactttaacagattccactgccacttttcaccacgtgactggcaaagactcatcaacaacaactggggattccgacccaagagactcaacttcaagctcttcaacatccaagtcaaggaggtcacgacgaatgatggcgtcacgaccatcgctaataaccttaccagcacggttcaagtcttctcggactcggagtaccagttgccgtacgtcctcggctctgcgcaccagggctgcctccctccgttcccggcggacgtgttcatgattccgcagtacggctacctaacgctcaacaatggcagccaagccgtgggacgttcatccttttactgcctggaatatttcccttctcagatgctgagaacgggcaacaactttaccttcagctacacttttgaggacgttcctttccacagcagctacgctcacagccagagtctggaccgtctcatgaatcctctcatcgaccagtacctgtattacttgagcagaacaaacactccaagtggaaccaccacgcagtcaaggcttcagttttctcaggccggagcgagtgacattcgggaccagtctaggaactggcttcctggaccctgttaccgccagcagcgcgtttctaaaacaaaaacagacaacaacaacagcaattttacctggactggtgcttcaaaatataaccttaatgggcgtgaatctataatcaaccctggcactgctatggcctcacacaaagacgacgaagacaagttctttcccatgagcggtgtcatgatttttggaaaagagagcgccggagcttcaaacactgcattggacaatgtcatgattacagacgaagaggaaattaaagccactaaccctgtggccaccgaaagatttgggaccgtggcagtcaatttccagagcagcagcacagaccctgcgaccggagatgtgcatgttatgggagccttacctggaatggtgtggcaagacagagacgtatacctgcagggtcctatttgggccaaaattcctcacacggatggacactttcacccgtctcctcttatgggcggctttggactcaagaacccgcctcctcagatcctcatcaaaaacacgcctgttcctgcgaatcctccggcggagttttcagctacaaagtttgcttcattcatcacccaatactccacaggacaagtgagtgtggaaattgaatgggagctgcagaaagaaaacagcaagcgctggaatcccgaagtgcagtacacatccaattatgcaaaatctgccaacgttgattttactgtggacaacaatggactttatactgagcctcgccccattggcacccgttaccttacccgtcccctgtaa

SEQ ID NO: 333 - protein, 736 aa, Artificial Sequence
  source: /note="Description of Artificial Sequence: Synthetic polypeptide"
MAADGYLPDWLEDNLSEGIREWWALKPGAPQPKANQQHQDNARGLVLPGYKYLGPGNGLDKGEPVNAADAAALEHDKAYDQQLKAGDNPYLKYNHADAEFQERLKEDTSFGGNLGRAVFQAKKRLLEPLGLVEEAAKTAPGKKRPVEPSPQRSPDSSTGIGKKGQQPAKKRLNFGQTGDSESVPDPQPLGEPPATPAAVGPTTMASGGGAPMADNNEGADGVGNSSGNWHCDSQWLGDRVITTSTRTWALPTYNNHLYKQISSQSGASNDNHYFGYSTPWGYFDFNRFHCHFSPRDWQRLINNNWGFRPKRLNFKLFNIQVKEVTTNDGVTTIANNLTSTVQVFSDSEYQLPYVLGSAHQGCLPPFPADVFMIPQYGYLTLNNGSQAVGRSSFYCLEYFPSQMLRTGNNFTFSYTFEDVPFHSSYAHSQSLDRLMNPLIDQYLYYLSRTNTPSGTTTQSRLQFSQAGASDIRDQSRNWLPGPCYRQQRVSKTKTDNNNSNFTWTGASKYNLNGRESIINPGTAMASHKDDEDKFFPMSGVMIFGKESAGASNTALDNVMITDEEEIKATNPVATERFGTVAVNFQSSSTDPATGDVHVMGALPGMVWQDRDVYLQGPIWAKIPHTDGHFHPSPLMGGFGLKNPPPQILIKNTPVPANPPAEFSATKFASFITQYSTGQVSVEIEWELQKENSKRWNPEVQYTSNYAKSANVDFTVDNNGLYTEPRPIGTRYLTRPL

SEQ ID NO: 334 - DNA, 2211 bp, Artificial Sequence
  source: /note="Description of Artificial Sequence: Synthetic polynucleotide"
atggctgccgatggttatcttccagattggctcgaggacaacctctctgagggcattcgcgagtggtgggacttgaaacctggagcccctaaacccaaggcaaatcaacaacatcaggacaacgctcgaggtcttgtgcttccgggttacaaataccttggacccggcaacggactcgacaagggggagccggtcaacgcagcagacgcggcggccctcgagcacgacaaggcctacgaccagcagctcaaggccggagacaacccgtacctcaagtacaaccacgccgacgccgagttccaggagcggctcaaagaagatacgtcttttgggggcaacctcgggcgagcagtcttccaggccaaaaagaggcttcttgaacctcttggtctggttgaggaagcggctaagacggctcctggaaagaagagaccggtagagccatcaccccagcgttctccagactcctctacgggcatcggcaagaaaggccaacagcccgctaaaaagagactcaattttggtcagactggcgactcagagtcagtccccgacccacaacctctcggagaacctccagcaacccccgctgctgtgggacctactacaatggcttcaggcggtggcgcaccaatggcagacaataacgagggtgccgatggagtgggtaattcctcaggaaattggcattgcgattcccaatggctgggcgacagagtcatcaccaccagcaccagaacctgggccctgcccacttacaacaaccatctctacaagcaaatctccagccaatcaggagcttcaaacgacaaccactactttggctacagcaccccttgggggtattttgactttaacagattccactgccacttttcaccacgtgactggcaaagactcatcaacaacaactggggattccgacccaagagactcaacttcaagctcttcaacatccaagtcaaggaggtcacgacgaatgatggcgtcacgaccatcgctaataaccttaccagcacggttcaagtcttctcggactcggagtaccagttgccgtacgtcctcggctctgcgcaccagggctgcctccctccgttcccggcggacgtgttcatgattccgcagtacggctacctaacgctcaacaatggcagccaagccgtgggacgttcatccttttactgcctggaatatttcccttctcagatgctgagaacgggcaacaactttaccttcagctacacttttgaggacgttcctttccacagcagctacgctcacagccagagtctggaccgtctcatgaatcccctcatcgaccagtacctgtattacttgagcagaacaaacactccaagtggaaccaccacgcagtcaaggcttcagttttctcaggccggagcgagtgacattcgggaccagtctaggaactggcttcctggaccctgttaccggcagcagcgcgtttctaaaacaaaaacagacaacaacaacagcaactttacctggactggtgcttcaaaatataaccttaatgggcgtgaatctataatcaaccctggcactgctatggcctcacacaaagacgacgaagacaagttctttcccatgagcggtgtcatgatttttggaaaggagagcgccggagcttcaaacactgcattggacaatgtcatgatcacagacgaagaggaaatcaaagccactaaccccgtggccaccgaaagatttgggactgtggcagtcaatctccagagcagcagcacagaccctgcgaccggagatgtgcatgttatgggagccttacctggaatggtgtggcaagacagagacgtgtacctgcagggtcctatttgggccaaaattcctcacacggatggacactttcacccgtctcctctcatgggcggctttggacttaagcacccgcctcctcagatcctcatcaaaaacacgcctgttcctgcgaatcctccggcagagttttcggctacaaagtttgcttcattcatcacccagtattccacaggacaagtgagtgtggaaattgaatgggagctgcagaaagaaaacagcaagcgctggaatcccgaagtgcagtacacatccaattatgcaaaatctgccaacgttgattttactgtggacaacaatggactttatactgagcctcgccccattggcacccgttacctcacccgtcccctgtaa

SEQ ID NO: 335 - protein, 736 aa, Artificial Sequence
  source: /note="Description of Artificial Sequence: Synthetic polypeptide"
MAADGYLPDWLEDNLSEGIREWWDLKPGAPKPKANQQHQDNARGLVLPGYKYLGPGNGLDKGEPVNAADAAALEHDKAYDQQLKAGDNPYLKYNHADAEFQERLKEDTSFGGNLGRAVFQAKKRLLEPLGLVEEAAKTAPGKKRPVEPSPQRSPDSSTGIGKKGQQPAKKRLNFGQTGDSESVPDPQPLGEPPATPAAVGPTTMASGGGAPMADNNEGADGVGNSSGNWHCDSQWLGDRVITTSTRTWALPTYNNHLYKQISSQSGASNDNHYFGYSTPWGYFDFNRFHCHFSPRDWQRLINNNWGFRPKRLNFKLFNIQVKEVTTNDGVTTIANNLTSTVQVFSDSEYQLPYVLGSAHQGCLPPFPADVFMIPQYGYLTLNNGSQAVGRSSFYCLEYFPSQMLRTGNNFTFSYTFEDVPFHSSYAHSQSLDRLMNPLIDQYLYYLSRTNTPSGTTTQSRLQFSQAGASDIRDQSRNWLPGPCYRQQRVSKTKTDNNNSNFTWTGASKYNLNGRESIINPGTAMASHKDDEDKFFPMSGVMIFGKESAGASNTALDNVMITDEEEIKATNPVATERFGTVAVNLQSSSTDPATGDVHVMGALPGMVWQDRDVYLQGPIWAKIPHTDGHFHPSPLMGGFGLKHPPPQILIKNTPVPANPPAEFSATKFASFITQYSTGQVSVEIEWELQKENSKRWNPEVQYTSNYAKSANVDFTVDNNGLYTEPRPIGTRYLTRPL

SEQ ID NO: 336 - DNA, 2214 bp, Artificial Sequence
  source: /note="Description of Artificial Sequence: Synthetic polynucleotide"
atggctgccgatggttatcttccagattggctcgaggacaaccttagtgaaggaattcgcgagtggtgggctttgaaacctggagcccctcaacccaaggcaaatcaacaacatcaagacaacgctcgaggtcttgtgcttccgggttacaaataccttggacccggcaacggactcgacaagggggagccggtcaacgcagcagacgcggcggccctcgagcacgacaaggcctacgaccagcagctgcaggcgggtgacaatccgtacctgcggtataaccacgccgacgccgagtttcaggagcgtctgcaagaagatacgtcttttgggggcaaccttggcagagcagtcttccaggccaaaaagaggatccttgagcctcttggtctggttgaggaagcagctaaaacggctcctggaaagaagaggcctgtagatcagtctcctcaggaaccggactcatcatctggtgttggcaaatcgggcaaacagcctgccagaaaaagactaaatttcggtcagactggcgactcagagtcagtcccagaccctcaacctctcggagaaccaccagcagcccccacaagtttgggatctaatacaatggcttcaggcggtggcgcaccaatggcagacaataacgagggtgccgatggggtgggtagttcctcgggaaattggcattgcgattcccaatgactgggggacagagtcatcaccaccagcacccgaacctgggccctgcccacctacaacaatcacctctacaagcaaatctccaacgggacatcgggaggagccaccaacgacaacacctacttcggctacagcaccccctgggggtattttgactttaacagattccactgccacttttcaccacgtgactggcagcgactcatcaacaacaactggggattccggcccaagagactcagcttcaagctcttcaacatccaggtcaaggaggtcacgcagaatgaaggcaccaagaccatcgccaataacctcaccagcaccatccaggtgtttacggactcggagtaccagctgccgtacgttctcggctctgcgcaccagggctgcctccctccgttcccggcggacgtgttcatgattccgcaatacggctacctgacgctcaacaatggcagccaagccgtgggacgttcatccttttactgcctggaatatttcccttctcagatgctgagaacgggcaacaactttaccttcagctacacctttgaggaagtgcctttccacagcagctacgcgcacagccagagcttggaccggctgatgaatcctctgattgaccagtacctgtactacttgtctcggactcaaacaacaggaggcacggcaaatacgcagactctgggcttcagccaaggtgggcctaatacaatggccaatcaggcaaagaactggctgccaggaccctgttaccgccaacaacgcgtctcaacgacaaccgggcaaaacaacaatagcaactttgcctggactgctgggaccaaataccatctgaatggaagaaattcattggctaatcctggcatcgctatggcaacacacaaagacgacgaggagcgtttttttcccagtaacgggatcctgatttttggcaaacaaaatgctgccagagacaatgcggattacagcgatgtcatgctcaccagcgaggaagaaatcaaaaccactaaccctgtggctacagaggaatacggtatcgtggcagataacttgcagcagcaaaacacggctcctcaaattggaactgtcaacagccagggggccttacccggtatggtctggcagaaccgggacgtgtacctgcagggtcccatctgggccaagattcctcacacggacggcaacttccacccgtctccgctgatgggcggctttggcctgaaacatcctccgcctcagatcctgatcaagaacacgcctgtacctgcggatcctccgaccaccttcaaccagtcaaagctgaactctttcatcacgcaatacagcaccggacaggtcagcgtggagatcgagtgggagctgcagaaggaaaacagcaagcgctggaacccggagatccagtacacttccaactattacaagtctaataatgttgaatttgctgttaatactgaaggtgtatatagtgaaccccgccccattggcaccagatacctgactcgtaatctgtaa

SEQ ID NO: 337 - protein, 736 aa, Artificial Sequence
  source: /note="Description of Artificial Sequence: Synthetic polypeptide"
MAADGYLPDWLEDNLSEGIREWWALKPGAPQPKANQQHQDNARGLVLPGYKYLGPGNGLDKGEPVNAADAAALEHDKAYDQQLQAGDNPYLRYNHADAEFQERLQEDTSFGGNLGRAVFQAKKRILEPLGLVEEAAKTAPGKKRPVDQSPQEPDSSSGVGKSGKQPARKRLNFGQTGDSESVPDPQPLGEPPAAPTSLGSNTMASGGGAPMADNNEGADGVGSSSGNWHCDSQLGDRVITTSTRTWALPTYNNHLYKQISNGTSGGATNDNTYFGYSTPWGYFDFNRFHCHFSPRDWQRLINNNWGFRPKRLSFKLFNIQVKEVTQNEGTKTIANNLTSTIQVFTDSEYQLPYVLGSAHQGCLPPFPADVFMIPQYGYLTLNNGSQAVGRSSFYCLEYFPSQMLRTGNNFTFSYTFEEVPFHSSYAHSQSLDRLMNPLIDQYLYYLSRTQTTGGTANTQTLGFSQGGPNTMANQAKNWLPGPCYRQQRVSTTTGQNNNSNFAWTAGTKYHLNGRNSLANPGIAMATHKDDEERFFPSNGILIFGKQNAARDNADYSDVMLTSEEEIKTTNPVATEEYGIVADNLQQQNTAPQIGTVNSQGALPGMVWQNRDVYLQGPIWAKIPHTDGNFHPSPLMGGFGLKHPPPQILIKNTPVPADPPTTFNQSKLNSFITQYSTGQVSVEIEWELQKENSKRWNPEIQYTSNYYKSNNVEFAVNTEGVYSEPRPIGTRYLTRNL

SEQ ID NO: 338 - DNA, 2214 bp, Artificial Sequence
  source: /note="Description of Artificial Sequence: Synthetic polynucleotide"
atggctgccgatggttatcttccagattggctcgaggacaaccttagtgaaggaattcgcgagtggtgggctttgaaacctggagcccctcaacccaaggcaaatcaacaacatcaagacaacgctcgaggtcttgtgcttccgggttacaaataccttggacccggcaacggactcgacaagggggagccggtcaacgcagcagacgcggcggccctcgagcacgacaaggcctacgaccagcagctgcaggcgggtgacaatccgtacctgcggtataaccacgccgacgccgagtttcaggagcgtctgcaagaagatacgtcttttgggggcaaccttggcagagcagtcttccaggccaaaaagaggatccttgagcctcttggtctggttgaggaagcagctaaaacggctcctggaaagaagaggcctgtagatcagtctcctcaggaaccggactcatcatctggtgttggcaaatcgggcaaacagcctgccagaaaaagactaaatttcggtcagactggcgactcagagtcagtcccagaccctcaacctctcggagaaccaccagcagcccccacaagtttgggatctaatacaatggcttcaggcggtggcgcaccaatggcagacaataacgagggtgccgatggggtgggtagttcctcgggaaattggcattgcgattcccaatggctgggggacagagtcatcaccaccagcacccgaacctgggccctgcccacctacaacaatcacctctacaagcaaatctccaacgggacatcgggaggagccaccaacgacaacacctacttcggctacagcaccccctgggggtattttgactttaacagattccactgccacttttcaccacgtgactggcagcgactcatcaacaacaactggggattccggcccaagagactcagcttcaagctcttcaacatccaggtcaaggaggtcacgcagaatgaaggcaccaagaccatcgccaataacctcaccagcaccatccaggtgtttacggactcggagtaccagctgccgtacgttctcggctctgcgcaccagggctgcctccctccgttcccggcggacgtgttcatgattccgcaatacggctacctgacgctcaacaatggcagccaagccgtgggacgttcatccttttactgcctggaatatttcccttctcagatgctgagaacgggcaacaactttaccttcagctacacctttgaggaagtgccttttcacagcagctacgcgcacagccagagcttggaccggctgatgaatcctctgattgaccagtacctgtactacttgtctcggactcaaacaacaggaggcacggcaaatacgcagactctgggcttcagccaaggtgggcctaatacaatggccaatcaggcaaagaactggctgccaggaccctgttaccgccaacaacgcgtctcaacgacaaccgggcaaaacaacaatagcaactttgcctggactgctgggaccaaataccatctgaatggaagaaattcattggctaatcctggcatcgctatggcaacacacaaagacgacgaggagcgtttttttcccagtaacgggatcctgatttttggcaaacaaaatgctgccagagacaatgcggattacagcgatgtcatgctcaccagcgaggaagaaatcaaaaccactaaccctgtggctacagaggaatacggtatcgtggcagataacttgcagcagcaaaacacggctcctcaaattggaactgtcaacagccagggggccttacccggtatggtctggcagaaccgggacgtgtacctgcagggtcccatctgggccaagattcctcacacggacggcaacttccacccgtctccgctgatgggcggctttggcctgaaacatcctccgcctcagatcctgatcaagaacacgcctgtacctgcggatcctccgaccaccttcaaccagtcaaagctgaactctttcatcacgcaatacagcaccggacaggtcagcgtggagatcgagtgggagctgcagaaggaaaacagcaagcgctggaacccggagatccagtacacttccaactattacaagtctaataatgttgaatttgctgttaatactgaaggtgtatatagtgaaccccgccccattggcaccagatacctgactcgtaatctgtaa

SEQ ID NO: 339 - protein, 737 aa, Artificial Sequence; identical to SEQ ID NO: 327
  source: /note="Description of Artificial Sequence: Synthetic polypeptide"

SEQ ID NO: 340 - DNA, 2211 bp, Artificial Sequence
  source: /note="Description of Artificial Sequence: Synthetic polynucleotide"
atggctgccgatggttatcttccagattggctcgaggacaacctctctgagggcattcgcgagtggtgggacttgaaacctggagcccctaaacccaaggcaaatcaacaacatcaggacaacgctcgaggtcttgtgcttccgggttacaaataccttggacccggcaacggactcgacaagggggagccggtcaacgcagcagacgcggcggccctcgagcacgacaaggcctacgaccagcagctcaaggccggagacaacccgtacctcaagtacaaccacgccgacgccgagttccaggagcggctcaaagaagatacgtcttttgggggcaacctcgggcgagcagtcttccaggccaaaaagaggcttcttgaacctcttggtctggttgaggaagcggctaagacggctcctggaaagaagagaccggtagagccatcaccccagcgttctccagactcctctacgggcatcggcaagaaaggccaacagcccgctaaaaagagactcaattttggtcagactggcgactcagagtcagtccccgacccacaacctctcggagaacctccagcaacccccgctgctgtgggacctactacaatggcttcaggcggtggcgcaccaatggcagacaataacgagggtgccgatggagtgggtaattcctcaggaaattggcattgcgattcccaatggctgggcgacagagtcatcaccaccagcaccagaacctgggccctgcccacttacaacaaccatctctacaagcaaatctccagccaatcaggagcttcaaacgacaaccactactttggctacagcaccccttgggggtattttgactttaacagattccactgccacttttcaccacgtgactggcaaagactcatcaacaacaactggggattccgacccaagagactcaacttcaagctcttcaacatccaagtcaaggaggtcacgacgaatgatggcgtcacgaccatcgctaataaccttaccagcacggttcaagtcttctcggactcggagtaccagttgccgtacgtcctcggctctgcgcaccagggctgcctccctccgttcccggcggacgtgttcatgattccgcagtacggctacctaacgctcaacaatggcagccaagccgtgggacgttcatccttttactgcctggaatatttcccttctcagatgctgagaacgggcaacaactttaccttcagctacacttttgaggacgttcctttccacagcagctacgctcacagccagagtctggaccgtctcatgaatcctctcatcgaccagtacctgtattacttgagcagaacaaacactccaagtggaaccaccacgcagtcaaggcttcagttttctcaggccggagcgagtgacattcgggaccagtctaggaactggcttcctggaccctgttaccgccagcagcgcgtttctaaaacaaaaacagacaacaacaacagcaattttacctggactggtgcttcaaaatataaccttaatgggcgtgaatctataatcaaccctggcactgctatggcctcacacaaagacgacgaagacaagttctttcccatgagcggtgtcatgatttttggaaaagagagcgccggagcttcaaacactgcattggacaatgtcatgattacagacgaagaggaaattaaagccactaaccctgtggccaccgaaagatttgggaccgtggcagtcaatttccagagcagcagcacagaccctgcgaccggagatgtgcatgctatgggagcattacctggcatggtgtggcaagatagagacgtgtacctgcagggtcccatttgggccaaaattcctcacacagatggacactttcacccgtctcctcttatgggcggctttggactcaagaacccgcctcctcagatcctcatcaaaaacacgcctgttcctgcgaatcctccggcggagttttcagctacaaagtttgcttcattcatcacccaatactccacaggacaagtgagtgtggaaattgaatgggagctgcagaaagaaaacagcaagcgctggaatcccgaagtgcagtacacatccaattatgcaaaatctgccaacgttgattttactgtggacaacaatggactttatactgagcctcgccccattggcacccgttaccttacccgtcccctgtaa

SEQ ID NO: 341 - protein, 736 aa, Artificial Sequence
  source: /note="Description of Artificial Sequence: Synthetic polypeptide"
MAADGYLPDWLEDNLSEGIREWWDLKPGAPKPKANQQHQDNARGLVLPGYKYLGPGNGLDKGEPVNAADAAALEHDKAYDQQLKAGDNPYLKYNHADAEFQERLKEDTSFGGNLGRAVFQAKKRLLEPLGLVEEAAKTAPGKKRPVEPSPQRSPDSSTGIGKKGQQPAKKRLNFGQTGDSESVPDPQPLGEPPATPAAVGPTTMASGGGAPMADNNEGADGVGNSSGNWHCDSQWLGDRVITTSTRTWALPTYNNHLYKQISSQSGASNDNHYFGYSTPWGYFDFNRFHCHFSPRDWQRLINNNWGFRPKRLNFKLFNIQVKEVTTNDGVTTIANNLTSTVQVFSDSEYQLPYVLGSAHQGCLPPFPADVFMIPQYGYLTLNNGSQAVGRSSFYCLEYFPSQMLRTGNNFTFSYTFEDVPFHSSYAHSQSLDRLMNPLIDQYLYYLSRTNTPSGTTTQSRLQFSQAGASDIRDQSRNWLPGPCYRQQRVSKTKTDNNNSNFTWTGASKYNLNGRESIINPGTAMASHKDDEDKFFPMSGVMIFGKESAGASNTALDNVMITDEEEIKATNPVATERFGTVAVNFQSSSTDPATGDVHAMGALPGMVWQDRDVYLQGPIWAKIPHTDGHFHPSPLMGGFGLKNPPPQILIKNTPVPANPPAEFSATKFASFITQYSTGQVSVEIEWELQKENSKRWNPEVQYTSNYAKSANVDFTVDNNGLYTEPRPIGTRYLTRPL

SEQ ID NO: 342 - DNA, 2211 bp, Artificial Sequence
  source: /note="Description of Artificial Sequence: Synthetic polynucleotide"
atggctgccgatggttatcttccagattggctcgaggacaaccttagtgaaggaattcgcgagtggtgggcgctgaaacctggagccccgaagcccaaagccaaccagcaaaagcaggacgacggccggggtctggtgcttccgggttacaaatacctcggacccggtaacggactcgacaaaggagagccggtcaacgaggcggacgcggcagccctcgagcacgacaaggcctacgaccagcagctcaaagcgggtgacaatccgtacctgcggtataaccacgccgacgccgagtttcaggagcgtctgcaagaagatacgtcttttgggggcaacctcgggcgagcagtcttccaggccaagaagcgggttctcgaacctctcggtctggttgaggaaggcgctaagacggctcccggaaagaaacgtccggtagagcagtcgccacaagagccagactcctctacgggcatcggcaagaaaggccaacagcccgccagaaaaagactcaatttcggtcagactggcgactcagagtcagttccagaccctcaacctctcggagaacctccagcagcgccctctggtgtgggacctactacaatggcttcaggcggtggcgcaccaatggcagacaataacgaaggcgccgacggagtgggtaatgcctcaggaaattggcattgcgattccacatggctgggcgacagagtcatcaccaccagcacccgaacatgggccttgcccacctataacaaccacctctacaagcaaatctccagtgcttcaacgggggccagcaacgacaacacctacttcggctacagcaccccctgggggtattttgatttcaacagattccactgccatttctcaccacgtgactggcagcgactcatcaacaacaattggggattccggcccaagagactcaacttcaaactcttcaacatccaagtcaaggaggtcacgacgaatgatggcgtcacgaccatcgctaataaccttaccagcacggttcaagtcttctcggactcggagtaccagttgccgtacgtcctcggctctgcgcaccagggctgcctccctccgttcccggcggacgtgttcatgattccgcagtacggctacctaacgctcaacaatggcagccaggcagtgggacggtcatccttttactgcctggaatatttcccatcgcagatgctgagaacgggcaataactttaccttcagctacaccttcgaggacgtgcctttccacagcagctacgcgcacagccagagcctggaccggctgatgaatcctctcatcgaccagtacctgtattacctgaacagaactcagaatcagtccggaagtgcccaaaacaaggacttgctgtttagccgggggtctccagctggcatgtctgttcagcccaaaaactggctacctggaccctgttatcggcagcagcgcgtttctaaaacaaaaacagacaacaacaacagcaattttacctggactggtgcttcaaaatataacctcaatgggcgtgaatccatcatcaaccctggcactgctatggcctcacacaaagacgacgaagacaagttctttcccatgagcggtgtcatgatttttggaaaagagagcgccggagcttcaaacactgcattggacaatgtcatgattacagacgaagaggaaattaaagccactaaccctgtggccaccgaaagatttgggaccgtggcagtcaatttccagagcagcagcacagaccctgcgaccggagatgtgcatgttatgggagccttacctggaatggtgtggcaagacagagacgtatacctgcagggtcctatttgggccaaaattcctcacacagatggacactttcacccgtctcctcttatgggcggctttggactcaagaacccgcctcctcagatcctcatcaaaaacacgcctgttcctgcgaatcctccggcagagttttcggctacaaagtttgcttcattcatcacccagtattccacaggacaagtgagcgtggagattgaatgggagctgcagaaagaaaacagcaaacgctggaatcccgaagtgcagtatacatctaactatgcaaaatctgccaacgttgatttcactgtggacaacaatggactttatactgagcctcgccccattggcacccgttacctcacccgtcccctgtaa

SEQ ID NO: 343 - protein, 736 aa, Artificial Sequence
  source: /note="Description of Artificial Sequence: Synthetic polypeptide"
MAADGYLPDWLEDNLSEGIREWWALKPGAPKPKANQQKQDDGRGLVLPGYKYLGPGNGLDKGEPVNEADAAALEHDKAYDQQLKAGDNPYLRYNHADAEFQERLQEDTSFGGNLGRAVFQAKKRVLEPLGLVEEGAKTAPGKKRPVEQSPQEPDSSTGIGKKGQQPARKRLNFGQTGDSESVPDPQPLGEPPAAPSGVGPTTMASGGGAPMADNNEGADGVGNASGNWHCDSTWLGDRVITTSTRTWALPTYNNHLYKQISSASTGASNDNTYFGYSTPWGYFDFNRFHCHFSPRDWQRLINNNWGFRPKRLNFKLFNIQVKEVTTNDGVTTIANNLTSTVQVFSDSEYQLPYVLGSAHQGCLPPFPADVFMIPQYGYLTLNNGSQAVGRSSFYCLEYFPSQMLRTGNNFTFSYTFEDVPFHSSYAHSQSLDRLMNPLIDQYLYYLNRTQNQSGSAQNKDLLFSRGSPAGMSVQPKNWLPGPCYRQQRVSKTKTDNNNSNFTWTGASKYNLNGRESIINPGTAMASHKDDEDKFFPMSGVMIFGKESAGASNTALDNVMITDEEEIKATNPVATERFGTVAVNFQSSSTDPATGDVHVMGALPGMVWQDRDVYLQGPIWAKIPHTDGHFHPSPLMGGFGLKNPPPQILIKNTPVPANPPAEFSATKFASFITQYSTGQVSVEIEWELQKENSKRWNPEVQYTSNYAKSANVDFTVDNNGLYTEPRPIGTRYLTRPL

SEQ ID NO: 344 - DNA, 2205 bp, Artificial Sequence
  source: /note="Description of Artificial Sequence: Synthetic polynucleotide"
atggctgctgacggttatcttccagattggctcgaggacaacctttctgaaggcattcgtgagtggtgggctctgaaacctggagtccctcaacccaaagcgaaccaacaacaccaggacaaccgtcggggtcttgtgcttccgggttacaaatacctcggacccggtaacggactcgacaaaggagagccggtcaacgaggcggacgcggcagccctcgaacacgacaaggcctacgaccagcagctcaaggccggagacaacccgtacctcaagtacaaccacgccgacgccgagttccaggagcggctcaaagaagatacgtcttttgggggcaacctcgggcgagcagtcttccaggccaaaaagaggcttcttgaacctcttggtctggttgaggaagcggctaagacggctcctggaaagaagaggcctgtagagcagtctcctcaggaaccggactcctccgcgggtattggcaaatcgggtgcacagcccgctaaaaagagactcaatttcggtcagactggcgacacagagtcagtcccagaccctcaaccaatcggagaacctcccgcagccccctcaggtgtgggatctcttacaatggcttcaggtggtggcgcaccagtggcagacaataacgaaggtgccgatggagtgggtagttcctcgggaaattggcattgcgattcccaatggctgggggacagagtcatcaccaccagcacccgaacctgggccctgcccacctacaacaaccacctctacaaacaaatttccagccaatcaggagcctcgaacgacaatcactactttggctacagcaccccttgggggtattttgacttcaacagattccactgccacttttcaccacgtgactggcagcgactcatcaacaacaactggggattccggcccaagagactcagcttcaagctcttcaacatccaggtcaaagaggttacggacaacaatggagtcaagaccatcgccaataaccttaccagcacggtccaggtcttcacggactcagactatcagctcccgtacgtgctcgggtcggctcacgagggctgcctcccgccgttcccagcggacgttttcatgattcctcagtacgggtatctgacgcttaatgatggaagccaggccgtgggtcgttcgtccttttactgcctggaatatttcccgtcgcaaatgctaagaacgggtaacaacttccagttcagctacgagtttgagaacgtacctttccatagcagctacgctcacagccaaagcctggaccgactaatgaatccactcatcgaccaatacttgtactatctctcaaagactattaacggttctggacagaatcaacaaacgctaaaattcagtgtggccggacccagcaacatggctgtccagggaagaaactacatacctggacccagctaccgacaacaacgtgtctcaaccactgtgactcaaaacaacaacagcgaatttgcttggcctggagcttcttcttgggctctcaatggacgtaatagcttgatgaatcctggacctgctatggccagccacaaagaaggagaggaccgtttctttcctttgtctggatctttaatttttggcaaacaaggaactggaagagacaacgtggatgcggacaaagtcatgataaccaacgaagaagaaattaaaactactaacccggtagcaacggagtcctatggacaagtggccacaaaccaccagagtgcccaagcacaggcgcagaccggctgggttcaaaaccaaggaatacttccgggtatggtttggcaggacagagatgtgtacctgcaaggacccatctgggccaagattcctcacacggacggcaacttccacccgtctccgctgatgggcggctttggcctgaaacatcctccgcctcagatcctgatcaagaacacgcctgtacctgcggatcctccgaccaccttcaaccagtcaaagctgaactctttcatcacgcaatacagcaccggacaggtcagcgtggaaattgaatgggagctgcagaaggaaaacagcaagcgctggaatcccgaagtgcagtatacatctaactatgcaaaatctgccaacgttgatttcactgtggacaacaatggactttatactgagcctcgccccattggcacccgttacctcacccgtcccctgtaa

SEQ ID NO: 345 - protein, 734 aa, Artificial Sequence
  source: /note="Description of Artificial Sequence: Synthetic polypeptide"
MAADGYLPDWLEDNLSEGIREWWALKPGVPQPKANQQHQDNRRGLVLPGYKYLGPGNGLDKGEPVNEADAAALEHDKAYDQQLKAGDNPYLKYNHADAEFQERLKEDTSFGGNLGRAVFQAKKRLLEPLGLVEEAAKTAPGKKRPVEQSPQEPDSSAGIGKSGAQPAKKRLNFGQTGDTESVPDPQPIGEPPAAPSGVGSLTMASGGGAPVADNNEGADGVGSSSGNWHCDSQWLGDRVITTSTRTWALPTYNNHLYKQISSQSGASNDNHYFGYSTPWGYFDFNRFHCHFSPRDWQRLINNNWGFRPKRLSFKLFNIQVKEVTDNNGVKTIANNLTSTVQVFTDSDYQLPYVLGSAHEGCLPPFPADVFMIPQYGYLTLNDGSQAVGRSSFYCLEYFPSQMLRTGNNFQFSYEFENVPFHSSYAHSQSLDRLMNPLIDQYLYYLSKTINGSGQNQQTLKFSVAGPSNMAVQGRNYIPGPSYRQQRVSTTVTQNNNSEFAWPGASSWALNGRNSLMNPGPAMASHKEGEDRFFPLSGSLIFGKQGTGRDNVDADKVMITNEEEIKTTNPVATESYGQVATNHQSAQAQAQTGWVQNQGILPGMVWQDRDVYLQGPIWAKIPHTDGNFHPSPLMGGFGLKHPPPQILIKNTPVPADPPTTFNQSKLNSFITQYSTGQVSVEIEWELQKENSKRWNPEVQYTSNYAKSANVDFTVDNNGLYTEPRPIGTRYLTRPL

SEQ ID NO: 346 - DNA, 2211 bp, Artificial Sequence
  source: /note="Description of Artificial Sequence: Synthetic polynucleotide"
atggctgccgatggttatcttccagattggctcgaggacaacctctctgagggcattcgcgagtggtgggcgctgaaacctggagccccgaagcccaaagccaaccagcaaaagcaggacgacggccggggtctggtgcttcctggctacaagtacctcggacccttcaacggactcgacaagggggagcccgtcaacgcggcggacgcagcggccctcgagcacgacaaggcctacgaccagcagctgcaggcgggtgacaatccgtacctgcggtataaccacgccgacgccgagtttcaggagcgtctgcaagaagatacgtcttttgggggcaacctcgggcgagcagtcttccaggccaagaagtgggttctcgaacctctcggtctggttgaggaaggcgctaagacggctcctggaaagaaacgtccggtagagcagtcgccacaagagccagactcctcctcgggcatcggcaagacaggccagcagcccgctaaaaagagactcaattttggtcagactggcgactcagagtcagtccccgacccacaacctctcggagaacctccagcaacccccgctgctgtgggacctactacaatggcttcaggcggtggcgcaccaatggcagacaataacgaaggcgccgacggagtgggtaatgcctcaggaaattggcattgcgattccacatggctgggcgacagagtcatcaccaccagcacccgcacctgggccttgcccacctacaataaccacctctacaagcaaatctccagtgcttcaacgggggccagcaacgacaaccactacttcggctacagcaccccctgggggtattttgatttcaacagattccactgccatttctcaccacgtgactggcagcgactcatcaacaacaattggggattccggcccaagagactcaacttcaagctcttcaacatccaagtcaaggaggtcacgacgaatgatggcgtcacaaccatcgctaataaccttaccagcacggttcaagtcttctcggactcggagtaccagcttccgtacgtcctcggctctgcgcaccagggctgcctccctccgttcccggcggacgtgttcatgattccgcaatacggctacctgacgctcaacaatggcagccaagccgtgggacgttcatccttttactgcctggaatatttcccttctcagatgctgagaacgggcaacaactttaccttcagctacacctttgaggaagtgcctttccacagcagctacgcgcacagccagagcctggaccggctgatgaatcctctcatcgaccaatacctgtattacctgaacagaactcaaaatcagtccggaagtgcccaaaacaaggacttgctgtttagccgtgggtctccagctggcatgtctgttcagcccaaaaactggctacctggaccctgttatcggcagcagcgcgtttctaaaacaaaaacagacaacaacaacagcaattttacctggactggtgcttcaaaatataacctcaatgggcgtgaatccatcatcaaccctggcactgctatggcctcacacaaagacgacgaagacaagttctttcccatgagcggtgtcatgatttttggaaaggagagcgccggagcttcaaacactgcattggacaatgtcatgatcaccgacgaagaggaaatcaaagccactaaccccgtggccaccgaaagatttgggactgtggcagtcaatctccagagcagcagcacagaccctgcgaccggagatgtgcatgttatgggagccttacctggcatggtgtggcaagatagagacgtgtacctgcagggtcccatttgggccaaaattcctcacacagatggacactttcacccgtctcctcttatgggcggctttggactcaagaacccgcctcctcagatcctcatcaaaaacacgcctgttcctgcgaatcctccggcggagttttcagctacaaagtttgcttcattcatcacccaatactccacaggacaagtgagtgtggaaattgaatgggagctgcagaaagaaaacagcaagcgctggaatcccgaagtgcagtacacatccaattatgcaaaatctgccaacgttgattttactgtggacaacaatggactttatactgagcctcgccccattggcacccgttacctcacccgtcccctgtaa

SEQ ID NO: 347 - protein, 736 aa, Artificial Sequence
  source: /note="Description of Artificial Sequence: Synthetic polypeptide"
MAADGYLPDWLEDNLSEGIREWWALKPGAPKPKANQQKQDDGRGLVLPGYKYLGPFNGLDKGEPVNAADAAALEHDKAYDQQLQAGDNPYLRYNHADAEFQERLQEDTSFGGNLGRAVFQAKKWVLEPLGLVEEGAKTAPGKKRPVEQSPQEPDSSSGIGKTGQQPAKKRLNFGQTGDSESVPDPQPLGEPPATPAAVGPTTMASGGGAPMADNNEGADGVGNASGNWHCDSTWLGDRVITTSTRTWALPTYNNHLYKQISSASTGASNDNHYFGYSTPWGYFDFNRFHCHFSPRDWQRLINNNWGFRPKRLNFKLFNIQVKEVTTNDGVTTIANNLTSTVQVFSDSEYQLPYVLGSAHQGCLPPFPADVFMIPQYGYLTLNNGSQAVGRSSFYCLEYFPSQMLRTGNNFTFSYTFEEVPFHSSYAHSQSLDRLMNPLIDQYLYYLNRTQNQSGSAQNKDLLFSRGSPAGMSVQPKNWLPGPCYRQQRVSKTKTDNNNSNFTWTGASKYNLNGRESIINPGTAMASHKDDEDKFFPMSGVMIFGKESAGASNTALDNVMITDEEEIKATNPVATERFGTVAVNLQSSSTDPATGDVHVMGALPGMVWQDRDVYLQGPIWAKIPHTDGHFHPSPLMGGFGLKNPPPQILIKNTPVPANPPAEFSATKFASFITQYSTGQVSVEIEWELQKENSKRWNPEVQYTSNYAKSANVDFTVDNNGLYTEPRPIGTRYLTRPL

SEQ ID NO: 348 - DNA, 2214 bp, Artificial Sequence
  source: /note="Description of Artificial Sequence: Synthetic polynucleotide"
atggctgccgatggttatcttccagattggctcgaggacaaccttagtgaaggaattcgcgagtggtgggctttgaaacctggagcccctcaacccaaggcaaatcaacaacatcaagacaacgctcgaggtcttgtgcttccgggttacaaataccttggacccggcaacggactcgacaagggggagccggtcaacgcagcagacgcggcggccctcgagcacgacaaggcctacgaccagcagctgcaggcgggtgacaatccgtacctgcggtataaccacgccgacgccgagtttcaggagcgtctgcaagaagatacgtcttttgggggcaaccttggcagagcagtcttccaggccaaaaagaggatccttgagcctcttggtctggttgaggaagcagctaaaacggctcctggaaagaagaggcctgtagatcagtctcctcaggaaccggactcatcatctggtgttggcaaatcgggcaaacagcctgccagaaaaagactaaatttcggtcagactggcgactcagagtcagtcccagaccctcaacctctcggagaaccaccagcagcccccacaagtttgggatctaatacaatggcttcaggcggtggcgcaccaatggcagacaataacgagggtgccgatggggtgggtagttcctcgggaaattggcattgcgattcccaatggctgggggacagagtcatcaccaccagcacccgaacctgggccctgcccacctacaacaatcacctctacaagcaaatctccaacgggacatcgggaggagccaccaacgacaacacctacttcggctacagcaccccctgggggtattttgactttaacagattccactgccacttttcaccacgtgactggcagcgactcatcaacaacaactggggattccggcccaagagactcagcttcaagctcttcaacatccaggtcaaggaggtcacgcagaatgaaggcaccaagaccatcgccaataacctcaccagcaccatccaggtgtttacggactcggagtaccagctgccgtacgttctcggctcggcgcaccagggctgcctccctccgttcccggcggacgtcttcatggtgccacagtatggatacctgacgctcaacaatggcagccaagccgtgggacgttcatccttttactgcctggaatatttcccttctcagatgctgagaacgggcaacaactttaccttcagctacacctttgaggaagtgcctttccacagcagctacgcgcacagccagagcttggaccggctgatgaatcctctgattgaccagtacctgtactacttgtctcggactcaaacaacaggaggcacggcaaatacgcagactctgggcttcagccaaggtgggcctaatacaatggccaatcaggcaaagaactggctgccaggaccctgttaccgccaacaacgcgtctcaacgacaaccgggcaaaacaacaatagcaactttgcctggactgctgggaccaaataccatctgaatggaagaaattcattggctaatcctggcatcgctatggcaacacacaaagacgacgaggagcgtttttttcccagtaacgggatcctgatttttggcaaacaaaatgctgccagagacaatgcggattacagcgatgtcatgctcaccagcgaggaagaaatcaaaaccactaaccctgtggctacagaggaatacggtatcgtggcagataacttgcagcagcaaaacacggctcctcaaattggaactgtcaacagccagggggacttacccggtatggtctggcagaaccgggacgtgtacctgcagggtcccatctgggccaagattcctcacacggacggcaacttccacccgtctccgctgatgggcggctttggcctgaaacatcctccgcctcagatcctgatcaagaacacgcctgtacctgcggatcctccgaccaccttcaaccagtcaaagctgaactctttcatcacgcaatacagcaccggacaggtcagcgtggagatcgagtgggagctgcagaaggaaaacagcaagcgctggaacccggagatccagtacacttccaactattacaagtctaataatgttgaatttgctgttaatactgaaggtgtatatagtgaaccccgccccattggcaccagatacctgactcgtaatctgtaa

SEQ ID NO: 349 - protein, 737 aa, Artificial Sequence
  source: /note="Description of Artificial Sequence: Synthetic polypeptide"
MAADGYLPDWLEDNLSEGIREWWALKPGAPQPKANQQHQDNARGLVLPGYKYLGPGNGLDKGEPVNAADAAALEHDKAYDQQLQAGDNPYLRYNHADAEFQERLQEDTSFGGNLGRAVFQAKKRILEPLGLVEEAAKTAPGKKRPVDQSPQEPDSSSGVGKSGKQPARKRLNFGQTGDSESVPDPQPLGEPPAAPTSLGSNTMASGGGAPMADNNEGADGVGSSSGNWHCDSQWLGDRVITTSTRTWALPTYNNHLYKQISNGTSGGATNDNTYFGYSTPWGYFDFNRFHCHFSPRDWQRLINNNWGFRPKRLSFKLFNIQVKEVTQNEGTKTIANNLTSTIQVFTDSEYQLPYVLGSAHQGCLPPFPADVFMVPQYGYLTLNNGSQAVGRSSFYCLEYFPSQMLRTGNNFTFSYTFEEVPFHSSYAHSQSLDRLMNPLIDQYLYYLSRTQTTGGTANTQTLGFSQGGPNTMANQAKNWLPGPCYRQQRVSTTTGQNNNSNFAWTAGTKYHLNGRNSLANPGIAMATHKDDEERFFPSNGILIFGKQNAARDNADYSDVMLTSEEEIKTTNPVATEEYGIVADNLQQQNTAPQIGTVNSQGDLPGMVWQNRDVYLQGPIWAKIPHTDGNFHPSPLMGGFGLKHPPPQILIKNTPVPADPPTTFNQSKLNSFITQYSTGQVSVEIEWELQKENSKRWNPEIQYTSNYYKSNNVEFAVNTEGVYSEPRPIGTRYLTRNL

SEQ ID NO: 350 - DNA, 2205 bp, Artificial Sequence
  source: /note="Description of Artificial Sequence: Synthetic polynucleotide"
atggctgctgacggttatcttccagattggctcgaggacaacctttctgaaggcattcgtgagtggtgggctctgaaacctggagtccctcaacccaaagcgaaccaacaacaccaggacaactgtcggggtcttgtgcttccgggttacaaatacctcggacccggtaacggactcgacaaaggagagccggtcaacgaggcggacgcggcagccctcgaacacgacaaggcctacgaccagcagctcaaggccggagacaacccgtacctcaagtacaaccacgccgacgccgagttccaggagcggctcaaagaagatacgtcttttgggggcaacctcgggcgagcagtcttccagaccaaaaagaggcttcttgaacctcttggtctggttgaggaagcggctaagacggctcctggaaagaagaggcctgtagagcagtctcctcaggaaccggactcctccgcgggtattggcaaatcgggtgcacagcccgctaaaaagagactcaatttcggtcagactggcgacacagagtcagtcccagaccctcaaccaatcggagaacctcccgcagccccctcaggtgtgggatctcttacaatggcttcaggtggtggcgcaccagtggcagacaataacgaaggtgccgatggagtgggtagttcctcgggaaattggcattgcgattcccaatggctgggggacagagtcatcaccaccagcacccgaacctgggccctgcccacctacaacaaccacctctacaaacaaatttccagccaatcaggagcctcgaacgacaatcactactttggctacagcaccccttgggggtattttgacttcaacagattccactgccacttttcaccacgtgactggcagcgactcatcaacaacaactggggattccggcccaagagactcagcttcaagctcttcaacatccaggtcaaagaggttacggacaacaatggagtcaagaccatcgccaataaccttaccagcacggtccaggtcttcacggactcagactatcagctcccgtacgtgctcgggtcggctcacgagggctgcctcccgccgttcccagcggacgttttcatgattcctcagtacgggtatctgacgcttaatgatggaagccaggccgtgggtcgttcgtccttttactgcctggaatatttcccgtcgcaaatgctaagaacgggtaacaacttccagttcagctacgagtttgagaacgtacctttccatagcagctacgctcacagccaaagcctggaccgactaatgaatccactcatcgaccaatacttgtactatctctcaaagactattaacggttctggacagaatcaacaaacgctaaaattcagtgtggccggacccagcaacatggctgtccagggaagaaactacatacctggacccagctaccgacaacaacgtgtctcaaccactgtgactcaaaacaacaacagcgaatttgcttggcctggagcttcttcttgggctctcaatggacgtaatagcttgatgaatcctggacctgctatggccagccacaaagaaggagaggaccgtttctttcctttgtctggatctttaatttttggcaaacaaggaactggaagagacaacgtggatgcggacaaagtcatgataaccaacgaagaagaaattaaaactactaacccggtagcaacggagtcctatggacaagtggccacaaaccaccagagtgcccaagcacaggcgcagaccggctgggttcaaaaccaaggaatacttccgggtatggtttggcaggacagagatgtgtacctgcaaggacccatctgggccaagattcctcacacggacggcaacttccacccgtctccgctgatgggcggctttggcctgaaacatcctccgcctcagatcctgatcaagaacacgcctgttcctgcgaatcctccggcggagttttcagctacaaagtttgcttcattcatcacccagtactccacaggacaagtgagtgtggaaattgaatgggagctgcagaaagaaaacagcaagcgctggaatcccgaagtgcagtacacatccaattatgcaaaatctgccaacgttgattttactgtggacaacaatggactttatactgagcctcgccccattggcacccgttaccttaccaaacctctgtaa

SEQ ID NO: 351 - protein, 734 aa, Artificial Sequence
  source: /note="Description of Artificial Sequence: Synthetic polypeptide"
MAADGYLPDWLEDNLSEGIREWWALKPGVPQPKANQQHQDNCRGLVLPGYKYLGPGNGLDKGEPVNEADAAALEHDKAYDQQLKAGDNPYLKYNHADAEFQERLKEDTSFGGNLGRAVFQTKKRLLEPLGLVEEAAKTAPGKKRPVEQSPQEPDSSAGIGKSGAQPAKKRLNFGQTGDTESVPDPQPIGEPPAAPSGVGSLTMASGGGAPVADNNEGADGVGSSSGNWHCDSQWLGDRVITTSTRTWALPTYNNHLYKQISSQSGASNDNHYFGYSTPWGYFDFNRFHCHFSPRDWQRLINNNWGFRPKRLSFKLFNIQVKEVTDNNGVKTIANNLTSTVQVFTDSDYQLPYVLGSAHEGCLPPFPADVFMIPQYGYLTLNDGSQAVGRSSFYCLEYFPSQMLRTGNNFQFSYEFENVPFHSSYAHSQSLDRLMNPLIDQYLYYLSKTINGSGQNQQTLKFSVAGPSNMAVQGRNYIPGPSYRQQRVSTTVTQNNNSEFAWPGASSWALNGRNSLMNPGPAMASHKEGEDRFFPLSGSLIFGKQGTGRDNVDADKVMITNEEEIKTTNPVATESYGQVATNHQSAQAQAQTGWVQNQGILPGMVWQDRDVYLQGPIWAKIPHTDGNFHPSPLMGGFGLKHPPPQILIKNTPVPANPPAEFSATKFASFITQYSTGQVSVEIEWELQKENSKRWNPEVQYTSNYAKSANVDFTVDNNGLYTEPRPIGTRYLTKPL

SEQ ID NO: 352 - DNA, 2211 bp, Artificial Sequence
  source: /note="Description of Artificial Sequence: Synthetic polynucleotide"
atggctgccgatggttatcttccagattggctcgaggacaacctctctgagggcattcgcgagtggtgggacttgaaacctggagcccctaaacccaaggcaaatcaacaacatcaggacaacgctcgaggtcttgtgcttccgggttacaaataccttggacccggcaacggactcgacaagggggagccggtcaacgcagcagacgcggcggccctcgagcacgacaaggcctacgaccagcagctcaaggccggagacaacccgtacctcaagtacaaccacgccgacgccgagttccaggagcggctcaaagaagatacgtcttttgggggcaacctcgggcgagcagtcttccaggccaaaaagaggcttcttgaacctcttggtctggttgaggaagcggctaagacggctcctggaaagaagagaccggtagagccatcaccccagcgttctccagactcctctacgggcatcggcaagaaaggccaacagcccgctaaaaagagactcaattttggtcagactggcgactcagagtcagtccccgacccacaacctctcggagaacctccagcaacccccgctgctgtgggacctactacaatggcttcaggcggtggcgcaccaatggcagacaataacgagggtgccgatggagtgggtaattcctcaggaaattggcattgcgattcccaatggctgggcgacagagtcatcaccaccagcaccagaacctgggccctgcccacttacaacaaccatctctacaagcaaatctccagccaatcaggagcttcaaacgacaaccactactttggctacagcaccccttgggggtattttgactttaacagattccactgccacttttcaccacgtgactggcaaagactcatcaacaacaactggggattccgacccaagagactcaacttcaagctcttcaacatccaagtcaaggaggtcacgacgaatgatggcgtcacgaccatcgctaataaccttaccagcacggttcaagtcttctcggactcggagtaccagttgccgtacgtcctcggctctgcgcaccagggctgcctccctccgttcccggcggacgtgttcatgattccgcagtacggctacctaacgctcaacaatggcagccaagccgtgggacgttcatccttttactgcctggaatatttcccttctcagatgctgagaacgggcaacaactttaccttcagctacacttttgaggacgttcctttccacagcagctacgctcacagccagagtctggaccgtctcatgaatcctctcatcgaccagtacctgtattacttgagcagaacaaacactccaagtggaaccaccacgcagtcaaggcttcagttttctcaggccggagcgagtgacattcgggaccagtctaggaactggcttcctggaccctgttaccgccagcagcgcgtttctaaaacaaaaacagacaacaacaacagcaattttacctggactggtgcttcaaaatataaccttaatgggcgtgaatctataatcaaccctggcactgctatggcctcacacaaagacgacgaagacaagttctttcccatgagcggtgtcatgatttttggaaaagagagcgccggagcttcaaacactgcattggacaatgtcatgatcacagacgaagaggaaatcaaagccactaaccccgtggccaccgaaagatttgggactgtggcagtcaatctccagagcagcagcacagaccctgcgaccggagatgtgcatgttatgggagcattacctggcatggtgtggcaagatagagacgtgtacctgcagggtcccatttgggccaaaattcctcacacagatggacactttcacccgtctcctcttatgggcggctttggactcaagaacccgcctcctcagatcctcatcaaaaacacgcctgttcctgcgaatcctccggcggagttttcagctacaaagtttgcttcattcatcacccaatactccacaggacaagtgagtgtggaaattgaatgggagctgcagaaagaaaacagcaagcgctggaatcccgaagtgcagtacacatccaattatgcaaaatctgccaacgttgattttactgtggacaacaatggactttatactgagcctcgccccattggcacccgttaccttacccgtcccctgtaa

SEQ ID NO: 353 - protein, 736 aa, Artificial Sequence
  source: /note="Description of Artificial Sequence: Synthetic polypeptide"
MAADGYLPDWLEDNLSEGIREWWDLKPGAPKPKANQQHQDNARGLVLPGYKYLGPGNGLDKGEPVNAADAAALEHDKAYDQQLKAGDNPYLKYNHADAEFQERLKEDTSFGGNLGRAVFQAKKRLLEPLGLVEEAAKTAPGKKRPVEPSPQRSPDSSTGIGKKGQQPAKKRLNFGQTGDSESVPDPQPLGEPPATPAAVGPTTMASGGGAPMADNNEGADGVGNSSGNWHCDSQWLGDRVITTSTRTWALPTYNNHLYKQISSQSGASNDNHYFGYSTPWGYFDFNRFHCHFSPRDWQRLINNNWGFRPKRLNFKLFNIQVKEVTTNDGVTTIANNLTSTVQVFSDSEYQLPYVLGSAHQGCLPPFPADVFMIPQYGYLTLNNGSQAVGRSSFYCLEYFPSQMLRTGNNFTFSYTFEDVPFHSSYAHSQSLDRLMNPLIDQYLYYLSRTNTPSGTTTQSRLQFSQAGASDIRDQSRNWLPGPCYRQQRVSKTKTDNNNSNFTWTGASKYNLNGRESIINPGTAMASHKDDEDKFFPMSGVMIFGKESAGASNTALDNVMITDEEEIKATNPVATERFGTVAVNLQSSSTDPATGDVHVMGALPGMVWQDRDVYLQGPIWAKIPHTDGHFHPSPLMGGFGLKNPPPQILIKNTPVPANPPAEFSATKFASFITQYSTGQVSVEIEWELQKENSKRWNPEVQYTSNYAKSANVDFTVDNNGLYTEPRPIGTRYLTRPL

SEQ ID NO: 354 - DNA, 2214 bp, Artificial Sequence; identical to SEQ ID NO: 326
  source: /note="Description of Artificial Sequence: Synthetic polynucleotide"

SEQ ID NO: 355 - protein, 737 aa, Artificial Sequence; identical to SEQ ID NO: 327
  source: /note="Description of Artificial Sequence: Synthetic polypeptide"

SEQ ID NO: 356 - DNA, 2205 bp, Artificial Sequence
  source: /note="Description of Artificial Sequence: Synthetic polynucleotide"
atggctgctgacggttatcttccagattggctcgaggacaacctttctgaaggcattcgtgagtggtgggctctgaaacctggagtccctcaacccaaagcgaaccaacaacaccaggacaaccgtcggggtcttgtgcttccgggttacaaatacctcggacccggtaacggactcgacaaaggagagccggtcaacgaggcggacgcggcagccctcgaacacgacaaggcctacgaccagcagctcaaggccggagacaacccgtacctcaagtacaaccacgccgacgccgagttccaggagcggctcaaagaagatacgtcttttgggggcaacctcgggcgagcagtcttccaggccaaaaagaggcttcttgaacctcttggtctggttgaggaagcggctaagacggctcctggaaagaagaggcctgtagagcagtctcctcaggaaccggactcctccgcgggtattggcaaatcgggtgcacagcccgctaaaaagagactcaatttcggtcagactggcgacacagagtcagtcccagaccctcaaccaatcggagaacctcccgcagccccctcaggtgtgggatctcttacaatggcttcaggtggtggcgcaccagtggcagacaataacgaaggtgccgatggagtgggtagttcctcgggaaattggcattgcgattcccaatggctgggggacagagtcatcaccaccagcacccgaacctgggccctgcccacctacaacaaccacctctacaaacaaatttccagccaatcaggagcctcgaacgacaatcactactttggctacagcaccccttgggggtattttgacttcaacagattccactgccacttttcaccacgtgactggcagcgactcatcaacaacaactggggattccggcccaagagactcagcttcaagctcttcaacatccaggtcaaagaggttacggacaacaatggagtcaagaccatcgccaataaccttaccagcacggtccaggtcttcacggactcagactatcagctcccgtacgtgctcgggtcggctcacgagggctgcctcccgccgttcccagcggacgttttcatgattcctcagtacgggtatctgacgcttaatgatggaagccaggccgtgggtcgttcgtccttttactgcctggaatatttcccgtcgcaaatgctaagaacgggtaacaacttccagttcagctacgagtttgagaacgtacctttccatagcagctacgctcacagccaaagcctggaccgactaatgaatccactcatcgaccaatacttgtactatctctcaaagactattaacggttctggacagaatcaacaaacgctaaaattcagtgtggccggacccagcaacatggctgtccagggaagaaactacatacctggacccagctaccgacaacaacgtgtctcaaccactgtgactcaaaacaacaacagcgaatttgcttggcctggagcttcttcttgggctctcaatggacgtaatagcttgatgaatcctggacctgctatggccagccacaaagaaggagaggaccgtttctttcctttgtctggatctttaatttttggcaaacaaggaactggaagagacaacgtggatgcggacaaagtcatgataaccaacgaagaagaaattaaaactactaacccggtagcaacggagtcctatggacaagtggccacaaaccaccagagtgcccaagcacaggcgcagaccggctgggttcaaaaccaaggaatacttccgggtatggtttggcaggacagagatgtgtacctgcaaggacccatttgggccaaaattcctcacacggacggcaactttcacccttctccgctgatgggagggtttggaatgaaacacccgcctcctcagatcctcatcaaaaacacacctgtacctgcggatcctccaacggccttcaacaaggacaagctgaactctttcatcacccagtattctactggccaagtcagcgtggagatcgagtgggagctgcagaaggaaaacagcaagcgctggaaccccgagatccagtacacctccaactactacaaatctacaagtgtggactttgctgttaatacagaaggcgtgtactctgaaccccgccccattggcacccgttacctcacccgtaatctgtaa

SEQ ID NO: 357 - protein, 734 aa, Artificial Sequence
  source: /note="Description of Artificial Sequence: Synthetic polypeptide"
MAADGYLPDWLEDNLSEGIREWWALKPGVPQPKANQQHQDNRRGLVLPGYKYLGPGNGLDKGEPVNEADAAALEHDKAYDQQLKAGDNPYLKYNHADAEFQERLKEDTSFGGNLGRAVFQAKKRLLEPLGLVEEAAKTAPGKKRPVEQSPQEPDSSAGIGKSGAQPAKKRLNFGQTGDTESVPDPQPIGEPPAAPSGVGSLTMASGGGAPVADNNEGADGVGSSSGNWHCDSQWLGDRVITTSTRTWALPTYNNHLYKQISSQSGASNDNHYFGYSTPWGYFDFNRFHCHFSPRDWQRLINNNWGFRPKRLSFKLFNIQVKEVTDNNGVKTIANNLTSTVQVFTDSDYQLPYVLGSAHEGCLPPFPADVFMIPQYGYLTLNDGSQAVGRSSFYCLEYFPSQMLRTGNNFQFSYEFENVPFHSSYAHSQSLDRLMNPLIDQYLYYLSKTINGSGQNQQTLKFSVAGPSNMAVQGRNYIPGPSYRQQRVSTTVTQNNNSEFAWPGASSWALNGRNSLMNPGPAMASHKEGEDRFFPLSGSLIFGKQGTGRDNVDADKVMITNEEEIKTTNPVATESYGQVATNHQSAQAQAQTGWVQNQGILPGMVWQDRDVYLQGPIWAKIPHTDGNFHPSPLMGGFGMKHPPPQILIKNTPVPADPPTAFNKDKLNSFITQYSTGQVSVEIEWELQKENSKRWNPEIQYTSNYYKSTSVDFAVNTEGVYSEPRPIGTRYLTRNL

SEQ ID NO: 358 - DNA, 2217 bp, Artificial Sequence
  source: /note="Description of Artificial Sequence: Synthetic polynucleotide"
atggctgccgatggttatcttccagattggctcgaggacaacctctctgagggcattcgcgagtggtgggcgctgaaacctggagccccgaagcccaaagccaaccagcaaaagcaggacgacggccggggtctggtgcttcctggctacaagtacctcggacccttcaacggactcgacaagggggagcccgtcaacgcggcggacgcagcggccctcgagcacgacaaggcctacgaccagcagctgcaggcgggtgacaatccgtacctgcggtataaccacgccgacgccgagtttcaggagcgtctgcaagaagatacgtcttttgggggcaacctcgggcgagcagtcttccaggccaagaagcgggttctcgaacctctcggtctggttgaggaaggcgctaagacggctcctggaaagaagagaccggtagagccatcaccccagcgttctccagactcctctacgggcatcggcaagaaaggccaacagcccgccagaaaaagactcaattttggtcagactggcgactcagagtcagttccagaccctcaacctctcggagaacctccagcagcgccctctggtgtgggacctaatacaatggctgcaggcggtggcgcaccaatggcagacaataacgaaggcgccgacggagtgggtagttcctcgggaaattggcattgcgattccacatggctgggcgacagagtcatcaccaccagcacccgaacctgggccctgcccacctacaacaaccacctctacaagcaaatctccaacgggacatcgggaggagccaccaacgacaacacctacttcggctacagcaccccctgggggtattttgactttaacagattccactgccacttttcaccacgtgactggcagcgactcatcaacaacaactggggattccggcccaagagactcagcttcaagctcttcaacatccaggtcaaggaggtcacgcagaatgaaggcaccaagaccatcgccaataacctcaccagcaccatccaggtgtttacggactcggagtaccagctgccgtacgttctcggctctgcccaccagggctgcctgcctccgttcccggcggacgtgttcatgattccccagtacggctacctaacactcaacaacggtagtcaggccgtgggacgctcctccttctactgcctggaatactttccttcgcagatgctgagaaccggcaacaacttccagtttacttacaccttcgaggacgtgcctttccacagcagctacgcccacagccagagcttggaccggctgatgaatcctctgattgaccagtacctgtactacttgtctcggactcaaacaacaggaggcacggcaaatacgcagactctgggcttcagccaaggtgggcctaatacaatggccaatcaggcaaagaactggctgccaggaccctgttaccgccaacaacgcgtctcaacgacaaccgggcaaaacaacaatagcaactttgcctggactgctgggaccaaataccatctgaatggaagaaattcattggctaatcctggcatcgctatggcaacacacaaagacgacgaggagcgtttttttcccagtaacgggatcctgatttttggcaaacaaaatgctgccagagacaatgcggattacagcgatgtcatgctcaccagcgaggaagaaatcaaaaccactaaccctgtggctacagaggaatacggtatcgtggcagataacttgcagcagcaaaacacggctcctcaaattggaactgtcaacagccagggggccttacccggtatggtctggcagaaccgggacgtgtacctgcagggtcccatctgggccaagattcctcacacggacggcaacttccacccctctcccctcatgggtggattcggacttaaacatcctccgcctcagatcctgatcaagaacacgcctgtacctgcggatcctccgaccaccttcaaccagtcaaagctgaactctttcatcacgcaatacagcaccggacaggtcagcgtggaaattgaatgggagctgcagaaggaaaacagcaagcgctggaaccccgagatccagtacacctccaactactacaaatctacaagtgtggactttgctgttaatacagaaggcgtgtactctgaaccccgccccattggcacccgttacctcacccgtaatctgtaa

SEQ ID NO: 359 - protein, 738 aa, Artificial Sequence; identical to SEQ ID NO: 105
  source: /note="Description of Artificial Sequence: Synthetic polypeptide"

SEQ ID NO: 360 - DNA, 2211 bp, Artificial Sequence
  source: /note="Description of Artificial Sequence: Synthetic polynucleotide"
atggctgctgacggttatcttccagattggctcgaggacaacctttctgaaggcattcgagagtggtgggcgctgcaacctggagcccctaaacccaaggcaaatcaacaacatcaggacaacgctcggggtcttgtgcttccgggttacaaatacctcggacccggcaacggactcgacaagggggaacccgtcaacgcagcggacgcggcagccctcgagcacgacaaggcctacgaccagcagctcaaggccggtgacaacccctacctcaagtacaaccacgccgacgccgagttccaggagcggctcaaagaagatacgtcttttgggggcaacctcgggcgagcagtcttccaggccaaaaagaggcttcttgaacctcttggtctggttgaggaagcggctaagacggctcctggaaagaagaggcctgtagatcagtctcctcaggaaccggactcatcatctggtgttggcaaatcgggcaaacagcctgccagaaaaagactaaatttcggtcagactggcgactcagagtcagtcccagaccctcaacctctcggagaaccaccagcagcccccacaagtttgggatctaatacaatggcttcaggcggtggcgcaccaatggcagacaataacgagggtgccgatggagtgggtaattcctcaggaaattggcattgcgattcccaatggctgggcgacagagtcatcaccaccagcaccagaacctgggccctgcccacttacaacaaccatctctacaagcaaatctccagccaatcaggagcttcaaacgacaaccactactttggctacagcaccccttgggggtattttgactttaacagattccactgccacttctcaccacgtgactggcagcgactcattaacaacaactggggattccggcccaagaaactcagcttcaagctcttcaacatccaagttaaagaggtcacgcagaacgatggcacgacgactattgccaataaccttaccagcacggttcaggtgtttacggactcggagtatcagctcccgtacgtgctcgggtcggcgcaccaaggctgtctcccgccgtttccagcggacgtcttcatggtccctcagtatggatacctcaccctgaacaacggaagtcaagcggtgggacgctcatccttttactgcctggagtacttcccttcgcagatgctaaggactggaaataacttccaattcagctataccttcgaggatgtaccttttcacagcagctacgctcacagccagagtttggatcgcttgatgaatcctcttattgatcagtatctgtactacctgaacagaacgcaaggaacaacctctggaacaaccaaccaatcacggctgctttttagccaggctgggcctcagtctatgtctttgcaggccagaaattggctacctgggccctgctaccggcaacagagactttcaaagactgctaacgacaacaacaacagtaactttccttggacagcggccagcaaatatcatctcaatggccgcgactcgctggtgaatccaggaccagctatggccagtcacaaggacgatgaagaaaaatttttccctatgcacggcaatctaatatttggcaaagaagggacaacggcaagtaacgcagaattagataatgtaatgattacggatgaagaagagattcgtaccaccaatcctgtggcaacagagcagtatggaactgtggcaaataacttgcagagctcaaatacagctcccacgactagaactgtcaatgatcagggggccttacctggcatggtgtggcaagatcgtgacgtgtaccttcaaggacctatctgggcaaagattcctcacacggatggacactttcatccttctcctctgatgggaggctttggactgaaacatccgcctcctcaaatcatgatcaaaaatactccggtaccggcaaatcctccgacgactttcagcccggccaagtttgcttcatttatcactcagtactccactggacaggtcagcgtggaaattgagtgggagctacagaaagaaaacagcaaacgttggaatccagagattcagtacacttccaactacaacaagtctgttaatgtggactttactgtagacactaatggtgtttatagtgaacctcgccccattggcacccgttaccttacccgtcccctgtaa

SEQ ID NO: 361 - protein, 736 aa, Artificial Sequence; identical to SEQ ID NO: 331
  source: /note="Description of Artificial Sequence: Synthetic polypeptide"

SEQ ID NO: 362 - DNA, 2211 bp, Artificial Sequence; identical to SEQ ID NO: 330
  source: /note="Description of Artificial Sequence: Synthetic polynucleotide"

SEQ ID NO: 363 - protein, 736 aa, Artificial Sequence; identical to SEQ ID NO: 331
  source: /note="Description of Artificial Sequence: Synthetic polypeptide"

SEQ ID NO: 364 - DNA, 2211 bp, Artificial Sequence
  source: /note="Description of Artificial Sequence: Synthetic polynucleotide"
atggctgctgacggttatcttccagattggctcgaggacaacctttctgaaggcattcgtgagtggtgggctctgaaacctggagtccctcaacccaaagcgaaccaacaacaccaggacaaccgtcggggtcttgtgcttccgggttacaaatacctcggacccggtaacggactcgacaaaggagagcccgtcaacgcggcggatgcagcggccctcgagcacgacaaggcctacgaccagcagctcaaagcgggtgacaatccgtacctgcggtataaccacgccgacgccgagtttcaggagcgtctgcaagaagatacgtcttttgggggcaacctcgggcgagcagtcttccaggccaagaagagggttctcgaaccttttggtctggttgaggaaggtgctaagacggctcctggaaagaaacgtccggtagagcagtcgccacaagagccagactcctcctcgggcatcggcaagacaggccagcagcccgctaaaaagagactcaattttggtcagactggcgactcagagtcagtccccgacccacaacctctcggagaacctccagcaacccccgctgctgtgggacctactacaatggcttcaggcggtggcgcaccaatggcagacaataacgaaggcgccgacggagtgggtaatgcctcaggaaattggcattgcgattccacatggctgggcgacagagtcatcaccaccagcacccgcacctgggccttgcccacctacaataaccacctctacaagcaaatctccagtgcttcaacgggggccagcaacgacaaccactacttcggctacagcaccccctgggggtattttgatttcaacagattccactgccatttctcaccacgtgactggcagcgactcatcaacaacaattggggattccggcccaagagactcaacttcaagctcttcaacatccaagtcaaggaggtcacgacgaatgatggcgtcacgaccatcgctaataaccttaccagcacggttcaagtcttctcggactcggagtaccagcttccgtacgtcctcggctctgcgcaccagggctgcctccctccgttcccggcggacgtgttcatgattccgcaatacggctacctgacgctcaacaatggcagccaagccgtgggacgttcatccttttactgcctggaatatttcccttctcagatgctgagaacgggcaacaactttaccttcagctacacctttgaggaagtgcctttccacagcagctacgcgcacagccagagcctggaccggctgatgaatcctctcatcgaccaatacctgtattacctgaacagaactcaaaatcagtccggaagtgcccaaaacaaggacttgctgtttagccgtgggtctccagctggcatgtctgttcagcccaaaaactggctacctggaccctgttatcggcagcagcgcgtttctaaaacaaaaacagacaacaacaacagcaattttacctggactggtgcttcaaaatataacctcaatgggcgtgaatccatcatcaaccctggcactgctatggcctcacacaaagacgacgaagacaagttctttcccatgagcggtgtcatgatttttggaaaagagagcgccggagcttcaaacactgcattggacaatgtcatgattacagacgaagaggaaattaaagccactaaccctgtggccaccgaaagatttgggaccgtggcagtcaatttccagagcagcagcacagaccctgcgaccggagatgtgcatgttatgggagccttacctggaatggtgtggcaagacagagacgtatacctgcagggtcctatttgggccaaaattcctcacacggatggacactttcacccgtctcctctcatgggcggctttggacttaagcacccgcctcctcagatcctcatcaaaaacacgcctgttcctgcgaatcctccggcagagttttcggctacaaagtttgcttcattcatcacccagtattccacaggacaagtgagcgtggagattgaatgggagctgcagaaagaaaacagcaaacgctggaatcccgaagtgcagtatacatctaactatgcaaaatctgccaacgttgatttcactgtggacaacaatggactttatactgagcctcgccccattggcacccgttacctcacccgtcccctgtaa

SEQ ID NO: 365 - protein, 736 aa, Artificial Sequence
  source: /note="Description of Artificial Sequence: Synthetic polypeptide"
MAADGYLPDWLEDNLSEGIREWWALKPGVPQPKANQQHQDNRRGLVLPGYKYLGPGNGLDKGEPVNAADAAALEHDKAYDQQLKAGDNPYLRYNHADAEFQERLQEDTSFGGNLGRAVFQAKKRVLEPFGLVEEGAKTAPGKKRPVEQSPQEPDSSSGIGKTGQQPAKKRLNFGQTGDSESVPDPQPLGEPPATPAAVGPTTMASGGGAPMADNNEGADGVGNASGNWHCDSTWLGDRVITTSTRTWALPTYNNHLYKQISSASTGASNDNHYFGYSTPWGYFDFNRFHCHFSPRDWQRLINNNWGFRPKRLNFKLFNIQVKEVTTNDGVTTIANNLTSTVQVFSDSEYQLPYVLGSAHQGCLPPFPADVFMIPQYGYLTLNNGSQAVGRSSFYCLEYFPSQMLRTGNNFTFSYTFEEVPFHSSYAHSQSLDRLMNPLIDQYLYYLNRTQNQSGSAQNKDLLFSRGSPAGMSVQPKNWLPGPCYRQQRVSKTKTDNNNSNFTWTGASKYNLNGRESIINPGTAMASHKDDEDKFFPMSGVMIFGKESAGASNTALDNVMITDEEEIKATNPVATERFGTVAVNFQSSSTDPATGDVHVMGALPGMVWQDRDVYLQGPIWAKIPHTDGHFHPSPLMGGFGLKHPPPQILIKNTPVPANPPAEFSATKFASFITQYSTGQVSVEIEWELQKENSKRWNPEVQYTSNYAKSANVDFTVDNNGLYTEPRPIGTRYLTRPL

SEQ ID NO: 366 - DNA, 2217 bp, Artificial Sequence
  source: /note="Description of Artificial Sequence: Synthetic polynucleotide"
atggctgccgatggttatcttccagattggctcgaggacaacctctctgagggcattcgcgagtggtgggacttgaaacctggagccccgaaacccaaagccaaccagcaaaagcaggacgacggccggggtctggtgcttcctggctacaagtacctcggacccttcaacggactcgacaagggggagcccgtcaacgcggcggatgcaacggccctcgagcacgacaaggcctacgaccagcagctgcaggcgggtgacaatccgtacctgcggtataaccacgccgacgccgagtttcaggagcgtctgcaagaagatacgtcttttgggggcaacctcgggcgagcagtcttccaggccaagaagcgggttctcgaacctctcggtctggttgaggaaggcgctaagacggctcctggaaagaagagaccggtagagccatcaccccagcgttctccagactcctctacgggcatcggcaagaaaggccaacagcccgccagaaaaagactcaattttggtcagactggcgactcagagtcagttccagaccctcaacctctcggagaaccaccagcagcccccacaagtttgggatctaatacaatggcttcaggcggtggcgcaccaatggcagacaataacgagggtgccgatggagtgggtaattcctcaggaaattggcattgcgattcccaatggctgggcgacagagtcatcaccaccagcacccgcacctgggccttgcccacctacaataaccacctctacaagcaaatctccagtgcttcaacgggggccagcaacgacaaccactacttcggctacagcaccccctgggggtattttgactttaaccgcttccactgccacttctcgccaagagactggcaaagactcatcaacaacaattggggattccggcccaagagactcaacttcaaactcttcaacatccaagtcaaggaggtcacgacgaatgatggcgtcacgaccatcgccaataacctcaccagcaccatccaggtgtttacggactcggagtaccagctgccgtacgttctcggctctgcccaccagggctgcctgcctccgttcccggcggacgtgttcatgattccccagtatggatacctcaccctgaacaacggaagtcaagcggtgggacgctcatccttttactgcctggagtacttcccttcgcagatgctaaggactggaaataacttccaattcagctataccttcgaggatgtaccttttcacagcagctacgctcacagccagagtttggatcgcttgatgaatcctcttattgatcagtatctgtactacctgaacagaacgcaaggaacaacctctggaacaaccaaccaatcacggctgctttttagccaggctgggcctcagtctatgtctttgcaggccagaaattggctacctgggccctgctaccggcaacagagactttcaaagactgctaacgacaacaacaacagtaactttccttggacagcagccagcaaatatcatctcaatggccgcgactcgctggtgaatccaggaccagctatggccagtcacaaggacgatgaagaaaaatttttccctatgcacggcaatctaatatttggcaaagaagggacaacggcaagtaacgcagaattagataatgtaatgattacggatgaagaagagattcgtaccaccaatcctgtggcaacagagcagtatggaactgtggcaaataacttgcagagctcaaatacagctcccacgactagaactgtcaatgatcagggggccttacctggcatggtgtggcaagatcgtgacgtgtaccttcaggggcccatctgggcaaagattccacacacggacggacattttcacccctctcccctcatgggtggattcggacttaaacaccctcctccgcagattctcatcaagaacaccccggtacctgcgaatccttcgaccaccttcagtgcggcaaagtttgcttccttcatcacacagtactccacgggacaggtcagcgtggagatcgagtgggagctgcagaaggaaaacagcaagcgctggaacccggagatccagtacacttccaactattacaagtctaataatgttgaatttgctgttaatactgaaggtgtatatagtgaaccccgccccattggcaccagatacctgactcgtaatctgtaa

SEQ ID NO: 367 - protein, 738 aa, Artificial Sequence
  source: /note="Description of Artificial Sequence: Synthetic polypeptide"
MAADGYLPDWLEDNLSEGIREWWDLKPGAPKPKANQQKQDDGRGLVLPGYKYLGPFNGLDKGEPVNAADATALEHDKAYDQQLQAGDNPYLRYNHADAEFQERLQEDTSFGGNLGRAVFQAKKRVLEPLGLVEEGAKTAPGKKRPVEPSPQRSPDSSTGIGKKGQQPARKRLNFGQTGDSESVPDPQPLGEPPAAPTSLGSNTMASGGGAPMADNNEGADGVGNSSGNWHCDSQWLGDRVITTSTRTWALPTYNNHLYKQISSASTGASNDNHYFGYSTPWGYFDFNRFHCHFSPRDWQRLINNNWGFRPKRLNFKLFNIQVKEVTTNDGVTTIANNLTSTIQVFTDSEYQLPYVLGSAHQGCLPPFPADVFMIPQYGYLTLNNGSQAVGRSSFYCLEYFPSQMLRTGNNFQFSYTFEDVPFHSSYAHSQSLDRLMNPLIDQYLYYLNRTQGTTSGTTNQSRLLFSQAGPQSMSLQARNWLPGPCYRQQRLSKTANDNNNSNFPWTAASKYHLNGRDSLVNPGPAMASHKDDEEKFFPMHGNLIFGKEGTTASNAELDNVMITDEEEIRTTNPVATEQYGTVANNLQSSNTAPTTRTVNDQGALPGMVWQDRDVYLQGPIWAKIPHTDGHFHPSPLMGGFGLKHPPPQILIKNTPVPANPSTTFSAAKFASFITQYSTGQVSVEIEWELQKENSKRWNPEIQYTSNYYKSNNVEFAVNTEGVYSEPRPIGTRYLTRNL

SEQ ID NO: 368 - DNA, 2208 bp, Artificial Sequence
  source: /note="Description of Artificial Sequence: Synthetic polynucleotide"
atggctgccgatggttatcttccagattggctcgaggacaaccttagtgaaggaattcgcgagtggtgggacttgaaacctggagccccgaagcccaaagccaaccagcaaaagcaggacgacggccggggtctggtgcttcctggctacaagtacctcggacccttcaacggactcgacaagggggagcccgtcaacgcggcggacgcagcggccctcgagcacgacaaggcctacgaccagcagctcaaagcgggtgacaatccgtacctgcggtataaccacgccgacgccgagtttcaggagcgtctgcaagaagatacgtcttttgggggcaacctcgggcgagcagtcttccaggccaagaagcgggttctcgaacctctcggtctggttgaggaaggtgctaagacggctcctggaaagaaacgtccggtagagcagtcgccacaagagccagactcctcctcgggcattggcaagacaggccagcagcccgctaaaaagagactcaattttggtcagactggcgactcagagtcagtccccgacccacaacctctcggagaacctccagcaacccccgctgctgtgggacctactacaatggcttcaggcggtggcgcaccaatggcagacaataacgaaggcgccgacggagtgggtaatgcctcaggaaattggcattgcgattccacatggctgggcgacagagtcatcaccaccagcacccgaacctgggccctgcccacctacaacaaccacctctacaaacaaatttccagccaatcaggagcctcgaacgacaatcactactttggctacagcaccccttgggggtattttgatttcaacagattccactgccacttttcaccacgtgactggcagcgactcatcaacaacaattggggattccggcccaagagactcagcttcaagctcttcaacatccaggtcaaggaggtcacgcagaatgaaggcaccaagaccatcgccaataaccttaccagcacggttcaagtgtttacggactcggagtatcagctcccgtacgtgctcggctcggcgcatcaaggatgcctcccgccgttcccagcagacgtcttcatggtgccacagtatggatacctcaccctgaacaacgggagtcaggcagtaggacgctcttcattttactgcctggagtactttccttctcagatgctgcgtaccggaaacaactttaccttcagctacacttttgaggacgttcctttccacagcagctacgctcacagccagagtctggaccgtctcatgaatcctctgattgaccagtacctgtattacttgagcagaacaaacactccaagtggaaccaccacgcagtcaaggcttcagttttctcaggccggagcgagtgacattcgggaccagtctaggaactggcttcctggaccctgttaccgccagcagcgagtatcaaagacatctgcggataacaacaacagtgaatactcgtggactggagctaccaagtaccacctcaatggcagagactctctggtgaatccgggcccggccatggcaagccacaaggactatgaagaaaagttttttcctcagagcggggttctcatctttgggaagcaaggctcagagaaaacaaatgtggacattgaaaaggtcatgattacagacgaagaggaaatcaggacaaccaatcccgtggctacggagcagtatggttctgtatctaccaacctccagagaggcaacagacaagcagctaccgcagatgtcaacacacaaggcgttcttccaggcatggtctggcaggacagagatgtgtaccttcaggggcccatctgggcaaagattccacacacggacggacattttcacccgtctccgctgatgggcggctttggcctgaaacatcctccgcctcagatcctgatcaagaacacgcctgtacctgcggatcctccgaccaccttcaaccagtcaaagctgaactctttcatcactcagtattctactggccaagtcagcgtggagatcgagtgggagctgcagaaggaaaacagcaagcgctggaaccccgagatccagtacacctccaactactacaaatctacaagtgtggactttgctgttaatacagaaggcgtgtactctgaaccccgccccattggcacccgttacctcacccgtaatctgtaa

SEQ ID NO: 369 - protein, 735 aa, Artificial Sequence
  source: /note="Description of Artificial Sequence: Synthetic polypeptide"
MAADGYLPDWLEDNLSEGIREWWDLKPGAPKPKANQQKQDDGRGLVLPGYKYLGPFNGLDKGEPVNAADAAALEHDKAYDQQLKAGDNPYLRYNHADAEFQERLQEDTSFGGNLGRAVFQAKKRVLEPLGLVEEGAKTAPGKKRPVEQSPQEPDSSSGIGKTGQQPAKKRLNFGQTGDSESVPDPQPLGEPPATPAAVGPTTMASGGGAPMADNNEGADGVGNASGNWHCDSTWLGDRVITTSTRTWALPTYNNHLYKQISSQSGASNDNHYFGYSTPWGYFDFNRFHCHFSPRDWQRLINNNWGFRPKRLSFKLFNIQVKEVTQNEGTKTIANNLTSTVQVFTDSEYQLPYVLGSAHQGCLPPFPADVFMVPQYGYLTLNNGSQAVGRSSFYCLEYFPSQMLRTGNNFTFSYTFEDVPFHSSYAHSQSLDRLMNPLIDQYLYYLSRTNTPSGTTTQSRLQFSQAGASDIRDQSRNWLPGPCYRQQRVSKTSADNNNSEYSWTGATKYHLNGRDSLVNPGPAMASHKDYEEKFFPQSGVLIFGKQGSEKTNVDIEKVMITDEEEIRTTNPVATEQYGSVSTNLQRGNRQAATADVNTQGVLPGMVWQDRDVYLQGPIWAKIPHTDGHFHPSPLMGGFGLKHPPPQILIKNTPVPADPPTTFNQSKLNSFITQYSTGQVSVEIEWELQKENSKRWNPEIQYTSNYYKSTSVDFAVNTEGVYSEPRPIGTRYLTRNL

SEQ ID NO: 370 - DNA, 2214 bp, Artificial Sequence
  source: /note="Description of Artificial Sequence: Synthetic polynucleotide"
atggctgccgatggttatcttccagattggctcgaggacaacctctctgagggcattcgcgagtggtgggacttgaaacctggagccccgaaacccaaagccaaccagcaaaagcaggacgacggccggggtctggtgcttcctggctacaagtacctcggacccttcaacggactcgacaagggggagcccgtcaacgcggcggatgcagcggccctcgagcacgacaaggcctacgaccagcagctcaaagcgggtgacaatccgtacctgcggtataaccacgccgacgccgagtttcaggagcgtctgcaagaagatacgtcttttgggggcaacctcgggcgagcagtcttccaggccaagaagagggttctcgaaccttttggtctggttgaggaaggtgctaagacggctcctggaaagaaacgtccggtagagcagtcgccacaagagccagactcctcctcgggcattggcaagacaggccagcagcctgcaagaaaaagattgaattttggtcagactggagacgcagactcagtacctgacccccagcctctcggacagccaccagcagccccctctggtctgggaactaatacgatggctacaggcagtggcgcaccaatggcagacaataacgagggcgccgacggagtgggtaattcctcgggaaattggcattgcgattcccaatggctgggggacagagtcatcaccaccagcacccgaacctgggccctgcccacctacaacaatcacctctacaagcaaatctccaacagcacatctggaggatcttcaaatgacaacgcctacttcggctacagcaccccctgggggtattttgatttcaacagattccactgccatttctcaccacgtgactggcagcgactcatcaacaacaattggggattccggcccaagagactcaacttcaagctcttcaacatccaggtcaaggaggtcacgcagaatgaaggcaccaagaccatcgccaataacctcaccagcaccatccaggtgtttacggactcggagtaccagctgccgtacgttctcggctctgcccaccagggctgcctgcctccgttcccggcggacgtgttcatgattccccagtacggctacctaacactcaacaacggtagtcaggccgtgggacgctcctccttctactgcctggaatactttccttcgcagatgctgagaaccggcaacaacttccagtttacttacaccttcgaggacgtgcctttccacagcagctacgcccacagccagagcttggaccggctgatgaatcctctgattgaccagtacctgtactacttgtctcggactcaaacaacaggaggcacgacaaatacgcagactctgggcttcagccaaggtgggcctaatacaatggccaatcaggcaaagaactggctgccaggaccctgttaccgccagcagcgagtatcaaagacatttgcggataacaacaacagtgaatactcgtggactggagctaccaagtaccacctcaatggcagagactctctggtgaatccgggcccggccatggcaagccacaaggacgatgaagaaaagttttttcctcagagcggggttctcatctttgggaagcaaggctcagagaaaacaaatgtggacattgaaaaggtcatgattacagacgaagaggaaatcaggacaaccaatcccgtggctacggagcagtatggttctgtatctaccaacctccagagaggcaacagacaagcagctaccgcagatgtcaacacacaaggcgttcttccaggcatggtctggcaggacagagatgtgtaccttcaggggcccatctgggcaaagattccacacacggacggacattttcacccctctcccctcatgggtggattcggacttaaacaccctccgcctcagatcctgatcaagaacacgcctgtacccgcggatcctccgaccaccttcaaccagtcaaagctgaactctttcatcacccagtattctactggccaagtcagcgtggagatcgagtgggagctgcagaaggaaaacagcaagcgctggaaccccgagatccagtacacctccaactactacaaatctacaagtgtggactttgctgttaatacagaaggcgtgtactctgaaccccgccccattggcacccgttacctcacccgtaatctgtaa

SEQ ID NO: 371 - protein, 737 aa, Artificial Sequence
  source: /note="Description of Artificial Sequence: Synthetic polypeptide"
MAADGYLPDWLEDNLSEGIREWWDLKPGAPKPKANQQKQDDGRGLVLPGYKYLGPFNGLDKGEPVNAADAAALEHDKAYDQQLKAGDNPYLRYNHADAEFQERLQEDTSFGGNLGRAVFQAKKRVLEPFGLVEEGAKTAPGKKRPVEQSPQEPDSSSGIGKTGQQPARKRLNFGQTGDADSVPDPQPLGQPPAAPSGLGTNTMATGSGAPMADNNEGADGVGNSSGNWHCDSQWLGDRVITTSTRTWALPTYNNHLYKQISNSTSGGSSNDNAYFGYSTPWGYFDFNRFHCHFSPRDWQRLINNNWGFRPKRLNFKLFNIQVKEVTQNEGTKTIANNLTSTIQVFTDSEYQLPYVLGSAHQGCLPPFPADVFMIPQYGYLTLNNGSQAVGRSSFYCLEYFPSQMLRTGNNFQFTYTFEDVPFHSSYAHSQSLDRLMNPLIDQYLYYLSRTQTTGGTTNTQTLGFSQGGPNTMANQAKNWLPGPCYRQQRVSKTFADNNNSEYSWTGATKYHLNGRDSLVNPGPAMASHKDDEEKFFPQSGVLIFGKQGSEKTNVDIEKVMITDEEEIRTTNPVATEQYGSVSTNLQRGNRQAATADVNTQGVLPGMVWQDRDVYLQGPIWAKIPHTDGHFHPSPLMGGFGLKHPPPQILIKNTPVPADPPTTFNQSKLNSFITQYSTGQVSVEIEWELQKENSKRWNPEIQYTSNYYKSTSVDFAVNTEGVYSEPRPIGTRYLTRNL

SEQ ID NO: 372 - DNA, 2217 bp, Artificial Sequence
  source: /note="Description of Artificial Sequence: Synthetic polynucleotide"
atggctgccgatggttatcttccagattggctcgaggacactctctctgaaggaataagacagtggtgggcgctgaaacctggagccccgaagcccaaagccaaccagcaaaagcaggacgacggccggggtctggtgcttcctggctacaagtacctcggacccttcaacggactcgacaagggggagcccgtcaacgcggcggatgcagcggccctcgagcacgacaaggcctacgaccagcagctcaaagcgggtgacaatccgtacctgcggtataaccacgccgacgccgagtttcaggagcgtctgcaagaagatacgtcttttgggggcaacctcgggcgagcagtcttccaggccaagaagcgggttctcgaacctctcggtctggttgaggaaggcgctaagacggctcctggaaagaagagaccggtagagccatcaccccagcgttctccagactcctctacgggcatcggcaagaaaggccaacagcccgccagaaaaagactcaattttggtcagactggcgactcagagtcagttccagaccctcaacctctcggagaaccaccagcagcccccacaagtttgggatctaatacaatggcttcaggcggtggcgcaccaatggcagacaataacgagggtgccgatggagtgggtaattcctcaggaaattggcattgcgattcccaatggctgggcgacagagtcatcaccaccagcacccgcacctgggccttgcccacctacaataaccacctctacaagcaaatctccagtgcttcaacgggggccagcaacgacaaccactacttcggctacagcaccccctgggggtattttgactttaaccgcttccactgccacttctcgccaagagactggcaaagactcatcaacaacaattggggattccggcccaagagactcaacttcaaactcttcaacatccaagtcaaggaggtcacgacgaatgatggcgtcacgaccatcgccaataacctcaccagcaccatccaggtgtttacggactcggagtaccagctgccgtacgttctcggctctgcccaccagggctgcctgcctccgttcccggcggacgtgttcatgattccccagtatggatacctcaccctgaacaacggaagtcaagcggtgggacgctcatccttttactgcctggagtacttcccttcgcagatgctaaggactggaaataacttccaattcagctataccttcgaggatgtaccttttcacagcagctacgctcacagccagagtttggatcgcttgatgaatcctcttattgatcagtatctgtactacctgaacagaacgcaaggaacaacctctggaacaaccaaccaatcacggctgctttttagccaggctgggcctcagtctatgtctttgcaggccagaaattggctacctgggccctgctaccggcaacagagactttcaaagactgctaacgacaacaacaacagtaactttccttggacagcagccagcaaatatcatctcaatggccgcgactcgctggtgaatccaggaccagctatggccagtcacaaggacgatgaagaaaaatttttccctatgcacggcaatctaatatttggcaaagaagggacaacggcaagtaacgcagaattagataatgtaatgattacggatgaagaagagattcgtaccaccaatcctgtggcaacagagcagtatggaactgtggcaaataacttgcagagctcaaatacagctcccacgactagaactgtcaatgatcagggggccttacctggcatggtgtggcaagatcgtgacgtgtaccttcaggggcccatctgggcaaagattccacacacggacggacattttcacccctctcccctcatgggtggattcggacttaaacaccctcctccgcagattctcatcaagaacaccccggtacctgcgaatccttcgaccaccttcagtgcggcaaagtttgcttccttcatcacacagtactccacgggacaggtcagcgtggagatcgagtgggagctgcagaaggaaaacagcaagcgctggaacccggagatccagtacacttccaactattacaagtctaataatgttgaatttgctgttaatactgaaggtgtatatagtgaaccccgccccattggcaccagatacctgactcgtaatctgtaa

SEQ ID NO: 373 - protein, 738 aa, Artificial Sequence
  source: /note="Description of Artificial Sequence: Synthetic polypeptide"
MAADGYLPDWLEDTLSEGIRQWWALKPGAPKPKANQQKQDDGRGLVLPGYKYLGPFNGLDKGEPVNAADAAALEHDKAYDQQLKAGDNPYLRYNHADAEFQERLQEDTSFGGNLGRAVFQAKKRVLEPLGLVEEGAKTAPGKKRPVEPSPQRSPDSSTGIGKKGQQPARKRLNFGQTGDSESVPDPQPLGEPPAAPTSLGSNTMASGGGAPMADNNEGADGVGNSSGNWHCDSQWLGDRVITTSTRTWALPTYNNHLYKQISSASTGASNDNHYFGYSTPWGYFDFNRFHCHFSPRDWQRLINNNWGFRPKRLNFKLFNIQVKEVTTNDGVTTIANNLTSTIQVFTDSEYQLPYVLGSAHQGCLPPFPADVFMIPQYGYLTLNNGSQAVGRSSFYCLEYFPSQMLRTGNNFQFSYTFEDVPFHSSYAHSQSLDRLMNPLIDQYLYYLNRTQGTTSGTTNQSRLLFSQAGPQSMSLQARNWLPGPCYRQQRLSKTANDNNNSNFPWTAASKYHLNGRDSLVNPGPAMASHKDDEEKFFPMHGNLIFGKEGTTASNAELDNVMITDEEEIRTTNPVATEQYGTVANNLQSSNTAPTTRTVNDQGALPGMVWQDRDVYLQGPIWAKIPHTDGHFHPSPLMGGFGLKHPPPQILIKNTPVPANPSTTFSAAKFASFITQYSTGQVSVEIEWELQKENSKRWNPEIQYTSNYYKSNNVEFAVNTEGVYSEPRPIGTRYLTRNL

SEQ ID NO: 374 - DNA, 2208 bp, Artificial Sequence; identical to SEQ ID NO: 10
  source: /note="Description of Artificial Sequence: Synthetic polynucleotide"

SEQ ID NO: 375 - protein, 735 aa, Artificial Sequence [sequence omitted]

SEQ ID NO: 376 - DNA, 2208 bp, Artificial Sequence
  source: /note="Description of Artificial Sequence: Synthetic polynucleotide"
atggctgccgatggttatcttccagattggctcgaggacaacctctctgagggcattcgcgagtggtgggcgctgaaacctggagccccgaagcccaaagccaaccagcaaaagcaggacgacggccggggtctggtgcttcctggctacaagtacctcggacccttcaacggactcgacaagggggagcccgtcaacgcggcggacgccgcggccctcgagcacgacaaggcctacgaccagcagctgcaggcgggtgacaatccgtacctgcggtataaccacgccgacgccgagtttcaggagcgtctgcaagaagatacgtcttttgggggcaacctcgggcgagcagtcttccaggccaaaaagaggcttcttgaacctcttggtctggttgaggaagcagctaaaacggctcctggaaagaagaggcctgtagagcagtctcctcaggaaccggactcctccgcgggtattggcaaatcgggtgcacagcccgccaaaaagagactcaatttcggtcagactggcgactcagagtcagtcccagaccctcaacctctcggagaaccaccagcagcccccacaagtttgggatctaatacaatggcttcaggcggtggcgcaccaatggcagacaataacgaaggcgccgacggagtgggtaatgcctcaggaaattggcattgcgattccacatggctgggcgacagagtcatcaccaccagcacccgcacctgggccttgcccacctacagcaaccatctctacaagcaaatctccagccaatcaggagcttcaaacgacaacgactactttggctacagcaccccttgggggtattttgatttcaacagattccactgccacttttcaccacgtgactggcaaagactcatcaacaacaactggggattccgacccaagagactcaacttcaagctctttaacattcaagtcaaagaggtcacgcagaatgacggtacgacgacgattgccaataaccttaccagcacggttcaggtgtttactgactcggagtaccagctcccgtacgtcctcggctcggcgcatcaaggatgcctcccgccgttcccagcagacgtcttcatggtgccacagtatggatacctcaccctgaacaacgggagtcaggcagtaggacgctcttcattttactgcctggagtactttccttctcagatgctgcgtaccggaaacaactttaccttcagctacacttttgaggacgttcctttccacagcagctacgctcacagccagagtctggaccgtctcatgaatcctctcatcgaccagtacctgtattacttgagcagaacaaacactccaagtggaaccaccacgcagtcaaggcttcagttttctcaggccggagcgagtgacattcgggaccagtctaggaactggcttcctggaccctgttaccgccagcagcgagtatcaaagacatctgaggataacaacaacagtgaatactcgtggactggagctaccaagtaccacctcaatggcagagactctctggtgaatccgggcccggccatggcaagccacaaggacgatgaagaaaagttttttcctcagagcggggttctcatctttgggaagcaaggctcagagaaaacaaatgtggacattgaaaaggtcatgattacagacgaagaggaaatcaggacaaccaatcccgtggctacggagcagtatggttctgtatctaccaacctccagagaggcaacagacaagcagctaccgcagatgtcaacacacaaggcgttcttccaggcatggtctggcaggacagagatgtgtaccttcaggggcccatctgggcaaagattccacacacggacggacattttcacccctctcccctcatgggtggattcggacttaaacaccctcctccacagattctcatcaagaacaccccggtacctgcgaatccttcgaccaccttcagtgcggcaaagtttgcttccttcatcacacagtactccacgggacaggtcagcgtggagatcgagtgggagctgcagaaggaaaacagcaaacgctggaatcccgaaattcagtacacttccaactacaacaagtctgttaatgtggactttactgtggacactaatggcgtgtattcagagcctcgccccattggcaccagatacctgactcgtaatctgtaa

SEQ ID NO: 377 - protein, 735 aa, Artificial Sequence
  source: /note="Description of Artificial Sequence: Synthetic polypeptide"
MAADGYLPDWLEDNLSEGIREWWALKPGAPKPKANQQKQDDGRGLVLPGYKYLGPFNGLDKGEPVNAADAAALEHDKAYDQQLQAGDNPYLRYNHADAEFQERLQEDTSFGGNLGRAVFQAKKRLLEPLGLVEEAAKTAPGKKRPVEQSPQEPDSSAGIGKSGAQPAKKRLNFGQTGDSESVPDPQPLGEPPAAPTSLGSNTMASGGGAPMADNNEGADGVGNASGNWHCDSTWLGDRVITTSTRTWALPTYSNHLYKQISSQSGASNDNDYFGYSTPWGYFDFNRFHCHFSPRDWQRLINNNWGFRPKRLNFKLFNIQVKEVTQNDGTTTIANNLTSTVQVFTDSEYQLPYVLGSAHQGCLPPFPADVFMVPQYGYLTLNNGSQAVGRSSFYCLEYFPSQMLRTGNNFTFSYTFEDVPFHSSYAHSQSLDRLMNPLIDQYLYYLSRTNTPSGTTTQSRLQFSQAGASDIRDQSRNWLPGPCYRQQRVSKTSEDNNNSEYSWTGATKYHLNGRDSLVNPGPAMASHKDDEEKFFPQSGVLIFGKQGSEKTNVDIEKVMITDEEEIRTTNPVATEQYGSVSTNLQRGNRQAATADVNTQGVLPGMVWQDRDVYLQGPIWAKIPHTDGHFHPSPLMGGFGLKHPPPQILIKNTPVPANPSTTFSAAKFASFITQYSTGQVSVEIEWELQKENSKRWNPEIQYTSNYNKSVNVDFTVDTNGVYSEPRPIGTRYLTRNL

SEQ ID NO: 378 - DNA, 2208 bp, Artificial Sequence
  source: /note="Description of Artificial Sequence: Synthetic polynucleotide"
atggctgccgatggttatcttccagattggctcgaggacaacctctctgagggcattcgcgagtggtgggcgctgaaacctggagccccgaagcccaaagccaaccagcaaaagcaggacgacggccggggtctggtgcttcctggctacaagtacctcggacccttcaacggactcgacaagggggagcccgtcaacgcggcggacgcagcggccctcgagcacgacaaggcctacgaccagcagctgcaggcgggtgacaatccgtacctgcggtataaccacgccgacgccgagttccaggagcgtctgcaagaagatacgtcttttgggggcaacctcgggcgagcagtcttccaggccaagaagagggttctcgaaccttttggtctggttgaggaaggtgctaagacggctcctggaaagaaacgtccggtagagcagtcgccacaagagccagactcctcctcgggcattggcaagacaggccagcagcccgctaaaaagagactcaattttggtcagactggcgactcagagtcagtcccagaccctcaacctctcggagaaccaccagcagcccccacaagtttgggatctaatacaatggcttcaggcggtggcgcaccaatggcagacaataacgagggcgccgacggagtgggtaattcctcgggaaattggcattgcgattccacatggatgggcgacagagtcatcaccaccagcacccgaacctgggccctgcccacctacaacaaccacctctacaaacaaatttccagccaatcaggagcttcaaacgacaaccactactttggctacagcaccccttgggggtattttgactttaacagattccactgccacttttcaccacgtgactggcagcgactcattaacaacaactggggattccggcccaagaaactcaacttcaagctctttaacatccaggtcaaggaggtcacgcagaatgaaggcaccaagaccatcgccaataacctcaccagcaccatccaggtgtttacggactcggagtaccagctgccgtacgttctcggctctgcccaccagggctgcctgcctccgttcccggcggacgtgttcatgattccccagtacggctacctaacactcaacaacggtagtcaggccgtgggacgctcctccttctactgcctggaatactttccttcgcagatgctgagaaccggcaacaacttccagtttacttacaccttcgaggacgtgcctttccacagcagctacgcccacagccagagcttggaccggctgatgaatcctctgattgaccagtacctgtattacttgtctcggactcaaacaacaggaggcacgacaaatacgcagactctgggcttcagccaaggtgggcctaatacaatggccaatcaggcaaagaactggctgcctggaccctgttaccgccagcagcgagtatcaaagacatctgcggataacaacaacagtgaatactcgtggactggagctaccaagtaccacctcaatggcagagactctctggtgaatccgggcccggccatggcaagccacaaggacgatgaagaaaagttttttcctcagagcggggttctcatctttgggaagcaaggctcagagaaaacaaatgtggacattgaaaaggttatgattacagacgaagaggaaatcaggacaaccaatcccgtggctacggagcagtatggttctgtatctaccaacctccagagaggcaacagacaagcagctaccgcagatgtcaacacacagggcgttcttccaggcatggtctggcaggacagagatgtgtaccttcagggtcccatttgggccaaaattcctcacacagatggacactttcacccgtcccctcttatgggcggctttggactcaagaacccgcctcctcagatcctcatcaaaaacacgcctgttcctgcgaatcctccggcagagttttcagctacaaagtttgcttcattcatcacccaatactccacaggacaagtgagtgtggaaattgaatgggagctgcagaaagaaaacagcaagcgctggaatcccgaagtgcagtacacatccaattatgcaaaatctgccaacgttgattttactgtggacactaatggcgtgtattcagagcctcgccccattggcaccagatacctcacccgtaatctgtaa

SEQ ID NO: 379 - protein, 735 aa, Artificial Sequence
  source: /note="Description of Artificial Sequence: Synthetic polypeptide"
MAADGYLPDWLEDNLSEGIREWWALKPGAPKPKANQQKQDDGRGLVLPGYKYLGPFNGLDKGEPVNAADAAALEHDKAYDQQLQAGDNPYLRYNHADAEFQERLQEDTSFGGNLGRAVFQAKKRVLEPFGLVEEGAKTAPGKKRPVEQSPQEPDSSSGIGKTGQQPAKKRLNFGQTGDSESVPDPQPLGEPPAAPTSLGSNTMASGGGAPMADNNEGADGVGNSSGNWHCDSTWMGDRVITTSTRTWALPTYNNHLYKQISSQSGASNDNHYFGYSTPWGYFDFNRFHCHFSPRDWQRLINNNWGFRPKKLNFKLFNIQVKEVTQNEGTKTIANNLTSTIQVFTDSEYQLPYVLGSAHQGCLPPFPADVFMIPQYGYLTLNNGSQAVGRSSFYCLEYFPSQMLRTGNNFQFTYTFEDVPFHSSYAHSQSLDRLMNPLIDQYLYYLSRTQTTGGTTNTQTLGFSQGGPNTMANQAKNWLPGPCYRQQRVSKTSADNNNSEYSWTGATKYHLNGRDSLVNPGPAMASHKDDEEKFFPQSGVLIFGKQGSEKTNVDIEKVMITDEEEIRTTNPVATEQYGSVSTNLQRGNRQAATADVNTQGVLPGMVWQDRDVYLQGPIWAKIPHTDGHFHPSPLMGGFGLKNPPPQILIKNTPVPANPPAEFSATKFASFITQYSTGQVSVEIEWELQKENSKRWNPEVQYTSNYAKSANVDFTVDTNGVYSEPRPIGTRYLTRNL

SEQ ID NO: 380 - DNA, 2214 bp, Artificial Sequence; identical to SEQ ID NO: 370
  source: /note="Description of Artificial Sequence: Synthetic polynucleotide"

SEQ ID NO: 381 - protein, 737 aa, Artificial Sequence; identical to SEQ ID NO: 371
  source: /note="Description of Artificial Sequence: Synthetic polypeptide"

SEQ ID NO: 382 - DNA, 2196 bp, Adeno-associated virus
atggctgctgacggttatcttccagattggctcgaggacaacctctctgagggcattcgcgagtggtgggcgctgaaacctggagccccgcaacccaaagccaaccagcaaaagcaggacgacggccggggtctggtgcttcctggctacaagtacctcggacccttcaacggactcgacaagggggagcccgtcaacgaggcggacgccgcggccctcgagcacgacaaggcctacgaccagcagctcaaagcgggtgacaatccgtacctgcggtataatcacgccgacgccgagtttcaagagcgtctgcaagaagatacgtcctttgggggcaacctcgggcgagcagtcttccaggccaaaaagagggtactcgagcctctgggtctggttgaggaaggcgctaagacggctcctggaaagaagcggccagtagaaccggactccagctcgggcatcggcaagtcaggccagcagcccgcgaaaaagagactgaattttgggcagactggcgactcagagtcagtgcctgacccccaacctctctcagaaccacccgcaggtccctctggtctgggatctggtacaatggctgctggcggtggcgctccaatggcagacaataacgaaggcgccgacggagtgggtaatgtctcaggaaattggcattgcgattccacatggctgggcgaccgagtcatcaccaccagcactcggacctgggccctccccacctacaacaaccacctctacaagcaaatctccaacgggacctcgggaggcagcagcaacgacaacacctactttggctacagcaccccctgggggtattttgactttaacagattccactgccacttttcaccacgtgactggcagcgactcatcaacaacaactgggggttccggcccaagaagctcaacttcaagctcttcaacatccaggtcaaggaggtcacccagaatgaaggcaccaagaccatcgccaataacctcaccagcacggtgcaggtctttacggactcggagtaccagctcccgtacgtgctcggctctgcccaccagggctgcctgcctccgttcccggcggacgtgttcatgattccgcagtacgggtacctgacgctgaacaacgggagccaggccgtggggcgatcctccttctactgcctggagtactttccctcgcagatgctgagaacgggcaacaactttaccttcagctacaccttcgaggacgtgcccttccacagcagctacgcgcacagccagagcctggaccggctgatgaacccgctgattgaccagtacctgtactacctgtctcggactcagaccaacgggaccaatgccacgcagactctgttgtttgctcaggccgggcctcagaacatgtcggctcaggccaagaactggctgcctggtccttgctatcggcagcagcgcgtctctacgacagtgtcgcaaaacaacaacagcaactttacctggaccggggcgaccaagtaccacctgaacggccgagactccctggtgagccccggtgtcgccatggcaacgcacaaggacgacgaggagcgcttcttcccgagcagcggggtcctgatgtttggcaagcagggcgctggaaaggacaatgtcgagtacaccaacgtgatgctcaccagcgaggaggagatcaagaccaccaaccctgtggccacggagcagtacggcgtggtggctgacaatctgcagcagaccaactcagctcccattgtgggggcagtcaacagccagggggccttacccggtatggtctggcagaaccgggacgtgtacctgcagggtcccatctgggccaagatcccgcatacggacggcaactttcacccgtctcctctcatgggcggctttggactgaaacacccgcctccccagatcctgatcaaaaacacgccggtacctgcggatcccccggtgaactttacggacgctaagctggcgagtttcatcacgcagtacagcaccgggcaggtcagcgtggagattgagtgggagctgcagaaggagaacagcaagcgctggaatcccgagattcagtacacttccaattattataaatcagctaatgtggactttgccgtcaatgcagatggtgtatatagtgaaccccgccccattggcactcgttacctcacccgtaatctgtaa

SEQ ID NO: 383 - protein, 731 aa, Adeno-associated virus
MAADGYLPDWLEDNLSEGIREWWALKPGAPQPKANQQKQDDGRGLVLPGYKYLGPFNGLDKGEPVNEADAAALEHDKAYDQQLKAGDNPYLRYNHADAEFQERLQEDTSFGGNLGRAVFQAKKRVLEPLGLVEEGAKTAPGKKRPVEPDSSSGIGKSGQQPAKKRLNFGQTGDSESVPDPQPLSEPPAGPSGLGSGTMAAGGGAPMADNNEGADGVGNVSGNWHCDSTWLGDRVITTSTRTWALPTYNNHLYKQISNGTSGGSSNDNTYFGYSTPWGYFDFNRFHCHFSPRDWQRLINNNWGFRPKKLNFKLFNIQVKEVTQNEGTKTIANNLTSTVQVFTDSEYQLPYVLGSAHQGCLPPFPADVFMIPQYGYLTLNNGSQAVGRSSFYCLEYFPSQMLRTGNNFTFSYTFEDVPFHSSYAHSQSLDRLMNPLIDQYLYYLSRTQTNGTNATQTLLFAQAGPQNMSAQAKNWLPGPCYRQQRVSTTVSQNNNSNFTWTGATKYHLNGRDSLVSPGVAMATHKDDEERFFPSSGVLMFGKQGAGKDNVEYTNVMLTSEEEIKTTNPVATEQYGVVADNLQQTNSAPIVGAVNSQGALPGMVWQNRDVYLQGPIWAKIPHTDGNFHPSPLMGGFGLKHPPPQILIKNTPVPADPPVNFTDAKLASFITQYSTGQVSVEIEWELQKENSKRWNPEIQYTSNYYKSANVDFAVNADGVYSEPRPIGTRYLTRNL

SEQ ID NO: 384 - DNA, 2196 bp, Adeno-associated virus
atggctgctgacggttatcttccagattggctcgaggacaacctctctgagggcattcgcgagtggtgggcgctgaaacctggagccccgcaacccaaagccaaccagcaaaagcaggacgacggccggggtctggtgcttcctggctacaagtacctcggacccttcaacggactcgacaagggggagcccgtcaacgaggcggacgccgcggccctcgagcacgacaaggcctacgaccagcagctcaaagcgggtgacaatccgtacctgcggtataatcacgccgacgccgagtttcaagagcgtctgcaagaagatacgtcctttgggggcaacctcgggcgagcagtcttccaggccaaaaagagggtactcgagcctctgggtctggttgaggaaggcgctaagacggctcctggaaagaagcggccagtagaaccggactccagctcgggcatcggcaagtcaggccggcagcccgcgaaaaagagactgaattttgggcagactggcgactcagagtcagtgcctgacccccaacctctctcagaaccacccgcaggtccctctggtctgggatctggtacaatggctgcaggcggtggcgctccaatggcagacaataacgaaggcgccgacggagtgggtaatgcctcaggaaattggcattgcgattccacatggctgggcgaccgagtcatcaccaccagcactcggacctgggccctccccacctacaacaaccacctctacaagcaaatctccaacgggacctcgggaggcagcagcaacgacaacacctactttggctacagcaccccctgggggtattttgactttaacagattccactgccacttttcaccacgtgactggcagcgactcatcaacaacaactggggattccggcccaagaggctcaacttcaagctcttcaacatccaggtcaaggaggtcacccagaatgaaggcaccaagaccatcgccaataacctcaccagcacggtgcaggtctttacggactcgaagtaccagctcccgtacgtgctcggctctgcccaccagggctgcctgcctccgttcccggcggacgtgttcatgattccgcagtacgggtacctgacgctgaacaacgggagccaggccgtggggcgatcctccttctactgcctggagtactttccctcgcagatgctgagaacgggcaacaactttaccttcagctacaccttcgaggacgtgcccttccacagcagctacgcgcacagccagagcctggaccggctgatgaacccgctgattgaccagtacctgtactacctgtctcggactcagaccaacgggaccaatgccacgcagactctgttgtttgctcaggccgggcctcagaacatgtcggctcaggccaagaactggctgcctggtccttgctatcggcagcagcgcgtctctacgacagtgtcgcaaaacaacaacagcaactttacctggaccggggcgaccaagtaccacctgaacggccgagactccctggtgaaccccggtgtcgccatggcaacgcacaaggacgacgaggagcgcttcttcccgagcagcggggtcctgatgtttggcaagcagggcgctggaaaggacaatgtcgagtacaccaacgtgatgctcaccagcgaggaggagatcaagaccaccaaccctgtggccacggagcagtacggtgtggtggctgacaatctgcagcagaccaactcggctcccattgtgggggcagtcaacagccagggggccttacccggtatggtctggcagaaccgggacgtgtacctgcagggtcccatctgggccaagatcccgcatacggacggcaactttcacccgtctcctctcatgggcggctttggactgaaacacccgcctccccagatcctgatcaaaaacacgccggtacctgcggatcccccggtgaactttacggacgctaagctggcgagtttcatcacgcagtacagcaccgggcaggtcagcgtggagattgagtgggagctgcagaaggagaacagcaagcgctggaatcccgagattcagtacacttccaattattataaatcagctaatgtggactttgccgtcaatgcagatggtgtatatagtgaaccccgccccattggcactcgttacctcacccgtaatctgtaa

SEQ ID NO: 385 - protein, 731 aa, Adeno-associated virus
MAADGYLPDWLEDNLSEGIREWWALKPGAPQPKANQQKQDDGRGLVLPGYKYLGPFNGLDKGEPVNEADAAALEHDKAYDQQLKAGDNPYLRYNHADAEFQERLQEDTSFGGNLGRAVFQAKKRVLEPLGLVEEGAKTAPGKKRPVEPDSSSGIGKSGRQPAKKRLNFGQTGDSESVPDPQPLSEPPAGPSGLGSGTMAAGGGAPMADNNEGADGVGNASGNWHCDSTWLGDRVITTSTRTWALPTYNNHLYKQISNGTSGGSSNDNTYFGYSTPWGYFDFNRFHCHFSPRDWQRLINNNWGFRPKRLNFKLFNIQVKEVTQNEGTKTIANNLTSTVQVFTDSKYQLPYVLGSAHQGCLPPFPADVFMIPQYGYLTLNNGSQAVGRSSFYCLEYFPSQMLRTGNNFTFSYTFEDVPFHSSYAHSQSLDRLMNPLIDQYLYYLSRTQTNGTNATQTLLFAQAGPQNMSAQAKNWLPGPCYRQQRVSTTVSQNNNSNFTWTGATKYHLNGRDSLVNPGVAMATHKDDEERFFPSSGVLMFGKQGAGKDNVEYTNVMLTSEEEIKTTNPVATEQYGVVADNLQQTNSAPIVGAVNSQGALPGMVWQNRDVYLQGPIWAKIPHTDGNFHPSPLMGGFGLKHPPPQILIKNTPVPADPPVNFTDAKLASFITQYSTGQVSVEIEWELQKENSKRWNPEIQYTSNYYKSANVDFAVNADGVYSEPRPIGTRYLTRNL

SEQ ID NO: 386 - DNA, 2196 bp, Adeno-associated virus
atggctgctgacggttatcttccagattggctcgaggacaacctctctgagggcattcgcgagtggtgggcgctgaaacctggagccccgcaacccaaagccaaccagcaaaagcaggacgacggccggggtctggtgcttcctggctacaagtacctcggacccttcaacggactcgacaagggggagcccgtcaacgaggcggacgccgcggccctcgagcacgacaaggcctacgaccagcagctcaaagcgggtgacaatccgtacctgcggtataatcacgccgacgccgagtttcaagagcgtctgcaagaagatacgtcctttgggggcaacctcgggcgagcagtcttccaggccaaaaagagggtactcgagcctctgggtctggttgaggaaggcgctaagacggctcctggaaagaagcggccagtagaaccggactccagctcgggcatcggcaagtcaggccagcagcccgcgaaaaagagactgaattttgggccgactggcgactcagagtcagtgcctgacccccaacctctctcagaaccacctgcaggtccctctggtctgggatctggtacaatggctgcaggcggtggcgctccaatggcagacaataacgaaggcgccgacggagtgggtaatgtctcaggaaattggcattgcgattccacatggctgggcgaccgagtcatcaccaccagcactcggacctgggccctccccacctacaacaaccacctctacaagcaaatctccaacgggacctcgggaggcagcagcaacgacaacacctactttggctacagcaccccctgggggtattttgactttaacagattccactgccacttttcaccacgcgactggcagcgactcatcaacaacaactggggattccggcccaagaagctcaacttcaagctcttcaacatccaggtcaaggaggtcacccagaatgaaggcaccaagaccaccgccaataacctcaccagcacggtgcaggtctttacggactcggagtaccagctcccgtacgtgctcggctctgcccaccagggctgcctgcctccgttcccggcggacgtgttcatgattccgcagtacgggtacctgacgctgaacaacgggagccaggccgtggggcgatcctccttctactgcctggagtactttccctcgcagatgctgagaacgggcaacaactttaccttcagctacaccttcgaggacgtgcccttccacagcagctacgcgcacagccagagcctggaccggctgatgaacccgctgattgaccagtacctgtactacctgtctcggactcagaccaacgggaccaatgccacgcagactctgttgtttgctcaggccgggcctcagaacatgtcggctcaggccaagaactggctgcctggtccttgctatcggcagcagcgcgtctctacggcagtgtcgcaaaacaacaacagcaactttacctggaccggggcgaccaagtaccacctgaacggccgagactccctggtgaaccccggtgtcgccatggcaacgcacaaggacgacgaggagcgcttcttcccgagcagcggggtcctgatgtttggcaagcagggcgctggaaaggacaatgtcgagtacaccaacgtgatgctcaccagcgaggaggagatcaagaccaccaaccctgtggccacggagcagtacggtgtggtggctgacaatctgcagcagaccaactcggctcccattgtgggggcagtcaacagccagggggccttacccggtatggtctggcagaaccgggacgtgtacctgcagggtcccatctgggccaagatcccgcatacggacggcaactttcacccgtctcctctcatgggcggctttggactgaaacacccgcctccccagatcctgatcaaaaacacgccggtacctgcggatcccccggtgaactttacggacgctaagctggcgagtttcatcacgcagtacagcaccgggcaggtcagcgtggagattgagtgggagctgcagaaggagaacagcaagcgctggaatcccgagattcagtacacttccaattattataaatcagctaatgtggactttgccgtcaatgcagatggtgtatatagcgaaccccgccccattggcactcgttacctcacccgtaatctgtaa

SEQ ID NO: 387 - protein, 731 aa, Adeno-associated virus
MAADGYLPDWLEDNLSEGIREWWALKPGAPQPKANQQKQDDGRGLVLPGYKYLGPFNGLDKGEPVNEADAAALEHDKAYDQQLKAGDNPYLRYNHADAEFQERLQEDTSFGGNLGRAVFQAKKRVLEPLGLVEEGAKTAPGKKRPVEPDSSSGIGKSGQQPAKKRLNFGPTGDSESVPDPQPLSEPPAGPSGLGSGTMAAGGGAPMADNNEGADGVGNVSGNWHCDSTWLGDRVITTSTRTWALPTYNNHLYKQISNGTSGGSSNDNTYFGYSTPWGYFDFNRFHCHFSPRDWQRLINNNWGFRPKKLNFKLFNIQVKEVTQNEGTKTTANNLTSTVQVFTDSEYQLPYVLGSAHQGCLPPFPADVFMIPQYGYLTLNNGSQAVGRSSFYCLEYFPSQMLRTGNNFTFSYTFEDVPFHSSYAHSQSLDRLMNPLIDQYLYYLSRTQTNGTNATQTLLFAQAGPQNMSAQAKNWLPGPCYRQQRVSTAVSQNNNSNFTWTGATKYHLNGRDSLVNPGVAMATHKDDEERFFPSSGVLMFGKQGAGKDNVEYTNVMLTSEEEIKTTNPVATEQYGVVADNLQQTNSAPIVGAVNSQGALPGMVWQNRDVYLQGPIWAKIPHTDGNFHPSPLMGGFGLKHPPPQILIKNTPVPADPPVNFTDAKLASFITQYSTGQVSVEIEWELQKENSKRWNPEIQYTSNYYKSANVDFAVNADGVYSEPRPIGTRYLTRNL

SEQ ID NO: 388 - DNA, 4404 bp, Adeno-associated virus
atggctgccgatggttatcttccagattggctcgagggcaacctctctgagggcattcgcgagtggtgggacttgaaacctggagccccgaaacccaaagccaaccagcaaaagcaggacgacggccggggtctggtgcttcctggctacaggtacctcggacccttcaacggactcgacaagggagagccggtcaacgaggcagacgccgcggccctcgagcacgacaaggcctacgacaagcagctcgagcagggggacaacccgtacctcaagtacaaccacgccgacgccgagtttcaggagcgtcttcaagaagatacgtcttttgggggcaacctcgggcgagcagtcttccaggccaagaagcgggttctcgaacctctcggtctggttgaggaaggcgctaagacggctcctggaaagaagagacccatagaatcccccgactcctccacgggcatcggcaagaacggccagccgcccgctaaaaagaagctcaactttgggcagactggcgactcagagtcagtgcccgacccccaacctctcggagaacctcccgccgcgccctcaggtctgggatctggtacaatggctgcaggcggtggcgcaccaatggcagacaataacgaaggcgccgacggagtgggtaatgcctccggaaattggcattgcgattccacatggctgggcgacagagtcatcaccaccagcacccgcacctgggccctgcccacctacaacaaccacctctacaagcagatatcaagtcagagcggggctaccaacgacaaccacttcttcggctacagcaccccctggggctattttgacttcaacagattccactgccacttctcaccacgtgactggcagcgactcatcaacaacaactggggattccggcccagaaagctgcggttcaagttgttcaacatccaggtcaaggaggtcacgacgaacgacggcgttacgaccatcgctaataaccttaccagcacgattcaggtcttctcggactcggagtaccaactgccgtacgtcctcggctctgcgcaccagggctgcctccctccgttccctgcggacgtgttcatgattcctcagtacggatatctgactctaaacaacggcagtcagtctgtgggacgttcctccttctactgcctggagtactttccttctcagatgctgagaacgggcgataactttgaattcagctacacctttgaggaagtgcctttccacagcagctatgcgcacagccagagcctggaccggctgatgaatcccctcatcgaccagtacctgtactacctggcccggacccagagcactacggggtccacaagggagctgcagttccatcaggctgggcccaacaccatggccgagcaatcaaagaactggctgcccggaccctgttatcggcagcagagactgtcaaaaaacatagacagcaacaacaacagtaactttgcctggaccggggccactaaataccatctgaatggtagaaattcattaaccaacccgggcgtagccatggccaccaacaaggacgacgaggaccagttctttcccatcaacggagtgctggtttttggcaaaacgggggctgccaacaagacaacgctggaaaacgtgctaatgaccagcgaggaggagatcaaaaccaccaatcccgtggctacagaagaatacggtgtggtctccagcaacctgcaatcgtctacggccggaccccagacacagactgtcaacagccagggggctctgcccggcatggtctggcagaaccgggacgtgtacctgcagggtcccatctgggccaaaattcctcacacggacggcaactttcacccgtctcccctgatgggcggatttggactcaaacacccgcctcctcaaattctcatcaaaaacaccccggtacctgctaatcctccagaggtgtttactcctgccaagtttgcctcatttatcacgcagtacagcaccggccaggtcagcgtggagatcgagtgggaactgcagaaagaaaacagcaaacgctggaatccagagattcagtacacctcaaattatgccaagtctaataatgtggaatttgctgtcaacaacgaaggggtttatactgagcctcgccccattggcacccgttacctcacccgtaacctgtaaatggctgccgatggttatcttccagattggctcgaggacaacctctctgagggcattcgcgagtggtgggacttgaaacctggagccccgaaacccaaagccaaccagcaaaagcaggacgacggccggggtctggtgcttcctggctacaagtacctcggacccttcaacggactcgacaagggggagcccgtcaacgcggcggacgcagcggccctcgagcacgacaaggcctacgaccagcagctcaaagcgggtgacaatccgtacctgcggtataaccacgccgacgccgagtttcaggagcgtctgcaagaagatacgtcttttgggggcaacctcgggcgagcagtcttccaggccaagaagcgggttctcgaacctctcggtctggttgaggaaggcgctaagacggctcctggaaagaagagaccggtagagccatcaccccagcgttctccagactcctctacgggcatcggcaagaaaggccagcagcccgcgaaaaagagactcaactttgggcagactggcgactcagagtcagtgcccgaccctcaaccaatcggagaaccccccgcaggcccctctggtctgggatctggtacaatggctgcaggcggtggcgctccaatggcagacaataacgaaggcgccgacggagtgggtagttcctcaggaaattggcattgcgattccacatggctgggcgacagagtcatcaccaccagcacccgaacctgggccctccccacctacaacaaccacctctacaagcaaatctccaacgggacttcgggaggaagcaccaacgacaacacctacttcggctacagcaccccctgggggtattttgactttaacagattccactgccacttctcaccacgtgactggcagcgactcatcaacaacaactggggattccggcccaagagactcaacttcaagctcttcaacatccaggtcaaggaggtcacgcagaatgaaggcaccaagaccatcgccaataaccttaccagcacgattcaggtctttacggactcggaataccagctcccgtacgtcctcggctctgcgcaccagggctgcctgcctccgttcccggcggacgtcttcatgattcctcagtacgggtacctgactctgaacaatggcagtcaggccgtgggccgttcctccttctactgcctggagtactttccttctcaaatgctgagaacgggcaacaactttgagttcagctaccagtttgaggacgtgccttttcacagcagctacgcgcacagccaaagcctggaccggctgatgaaccccctcatcgaccagtacctgtactacctgtctcggactcagtccacgggaggtaccgcaggaactcagcagttgctattttctcaggccgggcctaataacatgtcggctcaggccaaaaactggctacccgggccctgctaccggcagcaacgcgtctccacgacactgtcgcaaaataacaacagcaactttgcctggaccggtgccaccaagtatcatctgaatggcagagactctctggtaaatcccggtgtcgctatggcaacccacaaggacgacgaagagcgattttttccgtccagcggagtcttaatgtttgggaaacagggagctggaaaagacaacgtggactatagcagcgttatgctaaccagtgaggaagaaattaaaaccaccaacccagtggccacagaacagtacggcgtggtggccgataacctgcaacagcaaaacgccgctcctattgtaggggccgtcaacagtcaaggagccttacctggcatggtctggcagaaccgggacgtgtacctgcagggtcctatctgggccaagattcctcacacggacggaaactttcatccctcgccgctgatgggaggctttggactgaaacacccgcctcctcagatcctgattaagaatacacctgttcccgcggatcctccaactaccttcagtcaagctaagctggcgtcgttcatcacgcagtacagcaccggacaggtcagcgtggaaattgaatgggagctgcagaaagaaaacagcaaacgctggaacccagagattcaatacacttccaactactacaaatctacaaatgtggactttgctgttaacacagatggcacttattctgagcctcgccccatcggcacccgttacctcacccgtaatctgtaa

SEQ ID NO: 389 - protein, 738 aa, Adeno-associated virus; identical to SEQ ID NO: 7

SEQ ID NO: 390 - DNA, 3129 bp, Adeno-associated virus
gaattcgccctttctacggctgcgtcaactggaccaatgagaactttcccttcaacgattgcgtcgacaagatggtgatctggtgggaggagggcaagatgacggccaaggtcgtggagtccgccaaggccattctcggcggcagcaaagtgcgcgtggaccaaaagtgcaagtcgtccgcccagatcgaccccacccccgtgatcgtcacctccaacaccaacatgtgcgccgtgattgacgggaacagcaccaccttcgagcaccagcagccgttgcaggaccggatgttcaagtttgaactcacccgccgtctggagcacgactttggcaaggtgacaaagcaggaagtcagagagttcttccgctgggcgcaggatcacgtgaccgaggtggcgcacgagttctacgtcagaaagggtggagccaacaagagacccgcccccgatgacgcggataaaagcgagcccaagcgggcctgcccctcagtcgcggatccatcgacgtcagacgcggaaggagctccggtggactttgccgacaggtaccaaaacaaatgttctcgtcacgcgggcatgcttcagatgctgtttccctgcaaaacatgcgagagaatgaatcagaatttcaacatttgcttcacgcacgggaccagagactgttcagaatgtttccccggcgtgtcagaatctcaaccggtcgtcagaaaaaagacgtatcggaaactctgtgcgattcatcatctgctgggggcgggcacccgagattgcttgctcggcctgcgatctggtcaacgtggacctagatgactgtgtttctgagcaataaatgacttaaaccaggtatggctgccgatggttatcttccagattggctcgaggacaacctctctgagggcattcgcgagtggtgggacttgaaacctggagccccgaaacccaaagccaaccagcaaaagcaggacgacggccggggtctggtgcttcctggctacaagtacctcggacccttcaacggactcgacaagggggagcccgtcaacgcggcggacgcagcggccctcgagcacgacaaggcctacgaccagcagctcaaagcgggtgacaatccgtacctgcggtataaccacgccgacgccgagtttcaggagcgtctgcaagaagatacgtcttttgggggcaacctcgggcgagcagtcttccaggccaagaagcgggttctcgaacctctcggtctggttgaggaaggcgctaagacggctcctggaaagaagagaccggtagagccatcaccccagcgttctccagactcctctacgggcatcggcaagaaaggccagcagcccgcgaaaaagagactcaactttgggcagactggcgactcagagtcagtgcccgaccctcaaccaatcggagaaccccccgcaggcccctctggtctgggatctggtacaatggctgcaggcggtggcgctccaatggcagacaataacgaaggcgccgacggagtgggtagttcctcaggaaattggcattgcgattccacatggctgggcgacagagtcatcaccaccagcacccgaacctgggccctccccacctacaacaaccacctctacaagcaaatctccaacgggacttcgggaggaagcaccaacgacaacacctacttcggctacagcaccccctgggggtattttgactttaacagattccactgccacttctcaccacgtgactggcagcgactcatcaacaacaactggggattccggcccaagagactcaacttcaagctcttcaacatccaggtcaaggaggtcacgcagaatgaaggcaccaagaccatcgccaataaccttaccagcacgattcaggtctttacggactcggaataccagctcccgtacgtcctcggctctgcgcaccagggctgcctgcctccgttcccggcggacgtcttcatgattcctcagtacgggtacctgactctgaacaatggcagtcaggccgtgggccgttcctccttctactgcctggagtactttccttctcaaatgctgagaacgggcaacaactttgagttcagctaccagtttgaggacgtgccttttcacagcagctacgcgcacagccaaagcctggaccggctgatgaaccccctcatcgaccagtacctgtactacctgtctcggactcagtccacgggaggtaccgcaggaactcagcagttgctattttctcaggccgggcctaataacatgtcggctcaggccaaaaactggctacccgggccctgctaccggcagcaacgcgtctccacgacactgtcgcaaaataacaacagcaactttgcctggaccggtgccaccaagtatcatctgaatggcagagactctctggtaaatcccggtgtcgctatggcaacccacaaggacgacgaagagcgattttttccgtccagcggagtcttaatgtttgggaaacagggagctggaaaagacaacgtggactatagcagcgttatgctaaccagtgaggaagaaattaaaaccaccaacccagtggccacagaacagtacggcgtggtggccgataacctgcaacagcaaaacgccgctcctattgtaggggccgtcaacagtcaaggagccttacctggcatggtctggcagaaccgggacgtgtacctgcagggtcctatctgggccaagattcctcacacggacggaaactttcatccctcgccgctgatgggaggctttggactgaaacacccgcctcctcagatcctgattaagaatacacctgttcccgcggatcctccaactaccttcagtcaagctaagctggcgtcgttcatcacgcagtacagcaccggacaggtcagcgtggaaattgaatgggagctgcagaaagaaaacagcaaacgctggaacccagagattcaatacacttccaactactacaaatctacaaatgtggactttgctgttaacacagatggcacttattctgagcctcgccccatcggcacccgttacctcacccgtaatctgtaattgcttgttaatcaataaaccggttgattcgtttcagttgaactttggtctctgcgaagggcgaattc

SEQ ID NO: 391 - protein, 738 aa, Artificial Sequence; identical to SEQ ID NO: 7
  source: /note="Description of Artificial Sequence: Synthetic polypeptide"

SEQ ID NO: 392 - protein, 733 aa, Artificial Sequence
  source: /note="Description of Artificial Sequence: Synthetic polypeptide"
MAADGYLPDWLEDNLSEGIREWWDLRPGAPKPKANQQKQDDGRGLVLPGYKYLGPFNGLDKGEPVNEADAAALEHDKAYDKQLEQGDNPYLKYNHADAEFQERLQEDTSFGGNLGRAVFQAKKRVLEPLGLVEEGAKTAPGKKRPIESPDSSTGIGKKGQQPAKKRLNFGQTGDSESVPDPQPIGEPPAGPSGLGSGTMAAGGGAPMADNNEGADGVGSSSGNWHCDSTWLGDRVITTSTRTWALPTYNNHLYKQISNGTSGGSTNDNTYFGYSTPWGYFDFNRFHCHFSPRDWQRLINNNWGFRPKRLNFKLFNIQVKEVTQNEGTKTIANNLTSTIQVFTDSEYQLPYVLGSAHQGCLPPFPADVFMIPQYGYLTLNNGSQAVGRSSFYCLEYFPSQMLRTGNNFEFSYQFEDVPFHSSYAHSQSLDRLMNPLIDQYLYYLSRTQSTGGTAGTQQLLFSQAGPNNMSAQAKNWLPGPCYRQQRVSTTVSQNNNSNFAWTGATKYHLNGRDSLVNPGVAMATHKGDEERFFPSSGVLMFGKQGAGKDNVDYSSVMLTSEEEIKTTNPVATEQYGVVADNLQQQNAAPIVGAVNSQGALPGMVWQNRDVYLQGPIWAKIPHTDGNFHPSPLMGGFGLKHPPPQILIKNTPVPADPPTTFSQAKLASFITQYSTGQVSVEIEWELQKENSKRWNPEIQYTSNYYKSTNVDFAVNTEGTYSEPRPIGTRYLTRNL

SEQ ID NO: 393 - DNA, 2501 bp, Adeno-associated virus
gaattcgcccttggctgcgtcaactggaccaatgagaactttcccttcaacgattgcgtcgacaagatggtgatctggtgggaggagggcaagatgacggccaaggtcgtggagtccgccaaggccattcatcatctgctggggcgggctcccgagattgcttgctcggcctgcgatctggtcaacgtggacctggatgactgtgtttctgagcaataaatgacttaaaccaggtatggctgccgatggttatcttccagattggctcgaggacaacctctctgagggcattcgcgagtggtgggacttgagacctggagccccgaaacccaaagccaaccagcaaaagcaggacgacggccggggtctggtgcttcctggctacaagtacctcggacccttcaacggactcgacaagggagagccggtcaacgaggcagacgccgcggccctcgagcacgacaaggcctacgacaagcagctcgagcagggggacaacccgtacctcaagtacaaccacgccgacgccgagtttcaggagcgtcttcaagaagatacgtcttttgggggcaacctcgggcgagcagtcttccaggccaagaagcgggttctcgaacctctcggtctggttgaggaaggcgctaagacggctcctggaaagaagagacccatagaatcccccgactcctccacgggcatcggcaagaaaggccagcagcccgctaaaaagagactcaactttgggcagactggcgactcagagtcagtgcccgaccctcaaccaatcggagaaccccccgcaggcccctctggtctgggatctggcacaatggctgcaggcggtggcgctccaatggcagacaataacgaaggcgccgacggagtgggtagttcctcaggaaattggcattgcgattccacatggctgggcgacagagtcatcaccaccagcacccgaacctgggccctccccacctacaacaaccacctctacaagcaaatctccaacgggacatcgggaggaagcaccaacgacaacacctacttcggctacagcaccccctgggggtattttgactttaacagattccactgccacttctcaccacgtgactggcagcgactcatcaacaacaactggggattccggcccaagagactcaacttcaagctcttcaacatccaggtcaaggaggtcacgcagaatgaaggcaccaagaccatcgccaataaccttaccagcacgattcaggtctttacggactcggaataccagctcccgtacgtcctcggctctgcgcaccagggctgcctgcctccgttcccggcggacgtcttcatgattcctcagtacgggtacctgactctgaacaacggcagtcaggccgtgggccgttcctccttctactgcctggagtactttccttctcaaatgctgagaacgggcaacaactttgagttcagctaccagtttgaggacgtgccttttcacagcagctatgcgcacagccaaagcctggaccggctgatgaaccccctcatcgaccagtacctgtactacctgtctcggactcagtccacgggaggtaccgcaggaactcagcagttgctattttctcaggccgggcctaataacatgtcggctcaggccaaaaactggctacccgggccctgctaccggcagcaacgcgtctccacgacagtgtcgcaaaataacaacagcaactttgcttggaccggtgccaccaagtatcatctgaatggcagagactctctggtaaatcccggtgtcgctatggcaacgcacaagggcgacgaagagcgattttttccatccagcggagtcttgatgtttgggaaacagggagctggaaaagacaacgtagactatagcagcgttatgctaaccagtgaggaagaaatcaaaaccaccaacccagtggccacagaacagtacggcgtggtggccgataacctgcaacagcaaaacgccgctcctattgtaggggccgtcaacagtcaaggagccttacctggcatggtctggcagaaccgggacgtgtacctgcagggtcctatctgggccaagattcctcacacggacggcaactttcatccttcgccgctgatgggaggctttggactgaaacacccgcctcctcagatcctgattaagaatacacctgttcccgcggatcctccaactaccttcagtcaagccaagctggcgtcgttcatcacgcagtacagcaccggacaggtcagcgtggaaattgaatgggagctgcagaaagagaacagcaagcgctggaacccagagattcagtatacttccaactactacaaatctacaaatgtggactttgctgtcaatactgagggtacttattcagagcctcgccccattggcacccgttacctcacccgtaacctgtaattgcctgttaatcaataaaccggttgattcgtttcagttgaactttggtctcaagggcgaattc

SEQ ID NO: 394 - DNA, 2187 bp, Adeno-associated virus
atggctgccgatggttatcttccagattggctcgaggacaacctctctgagggcattcgcgagtggtgggacttgaaacctggagccccgaaacccaaagccaaccagcaaaagcaggacgacggccggggtctggtgcttcctggctacaagtacctcggacccttcaacggactcgacaagggagagccggtcaacgaggcagacgccgcggccctcgagcacgacaaggcctacgacaagcagctcgagcagggggacaacccgtacctcaagtacaaccacgccgacgccgagtttcaggagcgtcttcaagaagatacgtcttttgggggcaacctcgggcgagcagtcttccaggccaagaagcgggttctcgaacctctcggtctggttgaggaaggcgctaagacggctcctggaaagaagagacccatagaatcccccgactcctccacgggcatcggcaagaaaggccagcagcccgctaaaaagaagctcaactttgggcagactggcgactcagagtcagtgcccgacccccaacctctcggagaacctcccgccgcgccctcaggtctgggatctggtacaatggctgcaggcggtggcgcaccaatggcagacaataacgaaggcgccgacggagtgggtaatgcctccggaaattggcattgcgattccacatggctgggcgacagagtcatcaccaccagcacccgcacctgggccctgcccacctacaacaaccacctctacaagcagatatcaagtcagagcggggctaccaacgacaaccacttcttcggctacagcaccccctggggctattttgacttcaacagattccactgccacttctcaccacgtgactggcagcgactcatcaacaacaactggggattccggcccagaaagctgcggttcaagttgttcaacatccaggtcaaggaggtcacgacgaacgacggcgttacgaccatcgctaataaccttaccagcacgattcaggtcttctcggactcggagtaccaactgccgtacgtcctcggctctgcgcaccagggctgcctccctccgttccctgcggacgtgttcatgattcctcagtacggatatctgactctaaacaacggcagtcagtctgtgggacgttcctccttctactgcctggagtactttccttctcagatgctgagaacgggcaataactttgaattcagctacacctttgaggaagtgcctttccacagcagctatgcgcacagccagagcctggaccggctgatgaatcccctcatcgaccagtacctgtactacctggcccggacccagagcactacggggtccacaagggagctgcagttccatcaggctgggcccaacaccatggccgagcaatcaaagaactggctgcccggaccctgttatcggcagcagagactgtcaaaaaacatagacagcaacaacaacagtaactttgcctggaccggggccactaaataccatctgaatggtagaaattcattaaccaacccgggcgtagccatggccaccaacaaggacgacgaggaccagttctttcccatcaacggagtgctggtttttggcgaaacgggggctgccaacaagacaacgctggaaaacgtgctaatgaccagcgaggaggagatcaaaaccaccaatcccgtggctacagaagaatacggtgtggtctccagcaacctgcaatcgtctacggccggaccccagacacagactgtcaacagccagggggctctgcccggcatggtctggcagaaccgggacgtgtacctgcagggtcccatctgggccaaaattcctcacacggacggcaactttcacccgtctcccctgatgggcggatttggactcaaacacccgcctcctcaaattctcatcaaaaacaccccggtacctgctaatcctccagaggtgtttactcctgccaagtttgcctcatttatcacgcagtacagcaccggccaggtcagcgtggagatcgagtgggaactgcagaaagaaaacagcaaacgctggaatccagagattcagtacacctcaaattatgccaagtctaataatgtggaatttgctgtcaacaacgaaggggtttatactgagcctcgccccattggcacccgttacctcacccgtaacctgtaa

SEQ ID NO: 395 - protein, 728 aa, Adeno-associated virus; identical to SEQ ID NO: 63

SEQ ID NO: 396 - protein, 728 aa, Adeno-associated virus; identical to SEQ ID NO: 155

SEQ ID NO: 397 - protein, 728 aa, Adeno-associated virus; identical to SEQ ID NO: 155

SEQ ID NO: 398 - protein, 733 aa, Artificial Sequence
  source: /note="Description of Artificial Sequence: Synthetic polypeptide"
MAADGHLPDWLEDNLSEGIREWWDLKPGAPKPKANQQKQDDGRGLVLPGYKYLGPFNGLDKGEPVNAADAAALEHDKAYDQQLKAGDNPYLRYNHADAEFQERLQEDTSFGGNLGRAVFQAKKRVLEPLGLVEEGAKTAPGKKRPIESPDSSTGIGKKGQQPAKKKLNFGQTGDSESVPDPQPIGEPPAGPSGLGSGTMAAGGGAPMADNNEGADGVGSSSGNWHCDSTWLGDRVITTSTRTWALPTYNNHLYKQISNGTSGGSTNDNTYFGYSTPWGYFDFNRFHCHFSPRDWQRLINNSWGFRPKRLNFKLFNIQVKEVTQNEGTKTIANNLTSTIQVFTDSEYQLPYVLGSAHQGCLPPFPADVFMIPQYGYLTLNNGSQAVGRSSFYCLEYFPSQMLRTGNNFEFSYQFEDVPFHSSYAHSQSLDRLMNPLIDQYLYYLSRTQSTGGTAGTQQLLFSQAGPNNMSAQAKNWLPGPCYRQQRVSTTLSQNNNSNFAWTGATKYHLNGRDSLVNPGVAMATHKDDEERFFPSSGVLMFGKQGAGKDNVDYSSVMLTSEEEIKTTNPVATEQYGVVADNLQQQNAAPIVGAVNSQGALPGMVWQNRDVYLQGPIWAKIPHTDGNFHPSPLMGGFGLKHPPPQILIKNTPVPADPPTTFSQAKLASFITQYSTGQVSVEIEWELQKENSKRWNPEIQYTSNYYKSTNVDFAVNTEGTYSEPRPIGTRYLTRNL

SEQ ID NO: 399 - DNA, 3113 bp, Adeno-associated virus
gaattcgccctttctacggctgcgtcaactggaccaatgagaactttcccttcaacgattgcgtcgacaagatggtgatctggtgggaggagggcaagatgacggccaaggtcgtggagtccgccaaggccattctcggcggcagcaaggtgcgcgtggaccaaaagtgcaagtcgtccgcccagatcgatcccacccccgtgatcgtcacttccaacaccaacatgtgcgccgtgattgacgggaacagcaccaccttcgagcaccagcagccgttacaagaccggatgttcaaatttgaactcacccgccgtctggagcatgactttggcaaggtgacaaagcaggaagtcaaagagttcttccgctgggcgcaggatcacgtgaccgaggtggcgcatgagttctacgtcagaaagggtggagccaacaagagacccgcccccgatgacgcggataaaagcgagcccaagcgggcctgcccctcagtcgcggatccatcgacgtcagacgcggaaggagctccggtggactttgccgacaggtaccaaaacaaatgttctcgtcacgcgggcatgcttcagatgctgcttccctgcaagacatgcgagagaatgaatcagaatttcagcatttgcttcacgcacgggaccagagactgttcagaatgtttccccggcgtgtcagaatctcaaccggtcgtcagaaagaggacgtatcggaaactctgtgccattcatcatctgctggggcgggctcccgagattgcttgctcggcctgcgatctggtcaacgtggacctggatgactgtgtttctgagcaataaatgacttaaaccaggtatggctgccgatggtcatcttccagattggctcgaggacaacctctctgagggcattcgcgagtggtgggacttgaaacctggagccccgaaacccaaagccaaccagcaaaagcaggacgacggccggggtctggtgcttcctggctacaagtacctcggacccttcaacggactcgacaagggggagcccgtcaacgcggcggacgcagcggccctcgagcacgacaaggcctacgaccagcagctcaaagcgggtgacaatccgtacctgcggtataaccacgccgacgccgagtttcaggagcgtcttcaagaagatacgtcttttgggggcaacctcgggcgagcagtcttccaggccaagaagcgggttctcgaacctctcggtctggttgaggaaggcgctaagacggctcctggaaagaagagacccatagaatcccccgactcctccacgggcatcggcaagaaaggccagcagcccgctaaaaagaagctcaactttgggcagactggcgactcagagtcagtgcccgaccctcaaccaatcggagaaccccccgcaggcccctctggtctgggatctggtacaatggctgcaggcggtggcgctccaatggcagacaataacgaaggcgccgacggagtgggtagttcctcaggaaattggcattgcgattccacatagctgggcgacagagtcatcaccaccagcacccgaacctgggccctccccacctacaacaaccacctctacaagcaaatctccaacgggacatcgggaggaagcaccaacgacaacacctacttcggctacagcaccccctgggggtattttgactttaacagattccactgccacttctcaccacgtgactggcagcgactcatcaacaacagctggggattccggcccaagagactcaacttcaagctcttcaacatccaggtcaaggaggtcacgcagaatgaaggcaccaagaccatcgccaataaccttaccagcacgattcaggtctttacggactcggaataccagctcccgtacgtcctcggctctgcgcaccagggctgcctgcctccgttcccggcggacgtcttcatgattcctcagtacgggtacctgactctgaacaacggcagtcaggccgtgggccgttcctccttctactgcctggagtactttccttctcaaatgctgagaacgggcaacaactttgagttcagctaccagtttgaggacgtgccttttcacagcagctacgcgcacagccaaagcctggaccggctgatgaaccccctcatcgaccagtacctgtactacctgtctcggactcagtccacgggaggtaccgcaggaactcagcagttgctattttctcaggccgggcctaataacatgtcggctcaggccaaaaactggctacccgggccctgctaccggcagcaacgcgtctccacgacactgtcgcaaaataacaacagcaactttgcttggaccggtgccaccaagtatcatctgaatggcagagactctctggtaaatcccggtgtcgctatggcaacgcacaaggacgacgaagagcgattttttccatccagcggagtcttgatgtttgggaaacagggagctggaaaagacaacgtggactatagcagcgttatgctaaccagtgaggaagaaatcaaaaccaccaacccagtggccacagaacagtacggcgtggtggccgataacctgcaacagcaaaacgccgctcctattgtaggggccgtcaacagtcaaggagccttacctggcatggtctggcagaaccgggacgtgtacctgcagggtcctatctgggccaagattcctcacacggacggcaactttcatccttcgccgctgatgggaggctttggactgaaacacccgcctcctcagatcctgattaagaatacacctgttcccgcggatcctccaactaccttcagtcaagccaagctggcgtcgttcatcacgcagtacagcaccggacaggtcagcgtggaaattgaatgggagctgcagaaagagaacagcaagcgctggaacccagagattcagtatacttccaactactacaaatctacaaatgtggactttgctgtcaatactgagggtacttattcagagcctcgccccattggcacccgttacctcacccgtaacctgtaattgcctgttaatcaataaaccggttaattcgtttcagttgaactttggtctctgcgaagggcgaattc

SEQ ID NO: 400 - protein, 731 aa, Artificial Sequence
  source: /note="Description of Artificial Sequence: Synthetic polypeptide"
MAADGYLPDWLEDNLSEGIREWWDLKPGAPKPKANQQKQDDGRGLVLPGYKYLGPFNGLDKGEPVNEADAAALEHDKAYDKQLEQGDNPYLKYNHADAEFQERLQEDTSFGGNLGRAVFRAKKRVLEPLGLVEEGAKTAPGKKRPIESPDSSTGIGKKGQQPAKKKLNFGQTGDSESVPDPQPLGEPPAAPSGLGSGTMAAGGGAPMADNNEGADGVGNASGNWHCDSTWLGDRVITTSTRTWALPTYNNHLYKQISSQSGATNDNHFFGYSTPWGYFDFNRFHCHFSPRDWQRLINNNRGFRPRKLRFKLFNIQVKEVTTNDGVTTIANNLTSTIQVFSDSEYQLPYVLGSAHQGCLPPFPADVFMIPQYGYLTLNNGSQSVGRSSFYCLEYFPSQMLRTGNNFEFSYQFEDVPFHSSYAHSQSLDRLMNPLIDQYLYYLSRTQSTGGTAGTQQLLFSQAGPNNMSAQAKNWLPGPCYRQQRVSTTLSQNNNSNFAWTGATKYHLNGRDSLVNPGVAMATHKDDEERFFPSSGVLMFGKQGAGKDNVDYSSVMLTSEEEIKTTNPVATEQYGVVADNLQQQNAAPIVGAVNSQGALPGMAWQNRDVYLQGPIWAKIPHTDGNFHPSPLMGGFGLKHPPPQILIKNTPVPADPPTTFSQAKLASFITQYSTGQVSVEIEWELQKENSKRWNPEIQYTSNYYKSTNVDFAVNTEGTYSEPRPIGTRYLTRNL

SEQ ID NO: 401 - DNA, 3106 bp, Adeno-associated virus
gaattcgcccttctacggctgcgtcaactggaccaatgagaactttcccttcaacgattgcgtcgacaagatggtgatctggtgggaggagggcaagatgacggccaaggtcgtggagtccgccaaggccattctcggcggcagcaaggtgcgcgtggaccaaaagtgcaagtcgtccgcccagatcgaccccacccccgtgatcgtcacctccaacaccaacatgtgcgccgtgattgacgggaacagcaccaccttcgagcaccagcagccgttgcaggaccggatgttcaaatttgaactcacccgccgtctggagcatgactttggcaaggcgacaaagcaggaagtcaaagagttcttccgctgggcgcaggatcacgtgaccgaggtggcgcatgagttctacgtcagaaagggtggagccaacaagagacccgcccccgatgacgcggataaaagcgagcccaagcgggcccgcccctcagtcgcggatccatcgacgtcagacgcggaaggagctccggtggactttgccgacaggtaccaaaacaaatgttctcgtcacgcgggcatgcttcagatgctgtttccctgcaaaacatgcgagagaatgaatcagaatttcaacatttgcttcacgcacgggaccagagactgttcagaatgtttccccggcgtgtcagaatctcaaccggtcgtcagaaagaggacgtatcggaaactctgtgccattcatcatctgctggggcgggctcccgagattgcttgctcggcctgcgatctggtcaacgtggacctggatgactgtgtttctgagcaataaatgacttaaaccaggtatggctgccgatggttatcttccagattggctcgaggacaacctctctgagggcattcgcgagtggtgggacttgaaacctggagccccgaaacccaaagccaaccagcaaaagcaggacgacggccggggtctggtgcttcctggctacaagtacctcggacccttcaacggactcgacaagggagagccggtcaacgaggcagacgccgcggccctcgagcacgacaaggcctacgacaagcagctcgagcagggggacaacccgtacctcaagtacaaccacgccgacgccgagtttcaggagcgtcttcaagaagatacgtcttttgggggcaacctcgggcgagcagtcttccgggccaagaagcgggttctcgaacctctcggtctggttgaggaaggcgctaagacggctcctggaaagaagagacccatagaatcccccgactcctccacgggcatcggcaagaaaggccagcagcccgctaaaaagaagctcaactttgggcagactggcgactcagagtcagtgcccgacccccaacctctcggagaacctcccgccgcgccctcaggtctgggatctggtacaatggctgcaggcggtggcgcaccaatggcagacaataacgaaggcgccgacggagtgggtaatgcctccggaaattggcattgcgattccacatggctgggcgacagagtcatcaccaccagcacccgcacctgggccctgcccacctacaacaaccacctctacaagcagatatcaagtcagagcggggctaccaacgacaaccacttcttcggctacagcaccccctggggctattttgacttcaacagattccactgccacttctcaccacgtgactggcagcgactcatcaacaacaaccggggattccggcccagaaagctgcggttcaagttgttcaacatccaggtcaaggaggtcacgacgaacgacggcgttacgaccatcgctaataaccttaccagcacgattcaggtcttctcggactcggagtaccaactgccgtacgtcctcggctctgcgcaccagggctgcctccctccgttccctgcggacgtgttcatgattcctcagtacggatatctgactctaaacaacggcagtcagtctgtgggacgttcctccttctactgcctggagtactttccttctcagatgctgagaacgggcaataactttgaattcagctaccagtttgaggacgtgccctttcacagcagctacgcgcacagccaaagcctggaccggctgatgaaccccctcatcgaccagtacctgtactacctgtctcggactcagtccacgggaggtaccgcaggaactcagcagttgctattttctcaggccgggcctaataacatgtcggctcaggccaaaaactggctacccgggccctgctaccggcagcaacgcgtctccacgacactgtcgcaaaataacaacagcaactttgcttggaccggtgccaccaagtatcatctgaatggcagagactctctggtaaatcccggtgtcgctatggcaacgcacaaggacgacgaagagcgattttttccatccagcggagtcttgatgtttgggaaacagggagctggaaaagacaacgtggactatagcagcgttatgctaaccagtgaggaagaaatcaaaaccaccaacccagtggccacagaacagtacggcgtggtggccgataacctgcaacagcaaaacgccgctcctattgtaggggccgtcaacagtcaaggagccttacctggcatggcctggcagaaccgggacgtgtacctgcagggtcctatctgggccaagattcctcacacggacggcaactttcatccttcgccgctgatgggaggctttggactgaaacacccgcctcctcagatcctgattaagaatacacctgttcccgcggatcctccaactaccttcagtcaagccaagctggcgtcgttcatcacgcagtacagcaccggacaggtcagcgtggaaattgaatgggagctgcagaaagagaacagcaagcgctggaacccagagattcagtatacttccaactactacaaatctacaaatgtggactttgctgtcaatactgagggtacttattcagagcctcgccccattggcacccgttacctcacccgtaacctgtaattgcctgttaatcaataaaccggttaattcgtttcagttgaactttggtctctgcgaagggcgaattc

SEQ ID NO: 402 - protein, 738 aa, Artificial Sequence
  source: /note="Description of Artificial Sequence: Synthetic polypeptide"
MAADGYLPDWLEDNLSEGIREWWDLKPGAPKPKANQQKQDDGRGLVLPGYKYLGPFNGLDKGEPVNEADAAALEHDKAYDKQLEQGDNPYLKYNHADAEFQERLQEDTSFGGNLGRAVFQAKKRVLEPLGLVEEGAKTAPGKKRPVEPSPQRSPDSSTGIGKTGQQPAKKRLNFGQTGDSESVPDPQPIGEPPAGPSGLGSGTMAAGGGAPMADNNEGADGVGSSSGNWHCDSTWLGDRVITTSTRTWALPTYNNHLYKQISNGTSGGSTNDNTYFGYSTPWGYFDFNRFHCHFSPRDWQRLINNNWGFRPKRLNFKLFNIQVKEVTQNEGTKTIANNLTSTIQVFTDSEYQLPYVLGSAHQGCLPPFPADVFMIPQYGYLTLNNGSQAVGRSSFYCLEYFPSQMLRTGNNFEFSYQFEDVPFHSSYAHSQSLDRLMNPLIDQYLYYLSRTQSTGGTAGTQQLLFSQAGPNNMSAQAKNWLPGPCYRQQRVSTTLSQNNNSNFAWTGATKYHLNGRDSLVNPGVAMATHKDDEERFFPSSGVLMFGKQGAGKDNVDYSSVMLTSEEEIKTTNPVATEQYGVVADNLQQQNAAPIVGAVNSQGALPGMVWQNRDVYLQGPIWAKIPHTDGNFHPSPLMGGFGLKHPPPQILIKNTPVPADPPTTFSQAKLASFITQYSTGQVSVEIEWELQKENSKRWNPEIQYTSNYYKSTNVDFAVNTEGTYSEPRPIGTRYLTRNL

SEQ ID NO: 403 - DNA, 3197 bp, Adeno-associated virus
gaattcgccctttctacggctgcgtcaactggaccaatgagaactttcccttcaacgattgcgtcgacaagatggtgatctggtgggaggagggcaagatgacggccaaggtcgtggagtccgccaaggccattctcggcggcagcaaggtgcgcgtggaccaaaagtgcaagtcgtccgcccagatcgaccccacccccgtgatcgtcacctccaacaccaacatgtgcgccgtgattgacgggaacagcaccaccttcgagcaccagcagccgttacaagaccggatgttcaaatttgaactcacccgccgtctggagcacgactttggcaaggtgacaaagcaggaagtcaaagagttcttccgctgggcgcaggatcacgtgaccgaggtggcgcatgagttctacgtcagaaagggtggagccaacaagagacccgcccccgatgacgcggataaaagcgagcccaagcgggcctgcccctcagtcgcggatccatcgacgtcagacgcggaaggagctccggtggactttgccgacaggtaccaaaacaaatgttctcgtcacgcgggcatgcttcagatgctgtttccctgcaagacatgcgagagaatgaatcagaatttcaacatttgcttcacgcacgggaccagagactgttcagaatgtttccccggcgtgtcagaatctcaaccggtcgtcagaaagaggacgtatcggaaactctgtgccattcatcatctgctggggcgggctcccgagattgcttgctcggcctgcgatctggtcaacgtggacctggatgactgtgtttctgagcaataaatgacttaaaccaggtatggctgccgatggttatcttccagattggctcgaggacaacctctctgagggcattcgcgagtggtgggacttgaaacctggagccccgaaacccaaagccaaccagcaaaagcaggacgacggccggggtctggtgcttcctggctacaagtacctcggacccttcaacggactcgacaagggagagccggtcaacgaggcagacgccgcggccctcgagcacgacaaggcctacgacaagcagctcgagcagggggacaacccgtacctcaagtacaaccacgccgacgccgagtttcaggagcgtcttcaagaagatacgtcttttgggggcaacctcgggcgagcagtcttccaggccaagaagcgggttctcgaacctctcggtctggttgaggaaggcgctaagacggctcctggaaagaagagaccggtagagccatcaccccagcgttctccagactcctctacgggcatcggcaagacaggccagcagcccgcgaaaaagagactcaactttgggcagactggcgactcagagtcagtgcccgaccctcaaccaatcggagaaccccccgcaggcccctctggtctgggatctggtacaatggctgcaggcggtggcgctccaatggcagacaataacgaaggcgccgacggagtgggtagttcctcaggaaattggcattgcgattccacatggctgggcgacagagtcatcaccaccagcacccgaacctgggccctccccacctacaacaaccacctctacaagcaaatctccaacgggacatcgggaggaagcaccaacgacaacacctacttcggctacagcaccccctgggggtattttgactttaacagattccactgccacttctcaccacgtgactggcagcgactcatcaacaacaactggggattccggcccaagagactcaacttcaagctcttcaacatccaggtcaaggaggtcacgcagaatgaaggcaccaagaccatcgccaataaccttaccagcacgattcaggtctttacggactcggaataccagctcccgtacgtcctcggctctgcgcaccagggctgcctgcctccgttcccggcggacgtcttcatgattcctcagtacgggtacctgactctgaacaacggcagtcaggccgtgggccgttcctccttctactgcctggagtactttccttctcaaatgctgagaacgggcaacaactttgagttcagctaccagtttgaggacgtgccttttcacagcagctacgcgcacagccaaagcctggaccggctgatgaaccccctcatcgaccagtacctgtactacctgtctcggactcagtccacgggaggtaccgcaggaactcagcagttgctattttctcaggccgggcctaataacatgtcggctcaggccaaaaactggctacccgggccctgctaccggcagcaacgcgtctccacgacactgtcgcaaaataacaacagcaactttgcttggaccggtgccaccaagtatcatctgaatggcagagactctctggtaaatcccggtgtcgctatggcaacgcacaaggacgacgaagagcgattttttccatccagcggagtcttgatgtttgggaaacagggagctggaaaagacaacgtggactatagcagcgttatgctaaccagtgaggaagaaatcaaaaccaccaacccagtggccacagaacagtacggcgtggtggccgataacctgcaacagcaaaacgccgctcctattgtaggggccgtcaacagtcaaggagccttacctggcatggtctggcagaaccgggacgtgtacctgcagggtcctatctgggccaagattcctcacacggacggcaactttcatccttcgccgctgatgggaggctttggactgaaacacccgcctcctcagatcctgattaagaatacacctgttcccgcggatcctccaactaccttcagtcaagccaagctggcgtcgttcatcacgcagtacagcaccggacaggtcagcgtggaaattgaatgggagctgcagaaagagaacagcaagcgctggaacccagagattcagtatacttccaactactacaaatctacaaatgtggactttgctgtcaatactgagggtacttattcagagcctcgccccattggcacccgttacctcacccgtaacctgtaattgcctgttaatcaataaaccggttaattcgtttcagttgaactttggtctctgcgaagggcgaattcgtttaaacctgcaggactagtccctttagtgagggttaattctgagcttggcgtaatcatgggtcatag

SEQ ID NO: 404 - protein, 735 aa, Artificial Sequence
  source: /note="Description of Artificial Sequence: Synthetic polypeptide"
MAADGYLPDWLEDNLSEGIREWWDLKPGAPKPKANQQKQDDGRGLVLPGYKYLGPFNGLDKGEPVNEADAAALEHDKAYDKQLEQGDNPYLKYNHADAEFQERLQEDTSFGGNLGRAVFQAKKRVLEPLGLVEEGAKTAPGKKRPVEPSPQRSPDSSTGIGKTGQQPAKKRLNFGQTGDSESVPDPQPIGEPPAGPSGLGSGTMAAGGGAPMADNNEGADGVGSSSGNWHCDSTWLGDRVITTSTRTWALPTYNNHLYKQISNGTSGGSTNDNTYFGYSTPWGYFDFNRFHCHFSPRDWQRLINNNWGFRPRKLRFKLFNIQVKEVTTDDGVTTIANNLTSTIQVFSDSEYQLPYVLGSAHQGCLPPFPADVFMIPQYGYLTLNNGSQSVGRSSFYCLEYFPSQMLRTGNNFEFSYTFEEVPFHSSYAHSQSLDRLMNPLIDQYLYYLARTQSTTGSTRELQFHQAGPNTMAEQSKNWLPGPCYRQQRLSKNIDSNNNSNFAWTGATKYHLNGRNSLTNPGVAMATNKDDEDQFFPINGVLVFGKTGAANKTTLENVLMTSEEEIKTTNPVATEEYGVVSSNLQSSTAGPQTQTVNSQGALPGMVWQNRDVYLQGPIWAKIPHTDGNFHPSPLMDGFGLKHPPPQILIKNTPVPANPPEVFTPAKFASFITQYSTGQVSVEIEWELQKENSKRWNPEIQYTSNYAKSNNVEFAVNNEGVYTEPRPIGTRYLTRNL

SEQ ID NO: 405 - DNA, 3276 bp, Adeno-associated virus
gaattcgcccttcgcagagaccaaagttcaactgaaacgaattaaccggtttattgattaacaggcaattacaggttacgggtgaggtaacgggtgccaatggggcgaggctcagtataaaccccttcgttgttgacagcaaattccacattattagacttggcataatttgaggtgtactgaatctctggattccagcgtttgctgttttctttctgcagttcccactcgatctccacgctgacctggccggtgctgtactgcgtgataaatgaggcaaacttggcaggagtaaacacctctggaggattagcaggtaccggggtgtttttgatgagaatttgaggaggcgggtgtttgagtccaaatccgtccatcaggggagacgggtgaaagttgccgtccgtgtgaggaattttggcccagatgggaccctgcaggtacacgtcccggttctgccagaccatgccgggcagagccccctggctgttgacagtctgtgtctggggtccggccgtagacgattgcaggttgctggagaccacaccgtattcttctgtagccacgggattggtggttttgatctcctcctcgctggtcattagcacgttttccagcgttgtcttgttggcagcccccgttttgccaaaaaccagcactccgttgatgggaaagaactggtcctcgtcgtccttgttggtggccatggctacgcccgggttggttaatgaatttctaccattcagatggtatttagtggccccggtccaggcaaagttactgttgttgttgctgtctatgttttttgacagtctctgctgccgataacagggtccgggcagccagttctttgattgctcggccatggtgttgggcccagcctgatggaactgcagctcccttgtggaccccgtagtgctctgggtccgggccaggtagtacaggtactggtcgatgaggggattcatcagccggtccaggctctggctatgcgcatagctgctgtggaaaggcacttcctcaaaggtgtagctgaattcaaagttattgcccgttctcagcatctgagaaggaaagtactccaggcagtagaaggaggaacgtcccacagactgactgccgttgtttagagtcagatatccgtactgaggaatcatgaacacgtccgcagggaacggagggaggcagccctggtgcgcagagccgaggacgtacggcagttggtactccgagtccgagaagacctgaatcgtgctggtaaggttattagcgatggtcgtaacgccgtcgtccgtcgtgacctccttgacctggatgttgaacaacttgaaccgcagctttctgggccggaatccccagttgttgttgatgagtcgctgccagtcacgtggtgagaagtggcagtggaatctgttaaagtcaaaatacccccagggggtgctgtagccgaagtaggtgttgtcgttggtgcttcctcccgatgtcccgttggagatttgcttgtagaggtggttgttgtaggtggggagggcccaggttcgggtgctggtggtgatgactctgtcgcccagccatgtggaatcgcaatgccaatttcctgaggaactacccactccgtcggcgccttcgttattgtctgccattggagcgccaccgcctgcagccattgtaccagatcccagaccagaggggcctgcggggggttctccgattggttgagggtcgggcactgactctgagtcgccagtctgcccaaagttgagtctctttttcgcgggctgctggcctgtcttgccgatgcccgtagaggagtctggagaacgctggggtgatggctctaccggtctcttctttccaggagccgtcttagcgccttcctcaaccagaccgagaggttcgagaacccgcttcttggcctggaagactgctcgcccgaggttgcccccaaaagacgtatcttcttgaagacgctcctgaaactcggcgtcggcgtggttgtacttgaggtacgggttgtccccctgctcgagctgcttgtcgtaggccttgtcgtgctcgagggccgcggcgtctgcctcgttgaccggctctcccttgtcgagtccgttgaagggtccgaggtacttgtagccaggaagcaccagaccccggccgtcgtcctgcttttgctggttggctttgggtttcggggctccaggtttcaagtcccaccactcgcgaatgccctcagagaggttgtcctcgagccaatctggaagataaccatcggcagccatacctggtttaagtcatttattgctcagaaacacagtcatccaggtccacgttgaccagatcgcaggccgagcaagcaatctcgggagcccgccccagcagatgatgaatggcacagagtttccgatacgtcctctttctgacgaccggttgagattctgacacgccggggaaacattctgaacagtctctggtcccgtgcgtgaagcaaatgttgaaattctgattcattctctcgcatgtcttgcagggaaacagcatctgaagcatgcccgcgtgacgagaacacttgttttggtacctgtcggcaaagtccaccggagctccttccgcgtctgacgtcgatggatgcaaaatgtcgcaaaagcactcacgtgacagctaatacaggaccactcccctatgacgtgatttacgtcagcgctatgcccgcgtgacgagaacatttgttttggtacctgtcggcaaagtccaccggagctccttccgcgtctgacgtcgatggatccgcgactgaggggcaggcccgcttgggctcgcttttatccgcgtcatcgggggcgggtctcttgttggctccaccctttctgacgtagaactcatgcgccacctcggtcacgtgatcctgcgcccagcggaagaactctttgacttcctgctttgtcaccttgccaaagtcatgctccagacggcgggtgagttcaaatttgaacatccggtcctgcaacggctgctggtgctcgaaggtggtgctgttcccgtcaatcacggcgcacatgttggtgttggaagtgacgatcacgggggtgggatcgatctgggcggaagacttgcacttttggtccacgcgcaccttgctgccgccgagaatggccttggcggactccacgaccttggccgtcatcttgccctcctcccaccagatcaccatcttgtcgacgcaatcgttgaagggaaagttctcattggtccagttgacgcagccgtagaaagggcgaattc

SEQ ID NO: 406 - protein, 738 aa, Adeno-associated virus; identical to SEQ ID NO: 71

SEQ ID NO: 407 - protein, 738 aa, Adeno-associated virus
MAADGYLPDWLEDNLSEGIREWWDLKPGAPKPKANQQKQDDGRGLVLPGYKYLGPFNGLDKGEPVNAADAAALEHDKAYDQQLKAGDNPYLRYNHADAEFQERLQEDTSFGGNLGRAVFQAKKRVLEPLGLVEEGAKTAPGKKRPVEPSPQRSPDSSTGIGKKGHQPARKRLNFGQTGDSESVPDPQPIGEPPAGPSGLGSGTMAAGGGAPMADNNEGADGVGSSSGNWHCDSTWLGDRVITTSTRTWALPTYNNHLYKQISNGTSGGSTNDNTYFGYSTPWGYFDFNRFHCHFSPRDWQRLINNNWGFRPKRLNFKLFNIQVKEVTQNEGTKTIANNLTSTIQVFTDSEYQLPYVPGSAHQGCLPPFPADVFMIPQYGYLTLNNGSQAVGRSSFYCLEYFPSQMLRTGNNFEFSYTFEDVPFHSSYAHSQSLDRLMNPLIDQYLYYLSRTQSTGGTQGTQQLLFSQAGPANMSAQAKNWLPGPCYRQQRVSTTLSQNNNSNFAWTGATKYHLNGRDSLVNPGVAMATHKDDEERFFPSSGVLMFGKQGAGKDNVDYSSVMLTSEEEIKTTNPVATEQYGVVADNLQQTNGAPIVGTVNSQGALPGMVWQNRDVYLQGPIWAKIPHTDGNFHPSPLMGGFGLKHPPPQILIKNTPVPADPPTTFSQAKLASFITQYSTGQVSVEIEWELQKENSKRWNPEIQYTSNYYKSTNVDFAVNTEGTYSEPRPIGTRYLTRNL

SEQ ID NO: 408 - protein, 738 aa, Adeno-associated virus; identical to SEQ ID NO: 69

SEQ ID NO: 409 - protein, 728 aa, Artificial Sequence
  source: /note="Description of Artificial Sequence: Synthetic polypeptide"
MAADGYLPDWLEDNLSEGIREWWDLKPGAPKPKANQQKQDDGRGLVLPGYKYLGPFNGLDKGEPVNEADAAALEHDKAYDKQLEQGDNPYLKYNHADAEFQERLQEDTSFGGNLGRAVFQAKKRVLEPLGLVEEGAKTAPGKKRPIESPDSSTGIGRKGQQPAKKKLNFGQTGDSESVPDPQPIGEPPAGPSGLGSGTMAAGGGAPMADNNEGADGVGNASGNWHCDSTWLGDRVITTSTRTWALPTYNNHLYKQISSQSGATNDNHFFGYSTPWGYFDFNRFHCHFSPRDWQRLINNNWGFRPRKLRFKLFNIQVKEVTTNDGVTTIANNLTSTIQVFSDSEYQLPYVLGSAHQGCLPPFPADVFMIPQYGYLTLNNGSQSVGRSSFYCLEYFPSQMLRTGNNFEFSYTFEEVPFHSSYAHSQSLDRLMNPLIDQYLYYLARTQSTTGSTRELQFHQAGPNTMAEQSKNWLPGPCYRQQRLSKNIDSNNNSNFAWTGATKYHLNGRNSLTNPGVAMATNKDDEDQFFPINGVLVFGKTGAANKTTLENVLMTSEEEIKTTNPVATEEYGVVSSNLQSSTAGPQTQTVNSQGALPGMVWQNRDVYLQGPIWAKIPHTDGNFHPSPLMGGFGLKHPPPQILIKNTPVPANPPEVFTPAKFASFITQYSTGQVSVEIEWELQKENSKRWNPEIQYTSNYAKSNNVEFAVNNEGVYTEPRPIGTRYLTRNL

SEQ ID NO: 410 - DNA, 2489 bp, Adeno-associated virus
gaattcgccctttctacggctgcgtcaactggaccaatgagaactttcccttcaacgattgcgtcgacaagatggtgatctggtgggaggagggcaagatgacggccaaggtcgtgaagtccgccaaggccattcatcatctgctggggcgggctcccgagattgcttgctcggcctgcgatctggtcaacgtggacctggatgactgtgtttctgagcaataaatgacttaaaccaggtatggctgccgatggttatcttccagattggctcgaggacaacctctctgagggcattcgcgagtggtgggacttgaaacctggagccccgaaacccaaagccaaccagcaaaagcaggacgacggccggggtctggtgcttcctggctacaagtacctcggacccttcaacggactcgacaagggagagccggtcaacgaggcagacgccgcggccctcgagcacgacaaggcctacgacaagcagctcgagcagggggacaacccgtacctcaagtacaaccacgccgacgccgagtttcaggagcgtcttcaagaagatacgtcttttgggggcaacctcgggcgagcagtcttccaggccaagaagcgggttctcgaacctctcggtctggttgaggaaggcgctaagacggctcctggaaagaagagacccatagaatcccccgactcctccacgggcatcggcaggaaaggccagcagcccgctaaaaagaagctcaactttgggcagactggcgactcagagtcagtgcccgaccctcaaccaatcggagaaccccccgcaggcccctctggtctgggatctggtacaatggctgcaggcggtggcgctccaatggcagacaataacgaaggcgccgacggagtgggtaatgcctccggaaattggcattgcgattccacatggctgggcgacagagtcatcaccaccagcacccgcacctgggccctgcccacctacaacaaccacctctacaagcagatatcaagtcagagcggggctaccaacgacaaccacttcttcggctacagcaccccctggggctattttgacttcaacagattccactgccacttctcaccacgtgactggcagcgactcatcaacaacaactggggattccggcccagaaagctgcggttcaagttgttcaacatccaggtcaaggaggtcacgacgaacgacggcgttacgaccatcgccaataaccttaccagcacgattcaggtcttctcggactcggagtaccaactgccgtacgtcctcggctctgcgcaccagggctgcctccctccgttccctgcggacgtgttcatgattcctcagtacggatatctgactctaaacaacggcagtcagtctgtgggacgttcctccttctactgcctggagtactttccttctcagatgctgagaacgggcaataactttgaattcagctacacctttgaggaagtgcctttccacagcagctatgcgcacagccagagcctggaccggctgatgaatcccctcatcgaccagtacctgtactacctggcccggacccagagcactacggggtccacaagggagctgcagttccatcaggctgggcccaacaccatggccgagcaatcaaagaactggctgcccggaccctgttatcggcagcagagactgtcaaaaaacatagacagcaacaacaacagtaactttgcctggaccggggccactaaataccatctgaatggtagaaattcattaaccaacccgggcgtagccatggccaccaacaaggacgacgaggaccagttctttcccatcaacggagtgctggtttttggcaaaacgggggctgccaacaagacaacgctggaaaacgtgctaatgaccagcgaggaggagatcaaaaccaccaatcccgtggctacagaagaatacggtgtggtctccagcaacctgcaatcgtctacggccggaccccagacacagactgtcaacagccagggggctctgcccggcatggtctggcagaaccgggacgtgtacctgcagggtcccatctgggccaaaattcctcacacggacggcaactttcacccgtctcccctgatgggcggatttggactcaaacacccgcctcctcaaattctcatcaaaaacaccccggtacctgctaatcctccagaggtgtttactcctgccaagtttgcctcatttatcacgcagtacagcaccggccaggtcagcgtggagatcgagtgggaactgcagaaagaaaacagcaaacgctggaatccagagattcagtacacctcaaattatgccaagtctaataatgtggaatttgctgtcaacaacgaaggggtttatactgagcctcgccccattggcacccgttacctcacccgtaacctgtaattgcctgttaatcaataaaccggttaattcgtttcagttgaactttggtcaagggcgaattc

SEQ ID NO: 411 - protein, 728 aa, Artificial Sequence
  source: /note="Description of Artificial Sequence: Synthetic polypeptide"
MAADGYLPDWLEDNLSEGIREWWDLKPGAPKPKANQQKQDDGRGLVLPGYKYLGPFNGLDKGEPVNAADAAALEHDKAYDQQLKAGDNPYLRYNHADAEFQERLQEDTSFGGNLGRAVFQAKKRVLEPLGLVEEGAKTAPGKKRPIESPDSSTGIGKKGQQPAKKKLNFGQTGDSESVPDPQPIGEPPAGPSGLGSGTMAAGGGAPMADNNEGADGVGNASGNWHCDSTWLGDRVITTSTRTWALPTYNNHLYKQISSQSGATNDNHFFGYSTPWGYFDFNRFHCHFSPRDWQRLINNNWGFRPRKLRFKLFNIQVKEVTTNDGVTTIANNLTSTIQVFSDSEYQLPYVLGSAHQGCLPPFPADVFMIPQYGYLTLNNGSQSVGRSSFYCLEYFPSQMLRTGNNFEFSYTFEEVPFHSSYAHSQSLDRLMNPLIDQYLYYLARTQSTTGSTRELQFHQAGPNTMAEQSKNWLPGPCYRRQRLSKDIDSNNNSNFAWTGATKYHLNGRNSLTNPGVAMATNKDDEDQFFPINGVLVFGKTGAANKTTLENVLMTSEEEIKTTNPVATEEYGVVSSNLQSSTAGPQTQTVNSQGALPGMVWQNRDVYLQGPIWAKIPHTDGNFHPSPLMGGFGLKHPPPQILIKNTPVPANPPEVFTPAKFASFITQYSTGQVSVEIEWELQKENSKRWNPEIQYTSNYAKSNNVEFAVNNEGVYTEPRPIGTRYLTRNL

SEQ ID NO: 412 - DNA, 3098 bp, Adeno-associated virus
gaattcgccctttctacggctgcgtcaactggaccaatgagaactttcccttcaacgattgcgtcgacaagatggtgatctggtgggaggagggcaagatgacggccaaggtcgtggagtccgccaaggccattctcggcggcagcaaggtgcgcgtggaccaaaagtgcaagtcttccgcccagatcgatcccacccccgtgatcgtcacttccaacaccaacatgtgcgccgtgattgacgggaacagcaccaccttcgagcaccagcagccgttacaagaccggatgttcaaatttgaactcacccgccgtctggagcacgactttggcaaggtgacaaagcaggaagtcaaagagttcttccgctgggcgcaggatcacgtgaccgaggtggcgcatgagttctacgtcagaaagggtggagccaacaagagacccgcccccgatgacgcggataaaagcgagcccaagcgggcctgcccctcagtcgcggatccatcgacgtcagacgcggaaggagctccggtggactttgccgacaggtaccaaaacaaatgttctcgtcacgcgggcatgcttcagatgctgtttccctgcaagacatgcgagagaatgaatcagaatttcaacatttgcttcacgcacgggaccggagactgttcagaatgtttccccggcgtgtcagaatctcaaccggtcgtcagaaagaggacgtatcggaaactctgtgccattcatcatctgctggggcgggctcccgagattgcttgctcggcctgcgatctggtcaacgtggacctggatgactgtgtttctgagcaataaatgacttaaaccaggtatggctgccgatggttatcttccagattggctcgaggacaacctctctgagggcattcgcgagtggtgggacttgaaacctggagccccgaaacccaaagccaaccagcaaaagcaggacgacggccggggtctggtgcttcctggctacaagtacctcggacccttcaacggactcgacaagggagagccggtcaacgcggcggacgcagcggccctcgagcacgacaaggcctacgaccagcagctcaaagcgggtgacaatccgtacctgcggtataaccacgccgacgccgagtttcaggagcgtcttcaagaagatacgtcttttgggggcaacctcgggcgagcagtcttccaggccaagaagcgggttctcgaacctctcggtctggttgaggaaggcgctaagacggctcctggaaagaagagacccatagaatcccccgactcctccacgggcatcggcaagaaaggccagcagcccgctaaaaagaagctcaactttgggcagactggcgactcagagtcagtgcccgaccctcaaccaatcggagaaccccccgcaggcccctctggtctgggatctggtacaatggctgcaggcggtggcgctccaatggcagacaataacgaaggcgccgacggagtgggtaatgcctccggaaattggcattgcgattccacatggctgggcgacagagtcatcaccaccagcacccgcacctgggccctgcccacctacaacaaccacctctacaagcagatatcaagtcagagcggggctaccaacgacaaccacttcttcggctacagcaccccctggggctattttgacttcaacagattccactgccacttctcaccacgtgactggcagcgactcatcaacaacaactggggattccggcccagaaagctgcggttcaagttgttcaacatccaggtcaaggaggtcacgacgaacgacggcgttacgaccatcgctaataaccttaccagcacgattcaggtcttctcggactcggagtaccaactgccgtacgtcctcggctctgcgcaccagggctgcctccctccgttccctgcggacgtgttcatgattcctcagtacggatatctgactctaaacaacggcagtcagtctgtgggacgttcctccttctactgcctggagtactttccttctcagatgctgagaacgggcaataactttgaattcagctacacctttgaggaagtgcctttccacagcagctatgcgcacagccagagcctggaccggctgatgaatcccctcatcgaccagtacctgtactacctggcccggacccagagcactacggggtccacaagggagctgcagttccatcaggctgggcccaacaccatggccgagcaatcaaagaactggctgcccggaccctgttatcggcggcagagactgtcaaaagacatagacagcaacaacaacagtaactttgcctggaccggggccactaaataccatctgaatggtagaaattcattaaccaacccgggcgtagccatggccaccaacaaggacgacgaggaccagttctttcccatcaacggagtgctggtttttggcaaaacgggggctgccaacaagacaacgctggaaaacgtgctaatgaccagcgaggaggagatcaaaaccaccaatcccgtggctacagaagaatacggtgtggtctccagcaacctgcaatcgtctacggccggaccccagacacagactgtcaacagccagggggctctgcccggcatggtctggcagaaccgggacgtgtacctgcagggtcccatctgggccaaaattcctcacacggacggcaactttcacccgtctcccctgatgggcggatttggactcaaacacccgcctcctcaaattctcatcaaaaacaccccggtacctgctaatcctccagaggtgtttactcctgccaagtttgcctcatttatcacgcagtacagcaccggccaggtcagcgtggagatcgagtgggaactgcagaaagagaacagcaaacgctggaatccagagattcagtacacctcaaattatgccaagtctaataatgtggaatttgctgtcaacaacgaaggggtttatactgagcctcgccccattggcacccgttacctcacccgtaacctgtaattacttgttaatcaataaaccggttgattcgtttcagttgaactttggtctctgcgaagggcgaattc

SEQ ID NO: 413 - protein, 685 aa, Artificial Sequence
  source: /note="Description of Artificial Sequence: Synthetic polypeptide"
MAADGYLPDWLEDNLSEGIREWWDLKPGAPKPKANQQKQDDGRGLVLPGYKYLGPFNGLDKGEPVNEADAAALEHDKAYDKQLEQGDNPYLKYNHADAEFQERLQEDTSFGGNLGRAVFQAKKRVLEPLGLVEEGAKTAPGKKRPVEPSPQRSPDSSTGIGKTGQQPAKKRLNFGQTGDSESVPDPQPIGEPPAGPSGLGSGTMAAGGGAPMADNNEGADGVGSSSGNWHCDSTWLGDRVITTSTRTWALPTYNNHLYKQISNGTSGGSTNDNTYFGYSTPWGYFDFNRFHCHFSPRDWQRLINNNWGFRPKRLNFKLFNIQVKEVTQNEGTKTIANNLTSTIQVFTDSEYQLPYVLGSAHQGCLPPFPADVFMIPQYGYLTLNNGSQAVGRSSFYCLEYFPSQMLRTGNNFEFSYQFEDVPFHSSYAHSQSLDRLTNPLIDQYLYYLARTQSTTGSTRGLQFHQAGPNTMAEQSKNWLPGPCYRQQRLSKNIDSNNNSNFAWTGATKYHLNGRNSLTNPGVAMATNKDDEDQFFPINGVLVFGKTGAANKTTLENVLMTSEEEIKTTNPVATEEYGVVSSNLQSSTAGPQTQTVNSQGALPGMVWQNRDVYLQGPIWAKIPHTDGNFHPSPLMGGFGLKHPPPQILIKYTSNYYKSTNVDFAVNTEGTYSEPRPIGTRYLTRNL

SEQ ID NO: 414 - DNA, 2969 bp, Adeno-associated virus
gaattcgccctttctacggctgcgtcaactggaccaatgagaactttcccttcaacgattgcgtcgacaagatggtgatctggtgggaggagggcaagatgacggccaaggtcgtggagtccgccaaggccattctcggcggcagcaaggtgcgcgtggaccaaaagtgcaagtcgtccgcccagatcgaccccacccccgtgatcgtcacctccaacaccaacatgtgcgccgtgattgacgggaacagcaccaccttcgagcaccagcagccgttacaagaccggatgttcaaatttgaactcacccgccgtctggagcacgactttggcaaggtgacaaagcaggaagtcaaagagttcttccgctgggcgcaggatcacgtgaccgaggtggcgcatgagttctacgtcagaaagggtggagccaacaagagacccgcccccgatgacgcggataaaagcgagcccaagcgggcctgcccctcagtcgcggatccatcgacgtcagacgcggaaggagctccggtggactttgccgacaggtaccaaaacaaatgttctcgtcacgcgggcatgcttcagatgctgtttccctgcaagacatgcgagagaatgaatcagaatttcaacatttgcttcacgcacgggaccagagactgttcagaatgtttccccggcgtgtcagaatctcaaccggtcgtcagaaagaggacgtatcggaaactctgtgccattcatcatctgctggggcgggctcccgagattgcttgctcggcctgcgatctggtcaacgtggacctggatgactgtgtttctgagcaataaatgacttaaaccaggtatggctgccgatggttatcttccagattggctcgaggacaacctctctgagggcatccgcgagtggtgggacttgaaacctggagccccgaaacccaaagccaaccagcaaaagcaggacgacggccggggtctggtgcttcctggctacaagtacctcggacccttcaacggactcgacaagggagagccggtcaacgaggcagacgccgcggccctcgagcacgacaaggcctacgacaagcagctcgagcagggggacaacccgtacctcaagtacaaccacgccgacgccgagtttcaggagcgtcttcaagaagatacgtcttttgggggcaacctcgggcgagcagtcttccaggccaagaagcgggttctcgaacctctcggtctggttgaggaaggcgctaagacggctcctggaaagaagagaccggtagagccatcaccccagcgttctccagactcctctacgggcatcggcaagacaggccagcagcccgcgaaaaagagactcaactttgggcagactggcgactcagagtcagtgcccgaccctcaaccaatcggagaaccccccgcaggcccctctggtctgggatctggtacaatggctgcaggcggtggcgctccaatggcagacaataacgaaggcgccgacggagtgggtagttcctcaggaaattggcattgcgattccacatggctgggcgacagagtcatcaccaccagcacccgaacctgggccctccccacctacaacaaccacctctacaagcaaatctccaacgggacatcgggaggaagcaccaacgacaacacctacttcggctacagcaccccctgggggtattttgactttaacagattccactgccacttctcaccacgtgactggcagcgactcatcaacaacaactggggattccggcccaagagactcaacttcaagctcttcaacatccaggtcaaggaggtcacgcagaatgaaggcaccaagaccatcgccaataaccttaccagcacgattcaggtctttacggactcggaataccagctcccgtacgtcctcggctctgcgcaccagggctgcctgcctccgttcccggcggacgtcttcatgattcctcagtacgggtacctgactctgaacaacggcagtcaggccgtgggccgttcctccttctactgcctggagtactttccttctcaaatgctgagaacgggcaacaactttgagttcagctaccagtttgaggacgtgccttttcacagcagctacgcgcacagccaaagcctggaccggctgacgaaccccctcatcgaccagtacctgtactacctggcccggacccagagcactacggggtccacaagggggctgcagttccatcaggctgggcccaacaccatggccgagcaatcaaagaactggctgcccggaccctgttatcggcagcagagactgtcaaaaaacatagacagcaacaacaacagtaactttgcctggaccggggccactaaataccatctgaatggtagaaattcattaaccaacccgggcgtagccatggccaccaacaaggacgacgaggaccagttctttcccatcaacggagtgctggtttttggcaaaacgggggctgccaacaagacaacgctggaaaacgtgctaatgaccagcgaggaggagatcaaaaccaccaatcccgtggctacagaagaatacggtgtggtctccagcaacctgcaatcgtctacggccggaccccagacacagactgtcaacagccagggggctctgcccggcatggtctggcagaaccgggacgtgtacctgcagggtcccatctgggccaaaattcctcacacggacggcaactttcacccgtctcccctgatgggcggatttggactcaaacacccgcctcctcaaattctcatcaagtatacttccaactactacaaatctacaaatgtggactttgctgtcaatactgagggtacttattcagagcctcgccccattggcacccgttacctcacccgtaacctgtaattgcctgttaatcaataaaccggttaattcgtttcagttgaactttggtctctgcgaagggcgaattc

SEQ ID NO: 415 - protein, 733 aa, Artificial Sequence
  source: /note="Description of Artificial Sequence: Synthetic polypeptide"
MAADGYLPDWLEDNLSEGIREWWDLKPGAPKPKANQQKQDDGRGLVLPGYKYLGPFNGLDKGEPVNAADAAALEHDKAYDQQLKAGDNPYLRYNHADAEFQERLQEDTSFGGNLGRAVFQAKKRVLEPLGLVEEGAKTAPGKKRPIESPDSSTGIGKKGQQPAKKKLNFGQTGDSESVPDPQPIGEPPAGPSGLGSGTMAAGGGAPMADNNEGADGVGSSSGNWHCDSTWLGDRVITTSTRTWALPTYNNHLYKQISNGTSGGSTNDNTYFGYSTPWGYFDFNRFHCHFSPRDWQRLINNNWGFRPKRLNFKLFNIQVKEVTQNEGTKTIANNLTSTIQVFTDSEYQLPYVLGSAHQGCLPPFPADVFMIPQYGYLTLNNGSQAVGRSSFYCLEYFPSQMLRTGNNFEFSYQFEDVPFHSSYAHSQSLDRLMNPLIDQYLYYLSRTQSTGGTAGTQQLLFSQAGPNNMSAQAKNWLPGPCYRQQRVSTTVSQNNNSNFAWTGATKYHLNGRDSLVNPGVAMATHKGDEERFFPSSGVLMFGKQGAGKDNVDYSSVMLTSEEEIKTTNPVATEQYGVVADNLQQQNAAPIVGAVNSQGALPGMVWQNRDVYLQGPIWAKIPHTDGNFHPSPLMGGFGLKHPPPQILIKNTPVPADPPTTFSQAKLASFITQYSTGQVSVEIEWELQKENSKRWNPEIQYTSNYYKSTNVDFAVNTEGTYSEPRPIGTRYLTRSL

SEQ ID NO: 416 - DNA, 3113 bp, Adeno-associated virus
gaattcgccctttctacggctgcgtcaactggaccaatgagaactttcccttcaacgattgcgtcgacaagatggtgatctggtgggaggagggcaagatgacggccaaggtcgtggagtccgccaaggccattctcggcggcagcaaggtgcgcgtggaccaaaagtgcaagtcgtccgcccagatcgatcccacccccgtgatcgtcacttccaacaccaacatgtgcgccgtgattgacgggaacagcaccaccttcgagcaccagcagccgttacaagaccggatgttcaaatttgaactcacccgccgtctggagcatgactttggcaaggtgacaaagcaggaagtcaaagagttcttccgctgggcgcaggatcacgtgaccgaggtggcgcatgagttctacgtcagaaagggtggagccaacaagagacccgcccccgatgacgcggataaaagcgagcccaagcgggcctgcccctcagtcgcggatccatcgacgtcagacgcggaaggagctccggtggactttgccgacaggtaccaaaacaaatgttctcgtcacgcgggcatgcttcagatgctgtttccctgcaagacatgcgagagaatgaatcagaatttcaacatttgcttcacgcacgggaccagagactgttcagaatgtttccccggcgtgtcagaatctcaaccggtcgtcagaaagaggacgtatcggaaactctgtgccattcatcatctgctggggcgggctcccgagattgcttgctcggcctgcgatctggtcaacgtggacctggatgactgtgtttctgagcaataaatgacttaaaccaggtatggctgccgatggttatcttccagattggctcgaggacaacctctctgagggcattcgcgagtggtgggacttgaaacctggagccccgaaacccaaagccaaccagcaaaagcaggacgacggccggggtctggtgcttcctggctacaagtacctcggacccttcaacggactcgacaagggggagcccgtcaacgcggcggacgcagcggccctcgagcacgacaaggcctacgaccagcagctcaaagcgggtgacaatccgtacctgcggtataaccacgccgacgccgagtttcaggagcgtcttcaagaagatacgtcttttgggggcaacctcgggcgagcagtcttccaggccaagaagcgggttctcgaacctctcggtctggttgaggaaggcgctaagacggctcctggaaagaagagacccatagaatcccccgactcctccacgggcatcggcaagaaaggccagcagcccgctaaaaagaagctcaactttgggcagactggcgactcagagtcagtgcccgaccctcaaccaatcggagaaccccccgcaggcccctctggtctgggatctggtacaatggctgcaggcggtggcgctccaatggcagacaataacgaaggcgccgacggagtgggtagttcctcaggaaattggcattgcgattccacatggctgggcgacagagtcatcaccaccagcacccgaacctgggccctccccacctacaacaaccacctctacaagcaaatctccaacgggacatcgggaggaagcaccaacgacaacacctacttcggctacagcaccccctgggggtattttgactttaacagattccactgccacttctcaccacgtgactggcagcgactcatcaacaacaactggggattccggcccaagagactcaacttcaagctcttcaacatccaggtcaaggaggtcacgcagaatgaaggcaccaagaccatcgccaataaccttaccagcacgattcaggtctttacggactcggaataccagctcccgtacgtcctcggctctgcgcaccagggctgcctgcctccgttcccggcggacgtcttcatgattcctcagtacgggtacctgactctgaacaacggcagtcaggccgtgggccgttcctccttctactgcctggagtactttccttctcaaatgctgagaacgggcaacaactttgagttcagctaccagtttgaggacgtgccttttcacagcagctatgcgcacagccaaagcctggaccggctgatgaaccccctcatcgaccagtacctgtactacctgtctcggactcagtccacgggaggtaccgcaggaactcagcagttgctattttctcaggccgggcctaataacatgtcggctcaggccaaaaactggctacccgggccctgctaccggcagcaacgcgtctccacgacagtgtcgcaaaataacaacagcaactttgcttggaccggtgccaccaagtatcatctgaatggcagagactctctggtaaatcccggtgtcgctatggcaacgcacaagggcgacgaagagcgattttttccatccagcggagtcttgatgtttgggaaacagggagctggaaaagacaacgtggactatagcagcgttatgctaaccagtgaggaagaaatcaaaaccaccaacccagtggccacagaacagtacggcgtggtggccgataacctgcaacagcaaaacgccgctcctattgtaggggccgtcaacagtcaaggagccttacctggcatggtctggcagaaccgggacgtgtacctgcagggtcctatctgggccaagattcctcacacggacggcaactttcatccttcgccgctgatgggaggctttggactgaaacacccgcctcctcagatcctgattaagaatacacctgttcccgcggatcctccaactaccttcagtcaagccaagctggcgtcgttcatcacgcagtacagcaccggacaggtcagcgtggaaattgaatgggagctgcagaaagagaacagcaagcgctggaacccagagattcagtatacttccaactactacaaatctacaaatgtggactttgctgtcaatactgagggtacttattcagagcctcgccccattggcacccgttacctcacccgtagcctgtaattgcctgttaatcaataaaccggttgattcgtttcagttgaactttggtctctgcgaagggcgaattc

SEQ ID NO: 417 - protein, 738 aa, Artificial Sequence
  source: /note="Description of Artificial Sequence: Synthetic polypeptide"
MAADGYLPDWLEDNLSEGIREWWDLKPGAPKPKANQQKQDDGRGLVLPGYKYLGPFNGLDKGEPVNAADAAALEHDKAYDQQLKAGDNPYLRYNHADAEFQERLQEDTSFGGNLGRAVFQAKKRVLEPLGLVEEGAKTAPGKKRPVEPSPQRSPDSSTGIGKTGQQPAKKRLNFGQTGDSESVPDPQPIGEPPAGPSGLGSGTMAAGGGAPMADNNEGADGVGSSSGNWHCDSTWLGDRVITTSTRTWALPTYNNHLYKQISNGTSGGSTNDNTYFGYSTPWGYFDFNRFHCHFSPRDWQRLINNNWGFRPKRLNFKLFNIQVKEVTQNEGTKTIANNLTSTIQVFTDSEYQLPYVLGSAHQGCPPPFPADVFMIPQYGYLTLNNGSQAVGRSSFYCLEYFPSQMRRTGNNFEFSYQFEDVPFHSSYAHSQSLDRLMNPLIDQYLYYLSRTQSTGGTAGTQQLLFSQAGPNNMSAQAKNWLPGPCYRQQRVSTTLSQNNNSNFAWTGATKYHLNGRDSLVNPGVAMATHKDDEERFFPSSGVLMFGKQGAGKDNVDYSSVMLTSEEEIKTTNPVATEQYGVVADNLQQQNAAPIVGAVNSQGALPGMVWQNRDVYLQGPIWAKIPHTDGNFHPSPLMGGFGLKHPPPQILIKNTPVPADPPTTFSQAKLASFITQYSTGQVSVEIEWELQKENSKRWNPEIQYTSNYYKSTNVDFAVNTEGTYSEPRPIGTRYLTRNL

SEQ ID NO: 418 - DNA, 3128 bp, Adeno-associated virus
gaattcgccctttctacggctgcgtcaactggaccaatgagaactttcccttcaacgattgcgtcgacaagatggtgatctggtgggaggagggcaagatgacggccaaggtcgtggagtccgccaaggccattctcggcggcagcaaggtgcgcgtggaccaaaagtgcaagtcgtccgcccagatcgaccccacccccgtgatcgtcacctccaacaccaacatgtgcgccgtgattgacgggaacagcaccaccttcgagcaccagcagccgttgcaggaccggatgttcaaatttgaactcacccgccgtctggagcatgactttggcaaggtgacaaagcaggaagtcaaagagttcttccgctgggcgcaggatcacgtgaccgaggtggcgcatgagttctacgtcagaaagggtggagccaacaagagacccgcccccgatgacgcggataaaagcgagcccaagcgggcctgcccctcagtcgcggatccatcgacgtcagacgcggaaggagctccggtggactttgccgacaggtaccaaaacaaatgttctcgtcacgcgggcatgcttcagatgctgtttccctgcaagacatgcgagagaatgaatcagaatttcaacatttgcttcacgcgcgggaccagagactgttcagaatgtttcccgggcgtgtcagaatctcaaccggtcgtcagaaagaggacgtatcggaaactctgtgccattcatcatctgctggggcgggctcccgagattgcttgctcggcctgcgatctggtcaacgtggacctggatgactgtgtttctgagcaataaatgacttaaaccaggtatggctgccgatggttatcttccagattggctcgaggacaacctctctgagggcattcgcgagtggtgggacttgaaacctggagccccgaaacccaaagccaaccagcaaaagcaggacgacggccggggtctggtgcttcctggctacaagtacctcggacccttcaacggactcgacaagggggagcccgtcaacgcggcggacgcagcggccctcgagcacgacaaggcctacgaccagcagctcaaagcgggtgacaatccgtacctgcggtataaccacgccgacgccgagtttcaggagcgtctgcaagaagatacgtcttttgggggcaacctcgggcgagcagtcttccaggccaagaagcgggttctcgaacctctcggtctggttgaggaaggcgctaagacggctcctggaaagaagagaccggtagagccatcaccccagcgttctccagactcctctacgggcatcggcaagacaggccagcagcccgcgaaaaagagactcaactttgggcagactggcgactcagagtcagtgcccgaccctcaaccaatcggagaaccccccgcaggcccctctggtctgggatctggtacaatggctgcaggcggtggcgctccaatggcagacaataacgaaggcgccgacggagtgggtagttcctcaggaaattggcattgcgattccacatggctgggcgacagagtcatcaccaccagcacccgaacctgggccctccccacctacaacaaccacctctacaagcaaatctccaacgggacatcgggaggaagcaccaacgacaacacctacttcggctacagcaccccctgggggtattttgactttaacagattccactgccacttctcaccacgtgactggcagcgactcatcaacaacaactggggattccggcccaagagactcaacttcaagctcttcaacatccaggtcaaggaggtcacgcagaatgaaggcaccaagaccatcgccaataaccttaccagcacgattcaggtctttacggactcggaataccagctcccgtacgtcctcggctctgcgcaccagggctgcccgcctccgttcccggcggacgtcttcatgattcctcagtacgggtacctgactctgaacaacggcagtcaggccgtgggccgttcctccttctactgcctggagtactttccttctcaaatgcggagaacgggcaacaactttgagttcagctaccagtttgaggacgtgccttttcacagcagctacgcgcatagccaaagcctggaccggctgatgaaccccctcatcgaccagtacctgtactacctgtctcggactcagtccacgggaggtaccgcaggaactcagcagttgctattttctcaggccgggcctaataacatgtcggctcaggccaaaaactggctacccgggccctgctaccggcagcaacgcgtctccacgacactgtcgcaaaataacaacagcaactttgcttggaccggtgccaccaagtatcatctgaatggcagagactctctggtaaatcccggtgtcgctatggcaacgcacaaggacgacgaagagcgattttttccatccagcggagtcttgatgtttgggaaacagggagctggaaaagacaacgtggactatagcagcgttatgctaaccagtgaggaagaaatcaaaaccaccaacccagtggccacagaacagtacggcgtggtggccgataacctgcaacagcaaaacgccgctcctattgtaggggccgtcaacagtcaaggagccttacctggcatggtctggcagaaccgggacgtgtacctgcagggtcctatctgggccaagattcctcacacggacggcaactttcatccttcgccgctgatgggaggctttggactgaaacacccgcctcctcagatcctgattaagaatacacctgttcccgcggatcctccaactaccttcagtcaagccaagctggcgtcgttcatcacgcagtacagcaccggacaggtcagcgtggaaattgaatgggagctgcagaaagagaacagcaagcgctggaacccagagattcagtatacttccaactactacaaatctacaaatgtggactttgctgtcaatactgagggtacttattcagagcctcgccccattggcacccgttacctcacccgtaacctgtaattgcctgttaatcaataaaccggttaattcgtttcagttgaactttggtctctgcgaagggcgaattc

SEQ ID NO: 419 - protein, 738 aa, Adeno-associated virus; identical to SEQ ID NO: 407

SEQ ID NO: 420 - DNA, 1933 bp, Adeno-associated virus
  modified_base (1302)..(1302): a, c, t, or g
caaggcctacgaccagcagctcaaagcgggtgacaatccgtacctgcggtataaccacgccgacgccgagtttcaggagcgtcttcaagaagatacgtcttttgggggcaacctcgggcgagcagtcttccaggccaaaaagcgggttctcgaacctcttggtctggttgagacgccagctaagacggcacctggaaagaagcgaccggtagactcgccagactccacctcgggcatcggcaagaaaggccagcagcccgcgaaaaagagactcaactttgggcagactggcgactcagagtcagtccccgaccctcaaccaatcggagaaccaccagcaggcccctctggtctgggatctggtacaatggctgcaggcggtggcgcaccaatggctgacaataacgagggcgccgacggagtgggtaatgcctcaggaaattggcattgcgattccacatggctgggcgacagagtcatcaccaccagcacccgaacctgggccctgcccacctacaacaaccacctctacaagcaaatctccagtcagtcagcagggagcaccaacgataacgtctatttcggctacagcaccccctgggggtattttgacttcaacagattccattgccacttctcaccacgtgactggcagcgacttatcaacaacaactggggattccggcccaagaagctcaacttcaagctcttcaacatccaggtcaaggaggtcacgacgaatgacggtgtcacaaccatcgctaataaccttaccagcacggttcaggtcttttcggactcggaatatcaactgccgtacgtcctcggctccgcgcaccagggctgcctgcctccgttcccggcagacgtgttcatgattccgcagtacggatacctgactctgaacaatggcagccaatcggtaggccgttcctccttctactgcctggagtactttccttctcagatgctgagaacgggcaacaacttcacctttagctacaccttcgaggacgtgcctttccacagcagctacgcgcacagccagagtctggaccggctgatgaatcccctcatcgaccagtacctgtactacttggccagaacacagagcaacgcaggaggtactgctggcaatcgggaactgcagttttatcagggcggacctaccaccatggccgaacaagcaaagaactggctgcccggaccttgcttccggcaacagagagtatccaagacgctggatcaaaataacaacagcaactttgcctggactggtgccacaaaataccatttaaatgnaagaaattcattggttaatcccggtgtcgccatggcaacccacaaggacgacgaggaacgcttcttcccttcgagcggagttctaatttttggcaaaactggagcagctaataaaactacattagaaaacgtgctcatgacaaatgaagaagaaattcgtcctaccaacccggtagctaccgaggaatacgggattgtaagcagcaacttgcaggcggctagcaccgcagcccagacacaagttgttaacaaccagggagccttacctggcatggtctggcagaaccgggacgtgtacctgcaaggtcccatttgggccaagattcctcacacggacggcaactttcacccgtctcctctaatgggtggctttggactgaaacacccgcctccccagatcctgatcaaaaacacaccggtacctgctaatcctccagaagtgtttactcctgccaagtttgcttccttcatcacgcagtacagcaccgggcaagtcagcgttgagatcgagtgggagctgcagaaagagaacagcaagcgctggaacccagagattcagtacacctccaactttgacaaacagactggagtggactttgctgttgacagccagggtgtttactctgagcct

SEQ ID NO: 421 - protein, 733 aa, Artificial Sequence
  source: /note="Description of Artificial Sequence: Synthetic polypeptide"
MAADGYLPDWLEDNLSEGIREWWDLKPGAPKPKANQQKQDDGRGLVLPGYKYLGPFNGLDKGEPVNAADAAALEHDKAYDQQLKAGDNPYLRYNHADAEFQERLQEDTSFGGNLGRAVFQAKKRVLEPLGLVEEGAKTAPGKKRPLESPQEPDSSSGIGKKGKQPAKKRLNFEEDTGAGDGPPEGSDTSAMSSDIEMRAAPGGNAVDAGQGSDGVGNASGDWHCDSTWSEGKVTTTSTRTWVLPTYNNHLYLRLGTTSNSNTYNGFSTPWGYFDFNRFHCHFSPRDWQRLINNNWGLRPKAMRVKIFNIQVKEVTTSNGETTVANNLTSTVQIFADSSYELPYVMDAGQEGSLSPFPNDVFMVPQYGYCGIVTGENQNQTDRNAFYCLEYFPSQMLRTGNNFEMAYNFGKVPFHSMYAYSQSPDRLMNPLLDQYLWHLQSTTSGETLNQGNAATTFGKIRSGDFAFYRKNWLPGPCVKQQRLSKTASQNYKIPASGGNALLKYDTHYTLNNRWSNIAPGPPMATAGPSDGDFSNAQLIFPGPSVTGNTTTSANNLLFTSEEEIAATNPRDTDMFGQIADNNQNATTAPITGNVTAMGVLPGMVWQNRDIYYQGPIWAKIPHADGHFHPSPLIGGFGLKHPPPQIFIKNTPVPANPATTFTAARVDSFITQYSTGQVAVQIEWEIEKERSKRWNPEVQFTSNYGNQSSMLWAPDTTGKYTEPRVIGSRYLTNHL

SEQ ID NO: 422 - DNA, 3105 bp, Adeno-associated virus
gaattcgcccttgctgcgtcaactggaccaatgagaactttcccttcaacgattgcgtcgacaagatggtgatctggtgggaggagggcaagatgaccgccaaggtcgtggagtccgccaaggccattctgggcggaagcaaggtgcgcgtggaccaaaagtgcaagtcatcggcccagatcgaccccacgcccgtgatcgtcacctccaacaccaacatgtgcgccgtgatcgacgggaacagcaccaccttcgagcaccagcagccgctgcaggaccgcatgttcaagttcgagctcacccgccgtctggagcacgactttggcaaggtgaccaagcaggaagtcaaagagttcttccgctgggctcaggatcacgtgactgaggtggcgcatgagttctacgtcagaaagggcggagccaccaaaagacccgcccccagtgacgcggatataagcgagcccaagcgggcctgcccctcagttgcggagccatcgacgtcagacgcggaagcaccggtggactttgcggacaggtaccaaaacaaatgttctcgtcacgcgggcatgcttcagatgctgtttccctgcaagacatgcgagagaatgaatcagaatttcaacgtctgcttcacgcacggggtcagagactgctcagagtgcttccccggcgcgtcagaatctcaacccgtcgtcagaaaaaagacgtatcagaaactgtgcgcgattcatcatctgctggggcgggcacccgagattgcgtgttcggcccgcgatctcgtcaacgtggacttggatgactgtgtttctgagcaataaatgacttaaaccaggtatggctgctgacggttatcttccagattggctcgaggacaacctctctgagggcattcgcgagtggtgggacctgaaacctggagcccccaagcccaaggccaaccagcagaagcaggacgacggccggggtctggtgcttcctggctacaagtacctcggacccttcaacggactcgacaagggggagcccgtcaacgcggcggacgcagcggccctcgagcacgacaaggcctacgaccagcagctcaaagcgggtgacaatccgtacctgcggtataaccacgccgacgccgagtttcaggagcgtctgcaagaagatacgtcttttgggggcaacctcgggcgagcagtcttccaggccaagaagagggtactcgaacctctgggcctggttgaagaaggtgctaagacggctcctggaaagaagagaccgttagagtcaccacaagagcccgactcctcctcaggaatcggcaaaaaaggcaaacaaccagccaaaaagagactcaactttgaagaggacactggagccggagacggaccccctgaaggatcagataccagcgccatgtcttcagacattgaaatgcgtgcagcaccgggcggaaatgctgtcgatgcgggacaaggttccgatggagtgggtaatgcctcgggtgattggcattgcgattccacctggtctgagggcaaggtcacaacaacctcgaccagaacctgggtcttgcccacctacaacaaccacttgtacctgcggctcggaacaacatcaaacagcaacacctacaacggattctccaccccctggggatactttgactttaacagattccactgtcacttctcaccacgtgactggcaaagactcatcaacaacaactggggactacgaccaaaagccatgcgcgttaaaatcttcaatatccaagttaaggaggtcacaacgtcgaacggcgagactacggtcgctaataaccttaccagcacggttcagatatttgcggactcgtcgtatgagctcccgtacgtgatggacgctggacaagagggaagtctgtctcctttccccaatgacgtcttcatggtgcctcaatatggctactgtggcattgtgactggcgaaaatcagaaccagacggacagaaatgctttctactgcctggagtattttccttcacaaatgctgagaactggcaataactttgaaatggcttacaactttgggaaggtgccgttccactcaatgtatgcttacagccagagcccggacagactgatgaatcccctcctggaccagtacctgtggcacttacagtcgaccacctctggagagactctgaatcaaggcaatgcagcaaccacatttggaaaaatcaggagtggagactttgccttttacagaaagaactggctgcctgggccttgtgttaaacagcagagactctcaaaaactgccagtcaaaattacaagattcctgccagcgggggcaacgctctgttaaagtatgacacccactataccttaaacaaccgctggagcaacatagcgcctggacctccaatggcaacagctggaccttcagatggggacttcagcaacgcccagctcatcttccctggaccatcagtcaccggaaacacaacaacctcagcaaacaatctgttgtttacatcagaagaagaaattgctgccaccaacccaagagacacggacatgtttggtcagattgctgacaataatcagaatgctacaactgctcccataaccggcaacgtgactgctatgggagtgcttcctggcatggtgtggcaaaacagagacatttactaccaagggccaatttgggccaagatcccacacgcggacggacattttcatccttcaccgctaattggcggttttggactgaaacatccgcctccccagatatttatcaaaaacacccccgtacctgccaatcctgcgacaaccttcactgcagccagagtggactctttcatcacacaatacagcaccggccaggtcgctgttcagattgaatgggaaatcgaaaaggaacgctccaaacgctggaatcctgaagtgcagtttacttcaaactatgggaaccagtcttctatgttgtgggctcccgatacaactgggaagtatacagagccgcgggttattggctctcgttatttgactaatcatttgtaactgcctagttaatcaataaaccgtgtgattcgtttcagttgaactttggtctctgcgaagggcgaattc

SEQ ID NO: 423 - protein, 733 aa, Adeno-associated virus
MAADGYLPDWLEDNLSEGIREWWDLKPGAPKPKANQQKQDDGRGLVLPGYKYLGPFNGLDKGEPVNAADAAALEHDKAYDQQLKAGDNPYLRYNHADAEFQERLQEDTSFGGNLGRAVFQAKKRVLEPLGLVEEGAKTAPGKKRPLESPQEPDSSSGIGKKGKQPAKKRLNFEEDTGAGDGPPEGSDTSAMSSDIEMRAAPGGNAVDAGQGSDGVGNASGDWHCDSTWSEGKVTTTSTRTWVLPTYNNHLYLRLGTTSNSNTYNGFSTPWGYFDFNRFHCHFSPRDWQRLINNNWGLRPKAMRVKIFNIQVKEVTTSNGETTVANNLTSTVQIFADSSYELPYVMDAGQEGSLPPFPNDVFMVPQYGYCGIVTGENQNQTDRNAFYCLEYFPSQMLRTGNNFEMAYNFEKVPFHSMYAHSQSLDRLMNPLLDQYLWHLQSTTSGETLNQGNAATTFGKIRSGDFAFYRKNWLPGPCVKQQRFSKTASQNYKIPASGGNALLKYDTHYTLNNRWSNIAPGPPMATAGPSDGDFSNAQLIFPGPSVTGNTTTSANNLLFTSEEEIAATNPRDTDMFGQIADNNQNATTAPITGNVTAMGVLPGMVWQNRDIYYQGPIWAKIPHADGHFHPSPLIGGFGLKHPPPQIFIKNTPVPANPATTFTAARVDSFITQYSTGQVAVQIEWEIEKERSKRWNPEVQFTSNYGNQSSMLWAPDTTGKYTEPRVIGSRYLTNHL

SEQ ID NO: 424 - DNA, 3105 bp, Adeno-associated virus
gaattcgcccttgctgcgtcaactggaccaatgagaactttcccttcaacgattgcgtcgacaagatggtgatctggtgggaggagggcaagatgaccgccaaggtcgtggagtccgccaaggccattctgggcggaagcaaggtgcgcgtggaccaaaagtgcaagtcatcggcccagatcgaccccacgcccgtgatcgtcacctccaacaccaacatgtgcgccgtgatcgacgggaacagcaccaccttcgagcaccagcagccgctgcaggaccgcatgttcaagttcgagctcacccgccgtctggagcacgactttggcaaggtgaccaagcaggaagtcaaagagttcttccgctgggctcaggatcacgtgactgaggtggcgcatgagttctacgtcagaaagggcggagccaccaaaagacccgcccccagtgacgcggatataagcgagcccaagcgggcctgcccctcagttgcggagccatcgacgtcagacgcggaagcaccggtggactttgcggacaggtaccaaaacaaatgttctcgtcacgcgggcatgcttcagatgctgtttccctgcaagacatgcgagagaatgaatcagaatttcaacgtctgcttcacgcacggggtcagagactgctcagagtgcttccccggcgcgtcagaatctcaacccgtcgtcagaaaaaagacgtatcagaaactgtgcgcgattcatcatctgctggggcgggcacccgagattgcgtgttcggcctgcgatctcgtcaacgtggacttggatgactgtgtttctgagcaataaatgacttaaaccaggtatggctgctgacggttatcttccagattggctcgaggacaacctctctgagggcattcgcgagtggtgggacctgaaacctggagcccccaagctcaaggccaaccagcagaagcaggacgacggccggggtctggtgcttcctggctacaagtacctcggacccttccacggactcgacaagggggagcccgtcaacgcggcggacgcagcggccctcgagcacgacaaggcctacgaccagcagctcaaagcgggtgacaatccgtacctgcggtataaccacgccgacgccgagtttcaggagcgtctgcaagaagatacgtcttttgggggcaacctcgggcgagcagtcttccaggccaagaagagggtactcgaaccactgggcctggttgaagaaggtgctaagacggctcctggaaagaagagaccgttagagtcaccacaagagcccgactcctcctcaggaatcggcaaaaaaggcaaacaaccagccaaaaagagactcaactttgaagaggacactggagccggagacggaccccctgaaggatcagataccagcgccatgtcttcagacattgaaatgcgtgcagcaccgggcggaaatgctgtcgatgcgggacaaggttccgatggagtgggtaatgcctcgggtgattggcattgcgattccacctggtctgagggcaaggtcacaacaacctcgaccagaacctgggtcttgcccacctacaacaaccacttgtacctgcggctcggaacaacatcaaacagcaacacctacaacggattctccaccccctggggatactttgactttaacagattccactgtcacttctcaccacgtgactggcaaagactcatcaacaacaactggggactacgaccaaaagccatgcgcgttaaaatcttcaatatccaagttaaggaggtcacaacgtcgaacggcgagactacggtcgctaataaccttaccagcacggttcagatatttgcggactcgtcgtatgagctcccgtacgtgatggacgctggacaagagggaagtctgcctcctttccccaatgacgtcttcatggtgcctcaatatggctactgtggcattgtgactggcgaaaatcagaaccagacggacagaaatgctttctactgcctggagtattttccttcacaaatgctgagaactggcaataactttgaaatggcttacaactttgagaaggtgccgttccactcaatgtatgctcacagccagagcctggacagactgatgaatcccctcctggaccagtacctgtggcacttacagtcgaccacctctggagagactctgaatcaaggcaatgcagcaaccacatttggaaaaatcaggagtggagactttgccttttacagaaagaactggctgcctgggccttgtgttaaacagcagagattctcaaaaactgccagtcaaaattacaagattcctgccagcgggggcaacgctctgttaaagtatgacacccactataccttaaacaaccgctggagcaacatagcgcctggacctccaatggcaacagctggaccttcagatggggacttcagcaacgcccagctcatcttccctggaccatcagtcaccggaaacacaacaacctcagcaaacaatctgttgtttacatcagaaggagaaattgctgccaccaacccaagagacacggacatgtttggtcagattgctgacaataatcagaatgctacaactgctcccataaccggcaacgtgactgctatgggagtgcttcctggcatggtgtggcaaaacagagacatttactaccaagggccaatttgggccaagatcccacacgcggacggacattttcatccttcaccgctaattggcggttttggactgaaacatccgcctccccagatatttatcaaaaacacccccgtacctgccaatcctgcgacaaccttcactgcagccagagtggactctttcatcacacaatacagcaccggccaggtcgctgttcagattgaatgggaaatcgaaaaggaacgctccaaacgccggaatcctgaagtgcagtttacttcaaactatgggaaccagtcttctatgttgtgggctcccgatacaactgggaagtatacagagccgcgggttattggctctcgttatttgactaatcatttgtaactgcctagttaatcaataaaccgtgtgattcgtttcagttgaactttggtctctgcgaagggcgaattc

SEQ ID NO: 425 - protein, 733 aa, Artificial Sequence
  source: /note="Description of Artificial Sequence: Synthetic polypeptide"
MAADGYLPDWLEDNLSEGIREWWDLKPGAPKPKANQQKQDDGRGLVLPGYEYLGPFNGLDKGEPVNAADAAALEHDKAYDQQLKAGDNPYLRYNHADAEFQERLQEDTSFGGNLGRAVFQAKKRVLEPLGLVEEGAKTAPGKKRPLESPQEPDSSSGIGKKGKQPAKKRLNFEEDTGAGDGPPEGSDTSAMSSDIEMRAAPGGNAVDAGQGSDGVGNASGDWHCDSTWSEGKVTTTSTRTWVLPTYNNHLYLRLGTTSNSNTYNGFSTPWGYFDFNRFHCHFSPRDWQRLINNNWGLRPKAMRVKIFNIQVKEVTTSNGETTVANNLTSTVQIFADSSYELPYVMDAGQEGSLPPFPNDVFMVPQYGYCGIVTGENQNQTDRNAFYCLEYFPSQMLRTGNNFETAYNFEKVPFHSMYAHSQSLDGLMNPLLDQYLWHLQSTTSGETLNQGNAATTFGKIRSGDFAFYRKNWLPGPCVKQQRFSKTASQNYKIPASGGNALLKYDTHYTLNNRWSNIAPGPPMATAGPSDGDFSNAQLIFPGPSVTGNTTTSANNLLFTSEEEIAATNPRDTDMFGQIADNNQNATTAPITGNVTAMGVLPGMVWQNRDIYYQGPIWAKIPHADGHFHPSPLIGGFGLKHPPPQIFIKNTPVPAYPATTFTAARVDSFITQYSTGQVAVQIEWEIEKERSKRWNPEVQFTSNCGNQSSMLWAPDTTGKYTEPRVIGSRYLTNHL

SEQ ID NO: 426 - DNA, 3105 bp, Adeno-associated virus
gaattcgcccttcgcagagaccaaagttcaactgaaacgaatcacacggtttattgattaactaggcagttacaaatgattagtcaaataacgagagccaataacccgcggctctgtatacttcccagttgtatcgggagcccacaacatagaagactggttcccacagtttgaagtaaactgcacttcaggattccagcgtttggagcgttccttttcgatttcccattcaatctgaacagcgacctggccggtgctgtattgtgtgatgaaagagtccactctggctgcagtgaaggttgtcgcaggataggcaggtacgggggtgtttttgataaatatctggggaggcggatgtttcagtccaaaaccgccaattagcggtgaaggatgaaaatgtccgtccgcgtgtgggatcttggcccaaattggcccttggtagtaaatgtctctgttttgccacaccatgccaggaagcactcccatagcagtcacgttgccggttatgggagcagttgtagcattctgattattgtcagcaatctgaccaaacatgtccgtgtctcttgggttggtggcagcaatttcttcttctgatgtaaacaacagattgtttgctgaggttgttgtgtttccggtgactgatggtccagggaagatgagctgggcgttgctgaagtccccatctgaaggtccagctgttgccattggaggtccaggcgctatgttgctccagcggttgtttaaggtatagtgggtgtcatactttaacagagcgttgcccccgctggcaggaatcttgtaattttgactggcagtttttgagaatctctgctgtttaacacaaggcccaggcagccagttctttctgtaaaaggcaaagtctccactcctgatttttccaaatgtggttgctgcattgccttgattcagagtctctccagaggtggtcgactgtaagtgccacaggtactggtccaggaggggattcatcagtccgtccaggctctggctgtgagcatacattgagtggaacggcaccttctcaaagttgtaagccgtttcaaagttattgccagttctcagcatttgtgaaggaaaatactccaggcagtagaaagcatttctgtccgtctggttctgattttcgccagtcacaatgccacagtagccatattgaggcaccatgaagacgtcattggggaaaggaggcagacttccctcttgtccagcgtccatcacgtacgggagctcatacgacgagtccgcaaatatctgaaccgtgctggtaaggttattagcgaccgtagtctcgccgttcgacgttgtgacctccttaacttggatattgaagattttaacgcgcatggcttttggtcgtagtccccagttgttgttgatgagtctttgccagtcacgtggtgagaagtgacagtggaatctgttaaagtcaaagtatccccagggggtggagaatccgttgtaggtgttgctgtttgatgttgttccgagccgcaggtacaagtggttgttgtaggtgggcaagacccaggttctggtcgaggttgttgtgaccttgccctcagaccaggtggaatcgcaatgccaatcacccgaggcattacccactccatcggaaccttgtcccgcatcgacagcatttccgcccggtgctgcacgcatttcaatgtctgaagacatggcgctggtatctgatccttcagggggtccgtctccggctccagtgtcctcttcaaagttgagtctctttttggctggttgtttgccttttttgccgattcctgaggaggagtcgggctcttgtggtgactctaacggtctcttctttccaggagccgtcttagcaccttcttcaaccaggcccagaggttcgagtaccctcttcttggcctggaagactgctcgcccgaggttgcccccaaaagacgtatcttcttgcagacgctcctgaaactcggcgtcggcgtggttataccgcaggtacggattgtcacccgctttgagctgctggtcgtaggccttgtcgtgctcgagggccgctgcgtccgccgcgttgacgggctcccccttgtcgagtccgttgaagggtccgaggtactcgtagccaggaagcaccagaccccggccgtcgtcctgcttctgctggttggccttgggcttgggggctccaggtttcaggtcccaccactcgcgaatgccctcagagaggttgtcctcgagccaatctggaagataaccgtcagcagccatacctggtttaagtcatttattgctcagaaacacagtcatccaagtccacgttgacgagatcgcaggccgaacacgcaatctcgggtgcccgccccagcagatgatgaatcgcgcacagtttctgatacgtcttttttctgacgacgggttgagattctgacgcgccggggaagcactctgagcagtctctgaccccgtgcgtgaagcagacgttgaaattctgattcattctctcgcatgtcttgcagggaaacagcatctgaagcatgcccgcgtgacgagaacatttgttttggtacctgtccgcaaggtccaccggtgcttccgcgtctgacgtcgatggctccgcaactgaggggcaggcccgcttgggctcgcttatatccgcgtcactgggggcgggtcttttggtggctccgccctttctgacgtagaactcatgcgccacctcagtcacgtgatcctgagcccagcggaagaactctttgacttcctgcttggtcaccttgccaaagtcgtgctccagacggcgggtgagctcgaacttgaacatgcggtcctgcagcggctgctggtgctcgaaggtggtgctgttcccgtcgatcacggcgcacatgttggtgttggaggtgacgatcacgggcgtggggtcgatctgggccgatgacttgcacttttggtccacgcgcaccttgcttccgcccagaatggccttggcggactccacgaccttggcggtcatcttgccctcctcccaccagatcaccatcttgtcgacgcaatcgttgaagggaaagttctcattggtccagttgacgcagcaagggcgaattc

SEQ ID NO: 427 - protein, 729 aa, Artificial Sequence
  source: /note="Description of Artificial Sequence: Synthetic polypeptide"
MAADGYLPDWLEDNLSEGIREWWDLKPGAPKPKANQQKQDDGRGLVLPGYKYLGPFNGLDKGEPVNAADAAALEHDKAYDQQLKAGDNPYLRYNHADAEFQERLQEDTSFGGNLGRAVFQAKKRVLEPLGLVEEGAKTAPGKKRPIDSPDSSTGIGKKGQQPAKKKLNFGQTGDSESVPDPQPLGEPPAAPSSVGSGTMAAGGGAPMADNNEGADGVGNASGNWHCDSTWLGDRVITTSTRTWALPTYNNHLYKQISSSSSGATNDNHYFGYSTPWGYFDFNRFHCHFSPRDWQRLINNNWGFRPKKLRFKLFNIQVKEVTTNDGVTTIANNLTSTVQVFSDSEYQLPYVLGSAHQGCLPPFPADVFMIPQYGYLTLNNGSQSVGRSSFYCLEYFPSQMLRTGNNFEFSYSFEDVPFHSSYAHSQSLDRLMNPLIDQYLYYLARTQSTTGSTRELQFHQAGPNTMAEQSKNWLPGPCYRQQGLSKNLDFNNNSNFAWTAATKYHLNGRNSLTNPGIPMATNKDDEDQFFPINGVLVFGKTGAANKTTLENVLMTSEEEIKTTNPVATEEYGVVSSNLQPSTAGPQSQTINSQGALPGMVWQNRDVYLQGPIWAKIPHTDGNFHPSPLMGGFGLKHPPPQILIKNTPVPANPPEVFTPAKFASFITQYSTGQVSVEIEWELQKENSKRWNPEIQYTSNYAKSNNVEFAVNPDGVYTEPRPIGTRYLPRNL

SEQ ID NO: 428 - DNA, 3094 bp, Adeno-associated virus
gaattcgcccttgctgcgtcaactggaccaagagaactttcccttcaacgattgcgtcgacaagatggtgatctggtgggaggagggcaagatgacggccaaggtcgtggagtccgccaaagccattctgggcggaagcaaggtgcgcgtcgaccaaaagtgcaagtcctcggcccagatcgatcccacccccgtgatcgtcacctccaacaccaacatgtgcgccgtgatcgacgggaacagcaccaccttcgagcaccagcagccgttgcaggaccggatgttcaaatttgaactcacccgccgtctggaacacgactttggcaaggtgaccaagcaggaagtcaaagagttcttccgctgggctagtgatcacgtgactgaggtgacgcatgagttctacgtcagaaagggcggagccagcaaaagacccgcccccgatgacgcggatataagcgagcccaagcgggcctgtccctcagtcacggacccatcgacgtcagacgcggaaggagctccggtggactttgccgacaggtaccaaaacaaatgttctcgtcacgcgggcatgcttcagatgctgtttccctgcaaaacgtgcgagagaatgaatcagaatttcaacatttgcttcacgcacggggtcagagactgtttagaatgtttccccggcgtgtcagaatctcaaccggtcgtcagaaaaaagacgtatcggaagctgtgtgcgattcatcatctgctggggcgggcacccgagattgcttgctcggcctgcgacctggtcaacgtggacctggacgactgtgtttctgagcaataaatgacttaaaccgggtatggctgccgatggttatcttccagattggctcgaggacaacctctctgagggcattcgcgagtggtgggacctgaaacctggagccccgaaacccaaagccaaccagcaaaagcaggacgacggccggggtctggtgcttcctggctacaagtacctcggacccttcaacggactcgacaagggggagcccgtcaacgcggcggacgcagcggccctcgagcacgacaaggcctacgaccagcagctcaaagcgggtgacaatccgtacctgcggtataaccacgccgacgccgagtttcaggagcgtctgcaagaagatacgtcatttgggggcaacctcgggcgagcagtcttccaggccaagaagcgggttctcgaacctctcggtctggttgaggaaggcgctaagacggctcctggaaagaagagacccatagactctccagactcctccacgggcatcggcaaaaaaggccagcagcccgctaaaaagaagctcaattttggtcagactggcgactcagagtcagtccccgaccctcaacctcttggagaacctccagcagcgccctctagtgtgggatctggtacaatggctgcaggcggtggcgcaccaatggcagacaataacgaaggtgccgacggagtgggtaatgcctcaggaaattggcattgcgattccacatggctgggcgacagagtcatcaccaccagcaccagaacctgggccctccccacctacaacaaccacctctacaagcaaatctccagcagcagctcaggagccaccaatgacaaccactacttcggctacagcaccccctgggggtattttgactttaacagattccactgccacttctcaccacgtgactggcagcgactcatcaacaacaactggggattccggcccaagaagctgcggttcaagctcttcaacatccaggtcaaggaggtcacaacgaatgacggcgtcacgaccatcgctaataaccttaccagcacggttcaggtcttctcggactcggaataccagctgccgtacgtcctcggctctgcgcaccagggctgcctgcctccgttcccggcggacgtcttcatgattcctcagtacggctacctgactctgaacaacggcagccaatcggtgggccgttcctccttctactgcctggaatatttcccctctcaaatgctgagaacgggcaacaactttgagttcagttacagcttcgaggacgtgcctttccacagcagctacgcgcacagccagagcctagaccggctgatgaaccctctcatcgaccagtacctgtactacctggcccggacccagagcaccacgggttccaccagggaactgcaatttcatcaagctgggcccaatactatggccgagcagtcaaagaactggctgcctggaccctgctataggcaacagggactgtcaaagaacttggactttaacaacaacagcaattttgcctggactgctgccactaaatatcatctgaatggcagaaactctttgaccaatcctggcattcccatggcaaccaacaaggatgatgaggaccagttctttcccatcaacggggtactggtttttggcaagacgggagctgccaacaaaactacgctggaaaacgttctgatgaccagcgaggaggagatcaagaccactaaccctgtggctacagaagaatacggtgtggtctccagcaacctgcagccgtctacagccgggcctcaatcacagactatcaacagccagggagcactgcctggcatggtctggcagaaccgggacgtgtatctgcagggtcccatctgggccaaaattcctcacacggatggcaactttcacccgtctcctctgatgggcggttttggactcaaacacccgcctccacagatcctgatcaaaaacacacctgtacctgctaatcctccggaggtgtttactcctgccaagtttgcctccttcatcacgcagtacagcaccggacaagtcagcgtggaaatcgagtgggagctgcagaaagaaaacagcaagcgctggaacccagaaattcagtatacttccaattatgccaagtctaataatgttgaatttgctgtgaaccctgatggtgtttatactgagcctcgccccattggcactcgttacctcccccgtaatctgtaattgcttgttaatcaataaaccggttgattcgtttcagttgaactttggtctctgcgaagggcgaattc

SEQ ID NO: 429 - protein, 1458 aa, Artificial Sequence
  source: /note="Description of Artificial Sequence: Synthetic polypeptide"
MAADGYLPDWLEDNLSEGIREWWDLKPGAPKPKANQQKQDDGRGLVLPGYKYLGPFNGLDKGEPVNAADAAALEHDKAYDQQLKAGDNPYLRYNHADAEFQERLQEDTSFGGNLGRAVFQAKKRVLEPLGLVEEGAKTAPGKKRPIDSPDSSTGIGKKGQQPAKKKLNFGQTGDSESVPDPQPLGEPPAAPSSVGSGTMAAGGGAPTADNNEGADGVGNASGNWHCDSTWLGDRVITTSTRTWALPTYNNHLYKQISSSSSGATNDNHYFGYSTPWGYFDFNRFHCHFSPRDWQRLINNNWGFRPKKLRFKLFNIQVKEVTTNDGVTTIANNLTSTVQVFSDSEYQLPYVLGSAHQGCLPPFPADVFMIPQYGYLTLNNGSQSVGRSSFYCLEYFPSQMLRTGNNFEFSYSFEDVPFHSSYAHSQSLDRLMNPLIDQYLYYLARTQSTTGSTRELQFHQAGPNTMAEQSKNWLPGPCYRQQRLSKNLDFNNNSNFAWTAATKYHLNGRNSLTNPGIPMATNKDDEDQFFPINGVLVFGKTGAANKTTLENVLMTSEEEIKTTNPVATEEYGVVSSNLQSSTAGPQSQTINSQGALPGMVWQNRDVYLQGPIWAKIPHTDGNFHPSPLMGGFGLEHPPPQILIKNTPVPANPPEVFTPAKFASFITQYSTGQVSVEIEWELQKENSKRWNPEIQYTSNYAKSNNVEFAVNPDGVYTEPRPIGTRYLTRNLMAADGYLPDWLEDNLSEGIREWWDLKPGAPKPKANQQKQDDGRGLVLPGYKYLGPFNGLDKGEPVNAADAAALEHDKAYDQQLKAGDNPYLRYNHADAEFQERLQEDTSFGGNLGRAVFQAKKRVLEPLGLVEEGAKTAPGKKRPIGSPDSSTGIGKKGQQPAKKKLNFGQTGDSESVPDPQPLGEPPAAPSSVGSGTMAAGGGAPMADNNEGADGVGNASGNWHCDSTWLGDRVITTSTRTWALPTYNNHLYKQISSSSSGATNDNHYFGYSTPWGYFDFNRFHCHFSPRDWQRLINNNWGFRPKKLRFKLLNIQVKEVTTNDGVTTIANNLTSTVQVFSDSEYQLPYVLGSAHQGCLPPFPADVFMIPQYGYLTLDNGSQSVGRSSFYCLEYFPSQMLRTGNNFEFSYSFEDVPFHSSYAHSQSLDRLMNPLIDQYLYYLARTQSTTGSTRELQFHQAGPNTMAEQSKNWLPGPCYRQQRLSKNLDFNNNSNFAWTAATKYHLNGRNSLTNPGIPMATNKDDEDQFFPINGVLVFGKTGAANKTTLENVLMTSEEEIKTTNPVATEEYGVVSSNLQSSTAGPQSQTINSQGALPGMVWQNRDVYLQGPIWAKIPHTDGNFHPSPLMGGFGLKHPPPQILIKNTPVPANPPEVFTPAKFASFITQYSTGQVSVEIEWELQKENSKRWNPEIQYTSNYAKSNNVEFAVNPDGVYTEPRPIGTRYLTRNL

SEQ ID NO: 430 - DNA, 3095 bp, Adeno-associated virus
gaattcgcccttcgcagagaccaaagttcaactgaaacgaatcaaccggtttattgattaacaagcaattacagattacgggtgaggtaacgagtgccaatggggcgaggctcagtataaacaccatcagggttcacagcaaattcaacattattagacttggcataattggaagtatactgaatttctgggttccagcgcttgctgttttctttctgcagctcccactcgatttccacgctgacttgtccggtgctgtactgcgtgatgaaggaggcaaacttggcaggagtaaacacctccggaggattagcaggtacaggtgtgtttttgatcaggatctgtggaggcgggtgtttgagtccaaaaccgcccatcagaggagacgggtgaaagttgccatccgtgtgaggaattttggcccagatgggaccctgcagatacacgtcccggttctgccagaccatgccaggcagtgctccctggctgttgatagtctgtgattgaggcccggctgtagacgactgcaggttgctggagaccacaccgtattcttctgtagccacagggttagtggtcttgatctcctcctcgctggtcatcagaacgttttccagcgtagttttgttggcagctcccgtcttgccaaaaaccagtaccccgttgatgggaaagaactggtcctcatcatccttgttggttgccatgggaatgccaggattggtcaaagagtttctgccattcagatgatatttagtggcagcagtccaggcaaaattgctgttgttgttaaagtccaagttctttgacagtctctgttgcctatagcagggtccaggcagccagttctttgactgctcggccatagtattgggcccagcttgatgaaattgcagttccctggtggaacccgtggtgctctgggtccgggccaggtagtacaggtactggtcgatgagagggttcatcagccggtctaggctctggctgtgcgcgtagctgctgtggaaaggcacgtcctcgaagctgtaactgaactcaaagttgttgcccgttctcagcatttgagaggggaaatattccaggcagtagaaggaggaacggcccaccgattggctgccgttgtccagagtcaggtagccgtactgaggaatcatgaagacgtccgccgggaacggaggcaggcagccctggtgcgcagagccgaggacgtacggcagctggtattccgagtccgagaagacctgaaccgtgctggtaaggttattagcgatggtcgtgacgccgtcattcgttgtgacctccttgacctggatgttgaggagcttgaaccgcagcttcttgggccggaatccccagttgttgttgatgagtcgctgccagtcacgtggtgagaagtggcagtggaatctgttaaagtcaaaatacccccagggggtgctgtagccgaagtagtggttgtcattggtggctcctgagctgctgctggagatttgcttgtagaggtggttgttgtaggtggggagggcccaggttctggtgctggtggtgatgactctgtcgcccagccatgtggaatcgcaatgccaatttcctgaggcattacccactccgtcggcaccttcgttattgtctgccattggtgcgccaccgcctgcagccattgtaccagatcccacactagagggcgctgctggaggttctccaagaggttgagggtcggggactgactctgagtcgccagtctgaccaaaattgagcttctttttagcgggctgctggccttttttgccgatgcccgtggaggagtctggagagcctatgggtctcttctttccaggagccgtcttagcgccttcctcaaccagaccgagaggttcgagaacccgcttcttggcctggaagactgctcgcccgaggttgcccccaaatgacgtatcttcttgcagacgctcctgaaactcggcgtcggcgtggttataccgcaggtacggattgtcacccgctttgagctgctggtcgtaggccttgtcgtgctcgagggccgctgcgtccgccgcgttgacgggctcccccttgtcgagtccgttgaagggtccgaggtacttgtagccaggaagcaccagaccccggccgtcgtcctgcttttgctggttggctttgggtttcggggctccaggtttcaggtcccaccactcgcgaatgccctcagagaggttgtcctcgagccaatctggaagataaccatcggcagccatacctggtttaagtcatttattgctcagaaacacagtcgtccaggtccacgttgaccaggtcgcaggccgagcaagcaatctcgggtgcccgccccagcagatgatgaatcgcacacagcttccgatacgtcttttttctgacgaccggttgagattctgacacgccggggaaacattctaaacagtctctgaccccgtgcgtgaagcaaatgttgaaattctgattcattctctcgcacgttttgcagggaaacagcacctgaagcatgcccgcgtgacgagaacatttgttttggtacctgtcggcaaagtccaccggagctccttccgcgtctgacgtcgatgggtccgtgactgagggacgggcccgcttgggctcgcttatatccgcgtcatcgggggcgggtcttttgctggctccgccctttctgacgtagaactcatgcgtcacctcagtcacgtgatcactagcccagcggaagaactctttgacttcctgctttgtcaccttgccaaagtcgtgttccagacggcgggtgagttcaaatttgaacatccggtcctgcaacggttgctggtgctcgaaggtggtgctgttcccgtcgatcacggcgcacatgttggtgttggaggtgacgatcacgggggtgggatcgatctgggcggacgacttgcacttttggtccacgcgcaccttgctgccgccgagaatggccttggcggactccacgaccttggccgtcatcttgccctcctcccaccagatcaccatcttgtcgacgcaatcgttgaagggaaagttctcattggtccagttgacgcagcaagggcgaattc

SEQ ID NO: 431 - DNA, 3095 bp, Adeno-associated virus
gaattcgcccttcgcagagaccaaagttcaactgaaacgaatcaaccggtttattgattaacaagcaattacagattacgggtgaggtaacgagtgccaatggggcgaggctcagtataaacaccatcagggttcacagcaaattcaacattattagacttggcataattggaagtatactgaatttctgggttccagcgcttgctgttttctttctgcagctcccactcgatttccacgctgacttgtccggtgctgtactgcgtgatgaaggaggcaaacttggcaggagtaaacacctccggaggattagcaggtacaggtgtgtttttgatcaggatctgtggaggcgggtgttcgagtccaaaaccgcccatcagaggagacgggtgaaagttgccatccgtgtgaggaattttggcccagatgggaccctgcagatacacgtcccggttctgccagaccatgccaggcagtgctccctggctgttgatagtctgtgattgaggcccggctgtagacgactgcaggttgctggagaccacaccgtattcttctgtagccacagggttagtggtcttgatctcctcctcgctggtcatcagaacgttttccagcgtagttttgttggcagctcccgtcttgccaaaaaccagtaccccgttgatgggaaagaactggtcctcatcatccttgttggttgccatgggaatgccaggattggtcaaagagtttctgccattcagatgatatttagtggcagcagtccaggcaaaattgctgttgttgttaaagtccaagttctttgacagtctctgttgcctatagcagggtccaggcagccagttctttgactgctcggccatagtattgggcccagcttgatgaaattgcagttccctggtggaacccgtggtgctctgggtccgggccaggtagtacaggtactggtcgatgagagggttcatcagccggtctaggctctggctgtgcgcgtagctgctgtggaaaggcacgtcctcgaagctgtaactgaactcaaagttgttgcccgttctcagcatttgagaggggaaatattccaggcagtagaaggaggaacggcccaccgattggctgccgttgttcagagtcaggtagccgtactgaggaatcatgaagacgtccgccgggaacggaggcaggcagccctggtgcgcagagccgaggacgtacggcagctggtattccgagtccgagaagacctgaaccgtgctggtaaggttattagcgatggtcgtgacgccgtcattcgttgtgacctccttgacctggatgttgaagagcttgaaccgcagcttcttgggccggaatccccagttgttgttgatgagtcgctgccagtcacgtggtgagaagtggcagtggaatctgttaaagtcaaaatacccccagggggtgctgtagccgaagtagtggttgtcattggtggctcctgagctgctgctggagatttgcttgtagaggtggttgttgtaggtggggagggcccaggttctggtgctggtggtgatgactctgtcgcccagccatgtggaatcgcaatgccaatttcctgaggcattacccactccgtcggcaccttcgttattgtctgccgttggtgcgccaccgcctgcagccattgtaccagatcccacactagagggcgctgctggaggttctccaagaggttgagggtcggggactgactctgagtcgccagtctgaccaaaattgagcttctttttagcgggctgctggccttttttgccgatgcccgtggaggagtctggagagtctatgggtctcttctttccaggagccgtcttagcgccttcctcaaccagaccgagaggttcgagaacccgcttcttggcctggaagactgctcgcccgaggttgcccccaaatgacgtatcttcttgcaggcgctcctgaaactcggcgtcggcgtggttataccgcaggtacggattgtcacccgctttgagctgctggtcgtaggccttgtcgtgctcgagggccgctgcgtccgccgcgttgacgggctcccccttgtcgagtccgttgaagggtccgaggtacttgtagccaggaagcaccagaccccggccgtcgtcctgcttttgctggttggctttgggtttcggggctccaggtttcaggtcccaccactcgcgaatgccctcagagaggttgtcctcgagccaatctggaagataaccatcggcagccatacctggtttaagccatttattgctcagaaacacagtcgtccaggtccacgttgaccaggtcgcaggccgagcaggcaatctcgggtgcccgccccagcagatgatgaatcgcacacagcttccgatacgtcttttttctgacgaccggttgagattctgacacgccggggaaacattctaaacagtctctgaccccgtgcgtgaagcaaatgttgaaattctgattcattctctcgcacgttttgcagggaaacagcatctgaagcatgcccgcgtggcgagaacatttgttttggtacctgtcggcaaagtccaccggagctccttccgcgtctgacgtcgatgggtccgtgactgagggacaggcccgcttgggctcgcttatatccgcgtcatcgggggcgggtcttttgctggctccgccctttctgacgtagaactcatgcgtcacctcagtcacgtgatcactagcccagcggaagaactctttgacttcctgctttgtcaccttgccaaagtcgtgttccagacggcgggtgagttcaaatttgaacatccggtcctgcaacggctgctggtgctcgaaggtggtgctgttcccgtcgatcacggcgcgcatgttggtgttggaggtgacgatcacgggggtgggatcgatctgggcggacgacttgcacttttggtccacgcgcaccttgctgccgccgagaatggccttggcggactccacgaccttggccgtcatcttgccctcctcccaccagatcaccatcttgtcgacgcaatcgttgaagggaaagttctcattggtccagttgacgcagcaagggcgaattc

SEQ ID NO: 432 - protein, 729 aa, Adeno-associated virus; identical to SEQ ID NO: 160

SEQ ID NO: 433 - protein, 729 aa, Adeno-associated virus
MAADGYLPDWLEDNLSEGIREWWDLKPGAPKPKANQQKQDDGRGLVLPGYKYLGPFNGLDKGEPVNAADAAALEHDKAYDQQLKAGDNPYLRYNHADAEFQERLQEDTSFGGNLGRAVFQAKKRVLEPLGLVEEGAKTAPGKKRPIDSPDSSTGIGKKGQQPAKKKLNFGQTGDSESVPDPQPLGEPPAAPSSVGSGTMAAGGGAPTADNNEGADGVGNASGNWHCDSTWLGDRVITTSTRTWALPTYNNHLYKQISSSSSGATNDNHYFGYSTPWGYFDFNRFHCHFSPRDWQRLINNNWGFRPKKLRFKLFNIQVKEVTTNDGVTTIANNLTSTVQVFSDSEYQLPYVLGSAHQGCLPPFPADVFMIPQYGYLTLNNGSQSVGRSSFYCLEYFPSQMLRTGNNFEFSYSFEDVPFHSSYAHSQSLDRLMNPLIDQYLYYLARTQSTTGSTRELQFHQAGPNTMAEQSKNWLPGPCYRQQRLSKNLDFNNNSNFAWTAATKYHLNGRNSLTNPGIPMATNKDDEDQFFPINGVLVFGKTGAANKTTLENVLMTSEEEIKTTNPVATEEYGVVSSNLQSSTAGPQSQTINSQGALPGMVWQNRDVYLQGPIWAKIPHTDGNFHPSPLMGGFGLKHPPPQILIKNTPVPANPPEVFTPAKFASFITQYSTGQVSVEIEWELQKENSKRWNPEIQYTSNYAKSNNVEFAVNPDGVYTEPRPIGTRYLTRNL

SEQ ID NO: 434 - protein, 729 aa, Adeno-associated virus
MAADGYLPDWLEDNLSEGIREWWDLKPGAPKPKANQQKQDDGRGLVLPGYKYLGPFNGLDKGEPVNAADAAALEHDKAYDQQLKAGDNPYLRYNHADAEFQERLQEDTSFGGNLGRAVFQAKKRVLEPLGLVEEGAKTAPGKKRPIDSPDSSTGIGKKGQQPAKKKLNFGQTGDSESVPDPQPLGEPPAAPSSVGSGTMAAGGGAPMADNNEGADGVGNASGNWHCDSTWLGDRVITTSTRTWALPTYNNHLYKQISSSSSGATNDNHYFGYSTPWGYFDFNRFHCHFSPRDWQRLINNNWGFRPKKLRFKLFNIQVKEVTTNDGVTTIANNLTSTVQVFSDSEYQLPYVLGSAHQGCLPPFPADVFMIPQYGYLTLNNGSQSVGRSSFYCLEYFPSQMLRTGNNFEFSYSFEDVPFHSSYAHSQSLDRLMNPLIDQYLYYLARTQSTTGSTRELQFHQAGPNTMAEQSKNWLPGPCYRQQRLSKNLDFNNNSNFAWTAATKYHLNGRNSLTNPGIPMATNKDDEDQFFPINGVLVFGKTGAANKTTLENVLMTSEEEIKTTNPVATEEYGVVSSNLQSSTAGPQSQTINSQGALPGMVWQNRDVYLQGPIWAKIPHTDGNFHPSPLMGGFGLKHPPPQILIKNTPVPANPPEVFTPAKFASFITQYSTGQVSVEIEWELQKENSKRWNPEIQYTSNYAKSNNVEFAVNPDGVYTEPRPIGTRYLTRNL

SEQ ID NO: 435 - DNA, 2217 bp, Adeno-associated virus
atggctgctgacggttatcttccagattggctcgaggacaacctctctgagggcattcgcgagtggtgggacctgaaacctggagcccccaagcccaaggccaaccagcagaagcaggacgacggccggggtctggtgcttcctggctacaagtacctcggacccttcaacggactcgacaagggggagcccgtcaacgcggcggacgcagcggccctcgagcacgacaaggcctacgaccagcagctcaaagcgggtgacaatccgtacctgcggtataaccacgccgacgccgagtttcaggagcgtctacaagaagatacgtcttttgggggcaacctcgggcgagcagtcttccaggccaagaagcgggttctcgaacctctcggtctggttgaggaagctgctaagacggctcctggaaagaagagaccggtagaaccgtcacctcagcgttcccccgactcctccacgggcatcggcaagaaaggccagcggcccgctaaaaagagactgaactttggtcagactggcgactcagagtcagtccccgaccctcaaccaatcggagaaccaccagcaggcccctctggtctgggatctggtacaatggctgcaggcggtggcgctccaatggcagacaataacgaaggcgccgacggagtgggtagttcctcaggaaattggcattgcgattccacatggctgggcgacagagtcatcaccaccagcacccgaacctgggccctgcccacctacaacaaccacctctacaagcaaatatccaatgggacatcgggaggaagcaccaacgacaacacctacttcggctacagcaccccctgggggtattttgacttcaacagattccactgccacttctcaccacgtgactggcagcgactcatcaacaacaactggggattccggccaaaaagactcagcttcaagcccttcaacatccaggtcaaggaggtcacgcagaatgaaggcaccaagaccatcgccaataaccttaccagcacgattcaggtatttacggactcggaataccagctgccgtacgtcctcggctccgcgcaccagggctgcctgcctccgttcccggcggacgtcttcatgattccccagtacggctaccttacactgaacaatggaagtcaagccgtaggccgttcctccttctactgcctggaatattttccatctcaaatgctgcgaactggaaacaattttgaattcagctacaccttcgaggacgtgcctttccacagcagctacgcacacagccagagcttggaccgactgatgaatcctctcatcgaccagtacctgcactacttatccagaactcagtccacaggaggaactcaaggtacccagcaattgttattttctcaagctgggcctgcaaacatgtcggctcaggctaagaactggctacctggaccttgctaccggcagcagcgagtctctacgacactgtcgcaaaacaacaacagcaactttgcttggactggtgccaccaaatatcacctgaacggaagagactctttggtaaatcccggtgtcgccatggcaacccacaaggacgacgaggaacgcttcttcccgtcgagtggagtcctgatgtttggaaaacagggtgctggaagagacaatgtggactacagcagcgttatgctaaccagcgaagaagaaattaaaaccactaaccctgtagccacagaacaatacggtgtggtggctgacaacttgcagcaaaccaatacagggcctattgtgggaaatgtcaacagccaaggagccttacctggcatggtctggcagaaccgagacgtgtacctgcagggtcccatctgggccaagattcctcacacggacggcaacttccacccttcaccgctaatgggaggatttggactgaagcacccacctcctcagatcctgatcaagaacacgccggtacctgcggatcctccaacaacgttcagccaggcgaaattggcttccttcattacgcagtacagcaccggacaggtcagcgtggaaatcgagtgggagctgcagaaggagaacagcaaacgctggaacccagagattcagtacacttcaaactactacaaatctacaaatgtggactttgctgtcaatacagagggaacttattctgagcctcgccccattggtactcgctacctcacccgtaatctgtaa

SEQ ID NO: 436 - protein, 738 aa, Adeno-associated virus
MAADGYLPDWLEDNLSEGIREWWDLKPGAPKPKANQQKQDDGRGLVLPGYKYLGPFNGLDKGEPVNAADAAALEHDKAYDQQLKAGDNPYLRYNHADAEFQERLQEDTSFGGNLGRAVFQAKKRVLEPLGLVEEAAKTAPGKKRPVEPSPQRSPDSSTGIGKKGQRPAKKRLNFGQTGDSESVPDPQPIGEPPAGPSGLGSGTMAAGGGAPMADNNEGADGVGSSSGNWHCDSTWLGDRVITTSTRTWALPTYNNHLYKQISNGTSGGSTNDNTYFGYSTPWGYFDFNRFHCHFSPRDWQRLINNNWGFRPKRLSFKPFNIQVKEVTQNEGTKTIANNLTSTIQVFTDSEYQLPYVLGSAHQGCLPPFPADVFMIPQYGYLTLNNGSQAVGRSSFYCLEYFPSQMLRTGNNFEFSYTFEDVPFHSSYAHSQSLDRLMNPLIDQYLHYLSRTQSTGGTQGTQQLLFSQAGPANMSAQAKNWLPGPCYRQQRVSTTLSQNNNSNFAWTGATKYHLNGRDSLVNPGVAMATHKDDEERFFPSSGVLMFGKQGAGRDNVDYSSVMLTSEEEIKTTNPVATEQYGVVADNLQQTNTGPIVGNVNSQGALPGMVWQNRDVYLQGPIWAKIPHTDGNFHPSPLMGGFGLKHPPPQILIKNTPVPADPPTTFSQAKLASFITQYSTGQVSVEIEWELQKENSKRWNPEIQYTSNYYKSTNVDFAVNTEGTYSEPRPIGTRYLTRNL

SEQ ID NO: 437 - DNA, 2217 bp, Adeno-associated virus
atggctgctgacggttatcttccagattggctcgaggacaacctctctgagggcattcgcgagtggtgggacctgaaacctggagcccccaagcccaaggccaaccagcagaagcaggacgacggccggggtctggtgcttcctggctacaagtacctcggacccttcaacggactcgacaagggggagcccgtcaacgcggcggacgcagcggccctcgagcacgacaaggcctacgaccagcagctcaaagcgggtgacaatccgtacctgcggtataaccacgccgacgccgagtttcaggagcgtctgcaagaagatacgtcttttgggggcaacctcgggcgagcagtcttccaggccaagaagcgggttctcgaacctctcggtctggttgaggaagctgctaagacggctcctggaaagaagagaccggtagaaccgtcacctcagcgttcccccgactcctccacgggcatcggcaagaaaggccagcagcccgctaaaaagagactgaactttggtcagactggcgactcagagtcagtccccgaccctcaaccaatcggagaaccaccagcaggcccctctggtctgggatctggtacaatggctgcaggcggtggcgctccaatggcagacaataacgaaggcgccgacggagtgggtagttcctcaggaaattggcattgcgattccacatggctgggcgacagagtcatcaccaccagcacccgaacctgggccctgcccacctacaacaaccacctctacaagcaaatatccaatgggacatcgggaggaagcaccaacgacaacacctacttcggctacagcaccccctgggggtattttgacttcaacagattccactgccacttctcaccacgtgactggcagcgactcatcaacaacaactggggattccggccaaaaagactcagcttcaagctcttcaacatccaggtcaaggaggtcacgcagaatgaaggcaccaagaccatcgccaataaccttaccagcacgattcaggtatttacggactcggaataccagctgccgtacgtcctcggctccgcgcaccagggctgcctgcctccgttcccggcggacgtcttcatgattccccagtacggctaccttacactgaacaatggaagtcaagccgtaggccgttcctccttctactgcctggaatattttccatctcaaatgctgcgaactggaaacaattttgaattcagctacaccttcgaggacgtgcctttccacagcagctacgcacacagccagagcttggaccgactgatgaatcctctcatcgaccagtacctgtactacttatccagaactcagtccacaggaggaactcaaggtacccagcaattgttattttctcaagctgggcctgcaaacatgtcggctcaggctaagaactggctacctggaccttgctaccggcagcagcgagtctctacgacactgtcgcaaaacaacaacagcaactttgcttggactggtgccaccaaatatcacctgaacggaagagactctttggtaaatcccggtgtcgccatggcaacccacaaggacgacgaggaacgcttcttcccgtcgagtggagtcctgatgtttggaaaacagggtgctggaagagacaatgtggactacagcagcgttatgctaaccagcgaagaagaaattaaaaccactaaccctgtagccacagaacaatacggtgtggtggctgataacttgcagcaaaccaatacggggcctattgtgggaaatgtcaacagccaaggagccttacctggcatggtctggcagaaccgagacgtgtacctgcagggtcccatctgggccaagattcctcacacggacggcaacttccacccttcaccgctaatgggaggatttggactgaagcacccacctcctcagatcctgatcaagaacacgccggtacctgcggatcctccaacaacgttcagccaggcgaaattggcttccttcattacgcagtacagcaccggacaggtcagcgtggaaatcgagtgggagctgcagaaggagaacagcaaacgctggaacccagagattcagtacacttcaaactactacaaatctacaaatgtggactttgctgtcaatacagagggaacttattctgagcctcgccccattggtactcgttacctcacccgtaatctgtaa

SEQ ID NO: 438 - protein, 738 aa, Adeno-associated virus; identical to SEQ ID NO: 90

SEQ ID NO: 439 - protein, 738 aa, Adeno-associated virus
MAADGYLPDWLEDNLSEGIREWWDLKPGAPKPKANQQKQDDGRGLVLPGYKYLGPFNGLDKGEPVNAADAAALEHDKAYDQQLKAGDNPYLRYNHADAEFQERLQEDTSFGGNLGRAVFQAKKRVLEPLGLVEEAAKTAPGKKRPVEPSPQRSPDSSTGIGKKGQQPAKKRLNFGQTGDSESVPDPQPIGEPPAGPSGLGSGTMAAGGGAPMADNNEGADGVGSSSGNWHCDSTWLGDRVITTSTRTWALPTYNNHLYKQISNGTSGGSTNDNTYFGYSTPWGYFDFNRFHCHFSPRDWQRLINNNWGFRPKRLSFKLFNIQVKEVTQDEGTKTIANNLTSTIQVFTDSEYQLPYVLGSAHQGCLPPFPADVFMIPQYGYLTLNNGSQAVGRSSFYCLEYFPSQMLRTGNNFEFSYTFEDVPFHSSYAHSQSLDRLMNPLIDQYLYYLSRTQSTGGTQGTQQLLFSQAGPANMSARAKNWLPGPCYRQQRVSTTLSQNNNSNFAWTGATKYHLNGRDSLVNPGVAMATHKDDEERFFPSSGVLMFGKQGAGRDNVDYSSVMLTSEEEIKTTNPVATEQYGVVADNLQQANTGPIVGNVNSQGALPGMVWQNRDVYLQGPIWAKIPHTDGNFHPSPLMGGFGLKHPPPQILIKNTPVPADPPTTFSQAKLASFITQYSTGQVSVEIEWELQKENSKRWNPEIQYTSNYYKSTNVDFAVNSEGTYSEPRPIGTRYLTRNL

SEQ ID NO: 440 - DNA, 2217 bp, Adeno-associated virus
atggctgctgacggttatcttccagattggctcgaggacaacctctctgagggcattcgcgagtggtgggacctgaaacctggagcccccaagcccaaggccaaccagcagaagcaggacgacggccggggtctggtgcttcctggctacaagtacctcggacccttcaacggactcgacaagggggagcccgtcaacgcggcggacgcagcggccctcgagcacgacaaggcctacgaccagcagctcaaagcgggtgacaatccgtacctgcggtataaccacgccgacgccgagtttcaggagcgtctgcaagaagatacgtcttttgggggcaacctcgggcgagcagtcttccaggccaagaagcgggttctcgaacctctcggtctggttgaggaagctgctaagacggctcctggaaagaagagaccggtagaaccgtcacctcagcgttcccccgactcctccacgggcatcggcaagaaaggccagcagcccgctaaaaagagactgaactttggtcagactggcgactcagagtcagtccccgaccctcaaccaatcggagaaccaccagcaggcccctctggtctgggatctggtacaatggctgcaggcggtggcgctccaatggcagacaataacgaaggcgccgacggagtgggtagttcctcaggaaattggcattgcgattccacatggctgggcgacagagtcatcaccaccagcacccgaacctgggccctgcccacctacaacaaccacctctacaagcaaatatccaatgggacatcgggaggaagcaccaacgacaacacctacttcggctacagcaccccctgggggtattttgacttcaacagattccactgccacttctcaccacgtgactggcagcgactcatcaacaacaactggggattccggccaaaaagactcagcttcaagctcttcaacatccaggtcaaggaggtcacgcaggatgaaggcaccaagaccatcgccaataaccttaccagcacgattcaggtatttacggactcggaataccagctgccgtacgtcctcggctccgcgcaccagggctgcctgcctccgttcccggcggacgtcttcatgattccccagtacggctaccttacactgaacaatggaagtcaagccgtaggccgttcctccttctactgcctggaatattttccatctcaaatgctgcgaactggaaacaattttgaattcagctacaccttcgaggacgtgcctttccacagcagctacgcacacagccagagcttggaccgactgatgaatcctctcatcgaccagtacctgtactacttatccagaactcagtccacaggaggaactcaaggtacccagcaattgttattttctcaagctgggcctgcaaacatgtcggctcgggctaagaactggctacctggaccttgctaccggcagcagcgagtctctacgacactgtcgcaaaacaacaacagcaactttgcttggactggtgccaccaaatatcacctgaacggaagagactctttggtaaatcccggtgttgctatggcaacgcataaggacgacgaggaacgtttctttccatcgagcggagtcctgatgtttggaaaacagggtgctggaagagacaatgtggactatagcagcgttatgctaaccagcgaggaagaaattaaaaccactaaccctgtagccacagaacaatacggtgtggtggctgacaacttgcagcaagccaatacagggcctattgtgggaaatgtcaacagccaaggagccttacctggcatggtctggcagaaccgagacgtgtacctgcagggtcccatctgggccaaaattcctcacacggacggcaattttcacccgtctcctctgatgggcggctttggactgaagcacccacctccccagatcctgatcaagaatacgccggtacctgcggatcctccaacgacgttcagccaggcaaaattggcttccttcatcacgcagtacagcaccggccaggtcagcgtggagatcgagtgggagctgcagaaggagaacagcaagcgatggaacccagaaattcagtacacttccaactactacaaatctacaaatgtggactttgctgtcaattctgagggtacatattcagagcctcgccccattggtactcgttatctgacacgtaatctgtaa

SEQ ID NO: 441 - DNA, 2211 bp, Adeno-associated virus
atggctgccgatggttatcttccagattggctcgaggacaacctctctgagggcattcgcgagtggtgggacttgaaacctggagccccgaaacccaaagccaaccagcaaaagcaggacgacggccggggcctggtgcttcctggctacaagtacctcggacccttcaacggactcgacaagggggagcccgtcaacgcggcggacgcagcggccctcgagcacgacaaggcctacgaccagcagctcgaagcgggtgacaatccgtacctgcggtataaccacgccgacgccgagtttcaggagcgtctgcaagaagatacgtcttttgggggcaacctcgggcgagcagtcttccaggccaagaagcgggttctcgaacctctcggtctggttgaggaaggcgctaagacggctcctggaaagaagagaccagtagagcagtcaccccaagaaccagactcctcctcgggcatcggcaagaaaggccaacagcccgccagaaaaagactcaattttggccagactggcgactcagagtcagttccagaccctcaacctctcggagaacctccagcagcgccctctggtgtgggacctaatacaatggctgcaggcggtggcgcaccaatggcagacaataacgaaggcgccgacggagtgggtagttcctcgggaaattggcattgcgattccacatggctgggcgacagagtcatcaccaccagcacccgaacctgggccctgcccacctacaacaaccacctctacaagcaaatctccaacgggacatcgggaggagccaccaacgacaacacctacttcggctacagcaccccctgggggtattttgactttaacagattccactgccacttttcaccacgtgactggcagcgactcatcaacaacaactggggattccggcccaagagactcagcttcaagctcttcaacatccaggtcaaggaggtcacgcagaatgaaggcaccaagaccatcgccaataacctcaccagcaccatccaggtgtttacggactcggagtaccagctgccgtacgttctcggctctgcccaccagggctgcctgcctccgttcccggcggacgtgttcatgattccccagtacggctacctaacactcaacaacggtagtcaggccgtgggacgctcctccttctactgcctggaatactttccttcgcagatgctgagaaccggcaacaacttccagtttacttacaccttcgaggacgtgcctttccacagcagctacgcccacagccagagcttggaccggctgatgaatcctctgattgaccagtacctgtactacttgtctcggactcaaacaacaggaggcacggcaaatacgcagactctgggcttcagccaaggtgggcctaatacaatggccaatcaggcaaagaactggctgccaggaccctgttaccgccaacaacgcgtctcaacgacaaccgggcaaaacaacaatagcaactttgcctggactgctgggaccaaataccatctgaatggaagaaattcattggctaatcctggcatcgctatggcaacacacaaagacgacgaggagcgttttttcccagtaacgggatcctgtttttggcaacaaaatgctgccagagacaatgcggattacagcgatgtcatgctcaccagcgaggaagaaatcaaaaccactaaccctgtggctacagaggaatacggtatcgtggcagataacttgcagcagcaaaacacggctcctcaaattggaactgtcaacagccagggggccttacccggtatggtctggcagaaccgggacgtgtacctgcagggtcccatctgggccaagattcctcacacggacggcaacttccacccgtctccgctgatgggcggctttggcctgaaacatcctccgcctcagatcctgatcaagaacacgcctgtacctgcggatcctccgaccaccttcaaccagtcaaagctgaactctttcatcacgcaatacagcaccggacaggtcagcgtggaaattgaatgggagctacagaaggaaaacagcaagcgctggaaccccgagatccagtacacctccaactactacaaatctacaagtgtggactttgctgttaatacagaaggcgtgtactctgaaccccgccccattggcacccgttacctcacccgtaatctgtaa

SEQ ID NO: 442 - protein, 736 aa, Adeno-associated virus
MAADGYLPDWLEDNLSEGIREWWDLKPGAPKPKANQQKQDDGRGLVLPGYKYLGPFNGLDKGEPVNAADAAALEHDKAYDQQLEAGDNPYLRYNHADAEFQERLQEDTSFGGNLGRAVFQAKKRVLEPLGLVEEGAKTAPGKKRPVEQSPQEPDSSSGIGKKGQQPARKRLNFGQTGDSESVPDPQPLGEPPAAPSGVGPNTMAAGGGAPMADNNEGADGVGSSSGNWHCDSTWLGDRVITTSTRTWALPTYNNHLYKQISNGTSGGATNDNTYFGYSTPWGYFDFNRFHCHFSPRDWQRLINNNWGFRPKRLSFKLFNIQVKEVTQNEGTKTIANNLTSTIQVFTDSEYQLPYVLGSAHQGCLPPFPADVFMIPQYGYLTLNNGSQAVGRSSFYCLEYFPSQMLRTGNNFQFTYTFEDVPFHSSYAHSQSLDRLMNPLIDQYLYYLSRTQTTGGTANTQTLGFSQGGPNTMANQAKNWLPGPCYRQQRVSTTTGQNNNSNFAWTAGTKYHLNGRNSLANPGIAMATHKDDEERFFPVTGSCFWQQNAARDNADYSDVMLTSEEEIKTTNPVATEEYGIVADNLQQQNTAPQIGTVNSQGALPGMVWQNRDVYLQGPIWAKIPHTDGNFHPSPLMGGFGLKHPPPQILIKNTPVPADPPTTFNQSKLNSFITQYSTGQVSVEIEWELQKENSKRWNPEIQYTSNYYKSTSVDFAVNTEGVYSEPRPIGTRYLTRNL

SEQ ID NO: 443 - DNA, 2214 bp, Adeno-associated virus
atggctgctgacggttatcttccagattggctcgaggacaacctctctgagggcattcgcgagtggtgggacctgaaacctggagcccccaagcccaaggccaaccagcagaagcaggacgacggccggggtctggtgcttcctggctacaagtacctcggacccttcaacggactcgacaagggggagcccgtcagcgcggcggacgcagcggccctcgagcacgacaaggcctgcgaccagcggctcaaagcgggtgacaatccgtacctgcggtataaccacgccgacgccgagtttcaggagcgtctgcaagaagatacgtcttttgggggcaacctcgggcgagcagtcttccaggccaagaagcgggttctcgaacctctcggtctggttgaggaagctgctaagacggctcctggaaagaagggaccggtagaaccgtcacctcagcgttcccccgactcctccacgggcatcggcaagaaaggccagcagcccgctagaaagagactgaactttgggcagactggcgactcagagtcagtccccgaccctcaaccaatcggagaaccaccagcaggcccctctggtctgggatctggtacaatggctgcaggcggtggcgcaccaatggctgacaataacgagggcgccgacggagtgggtaatgcctcaggaaattggcattgcgattccacatggctgggcgacagagtcatcaccaccagcacccgaacctgggctttgcccacctacaacaatcacctctacaagcaaatctccagtcagtcagcaggtagcaccaacgacaacgtctacttcggctacagcaccccctgggggtattttgacttcaacagattccactgtcacttctcaccacgtgactggcagcggctcatcaacaacaactggggattccggcccaagaagctcaacttcaagctgttcaacatccaggtcaaggaggtcacaacgaatgacggcgtcacgaccatcgccaataaccttaccagcacggttcaggtcttttcggactcggaataccagctgccctacgtcctcggctccgcacaccagggctgcctgcctccgttcccggcggacgtcttcatgattccccagtacggctacctgactctgaacaatggcagccaatcggtgggtcgttcctctttctactgcctggaatatttcccttctcaaatgctgagaacgggcaacaacttcaccttcagctacaccttcgaggacgttcccttccacagcagctacgcacacagccagagcctggaccggctgatgaatcctcttatcgaccagtacctgtattacctggccagaacacagagcaacgcaggaggcacagctggcaatcgggaactgcagttttatcagggcgggcctaccaccatggccgaacaagccaaaaactggctgcctggaccttgcttccggcaacaaagagtctccaagacgctggatcaaaacaacaacagcaactttgcttggactggtgccaccaaataccatctaaatggaagaaattcattggttaatcccggtgtcgccatggcaacccacaaggacgacgaggaacgcttcttcccttcgagcggagtcctgatttttggaaaaactggagcagctaataagactacactggaaaatgtgttaatgacaaatgaagaggaaattcgtcctaccaacccggtagccaccgaggaatacgggactgttagcagcaacctgcaggcggctaacactgcagcccagacacaagttgtcaacaaccagggagccttacctggtatggtctggcagaaccgggacgtgtacctgcagggtcccatctgggccaagattcctcacacggacggcaactttcacccgtctccgctgatgggcggctttggactgaagcatccgcctcctcagatcctgatcaaaaacactcctgttcctgctaatcccccggaggtgtttacgcctgccaagtttgcttctttcatcacacagtacagcaccggccaggtcagcgtggagatcgagtgggagctgcagaaggagaacagcaagcgctggaacccagagattcagtatacctccaattttgacgaacagactggtgtggactttgccgttgacagccagggtgtttattctgagcctcgccccattggtactcgttacctcacccgtaatctgtaa

SEQ ID NO: 444 - protein, 737 aa, Adeno-associated virus
MAADGYLPDWLEDNLSEGIREWWDLKPGAPKPKANQQKQDDGRGLVLPGYKYLGPFNGLDKGEPVSAADAAALEHDKACDQRLKAGDNPYLRYNHADAEFQERLQEDTSFGGNLGRAVFQAKKRVLEPLGLVEEAAKTAPGKKGPVEPSPQRSPDSSTGIGKKGQQPARKRLNFGQTGDSESVPDPQPIGEPPAGPSGLGSGTMAAGGGAPMADNNEGADGVGNASGNWHCDSTWLGDRVITTSTRTWALPTYNNHLYKQISSQSAGSTNDNVYFGYSTPWGYFDFNRFHCHFSPRDWQRLINNNWGFRPKKLNFKLFNIQVKEVTTNDGVTTIANNLTSTVQVFSDSEYQLPYVLGSAHQGCLPPFPADVFMIPQYGYLTLNNGSQSVGRSSFYCLEYFPSQMLRTGNNFTFSYTFEDVPFHSSYAHSQSLDRLMNPLIDQYLYYLARTQSNAGGTAGNRELQFYQGGPTTMAEQAKNWLPGPCFRQQRVSKTLDQNNNSNFAWTGATKYHLNGRNSLVNPGVAMATHKDDEERFFPSSGVLIFGKTGAANKTTLENVLMTNEEEIRPTNPVATEEYGTVSSNLQAANTAAQTQVVNNQGALPGMVWQNRDVYLQGPIWAKIPHTDGNFHPSPLMGGFGLKHPPPQILIKNTPVPANPPEVFTPAKFASFITQYSTGQVSVEIEWELQKENSKRWNPEIQYTSNFDEQTGVDFAVDSQGVYSEPRPIGTRYLTRNL

SEQ ID NO: 445 - DNA, 2214 bp, Adeno-associated virus
atggctgccgatggttatcttccagattggctcgaggacaacctctctgagggcattcgcgagtggtgggacctgaaacctggagccccgaaacccaaagccaaccagcaaaagcaggacgacggccggggtctggtgcttcctggctacaagtacctcggacccttcaacggactcgacaagggggagcccgtcaacgcggcggacgcagcggccctcgagcacgacaaggcctacgaccagcagctcaaagcgggtgacaatccgtacctgcggtataaccacgccgacgccgagtttcaggagcgtctgcaagaagatacgtcttttgggggcaacctcgggcgagcagtcttccaggccaagaagcgggttctcgaacctctcggtctggttgaggaagctgctaagacggctcctggaaagaagagaccggtagaaccgtcacctcagcgttcccccgactcctccacgggcatcggcaagaaaggccagcagcccgctagaaagagactgaactttgggcagactggcgactcagagtcagtccccgaccctcaaccaatcggagaaccaccagcaggcccctctggtctgggatctggtacaatggctgcaggcggtggcgctccaatggcagacaataacgaaggcgccgacggagtgggtaatgcctcaggaaattggcattgcgattccacatggctgggcgacagagtcatcaccaccagcacccgaacctgggctttgcccacctacaacaaccacctctacaagcaaatctccagtcagtcagcaggtagcaccaacgacaacgtctacttcggctacagcaccccctgggggtattttgacttcaacagattccactgtcacttctcaccacgtgactggcagcggctcatcaacaacaactggggattccggcccaagaagctcaacttcaagctgttcaacatccaggtcaaggaggtcacaacgaatgacggcgtcacgaccatcgccaataaccttaccagcacggttcaggtcttttcggactcggaataccagctgccctacgtcctcggctccgcacaccagggctgcctgcctccgttcccggcggacgtcttcatgattcctcagtacggctacctgactctcaacaacggtagtcaggccgtgggacgttcctccttctactgcctggagtacttcccctctcagatgctgagaacgggcaacaacttttccttcagctacactttcgaggacgtgcctttccacagcagctacgcgcacagccagagtttggacaggctgatgaatcctctcatcgaccagtacctgtactacctgtcaagaacccagtctacgggaggcacagcgggaacccagcagttgctgttttctcaggccgggcctagcaacatgtcgactcaggccagaaactggctgcctggaccctgctacagacagcagcgcgtctccacgacactgtcgcaaaacaacaacagcaactttgcctggactggtgccaccaagtatcatctgaacggcagagactctctggtgaatccgggcgtcgccatggcaaccaacaaggacgacgaggaccgcttcttcccatccagcggcatcctcatgtttggcaagcagggagctggaaaagacaacgtggactatagcaacgtgatgctaaccagcgaggaagaaatcaagaccaccaaccccgtggccacagaacagtatggcgtggtggctgataacctacagcagcaaaacaccgctcctattgtgggggccgtcaacagccagggagccttacctggcatggtctggcagaaccgggacgtgtacctgcagggtcctatttgggccaagattcctcacacagatggcaactttcacccgtctcctttaatgggcggctttggacttaaacatccgcctcctcagatccttatcaaaaacactcctgttcctgcggatcctccaacagcgttcaaccaggccaagctgaattctttcatcacgcagtacagcaccggacaagtcagcgtggagatcgagtgggagctgcagaaggagaacagcaagcgctggaacccagagattcagtatacttccaactactacaaatctacaaatgtggactttgctgttaatactgagggtgcttactctgagcctcgccccattggcactcgttacctcacccgtaatctgtaa

SEQ ID NO: 446 - protein, 737 aa, Adeno-associated virus
MAADGYLPDWLEDNLSEGIREWWDLKPGAPKPKANQQKQDDGRGLVLPGYKYLGPFNGLDKGEPVNAADAAALEHDKAYDQQLKAGDNPYLRYNHADAEFQERLQEDTSFGGNLGRAVFQAKKRVLEPLGLVEEAAKTAPGKKRPVEPSPQRSPDSSTGIGKKGQQPARKRLNFGQTGDSESVPDPQPIGEPPAGPSGLGSGTMAAGGGAPMADNNEGADGVGNASGNWHCDSTWLGDRVITTSTRTWALPTYNNHLYKQISSQSAGSTNDNVYFGYSTPWGYFDFNRFHCHFSPRDWQRLINNNWGFRPKKLNFKLFNIQVKEVTTNDGVTTIANNLTSTVQVFSDSEYQLPYVLGSAHQGCLPPFPADVFMIPQYGYLTLNNGSQAVGRSSFYCLEYFPSQMLRTGNNFSFSYTFEDVPFHSSYAHSQSLDRLMNPLIDQYLYYLSRTQSTGGTAGTQQLLFSQAGPSNMSTQARNWLPGPCYRQQRVSTTLSQNNNSNFAWTGATKYHLNGRDSLVNPGVAMATNKDDEDRFFPSSGILMFGKQGAGKDNVDYSNVMLTSEEEIKTTNPVATEQYGVVADNLQQQNTAPIVGAVNSQGALPGMVWQNRDVYLQGPIWAKIPHTDGNFHPSPLMGGFGLKHPPPQILIKNTPVPADPPTAFNQAKLNSFITQYSTGQVSVEIEWELQKENSKRWNPEIQYTSNYYKSTNVDFAVNTEGAYSEPRPIGTRYLTRNL

SEQ ID NO: 447 - DNA, 2217 bp, Adeno-associated virus
atggctgccgatggttatcttccagattggctcgaggacaacctctctgagggcattcgcgagtggtgggacctgaaacctggagccccgaaacccaaagccaaccagcaaaagcaggacgacggccggggtctggtgcttcctggctacaagtacctcggacccttcaacggactcgacaagggggagcccgtcaacgcggcggacgcagcggccctcgagcacgacaaggcctacgaccagcagctcaaagcgggtgacaatccgtacctgcggtataatcacgccgacgccgagtttcaggagcgtctgcaagaagatacgtcttttgggggcaacctcgggcgagcagtcttccaggccaagaagcgggttctcgaacctctcggtctggttgaggaaggcgctaagacggctcctggaaagaagagaccggtagagccgtcaccacagcgttcccccgactcctccacgggcatcggcaagaaaggccagcagcccgccagaaagagactcaatttcggtcagactggcgactcagagtcagtccccgaccctcaacctatcggagaacctccagcagcgccctctagtgtgggatctggtacaatggctgcaggcggtggcgcaccaatggcagacaataacgaaggtgccgacggagtgggtagttcctcgggaaattggcattgcgattccacatggctgggcgacagagtcatcaccaccagcacccgaacctgggccctgcccacctacaacaaccacctctacaagcaaatctccaacgggacctcgggaggcagcaccaacgacaacacctactttggctacagcaccccctgggggtattttgactttaacagattccactgccacttctcaccacgtgactggcagcgactcatcaacaacaactggggattccggcccaagagactcagcttcaagctcttcaacatccaggtcaaagaggtcacgcagaatgaaggcaccaagaccatcgccaataacctcaccagcaccatccaggtgtttacggactcggaataccagctgccgtacgtcctcggctctgcccaccagggctgcctgcctccgttcccggcggacgtcttcatgattcctcagtacggctacctgactctcaacaacggtagtcaggccgtgggacgttcctccttctactgcctggagtacttcccctctcagatgctgagaacgggcaacaacttttccttcagctacactttcgaggacgtgcctttccacagcagctacgcgcacagccagagtttggacaggctgatgaatcctctcatcgaccagtacctgtactacctgtcaagaacccagtctacgggaggcacagcgggaacccagcagttgctgttttctcaggccgggcctagcaacatgtcggctcaggccagaaactggctgcctggaccctgctacagacagcagcgcgtctccacgacactgtcgcaaaacaacaacagcaactttgcctggactggtgccaccaagtatcatctgaacggcagagactctctggtgaatccgggcgtcgccatggcaaccaacaaggacgacgaggaccgcttcttcccatccagcggcatcctcatgtttggcaagcagggagctggaaaagacaacgtggactatagcaacgtgatgctaaccagcgaggaagaaatcaaggccaccaaccccgtggccacagaacagtatggcgtggtggctgataacctacagcagcaaaacaccgctcctattgtgggggccgtcaacagccagggagccttacctggcatggtctggcagaaccgggacgtgtacctgcagggtcctatttgggccaagattcctcacacagatggcaactttcacccgtctcctttaatgggcggctttggacttaaacatccgcctcctcagatcctcatcaaaaacactcctgttcctgcggatcctccaacagcgttcaaccaggccaagctgaattctttcatcacgcagtacagcaccggacaagtcagcgtggagatcgagtgggagctgcagaaggagaacagcaagcgctggaacccagagattcagtatacttccaactactacaaatctacaaatgtggactttgctgttaatactgagggtgtttactctgagcctcgccccattggcactcgttacctcacccgtaatctgtaa

SEQ ID NO: 448 - protein, 738 aa, Adeno-associated virus
MAADGYLPDWLEDNLSEGIREWWDLKPGAPKPKANQQKQDDGRGLVLPGYKYLGPFNGLDKGEPVNAADAAALEHDKAYDQQLKAGDNPYLRYNHADAEFQERLQEDTSFGGNLGRAVFQAKKRVLEPLGLVEEGAKTAPGKKRPVEPSPQRSPDSSTGIGKKGQQPARKRLNFGQTGDSESVPDPQPIGEPPAAPSSVGSGTMAAGGGAPMADNNEGADGVGSSSGNWHCDSTWLGDRVITTSTRTWALPTYNNHLYKQISNGTSGGSTNDNTYFGYSTPWGYFDFNRFHCHFSPRDWQRLINNNWGFRPKRLSFKLFNIQVKEVTQNEGTKTIANNLTSTIQVFTDSEYQLPYVLGSAHQGCLPPFPADVFMIPQYGYLTLNNGSQAVGRSSFYCLEYFPSQMLRTGNNFSFSYTFEDVPFHSSYAHSQSLDRLMNPLIDQYLYYLSRTQSTGGTAGTQQLLFSQAGPSNMSAQARNWLPGPCYRQQRVSTTLSQNNNSNFAWTGATKYHLNGRDSLVNPGVAMATNKDDEDRFFPSSGILMFGKQGAGKDNVDYSNVMLTSEEEIKATNPVATEQYGVVADNLQQQNTAPIVGAVNSQGALPGMVWQNRDVYLQGPIWAKIPHTDGNFHPSPLMGGFGLKHPPPQILIKNTPVPADPPTAFNQAKLNSFITQYSTGQVSVEIEWELQKENSKRWNPEIQYTSNYYKSTNVDFAVNTEGVYSEPRPIGTRYLTRNL

SEQ ID NO: 449 - DNA, 2217 bp, Adeno-associated virus
atggctgccgatggttatcttccagattggctcgaggacaacctctctgagggcattcgcgagtggtgggacctgaaacctggagccccgaaacccaaagccaaccagcaaaagcaggacgacggccggggtctggtgcttcctggctacaagcacctcggacccttcaacggactcgacaagggggagcccgtcaacgcggcggacgcagcggccctcgagcacgacaaggcctacgaccagcagctcaaagcgggtgacaatccgtacctgcggtataatcacgctgacgccgagtttcaggagcgtctgcaagaagatacgtcttttgggggcaacctcgggcgagcagtcttccaggccaagaagcgggttctcgaacctctcggtctggttgaggaaggcgctaagacggctcctggaaagaagagaccggtagagccgtcaccacagcgttcccccgactcctccacgggcatcggcaagaaaggccagcagcccgccagaaagagactcaatttcggtcagactggcgactcagagtcagtccccgaccctcaacctatcggagaacctccagcagcgccctctagtgtgggatctggtacaatggctgcaggcggtggcgcaccaatggcagacaataacgaaggtgccgacggagtgggtagttcctcgggaaattggcattgcgattccacatggctgggcgacagagtcatcaccaccagcacccgaacctgggccctgcccacctacaacaaccacctctacaagcaaatctccaacgggacctcgggaggcagcaccaacgacaacacctactttggctacagcaccccctgggggtattttgactttaacagattccactgccacttctcaccacgtgactggcagcgactcatcaacaacaactggggattccggcccaagagactcagcttcaagctcttcaacatccaggtcaaagaggtcacgcagaatgaaggcaccaagaccatcgccaataaccttaccagcacggttcaggtcttttcggactcggaataccagctgccctacgtcctcggctccgcacaccagggctgcctgcctccgttcccggcggacgtcttcatgattccccagtacggctacctgactctgaacaatggcagccaatcggtgggtcgttcctctttctactgcctggaatatttcccttctcaaatgctgagaacgggcaacaacttcaccttcagctacaccttcgaggacgttcccttccacagcagctacgcacacagccagagcctggaccggctgatgaatcctcttatcgaccagtacctgtattacctggccagaacacagagcaacgcaggaggcacagctggcaatcgggaactgcagttttatcagggcgggcctaccaccatggccgaacaagccaaaaactggctgcctggaccttgcttccggcaacaaagagtctccaagacgctggatcaaaacaacaacagcaactttgcttggactggtgccaccaaataccatctaaatggaagaaattcattggttaatcccggtgtcgccatggcaacccacaaggacgacgaggaacgcttcttcccttcgagcggagtcctgatttttggaaaaactggagcagctaataagactacactggaaaatgtgttaatgacaaatgaagaggaaattcgtcctaccaacccggtagccaccgaggaatacgggactgttagcagcaacctgcaggcggctaacactgcagcccagacacaagttgtcaacaaccagggagccttacctggtatggtctggcagaaccgggacgtgtacctgcagggtcccatctgggccaagattcctcacacggacggcaactttcacccgtctccgctgatgggcggctttggactgaagcatccgcctcctcagatcctgatcaaaaacactcctgttcctgctaatcccccggaggtgtttacgcctgccaagtttgcttctttcatcacacagtacagcaccggccaggtcagcgtggagatcgagtgggagctgcagaaggagaacagcaagcgctggaacccagagattcagtatacctccaattttgacaaacagactggtgtggactttgccgttgacagccagggtgtttattctgagcctcgccccattggtactcgttacctcacccgtaatctgtaa

SEQ ID NO: 450 - protein, 738 aa, Adeno-associated virus
MAADGYLPDWLEDNLSEGIREWWDLKPGAPKPKANQQKQDDGRGLVLPGYKHLGPFNGLDKGEPVNAADAAALEHDKAYDQQLKAGDNPYLRYNHADAEFQERLQEDTSFGGNLGRAVFQAKKRVLEPLGLVEEGAKTAPGKKRPVEPSPQRSPDSSTGIGKKGQQPARKRLNFGQTGDSESVPDPQPIGEPPAAPSSVGSGTMAAGGGAPMADNNEGADGVGSSSGNWHCDSTWLGDRVITTSTRTWALPTYNNHLYKQISNGTSGGSTNDNTYFGYSTPWGYFDFNRFHCHFSPRDWQRLINNNWGFRPKRLSFKLFNIQVKEVTQNEGTKTIANNLTSTVQVFSDSEYQLPYVLGSAHQGCLPPFPADVFMIPQYGYLTLNNGSQSVGRSSFYCLEYFPSQMLRTGNNFTFSYTFEDVPFHSSYAHSQSLDRLMNPLIDQYLYYLARTQSNAGGTAGNRELQFYQGGPTTMAEQAKNWLPGPCFRQQRVSKTLDQNNNSNFAWTGATKYHLNGRNSLVNPGVAMATHKDDEERFFPSSGVLIFGKTGAANKTTLENVLMTNEEEIRPTNPVATEEYGTVSSNLQAANTAAQTQVVNNQGALPGMVWQNRDVYLQGPIWAKIPHTDGNFHPSPLMGGFGLKHPPPQILIKNTPVPANPPEVFTPAKFASFITQYSTGQVSVEIEWELQKENSKRWNPEIQYTSNFDKQTGVDFAVDSQGVYSEPRPIGTRYLTRNL

SEQ ID NO: 451 - protein, 737 aa, Adeno-associated virus
MAADGYLPDWLEDNLSEGIREWWDLKPGAPKPKANQQKQDDGRGLVLPGYKYLGPFNGLDKGEPVNAADAAALEHDKAYDQQLKAGDNPYLRYNHADAEFQERLQEDTSFGGNLGRAVFQAKKRVLEPLGLVEEAAKTAPGKKRPVEPSPQRSPDSSTGIGKKGQQPARKRLNFGQTGDSESVPDPQPIGEPPAGPSGLGSGTMAAGGGAPMADNNKGADGVGNASGNWHCDSTWLGDRVITTSTRTWALPTYNNHLYKQISSQSAGSTNDNVYFGYSTPWGYFDFNRFHCHFSPRDWQRLINSNWGFRPKKLNFKLFNIQVKEVTTNDGVTTIANNLTSTVQVFSDSEYQLPYVLGSAHQGCLPPFPADVFMIPQYGYLTLNNGSQSVGRSSFYCLEYFPSQMLRTGNNFTFSYTFEDVPFHSSYAHSQSLDRLMNPLIDQYLYYLARTQSNAGGTAGNRELQFYQGGPTTMAEQAKNWLPGPCFRQQRVSKTLDQNNNSNFAWTGATKYHLNGRNSLVNPGVAMATHKDDEERFFPSSGVLIFGKTGAANKTTLENVLMTNEEEIRPTNPVATEEYGTVSSNLQAANTAAQTQVVNNQGALPGMVWQNRDVYLQGPIWAKIPHTDGNFHPSPLMGGFGLKHPPPQILIKNTPVPANPPEVFTPAKFASFITQYSTGQVSVEIEWELQKENSKRWNPEIQYTSNFDKQTGVDFAVDSQGVYSEPRPIGTRYLTRNL

SEQ ID NO: 452 - protein, 737 aa, Adeno-associated virus
MAADGYLPDWLEDNLSEGIREWWDLKPGAPKPKANQQKQDDGRGLVLPGYKYLGPFNGLDKGEPVNAADAAALEHDKAYDQQLKAGDNPYLRYNHADAEFQERLQEDTSFGGNLGRAVFQAKKRVLEPLGLVEEAAKTAPGKKRPVEPSPQRSPDSSTGIGKKGQQPARKRLNFGQTGDSESVPDPQPIGEPPAGPSGLGSGTMAAGGGAPMADNNEGADGVGNASGNWHCDSTWLGDRVITTSTRTWALPTYNNHLYKQISSQSAGSTNDNVYFGYSTPWGYFDFNRFHCHFSPRDWQRLINSNWGFRPKKLNFKLFNIQVKEVTTNDGVTTIANNLTSTVQVFSDSEYQLPYVLGSAHQGCLPPFPADVFMIPQYGYLTLNNGSQSVGRSSFYCLEYFPSQMLRTGNNFTFSYTFEDVPFHSSYAHSQSLDRLMNPLIDQYLYYLARTQSNAGGTAGNRELQFYQGGPTTMAEQAKNWLPGPCFRQQRVSKTLDQNNNSNFAWTGATKYHLNGRNSLVNPGVAMATHKDDEERFFPSSGVLIFGKTGAANKTTLENVLMTNEEEIRPTNPVATEEYGTVSSNLQAANTAAQTQVVNNQGALPGMVWQNRDVYLQGPIWAKIPHTDGNFHPSPLMGGFGLKHPPPQILIKNTPVPANPPEVFTPAKFASFITQYSTGQVSVEIEWELQKENSKRWNPEIQYTSNFDKQTGVDFAVDSQGVYSEPRPIGTRYLTRNL

SEQ ID NO: 453 - protein, 737 aa, Adeno-associated virus
MAADGYLPDWLEDNLSEGIREWWDLKPGAPKPKANQQKQDDGRGLVLPGYKYLGPFNGLDKGEPVNAADAAALEHDKAYDQQLKAGDNPYLRYNHADAEFQERLQEDTSFGGNLGRAVFQAKKRVLEPLGLVEEAAKTAPGKKRPVEPSPQRSPDSSTGIGKKGQQPARKRLNFGQTGDSESVPDPQPIGEPPAGPSGLGSGTMAAGGGAPMADNNEGADGVGNASGNWHCDSTWLGDRVITTSTRTWALPTYNNHLYKQISSQSAGSTNDNVYFGYSTPWGYFDFNRFHCHFSPRDWQRLINNNWGFRPKKLNFKLFNIQVKEVTTNDGVTTIANNLTSTVQVFSDSEYQLPYVLGSAHQGCLPPFPADVFMIPQYGYLTLNNGSQSVGRSSFYCLEYFPSQMLRTGNNFTFSYTFEDVPFHSSYAHSQSLDRLMNPLIDQYLYYLARTQSNAGGTAGNRELQFYQGGPTTMAEQAKNWLPGPCFRQQRVSKTLDQNNNSNFAWTGATKYHLNGRNSLVNPGVAMATHKDDEERFFPSSGVLIFGKTGAANKTTLENVLMTNEEEIRPTNPVATEEYGTVSSNLQAANTAAQTQVVNNQGALPGMVWQNRDVYLQGPIWAKIPHTDGNFHPSPLMGGFGLKHPPPQILIKNTPVPANPPEVFTPAKFASFITQYSTGQVSVEIEWELQKENSKRWNPEIQYTSNFDKQTGVDFAVDSQGVYSEPRPIGTRYLTRNL

SEQ ID NO: 454 - protein, 737 aa, Adeno-associated virus
MAADGYLPDWLEDNLSEGIREWWDLKPGAPKPKANQQKQDDGRGLVLPGYKYLGPFNGLDKGEPVNAADAAALEHDKAYDQQLKAGDNPYLRYNHADAEFQERLQEDTSFGGNLGRAVFQAKKRVLEPLGLVEEAAKTAPGKKRPVEPSPQRSPDSSTGIGKKGQQPARKRLNFGQTGDSESVPDPQPIGEPPAGPSGLGSGTMAAGGGAPMADNNKGADGVGNASGNWHCDSTWLGDRVITTSTRTWALPTYNNHLYKQISSQSAGSTNDNVYFGYSTPWGYFDFNRFHCHFSPRDWQRLINNNWGFRPKKLNFKLFNIQVKEVTTNDGVTTIANNLTSTVQVFSDSEYQLPYVLGSAHQGCLPPFPADVFMIPQYGYLTLNNGSQSVGRSSFYCLEYFPSQMLRTGNNFTFSYTFEDVPFHSSYAHSQSLDRLMNPLIDQYLYYLARTQSNAGGTAGNRELQFYQGGPTTMAEQAKNWLPGPCFRQQRVSKTLDQNNNSNFAWTGATKYHLNGRNSLVNPGVAMATHKDDEERFFPSSGVLIFGKTGAANKTTLENVLMTNEEEIRPTNPVATEEYGTVSSNLQAANTAAQTQVVNNQGALPGMVWQNRDVYLQGPIWAKIPHTDGNFHPSPLMGGFGLKHPPPQILIKNTPVPANPPEVFTPAKFASFITQYSTGQVSVEIEWELQKENSKRWNPEIQYTSNFDKQTGVDFAVDSQGVYSEPRPIGTRYLTRNL

SEQ ID NO: 455 - DNA, 2214 bp, Adeno-associated virus
atggctgctgacggttatcttccagattggctcgaggacaacctctctgagggcattcgcgagtggtgggacctgaaacctggagcccccaagcccaaggccaaccagcagaagcaggacgacggccggggtctggtgcttcctggctacaagtacctcggacccttcaacggactcgacaagggggagcccgtcaacgcggcggacgcagcggccctcgagcacgacaaggcctacgaccagcagctcaaagcgggtgacaatccgtacctgcggtataaccacgccgacgccgagtttcaggagcgtctgcaagaagatacgtcttttgggggcaacctcgggcgagcagtcttccaggccaagaagcgggttctcgaacctctcggtctggttgaggaagctgctaagacggctcctggaaagaagagaccggtagaaccgtcacctcagcgttcccccgactcctccacgggcatcggcaagaaaggccagcagcccgctagaaagagactgaactttgggcagactggcgactcagagtcagtccccgaccctcaaccaatcggagaaccaccagcaggcccctctggtctgggatctggtacaatggctgcaggcggtggcgcaccaatggctgacaataacaagggcgccgacggagtgggtaatgcctcaggaaattggcattgcgattccacatggctgggcgacagagtcatcaccaccagcacccgaacctgggctttgcccacctacaacaaccacctctacaagcaaatctccagtcagtcagcaggtagcaccaacgacaacgtctacttcggctacagcaccccctgggggtattttgacttcaacagattccactgtcacttctcaccacgtgactggcagcggctcatcaacagcaactggggattccggcccaagaagctcaacttcaagctgttcaacatccaggtcaaggaggtcacaacgaatgacggcgtcacgaccatcgccaataaccttaccagcacggttcaggtcttttcggactcggaataccagctgccctacgtcctcggctccgcacaccagggctgcctgcctccgttcccggcggacgtcttcatgattccccagtacggctacctgactctgaacaatggcagccaatcggtgggtcgttcctctttctactgcctggaatatttcccttctcaaatgctgagaacgggcaacaacttcaccttcagctacaccttcgaggacgttcccttccacagcagctacgcacacagccagagcctggaccggctgatgaatcctcttatcgaccagtacctgtattacctggccagaacacagagcaacgcaggaggcacagctggcaatcgggaactgcagttttatcagggcgggcctaccaccatggccgaacaagccaaaaactggctgcctggaccttgcttccggcaacaaagagtctccaagacgctggatcaaaacaacaacagcaactttgcttggactggtgccaccaaataccatctaaatggaagaaattcattggttaatcccggtgtcgccatggcaacccacaaggacgacgaggaacgcttcttcccttcgagcggagtcctgatttttggaaaaactggagcagctaataagactacactggaaaatgtgttaatgacaaatgaagaggaaattcgtcctaccaacccggtagccaccgaggaatacgggactgttagcagcaacctgcaggcggctaacactgcagcccagacacaagttgtcaacaaccagggagccttacctggtatggtctggcagaaccgggacgtgtacctgcagggtcccatctgggccaagattcctcacacggacggcaactttcacccgtctccgctgatgggcggctttggactgaagcatccgcctcctcagatcctgatcaaaaacactcctgttcctgctaatcccccggaggtgtttacgcctgccaagtttgcttctttcatcacacagtacagcaccggccaggtcagcgtggagatcgagtgggagctgcagaaggagaacagcaagcgctggaacccagagattcagtatacctccaattttgacaaacagactggtgtggactttgccgttgacagccagggtgtttattctgagcctcgccccattggtactcgttacctcacccgtaatctgtaa

SEQ ID NO: 456 - DNA, 2217 bp, Adeno-associated virus
atggctgccgatggttatcttccagattggctcgaggacaacctctctgagggcattcgcgagtggtgggacctgaaacctggagccccgaaacccaaagccaaccagcaaaagcaggacgacggccggggtctggtgcttcctggctacaagtacctcggacccttcaacggactcgacaagggggagcccgtcaacgcggcggacgcagcggccctcgagcacgacaaggcctacgaccagcagctcaaagcgggtgacaatccgcacctgcggtataatcacgccgacgccgagtttcaggagcgtctgcaagaagatacgtcttttgggggcaacctcgggcgagcagtcttccaggccaagaagcgggttctcgaacctctcggtctggttgaggaaggcgctaagacggctcctggaaagaagagaccggtagagccgtcaccacagcgttcccccgactcctccacgggcatcggcaagaaaggccagcagcccgccagaaagagactcaatttcggtcagactggcgactcagagtcagtccccgaccctcaacttatcggagaacctccagcagcgccctctagtgtgggatctggtacaatggctgcaggcggtggcgcaccaatggcagacaataacgaaggtgccgacggagtgggtagttcctcgggaaattggcattgcgattccacatggctgggcgacagagtcatcaccaccagcacccgaacctgggccctgcccacctacaacaaccacctctacaagcaaatctccaacgggacctcgggaggcagcaccaacgacaacacctactttggctacagcaccccctgggggtattttgactttaacagattccactgccacttctcaccacgtgactggcagcgactcatcaacaacaactggggattccggcccaagagactcagcttcaagctcttcaacatccaggtcaaagaggtcacgcagaatgaaggcaccaagaccatcgccaataacctcaccagcaccatccaggtgtttacggactcggagtaccagctgccgtacgtcctcggctctgcccaccagggctgcctgcctccgttcccggcggacgtcttcatgattcctcagtacggcaacctgactctcaacaacggtagtcaggccgtgggacgttcctccttctactgcctggagtacttcccctctcagatgctgagaacgggcaacaacttttccttcagctacactttcgaggacgtgcctttccacagcagctacgcgcacagccagagtttggacaggctgatgaatcctctcatcgaccagtacctgtactacctgtcaagaacccagtctacgggaggcacagcgggaacccagcagttgctgttttctcaggccgggcctagcaacatgtcggctcaggccagaaactggctgcctggaccctgctacagacagcagcgcgtctccacgacactgtcgcaaaacaacaacagcaactttgcctggactggtgccaccaagtatcatctgaacggcagagactctctggtgaatccgggcgtcgccatggcaaccaacaaggacgacgaggaccgcttcttcccatccagcggcatcctcatgtttggcaagcagggagctggaaaagacaacatgggctatagcaacgtgatgctaaccagcgaggaagaaatcaagaccaccaaccccgtggccacagaacagtatggcgtggtggctgataacctacagcagcaaaacaccgctcctattgtgggggccgtcaacagccagggagccttacctggcatggtctggcagaaccgggacgtgtacctgcagggtcctatttgggccaagattcctcacacagatggcaactttcacccgtctcctttaatgggcggctttggacttaaacatccgcctcctcagatcctcatcaaaaacactcctgttcctgcggatcctccaacagcgttcaaccaggccaagctgaattctttcatcacgcagtacggcaccggacaagtcagcgtggagatcgagtgggagctgcagaaggagaacagcaagcgctggaacccagagattcagtatacttccaactactacaaatctacaaatgtggactttgctgttaatactgagggtgtttactctgagcctcgccccattggcactcgttacctcacccgtaatctgtaa

SEQ ID NO: 457 - protein, 738 aa, Adeno-associated virus
MAADGYLPDWLEDNLSEGIREWWDLKPGAPKPKANQQKQDDGRGLVLPGYKYLGPFNGLDKGEPVNAADAAALEHDKAYDQQLKAGDNPHLRYNHADAEFQERLQEDTSFGGNLGRAVFQAKKRVLEPLGLVEEGAKTAPGKKRPVEPSPQRSPDSSTGIGKKGQQPARKRLNFGQTGDSESVPDPQLIGEPPAAPSSVGSGTMAAGGGAPMADNNEGADGVGSSSGNWHCDSTWLGDRVITTSTRTWALPTYNNHLYKQISNGTSGGSTNDNTYFGYSTPWGYFDFNRFHCHFSPRDWQRLINNNWGFRPKRLSFKLFNIQVKEVTQNEGTKTIANNLTSTIQVFTDSEYQLPYVLGSAHQGCLPPFPADVFMIPQYGNLTLNNGSQAVGRSSFYCLEYFPSQMLRTGNNFSFSYTFEDVPFHSSYAHSQSLDRLMNPLIDQYLYYLSRTQSTGGTAGTQQLLFSQAGPSNMSAQARNWLPGPCYRQQRVSTTLSQNNNSNFAWTGATKYHLNGRDSLVNPGVAMATNKDDEDRFFPSSGILMFGKQGAGKDNMGYSNVMLTSEEEIKTTNPVATEQYGVVADNLQQQNTAPIVGAVNSQGALPGMVWQNRDVYLQGPIWAKIPHTDGNFHPSPLMGGFGLKHPPPQILIKNTPVPADPPTAFNQAKLNSFITQYGTGQVSVEIEWELQKENSKRWNPEIQYTSNYYKSTNVDFAVNTEGVYSEPRPIGTRYLTRNL

SEQ ID NO: 458 - DNA, 2217 bp, Adeno-associated virus
atggctgccgatggttatcttccagattggctcgaggacaacctctctgagggcattcgcgagtggtgggacctgaaacctggagccccgaaacccaaagccaaccagcaaaagcaggacgacggccggggtctggtgcttcctggctacaagtacctcggacccttcaacggactcgacaagggggagcccgtcaacgcggcggacgcagcggccctcgagcacgacaaggcctacgaccagcagctcaaagcgggtgacaatccgtacctgcggtataatcacgccgacgccgagtttcaggagcgtctgcaagaagatacgtcttttgggggcaacctcgggcgagcagtcttccaggccaagaagcgggttctcgaacctctcggtctggttgaggaaggcgctaagacggctcctggaaagaagagaccggtagagccgtcaccacagcgttcccccgactcctccacgggcatcggcaagaaaggccagcagcccgccggaaagagactcaatttcggtcagactggcgactcagagtcagtccccgaccctcaacctatcggagaacctccagcagcgccctctagtgtgggatctggtacaatggctgcaggcggtggcgcaccaatggcagacaataacgaaggtgccgacggagtgggtagttcctcgggaaattggcattgcgattccacatggctgggcgacagagtcatcaccaccagcacccgaacctgggccctgcccacctacaacaaccacctctacaagcaaatctccaacgggacctcgggaggcagcaccaacgacaacacctactttggctacagcaccccctgggggtattttgactttaacagattccactgccacttctcaccacgtgactggcagcgactcatcaacaacaactggggattccggcccaagagactcagcttcaagctcttcaacatccaggtcaaagaggtcacgcagaatgaaggcaccaagaccatcgccaataacctcaccagcaccatccaggtgtttacggactcggaataccagctgccgtacgtcctcggctctgcccaccagggctgcctgcctccgttcccggcggacgtcttcatgattcctcagtacggctacctgactctcaacaacggtagtcaggccgtgggacgttcctccttctactgcctggagtacttcccctctcagatgctgagaacgggcaacaacttttccttcagctacactttcgaggacgtgcctttccacagcagctacgcgcacagccagagtttggacaggctgatgaatcctctcgtcgaccagtacctgtactacctgtcaagaacccagtctacgggaggcacagcgggaacccagcagttgctgttttctcaggccgggcctagcaacatgtcggctcaggccagaaactggctgcctggaccctgctacagacagcagcgcgtctccacgacactgtcgcaaaacaacaacagcaactttgcctggactggtgccaccaagtatcatctgaacggcagagactctctggtgaatccgggcgtcgccatggcaaccaacaaggacgacgaggaccgcttcttcccatccagcggcatcctcatgtttggcaagcagggagctggaaaagacaacgtggactatagcaacgtgatgctaaccagcgaggaagaaatcaagaccaccaaccccgtggccacagaacagtatggcgtggtggctgataacctacagcagcaaaacaccgctcctattgtgggggccgtcaacagccagggagccttacctggcatggtctggcagaaccgggacgtgtacctgcagggtcctatttgggccaagattcctcacacagatggcaactttcacccgtctcctttaatgggcggctttggacttaaacatccgcctcctcagatcctcatcaaaaacactcctgttcctgcggatcctccaacagcgttcaaccaggccaagctgaattctttcatcacgcagtacagcaccggacaagtcagcgtggagatcgagtgggagctgcagaaggagaacagcaagcgctggagcccagagattcagtatacttccaactactacaaatctacaaatgtggactttgctgttaatactgagggtgtttactctgagcctcgccccattggcactcgttacctcacccgtaatctgtaa

SEQ ID NO: 459 - protein, 738 aa, Adeno-associated virus
MAADGYLPDWLEDNLSEGIREWWDLKPGAPKPKANQQKQDDGRGLVLPGYKYLGPFNGLDKGEPVNAADAAALEHDKAYDQQLKAGDNPYLRYNHADAEFQERLQEDTSFGGNLGRAVFQAKKRVLEPLGLVEEGAKTAPGKKRPVEPSPQRSPDSSTGIGKKGQQPAGKRLNFGQTGDSESVPDPQPIGEPPAAPSSVGSGTMAAGGGAPMADNNEGADGVGSSSGNWHCDSTWLGDRVITTSTRTWALPTYNNHLYKQISNGTSGGSTNDNTYFGYSTPWGYFDFNRFHCHFSPRDWQRLINNNWGFRPKRLSFKLFNIQVKEVTQNEGTKTIANNLTSTIQVFTDSEYQLPYVLGSAHQGCLPPFPADVFMIPQYGYLTLNNGSQAVGRSSFYCLEYFPSQMLRTGNNFSFSYTFEDVPFHSSYAHSQSLDRLMNPLVDQYLYYLSRTQSTGGTAGTQQLLFSQAGPSNMSAQARNWLPGPCYRQQRVSTTLSQNNNSNFAWTGATKYHLNGRDSLVNPGVAMATNKDDEDRFFPSSGILMFGKQGAGKDNVDYSNVMLTSEEEIKTTNPVATEQYGVVADNLQQQNTAPIVGAVNSQGALPGMVWQNRDVYLQGPIWAKIPHTDGNFHPSPLMGGFGLKHPPPQILIKNTPVPADPPTAFNQAKLNSFITQYSTGQVSVEIEWELQKENSKRWSPEIQYTSNYYKSTNVDFAVNTEGVYSEPRPIGTRYLTRNL

SEQ ID NO: 460 - DNA, 2217 bp, Adeno-associated virus
atggttgccgatggttatcttccagattggctcgaggacaacctctctgagggcattcgcgagtggtgggacctgaaacctggagccccgaaacccaaagccaaccagcaaaagcagggcgacggccggggtctggtgcttcctggctacaagtacctcggacccttcaacggactcgacaagggggagcccgtcaacgcggcggacgcagcggccctcgagcacgacaaggcctacgaccagcagcttaaagcgggtgacaatccgtacctgcggtataatcacgccgacgccgagcttcaggagcgtctgcaagaagatacgtcttttgggggcaacctcgggcgagcagtcttccaggccaagaagcgggttctcgaacctctcggtctggttgaggaaggcgctaagacggctcctggaaagaagagaccggtagagccgtcaccacagcgttcccccgactcctccacgggcatcggcaagaaaggccagcagcccgccagaaagagactcaatttcggtcagactggcgactcagagtcagtccccgaccctcaacctatcggagaacctccagcagcgccctctagtgtgggatctggtacaatggctgcaggcggtggcgcgccaatggcagacaataacgaaggtgccgacggagtgggtagttcctcgggaaattggcattgcgattccacatggctgggcgacagagtcatcaccaccagcacccgaacctgggccctgcccacctacaacaaccacctctacaagcaaatctccaacgggacctcgggaggcagcaccaacgacaacacctactttggctacagcaccccctgggggtattttgactttaacagattccactgccacttctcaccacgtgactggcagcgactcatcaacaacaactggggattccggcccaagagactcagcttcaagctcttcaacatccaggtcaaagaggtcacgcagaatgaaggcaccaagaccatcgccaataacctcaccagcaccatccaggtgtttacggactcggaataccagctgccgtacgtcctcggctctgcccaccagggctgccagcctccgttcccggcggacgtcttcatgattcctcagtacggctacctgactctcaacaacggtagtcaggccgtgggacgttcctccttctactgcctggagtacttcccctctcagatgctgagaacgggcaacaacttttccttcagctacactttcgaggacgtgcctttccacagcagctacgcgcacagccagagtttggacaggctgatgaatcctctcatcgaccagtacctgtactacctgtcaagaacccagtctacgggaggcacagcgggaacccagcagttgctgttttctcaggccgggcctagcaacatgtcggctcaggccagaaactggctgcctggaccctgctacagacagcagcgcgtctccacgacactgtcgcaaaacaacaacagcaactttgcctggactggtgccaccaagtatcatctgaacggcagagactctctggtgaatccgggcgtcgccatggcaaccaacaaggacgacgaggaccgcttcttcccatccagcggcatcctcatgtttggcaagcagggagctggaaaagacaacgtggactatagcaacgtgatgctaaccagcgaggaagaaatcaagaccaccaaccccgtggccacagaacagtatggcgtggtggctgataacctacagcagcaaaacaccgctcctattgtgggggccgtcaacagccagggagccttacctggcatggtctggcagaaccgggacgtgtacctgcagggtcctatttgggccaagattcctcacacagatggcaactttcacccgtctcctttaatgggcggctttggacttaaacatccgcctcctcagatcctcatcaaaaacactcctgttcctgcggatcctccaacagcgttcaaccaggccaagctgaattctttcatcacgcagtacagcaccggacaagtcagcgtggagatcgagtgggagccgcagaaggagaacagcaagcgctggaacccagagattcagtatacttccaactactacaaatctacaaatgtggactttgctgttaatactgagggtgtttactctgagcctcgccccattggcactcgttacctcacccgtaatctgtaa

SEQ ID NO: 461 - protein, 738 aa, Adeno-associated virus
MVADGYLPDWLEDNLSEGIREWWDLKPGAPKPKANQQKQGDGRGLVLPGYKYLGPFNGLDKGEPVNAADAAALEHDKAYDQQLKAGDNPYLRYNHADAELQERLQEDTSFGGNLGRAVFQAKKRVLEPLGLVEEGAKTAPGKKRPVEPSPQRSPDSSTGIGKKGQQPARKRLNFGQTGDSESVPDPQPIGEPPAAPSSVGSGTMAAGGGAPMADNNEGADGVGSSSGNWHCDSTWLGDRVITTSTRTWALPTYNNHLYKQISNGTSGGSTNDNTYFGYSTPWGYFDFNRFHCHFSPRDWQRLINNNWGFRPKRLSFKLFNIQVKEVTQNEGTKTIANNLTSTIQVFTDSEYQLPYVLGSAHQGCQPPFPADVFMIPQYGYLTLNNGSQAVGRSSFYCLEYFPSQMLRTGNNFSFSYTFEDVPFHSSYAHSQSLDRLMNPLIDQYLYYLSRTQSTGGTAGTQQLLFSQAGPSNMSAQARNWLPGPCYRQQRVSTTLSQNNNSNFAWTGATKYHLNGRDSLVNPGVAMATNKDDEDRFFPSSGILMFGKQGAGKDNVDYSNVMLTSEEEIKTTNPVATEQYGVVADNLQQQNTAPIVGAVNSQGALPGMVWQNRDVYLQGPIWAKIPHTDGNFHPSPLMGGFGLKHPPPQILIKNTPVPADPPTAFNQAKLNSFITQYSTGQVSVEIEWEPQKENSKRWNPEIQYTSNYYKSTNVDFAVNTEGVYSEPRPIGTRYLTRNL

SEQ ID NO: 462 - DNA, 2217 bp, Adeno-associated virus
atggctgccgatggttatcttccagattggctcgaggacaacctctctgagggcattcgcgagtggtgggacctgaaacctggagccccgaaacccaaagccaaccagcaaaagcaggacgacggccggggtctggtgcttcctggctacaagtacctcggacccttcaacggactcgacaagggggagcccgtcaacgcggcggacgcagcggccctcgagcacgacaaggcctacgaccagcagctcaaagcgggtgacaatccgtacctgcggtataatcacgccgacgccgagtttcaggagcgtctgcaagaagatacgtcttttgggggcaacctcgggcgagcagtcttccaggccaagaagcgggttctcgaacctctcggtctggttgaggaaggcgctaagacggctcctggaaagaagagaccggtagagccgtcaccacagcgttcccccgactcctccacgggcatcggcaagaaaggccagcagcccgccagaaagagactcaatttcggtcagactggcgactcagagtcagtccccgaccctcaacctatcggagaacctccagcagcgccctctagtgtgggatctggtacaatggctgcaggcggtggcgcaccaatggcagacaataacgaaggtgccgacggagtgggtagttcctcgggaaattggcattgcgattccacatggctgggcgacagagtcatcaccaccagcacccgaacctgggccctgcccacctacaacaaccacctctacaagcaaatctccaacgggacctcgggaggcagcaccaacgacaacacctactttggctacagcaccccctgggggtattttgactttaacagattccactgccacttctcaccacgtgactggcagcgactcatcaacaacaactggggattccggcccaagagactcagcttcaagctcttcaacatccaggtcaaagaggtcacgcagaatgaaggcaccaagaccatcgccaatagcctcaccagcaccatccaggtgtttacggactcggaataccagctgccgtacgtcctcggctctgcccaccagggctgcctgcctccgttcccggcggacgtcttcatgattcctcagtacggctacctgactcccaacaacggtagtcaggccgtgggacgttcctccttctactgcctggagtacttcccctctcagatgctgagaacgggcaacaacttttccttcagctacactttcgaggacgtgcctttccacagcagctacgcgcacagccagagtttggacaggctgatgaatcctctcatcgaccagtacctgtactacctgtcaagaacccagtctacgggaggcacagcgggaacccagcagttgctgtcttctcaggccgggcctagcaacatgtcggctcaggccagaaactggctgcctggaccctgctacagacagcagcgcgtctccacgacactgtcgcaaaacaacaacagcaactttgcctggactggtgccaccaagtatcatctgaacggcagagactctctggtgaatccgggcgtcgccatggcaaccaacaaggacgacgaggaccgcttcttcccatccagcggcatcctcatgtttggcaagcagggagctggaaaagacaacgtggactatagcaacgtgatgctaaccagcgaggaagaaatcaagaccaccaaccccgtggccacagaacagtatggcgtggtggctgataacctacagcagcaaaacaccgctcctattgtgggggccgtcaacagccagggagccttacctggcatggtctggcagaaccgggacgtgtacttgcagggtcctatttgggccaagattcctcacacagatggcaactttcacccgtctcctttaatgggcggctttggacttaaacatccgcctcctcagatcctcatcaaaaacactcctgttcctgcggatcctccaacagcgttcaaccaggccaagctgaattctttcatcacgcagtacagcaccggacaagtcagcgtggagatcgagtgggagctgcagaaggagaacagcaagcgctggaacccagagattcagtatacttccaactactacaaatctacaaatgtggactttgctgttaatactgagggtgtttactctgagcctcgccccattggcactcgttacctcacccgtaatctgtaa

SEQ ID NO: 463 - protein, 738 aa, Adeno-associated virus
MAADGYLPDWLEDNLSEGIREWWDLKPGAPKPKANQQKQDDGRGLVLPGYKYLGPFNGLDKGEPVNAADAAALEHDKAYDQQLKAGDNPYLRYNHADAEFQERLQEDTSFGGNLGRAVFQAKKRVLEPLGLVEEGAKTAPGKKRPVEPSPQRSPDSSTGIGKKGQQPARKRLNFGQTGDSESVPDPQPIGEPPAAPSSVGSGTMAAGGGAPMADNNEGADGVGSSSGNWHCDSTWLGDRVITTSTRTWALPTYNNHLYKQISNGTSGGSTNDNTYFGYSTPWGYFDFNRFHCHFSPRDWQRLINNNWGFRPKRLSFKLFNIQVKEVTQNEGTKTIANSLTSTIQVFTDSEYQLPYVLGSAHQGCLPPFPADVFMIPQYGYLTPNNGSQAVGRSSFYCLEYFPSQMLRTGNNFSFSYTFEDVPFHSSYAHSQSLDRLMNPLIDQYLYYLSRTQSTGGTAGTQQLLSSQAGPSNMSAQARNWLPGPCYRQQRVSTTLSQNNNSNFAWTGATKYHLNGRDSLVNPGVAMATNKDDEDRFFPSSGILMFGKQGAGKDNVDYSNVMLTSEEEIKTTNPVATEQYGVVADNLQQQNTAPIVGAVNSQGALPGMVWQNRDVYLQGPIWAKIPHTDGNFHPSPLMGGFGLKHPPPQILIKNTPVPADPPTAFNQAKLNSFITQYSTGQVSVEIEWELQKENSKRWNPEIQYTSNYYKSTNVDFAVNTEGVYSEPRPIGTRYLTRNL

SEQ ID NO: 464 - protein, 738 aa, Adeno-associated virus
MAADGYLPDWLEDNLSEGIREWWDLKPGAPKPKANQQKQDDGRGLVLPGYKYLGPFNGLDKGEPVNAADAAALEHDKAYDQQLKAGDNPYLRYNHADAEFQERLQEDTSFGGNLGRAVFQAKKRVLEPLGLVEEGAKTAPGKKRPVEPSPQRSPDSSTGIGKKGQQPARKRLNFGQTGDSESVPDPQPIGEPPAAPSSVGSGTMAAGGGAPMADNNEGADGVGSSSGNWHCDSTWLGDRVITTSTRTWALPTYNNHLYKQISNGTSGGSTNDNTYFGYSTPWGYFDFNRFHCHFSPRDWQRLINNNWGFRPKRLSFKLFNIQVKEVTQNEGTKTIANNLTSTIQVFTDSEYQLPYVLGSAHQGCLPPFPADVFMIPQYGYLTLNNGSQAVGRSSFYCLEYFPSQMLRTGNNFSFSYTFEDVPFHSSYVHSQSLDRLMNPLIDQYLYYLSRTQSTGGTAGTQQLLFSQAGPSNMSAQARNWLPGPCYRQQRVSTTLSQNNNSNFAWTGATKYHLNGRDSLVNSGVAMATNKDDEDRFFPSSGILMFGKQGAGKDNVDYSNVMLTSEEEIKTTNPVATEQYGVVADNLQQQNTAPIVGAVNSQGALPGMVWQNRDVYLQGPIWAKIPHTDGNFHPSPLMGGFGLKHPPPQILIKNTPVPADPPTAFNQAKLNSFITQYSTGQVSVEIEWELQKENSKRWNPEIQYTSNYYKSTNVDFAVNTEGVYSEPRPIGTRYPTRNL

SEQ ID NO: 465 - DNA, 2217 bp, Adeno-associated virus
atggctgccgatggttatcttccagattggctcgaggacaacctctctgagggcattcgcgagtggtgggacctgaaacctggagccccgaaacccaaagccaaccagcaaaagcaggacgacggccggggtctggtgcttcctggctacaagtacctcggacccttcaacggactcgacaagggggagcccgtcaacgcggcggacgcagcggccctcgagcacgacaaggcctacgaccagcagctcaaagcgggtgacaatccgtacctgcggtataatcacgccgacgccgagtttcaggagcgtctgcaagaagatacgtcttttgggggcaacctcgggcgagcagtcttccaggccaagaagcgggttctcgaacctctcggtctggttgaggaaggcgctaagacggctcctggaaagaagagaccggtagagccgtcaccacagcgttcccccgactcctccacgggcatcggcaagaaaggccagcagcccgccagaaagagactcaatttcggtcagactggcgactcagagtcagtccccgaccctcaacctatcggagaacctccagcagcgccctctagtgtgggatctggtacaatggctgcaggcggtggcgcaccaatggcagacaataacgaaggtgccgacggagtgggtagttcctcgggaaattggcattgcgattccacatggctgggcgacagagtcatcaccaccagcacccgaacctgggccctgcccacctacaacaaccacctctacaagcaaatctccaacgggacctcgggaggcagcaccaacgacaacacctactttggctacagcaccccctgggggtattttgactttaacagattccactgccacttctcaccacgtgactggcagcgactcatcaacaacaactggggattccggcccaagagactcagcttcaagctcttcaacatccaggtcaaagaggtcacgcagaatgaaggcaccaagaccatcgccaataacctcaccagcaccatccaggtgtttacggactcggaataccagctgccgtacgtcctcggctctgcccaccagggctgcctgcctccgttcccggcggacgtcttcatgattcctcagtacggctacctgactctcaacaacggtagtcaggccgtgggacgttcctccttctactgcctggagtacttcccctctcagatgctgagaacgggcaacaacttttccttcagctacactttcgaggacgtgcctttccacagcagctacgtgcacagccagagtttggacaggctgatgaatcctctcatcgaccagtacctgtactacctgtcaagaacccagtctacgggaggcacagcgggaacccagcagttgctgttttctcaggccgggcctagcaacatgtcggctcaggccagaaactggctgcctggaccctgctacagacagcagcgcgtctccacgacactgtcgcaaaacaacaacagcaactttgcctggactggtgccaccaagtatcatctgaacggcagagactctctggtgaattcgggcgtcgccatggcaaccaacaaggacgacgaggaccgcttcttcccatccagcggcatcctcatgtttggcaagcagggagctggaaaagacaacgtggactatagcaacgtgatgctaaccagcgaggaagaaatcaagaccaccaaccccgtggccacagaacagtatggcgtggtggctgataacctacagcagcaaaacaccgctcctattgtgggggccgtcaacagccagggagccttacctggcatggtctggcagaaccgggacgtgtacctgcagggtcctatttgggccaagattcctcacacagatggcaactttcacccgtctcctttaatgggcggctttggacttaaacatccgcctcctcagatcctcatcaaaaacactcctgttcctgcggatcctccaacagcgttcaaccaggccaagctgaattctttcatcacgcagtacagcaccggacaagtcagcgtggagatcgagtgggagctgcagaaggagaacagcaagcgctggaacccagagattcagtatacttccaactactacaaatctacaaatgtggactttgctgttaatactgagggtgtttactctgagcctcgccccattggcactcgttaccccacccgtaatctgtaa

SEQ ID NO: 466 - protein, 734 aa, Adeno-associated virus; identical to SEQ ID NO: 291

SEQ ID NO: 467 - DNA, 2214 bp, Adeno-associated virus
atggctgctgacggttatcttccagattggctcgaggacaacctctctgagggcattcgcgagtggtgggacctgaaacctggagccccgaaacccaaagccaaccagcagaagcaggacgacggccggggtctggtgcttcctggctacaagtacctcggacccttcaacggactcgacaagggggagcccgtcaacgcggcggacgcagcggccctcgagcacgacaaggcctacgaccagcagctcaaagcgggtgacaatccgtacctgcggtataaccacgccgacgccgagtttcaggagcgtctgcaagaagatacgtcttttgggggcaacctcgggcgagcagtcttccaggccaagaagcgggttctcgaacctctcggtctggttgaggaagctgctaagacggctcctggaaagaagagaccggtagaaccgtcacctcagcgttcccccgactcctccacgggcatcggcaagaaaggccagcagcccgctagaaagagactgaactttgggcagactggcgactcagagtcagtccccgaccctcaacctctcggagaaccaccagcaggcccctctggtctgggatctggtacaatggctgcaggcggtggcgctccaatggcagacaataacgaaggcgccgacggagtgggtaatgcctcaggaaattggcattgcgattccacatggctgggcgacagagtcatcaccaccagcacccgaacctgggctttgcccacctacaacaaccacctctacaagcaaatctccagtcagtcagcaggtagcaccaacgacaacgtctacttcggctacagcaccccctgggggtattttgacttcaacagattccactgtcacttctcaccacgtgactggcagcgactcatcaacaacaactggggattccggcccaagaagctcaacttcaagctcttcaacatccaagtcaaggaggtcacgacgaatgacggcgtcacgaccatcgctaataaccttaccagcacggttcaggtcttttcggactcggagtaccagctgccgtacgtcctcggctctgcccaccagggctgcctgcctccgttcccggcggacgtcttcatgattcctcagtacggctacctgactctgaacaatggcagccaatcggtgggacgttcatccttctactgcctggaatacttcccttctcaggtgctgagaacgggtaacaacttcaccttcagttacaccttcgaggacgtgcctttccacagcagctacgcgcacagccagagcctagaccggctgatgaatcccctcatcgaccagtacctgtattacctggctagaacacagagtaacccaggaggcacatctggcaatcgggaactgcagttttaccagggcgggccttccaccatggccgaacaagccaagaactggttacctggaccttgcttccggcaacaaagagtttccaaaacactggatcaaaacaacaacagcaactttgcttggactggtgccaccaaatatcacctgaacggcagaaactcattggtgaatcctggtgtcgccatggcaactcacaaggacgacgaggaccgctttttcccatccagcggagtcctgatttttggaaaaactggagcaaccaacaagactacattggaaaacgtgttaatgacaaatgaagaagaaattcgtcctactaatcctgtggccacagaagaatacgggatagtcagcagcaatttacaagcggccaatactgcagcccagacacaagttgtcaacaaccagggagccttacctggcatggtctggcagaaccgggacgtgtacctgcagggtcccatctgggccaaaattcctcacacagacggcaactttcacccgtctccgctgatgggcggctttggactgaagcatccgcctcctcagatcctgatcaaaaacactcctgttcctgctaatcccccggaggtgtttacgcctgccaagtttgcttctttcatcacacagtacagcaccggccaggtcagcgtggagatcgagtgggagctgcagaaggagaacagcaagcgctggaacccagagattcagtatacctccaattttgacaaacagactggtgtggactttgccgttgacagccagggtgtttattctgagcctcgccccattggtactcgttacctcacccgtaatctgtaa

SEQ ID NO: 468 - protein, 737 aa, Adeno-associated virus
MAADGYLPDWLEDNLSEGIREWWDLKPGAPKPKANQQKQDDGRGLVLPGYKYLGPFNGLDKGEPVNAADAAALEHDKAYDQQLKAGDNPYLRYNHADAEFQERLQEDTSFGGNLGRAVFQAKKRVLEPLGLVEEAAKTAPGKKRPVEPSPQRSPDSSTGIGKKGQQPARKRLNFGQTGDSESVPDPQPLGEPPAGPSGLGSGTMAAGGGAPMADNNEGADGVGNASGNWHCDSTWLGDRVITTSTRTWALPTYNNHLYKQISSQSAGSTNDNVYFGYSTPWGYFDFNRFHCHFSPRDWQRLINNNWGFRPKKLNFKLFNIQVKEVTTNDGVTTIANNLTSTVQVFSDSEYQLPYVLGSAHQGCLPPFPADVFMIPQYGYLTLNNGSQSVGRSSFYCLEYFPSQVLRTGNNFTFSYTFEDVPFHSSYAHSQSLDRLMNPLIDQYLYYLARTQSNPGGTSGNRELQFYQGGPSTMAEQAKNWLPGPCFRQQRVSKTLDQNNNSNFAWTGATKYHLNGRNSLVNPGVAMATHKDDEDRFFPSSGVLIFGKTGATNKTTLENVLMTNEEEIRPTNPVATEEYGIVSSNLQAANTAAQTQVVNNQGALPGMVWQNRDVYLQGPIWAKIPHTDGNFHPSPLMGGFGLKHPPPQILIKNTPVPANPPEVFTPAKFASFITQYSTGQVSVEIEWELQKENSKRWNPEIQYTSNFDKQTGVDFAVDSQGVYSEPRPIGTRYLTRNL

SEQ ID NO: 469 - DNA, 2214 bp, Adeno-associated virus
atggctgccgatggttatcttccagattggctcgaggacaacctctctgagggcattcgcgagtggtgggacctgaaacctggagccccgaaacccaaagccaaccagcaaaagcaggacgacggccggggtctggtgcttcctggctacaagtacctcggacccttcaacggactcgacaagggggagcccgtcaacgcggcggacgcagcggccctcgagcacgacaaggcctacgaccagcagctcaaagcgggtgacaatccgtacctgcggtataatcacgccgacgccgagtttcaggagcgtctgcaagaagatacgtcttttgggggcaacctcgggcgagcagtcttccaggccaagaagcgggttctcgaacctctcggtctggttgaggaaggcgctaagacggctcctggaaagaagagaccggtagagccgtcaccacagcgttcccccgactcctccacgggcatcggcaagaaaggccagcagcccgccagaaagagactcaatttcggtcagactggcgactcagagtcagtccccgaccctcaacctatcggagaacctccagcagcgccctctagtgtgggatctggtacaatggctgcaggcggtggcgcaccaatggcagacaataacgaaggtgccgacggagtgggtagttcctcgggaaattggcattgcgattccacacggctgggcgacagagtcatcaccaccagcacccggacctgggctttgcccacctacaacaaccacctctacaagcaaatctccagtcagtcagcaggtagcaccaacgacaacgtctacttcggctacagcaccccctgggggtattttgacttcaacagattccactgtcacttctcaccacgtgactggcagcggctcatcaacaacaactggggattccggcccaagaagctcaacttcaagctgttcaacatccaggtcaaggaggtcacaacgaatgacggcgtcacgaccatcgccaataaccttaccagcacggttcaggtcttttcggactcggaataccagctgccctacgtcctcggctccgcacaccagggctgcctgcctccgttcccggcggacgtcttcatgattccccagtacggctacctgactctgaacaatggcagccaatcggtgggtcgttcctctttctactgcctggaatatttcccttctcaaatgctgagaacgggcaacaacttcaccttcagctacaccttcgaggacgttcccttccacagcagctacgcacacagccagagcctggaccggctgatgaatcctcttatcgaccagtacctgtattacctggccagaacacagagcaacgcaggaggcacagctggcaatcgggaactgcagttttatcagggcgggcctaccaccatggccgaacaagccaaaaactggctgcctggaccttgcttccggcaacgaagagtctccaagacgctggatcaaaacaacaacagcaactttgcttggactggtgccaccaaataccatctaaatggaagaaattcattggttaatcccggtgtcgccatggcaacccacaaggacgacgaggaacgcttcttcccttcgagcggagtcctgatttttggaaaaactggagcagctaataagactacactggaaaatgtgttaatgacaaatgaagaggaaattcgtcctaccaacccggtagccaccgaggaatacgggactgttagcagcaacctgcaggcggctaacactgcagcccagacacaagttgtcaacaaccagggagccttacctggtatggtctggcagaaccgggacgtgtacctgcagggtcccatctgggccaagattcctcacacggacggcaactttcacccgtctccgctgatgggcggctttggactgaagcatccgcctcctcagatcctgatcaaaaacactcctgttcctgctaatcccccggaggtgtttacgcctgccaagtttgcttctttcatcacacagtacagcaccggccaggtcagcgtggagatcgagtgggagctgcagaaggagaacagcaagcgctggaacccagagattcagtatacctccaattttgacaaacagactggtgtggactttgccgttgacagccagggtgtttattctgagcctcgccccattggtactcgttacctcacccgtaatctgtaa

SEQ ID NO: 470 - protein, 737 aa, Adeno-associated virus
MAADGYLPDWLEDNLSEGIREWWDLKPGAPKPKANQQKQDDGRGLVLPGYKYLGPFNGLDKGEPVNAADAAALEHDKAYDQQLKAGDNPYLRYNHADAEFQERLQEDTSFGGNLGRAVFQAKKRVLEPLGLVEEGAKTAPGKKRPVEPSPQRSPDSSTGIGKKGQQPARKRLNFGQTGDSESVPDPQPIGEPPAAPSSVGSGTMAAGGGAPMADNNEGADGVGSSSGNWHCDSTRLGDRVITTSTRTWALPTYNNHLYKQISSQSAGSTNDNVYFGYSTPWGYFDFNRFHCHFSPRDWQRLINNNWGFRPKKLNFKLFNIQVKEVTTNDGVTTIANNLTSTVQVFSDSEYQLPYVLGSAHQGCLPPFPADVFMIPQYGYLTLNNGSQSVGRSSFYCLEYFPSQMLRTGNNFTFSYTFEDVPFHSSYAHSQSLDRLMNPLIDQYLYYLARTQSNAGGTAGNRELQFYQGGPTTMAEQAKNWLPGPCFRQRRVSKTLDQNNNSNFAWTGATKYHLNGRNSLVNPGVAMATHKDDEERFFPSSGVLIFGKTGAANKTTLENVLMTNEEEIRPTNPVATEEYGTVSSNLQAANTAAQTQVVNNQGALPGMVWQNRDVYLQGPIWAKIPHTDGNFHPSPLMGGFGLKHPPPQILIKNTPVPANPPEVFTPAKFASFITQYSTGQVSVEIEWELQKENSKRWNPEIQYTSNFDKQTGVDFAVDSQGVYSEPRPIGTRYLTRNL

SEQ ID NO: 471 - DNA, 2208 bp, Adeno-associated virus
atggctgccgatggttatcttccagattggctcgaggacactctctctgaaggaataagacagtggtggaagctcaaacctggcccaccaccaccaaagcccgcagagcggcataaggacgacagcaggggtcttgtgcttcctgggtacaagtacctcggacccttcaacggactcgacaagggggagccggtcaacgaggcagacgccgcggccctcgagcacgacaaggcctacgaccggcagctcgacagcggagacaacccgtacctcaagtacaaccacgccgacgcggagtttcaggagcgtcttaaagaagatacgtcttttgggggcaacctcggacgagcagtcttccaggcgaaaaagagggttcttgaacctctgggcctggttgaggaacctgttaagacggctccgggaaaaaagaggccggtagagcactctcctgcggagccagactcctcctcgggaaccggaaaagcgggccagcagcctgcaagaaaaagattgaattttggtcagactggagacgcagactccgtacctgacccccagcctctcggacagccaccagcagccccctctggtttgggatctactacaatggctacaggcagtggcgcaccaatggcagacaataacgagggtgccgatggagtgggtaattcttcaggaaattggcattgcgattcccaatggctgggcgacagagtcatcaccaccagcacccgaacctgggcccagcccacctacaacaaccacctctacaagcaaatctcaagccaatcaggagcctcaaacgacaaccactactttggctacagcaccccttgggggtattttgacttcaacagattccactgccacttttcaccacgtgactggcaaagactcatcaacaacaactggggattccgacccaagagactcaacttcaagctctttaacattcaagtcaaagaggtcacgcagaatgacggtacgacgacgattgccaataaccttaccagcacggttcaggtgtttactgactcggagtaccagctcccgtacgtcctcgggtcggcgcatcaaggatgcctcccgccgtttccagcggacgtcttcatggtcccacagtatggatacctcaccctgaacaacgggagtcaggcggtaggacgctcttccttttactgcctggagtactttccttctcagatgcttcgtactggaaacaactttcagttcagctacacctttgaagacgttcctttccacagcagctacgctcacagccagagtctggatcggctgatgaatcctctgatcgaccagtacctgtattatctgaacaaaacacaatcaaatagtggagctcttcagcagtctcggctactgtttagtcaagctggacccaccagcatgtctcttcaagctaaaaactggctacctggaccttgctacagacagcagcgtctgtcaaagcaggcaaacgacaacaacaacagcaactttccctggactgcggctacaaagtaccacctaaatggccgggactcgttggttaatccaggaccagctatggccagtcacaaagacgatgaagaaaagtttttccccatgcatggaaccctgatatttggtaaacaaggaacaaatgctaacgacgcggatttggacaatgtcatgattacagatgaagaagaaatccgcaccaccaatcccgtggctacggagcagtacggatatgtgtcaaataatttgcaaaactcaaatactggtccaactactggaactgtcaatcaccgaggagcgttacctggcatggtgtggcaggatcgagacgtgtacctgcagggacccatttgggccaagattcctcacaccgatggacactttcatccttctccactgatgggaggttttgggctcaaacacccgcctcctcagatcatgatcaaaaacactcccgttccagccaatcctcccacaaacttcagttctgccaagtttgcttctttcatcacacagtattccacggggcaggtcagcgtggagatcgagtgggagctgcagaaagagaacagcaaacgctggaatcccgaaattcagtacacttccaactacaacaaatctgttaatgtggactttactgtggacactaatggcgtgtattcagagcctcgccccattggcaccagatacctgactcgtaatctgtaa

SEQ ID NO: 472 - protein, 735 aa, Adeno-associated virus
MAADGYLPDWLEDTLSEGIRQWWKLKPGPPPPKPAERHKDDSRGLVLPGYKYLGPFNGLDKGEPVNEADAAALEHDKAYDRQLDSGDNPYLKYNHADAEFQERLKEDTSFGGNLGRAVFQAKKRVLEPLGLVEEPVKTAPGKKRPVEHSPAEPDSSSGTGKAGQQPARKRLNFGQTGDADSVPDPQPLGQPPAAPSGLGSTTMATGSGAPMADNNEGADGVGNSSGNWHCDSQWLGDRVITTSTRTWAQPTYNNHLYKQISSQSGASNDNHYFGYSTPWGYFDFNRFHCHFSPRDWQRLINNNWGFRPKRLNFKLFNIQVKEVTQNDGTTTIANNLTSTVQVFTDSEYQLPYVLGSAHQGCLPPFPADVFMVPQYGYLTLNNGSQAVGRSSFYCLEYFPSQMLRTGNNFQFSYTFEDVPFHSSYAHSQSLDRLMNPLIDQYLYYLNKTQSNSGALQQSRLLFSQAGPTSMSLQAKNWLPGPCYRQQRLSKQANDNNNSNFPWTAATKYHLNGRDSLVNPGPAMASHKDDEEKFFPMHGTLIFGKQGTNANDADLDNVMITDEEEIRTTNPVATEQYGYVSNNLQNSNTGPTTGTVNHRGALPGMVWQDRDVYLQGPIWAKIPHTDGHFHPSPLMGGFGLKHPPPQIMIKNTPVPANPPTNFSSAKFASFITQYSTGQVSVEIEWELQKENSKRWNPEIQYTSNYNKSVNVDFTVDTNGVYSEPRPIGTRYLTRNL

SEQ ID NO: 473 - DNA, 2217 bp, Adeno-associated virus
atggctgccgatggttatcttccagattggctcgaggacaacctctctgagggcattcgcgagtggtgggcgctgaaacctggagccccgaagcccaaagccaaccagcaaaagcaggacgacggccggggtctggtgcttcctggctacaagtacctcggacccttcaacggactcgacaagggggagcccgtcaacgcggcggacgcagcggccctcgagcacgacaaggcctacgaccagcagctgcaggcgggtgacaatccgtacctgcggtataatcacgccgacgccgagtttcaggagcgtctgcaagaagatacgtcttttgggggcaacctcgggcgagcagtcttccaggccaagaagcgggttctcgaacctctcggtctggttgaggaaggcgctaagacggctcctggaaagaagagaccggtagagccgtcaccacagcgttcccccgactcctccacgggcatcggcaagaaaggccagcagcccgccagaaagagactcaatttcggtcagactggcgactcagagtcagtccccgaccctcaacctatcggagaacctccagcagcgccctctagtgtgggatctggtacaatggctgcaggcggtggcgcgccaatggcagacaataacgaaggtgccgacggagtgggtagttcctcgggaaattggcattgcgattccacatggctgggcgacagagtcatcaccaccagcacccgaacctgggccctgcccacctacaacaaccacctctacaagcaaacctccaacgggacctcgggaggcagcaccaacgacaacacctactttggctacagcaccccctgggggtattttgactttaacagattccactgccacttctcaccacgtgactggcagcgactcatcaacaacaactggggattccggcccaagagactcagcttcaagctcttcaacatccaggtcaaagaggtcacgcagaatgaaggcaccaagaccatcgccaataacctcaccagcaccatccaggtgtttacggactcggaataccagctgccgtacgtcctcggctctgcccaccagggctgcctgcctccgttcccggcggacgtcttcatgattcctcagtacggctacctgactctcaacaacggtagtcaggccgtgggacgttcctccttctactgcctggagtacttcccctctcagatgctgagaacgggcaacaacttttccttcagctacactttcgaggacgtgcctttccacagcagctacgcgcacagccagagtttggacaggctgatgaatcctctcatcgaccagtacctgtactacctgtcaagaacccagtctacgggaggcacagcgggaacccagcagttgctgttttctcaggccgggcctagcaacatgtcggctcaggccagaaactggctgcctggaccctgctacagacagcagcgcgtctccacgacactgtcgcaaaacaacaacagcaactttgcctggactggtgccaccaagtatcatctgaacggcagagactctctggtgaatccgggcgtcgccatggcaaccaacaaggacgacgaggaccgcttcttcccatccagcggcatcctcatgtttggcaagcagggagctggaaaagacaacgtggactatagcaacgtgatgctaaccagcgaggaagaaatcaagaccaccaaccccgtggccacagaacagtatggcgtggtggctgataacctacagcagcaaaacaccgctcctattgtgggggccgtcaacagccagggagccttacctggcatggtctggcagaaccgggacgtgtacctgcagggtcctatttgggccaagattcctcacacagatggcaactttcacccgtctcctttaatgggcggctttggacttaaacatccgcctcctcagatcctcatcaaaaacactcctgttcctgcggatcctccaacagcgttcaaccaggccaagctgaattctttcatcacgcagtacagcaccggacaagtcagcgcggagatcgagtgggagctgcagaaggagaacagcaagcgctggaacccagagattcagtatacttccaactactacaaatctacaaatgtggactttgctgttaatactgagggtgtttactctgagcctcgccccattggcactcgttacctcacccgtaatctgtaa

SEQ ID NO: 474 - protein, 738 aa, Adeno-associated virus
MAADGYLPDWLEDNLSEGIREWWALKPGAPKPKANQQKQDDGRGLVLPGYKYLGPFNGLDKGEPVNAADAAALEHDKAYDQQLQAGDNPYLRYNHADAEFQERLQEDTSFGGNLGRAVFQAKKRVLEPLGLVEEGAKTAPGKKRPVEPSPQRSPDSSTGIGKKGQQPARKRLNFGQTGDSESVPDPQPIGEPPAAPSSVGSGTMAAGGGAPMADNNEGADGVGSSSGNWHCDSTWLGDRVITTSTRTWALPTYNNHLYKQTSNGTSGGSTNDNTYFGYSTPWGYFDFNRFHCHFSPRDWQRLINNNWGFRPKRLSFKLFNIQVKEVTQNEGTKTIANNLTSTIQVFTDSEYQLPYVLGSAHQGCLPPFPADVFMIPQYGYLTLNNGSQAVGRSSFYCLEYFPSQMLRTGNNFSFSYTFEDVPFHSSYAHSQSLDRLMNPLIDQYLYYLSRTQSTGGTAGTQQLLFSQAGPSNMSAQARNWLPGPCYRQQRVSTTLSQNNNSNFAWTGATKYHLNGRDSLVNPGVAMATNKDDEDRFFPSSGILMFGKQGAGKDNVDYSNVMLTSEEEIKTTNPVATEQYGVVADNLQQQNTAPIVGAVNSQGALPGMVWQNRDVYLQGPIWAKIPHTDGNFHPSPLMGGFGLKHPPPQILIKNTPVPADPPTAFNQAKLNSFITQYSTGQVSAEIEWELQKENSKRWNPEIQYTSNYYKSTNVDFAVNTEGVYSEPRPIGTRYLTRNL

SEQ ID NO: 475 - DNA, 2217 bp, Adeno-associated virus
atggctgctgacggttatcttccagattggctcgaggacaacctctctgagggcattcgcgagtggtgggacctgaaacctggagcccccaagcccaaggccaaccagcagaagcaggacgacggccggggtctggtgcttcctggctacaagtacctcggacccttcaacggactcgacaagggggagcccgtcaacgcggcggacgcagcggccctcgagcacgacaaggcctacgaccagcagctcaaagcgggtgacaatccgtacctgcggtataatcacgccgacgccgagtttcaggagcgtctgcaagaagatacgtcttttgggggcaacctcgggcgagcagtcttccaggccaagaagcgggttctcgaacctctcggtctggttgaggaagctgctaagacggctcctggaaagaagagaccggtagaaccgtcacctcagcgttcccccgactcctccacgggcatcggcaagaaaggccagcagcccgctagaaagagactgaactttgggcagactggcgactcagagtcagtccccgaccctcaaccaatcggagaacctccagcagcgccctctagtgtgggatctggtacaatggccgcaggcggtggcgcaccaatggcagacaataacgaaggtgccgacggagtgggtagttcctcgggaaattggcattgcgattccacatggctgggcgacagagtcatcaccaccagcacccgaacctgggccctgcccacctacaacaaccacctctacaagcaaatctccaacgggacctcgggaggcagcaccaacgacaacacctactttggctacagcaccccctgggggtattttgactttaacagattccactgccacttctcaccacgtgactggcagcgactcatcaacaacaactggggattccggcccaagagactcagcttcaagctcttcaacatccaggtcaaagaggtcacgcagaatgaaggcaccaagaccatcgccaataacctcaccagcaccatccaggtgtttacggactcggaataccagctgccgtacgtcctcggctctgcccaccagggctgcctgcctccgttcccggcggacgtcttcatgattcctcagtacggctacctgactctcaacaacggtagtcaggccgtgggacgttcctccttctactgcctggagtacttcccctctcagatgctgagaacgggcaacaacttttccttcagctacactttcgaggacgtgcctttccacagcagctacgcgcacagccagagtttggacaggctgatgaatcctctcatcgaccagtacctgtactacctgtcaagaacccagtctacgggaggcacagcgggaacccagcagctgctgttttctcaggccgggcctagcaacatgtcggctcaggccagaaactggctgcctggaccctgctacagacagcagcgcgtctccacgacactgtcgcaaaacaacaacagcaactttgcctggactggtgccaccaagtatcatctgaacggcagagactctctggtgaatccgggcgtcgccatggcaaccaacaaggacgacgaggaccgcttcttcccatccagcggcatcctcatgtttggcaagcagggagctggaaaagacaacgtggactatagcaacgtgatgctaaccagcgaggaagaaatcaagaccaccaaccccgtggccacagaacagtatggcgtggtggctgataacctacagcagcaaaacaccgctcctattgtgggggccgtcaacagccagggagccttacctggcatggtctggcagaaccgggacgtgtacctgcagggtcctatttgggccaagattcctcacacagatggcaactttcacccgtctcctttaatgggcggctttggacttaaacatccgcctcctcagatcctcatcaaaagcactcctgttcctgcggatcctccaacagcgttcaaccaggccaagctgaattctttcatcacgcagtacagcaccggacaagtcagcgtggagatcgagtgggagctgcagaaggagaacagcaagtgctggaacccagagattcagtatacttccaactactacaaatctacaaatgtggactttgctgttaatactgagggtgtttactctgagcctcgccccattggcactcgttacctcacccgtaatctgtaa

SEQ ID NO: 476 - protein, 738 aa, Adeno-associated virus
MAADGYLPDWLEDNLSEGIREWWDLKPGAPKPKANQQKQDDGRGLVLPGYKYLGPFNGLDKGEPVNAADAAALEHDKAYDQQLKAGDNPYLRYNHADAEFQERLQEDTSFGGNLGRAVFQAKKRVLEPLGLVEEAAKTAPGKKRPVEPSPQRSPDSSTGIGKKGQQPARKRLNFGQTGDSESVPDPQPIGEPPAAPSSVGSGTMAAGGGAPMADNNEGADGVGSSSGNWHCDSTWLGDRVITTSTRTWALPTYNNHLYKQISNGTSGGSTNDNTYFGYSTPWGYFDFNRFHCHFSPRDWQRLINNNWGFRPKRLSFKLFNIQVKEVTQNEGTKTIANNLTSTIQVFTDSEYQLPYVLGSAHQGCLPPFPADVFMIPQYGYLTLNNGSQAVGRSSFYCLEYFPSQMLRTGNNFSFSYTFEDVPFHSSYAHSQSLDRLMNPLIDQYLYYLSRTQSTGGTAGTQQLLFSQAGPSNMSAQARNWLPGPCYRQQRVSTTLSQNNNSNFAWTGATKYHLNGRDSLVNPGVAMATNKDDEDRFFPSSGILMFGKQGAGKDNVDYSNVMLTSEEEIKTTNPVATEQYGVVADNLQQQNTAPIVGAVNSQGALPGMVWQNRDVYLQGPIWAKIPHTDGNFHPSPLMGGFGLKHPPPQILIKSTPVPADPPTAFNQAKLNSFITQYSTGQVSVEIEWELQKENSKCWNPEIQYTSNYYKSTNVDFAVNTEGVYSEPRPIGTRYLTRNL

SEQ ID NO: 477 - protein, 738 aa, Adeno-associated virus
MAADGYLPDWLEDNLSEGIREWWDLKPGAPKPKANQQKQDDGRGLVLPGYKYLGPFNGLDKGEPVNAADAAALEHDKAYDQQLKAGDNPYLRYNHADAEFQERLQEDTSFGGNLGRAVFQAKKRVLEPLGLVEEAAKTAPGKKRPVEPSPQRSPDSSTGIGKKGQQPARKRLNFGQTGDSESVPDPQPIGEPPAAPSSVGSGTMAAGGGAPMADNNEGADGVGSSSGNWHCDSTWLGDRVITTSTRTWALPTYNNHLYKQISNGTSGGSTNDNTYFGYSTPWGYFDFNRFHCHFSPRDWQRLINNNWGFRPKRLSFKLFNIQVKEVTQNEGTKTIANNLTSTIQVFTDSEYQLPYVLGSAHQGCLPPFPADVFMIPQYGYLTLNNGSQAVGRSSFYCLEYFPSQMLRTGNNFSFSYTFEDVPFHSSYAHSQSLDRLMNPLIDQYLYYLSRTQSTGGTAGTQQLLFSQAGPSNMSAQARNWLPGPCYRQQRVSTTLSQNNNSNFAWTGATKYHLNGRDSLVNPGVAMATNKDDEDRFFPSSGILMFGKQGAGKDNVDYSNVMLTSEEEIKTTNPVATEQYGVVADNLQQQNTAPIVGAVNSQGALPGMVWQNRDVYLQGPIWAKIPHTDGNFHPSPLMGGFGLKHPPPQILIKSTPVPADPPTAFNQAKLNSFITQYSTGQVSVEIEWELQKENSKRWNPEIQYTSNYYKSTNVDFAVNTEGVYSEPRPIGTRYLTRNL

SEQ ID NO: 478 - DNA, 2217 bp, Adeno-associated virus
atggctgctgacggttatcttccagattggctcgaggacaacctctctgagggcattcgcgagtggtgggacctgaaacctggagcccccaagcccaaggccaaccagcagaagcaggacgacggccggggtctggtgcttcctggctacaagtacctcggacccttcaacggactcgacaagggggagcccgtcaacgcggcggacgcagcggccctcgagcacgacaaggcctacgaccagcagctcaaagcgggtgacaatccgtacctgcggtataaccacgccgacgccgagtttcaggagcgtctgcaagaagatacgtcttttgggggcaacctcgggcgagcagtcttccaggccaagaagcgggttctcgaacctctcggtctggttgaggaagctgctaagacggctcctggaaagaagagaccggtagaaccgtcacctcagcgttcccccgactcctccacgggcatcggcaagaaaggccagcagcccgctagaaagagactgaactttgggcagactggcgactcagagtcagtccccgaccctcaaccaatcggagaaccaccagcaggcccctctggtctgggatctggtacaatggctgcaggcggtggcgcaccaatggctgacaataacgagggcgccgacggagtgggtaatgcctcaggaaattggcattgcgattccacatggctgggcgacagagtcatcaccaccagcacccgaacctgggctttgcccacctacaacaaccacctctacaagcaaatctccagtcagtcagcaggtagcaccaacgacaacgtctacttcggctacagcaccccctgggggtattttgacttcaacagattccactgtcacttctcaccacgtgactggcagcggctcatcaacaacaactggggattccggcccaagaagctcaacttcaagctgttcaacatccaggtcaaggaggtcacaacgaatgacggcgtcacgaccatcgccaataaccctaccagcacggttcaggtcttttcggactcggaataccagctgccctacgtcctcggctccgcacaccagggctgcctgcctccgttcccggcggacgtcttcatgattccccagtacggctacctgactctgaacaatggcagccaatcggtgggtcgttcctctttctactgcctggaatatttcccttctcaaatgctgagaacgggcaacaacttcaccttcagctacaccttcgaggacgttcccttccacagcagctacgcacacagccagagcctggaccggctgatgaatcctcttatcgaccagtacctgtattacctggccagaacacagagcaacgcaggaggcacagctggcaatcgggaactgcagttttatcagggcgggcctaccaccatggccgaacaagccaaaaactggctgcctggaccctgctacagacagcagcgcgtctccacgacactgtcgcaaaacaacaacagcaactttgcctggactggtgccaccaagtatcatctgaacggcagagactctctggtgaatccgggcgtcgccatggcaaccaacaaggacgacgaggaccgcttcttcccatccagcggcatcctcatgtttggcaagcagggagctggaaaagacaacgtggactatagcaacgtgatgctaaccagcgaggaagaaatcaagaccaccaaccccgtggccacagaacagtatggcgtggtggctgataacctacagcagcaaaacaccgctcctattgtgggggccgtcaacagccagggagccttacctggcatggtctggcagaaccgggacgtgtacctgcagggtcctatttgggccaagattcctcacacagatggcaactttcacccgtctcctttaatgggcggctttggacttaaacatccgcctcctcagatcctcatcaaaaacactcctgttcctgcggatcctccaacagcgttcaaccaggccaagctgaattctttcatcacgcagtacagcaccggacaagtcagcgtggagatcgagtgggagctgcagaaggagaacagcaagcgctggaacccagagattcagtatacttccaactactacaaatctacaaatgtggactttgctgttaatactgagggtgtttactctgagcctcgccccattggcactcgttacctcacccgtaatctgtaa

SEQ ID NO: 479 - protein, 738 aa, Adeno-associated virus
MAADGYLPDWLEDNLSEGIREWWDLKPGAPKPKANQQKQDDGRGLVLPGYKYLGPFNGLDKGEPVNAADAAALEHDKAYDQQLKAGDNPYLRYNHADAEFQERLQEDTSFGGNLGRAVFQAKKRVLEPLGLVEEAAKTAPGKKRPVEPSPQRSPDSSTGIGKKGQQPARKRLNFGQTGDSESVPDPQPIGEPPAGPSGLGSGTMAAGGGAPMADNNEGADGVGNASGNWHCDSTWLGDRVITTSTRTWALPTYNNHLYKQISSQSAGSTNDNVYFGYSTPWGYFDFNRFHCHFSPRDWQRLINNNWGFRPKKLNFKLFNIQVKEVTTNDGVTTIANNPTSTVQVFSDSEYQLPYVLGSAHQGCLPPFPADVFMIPQYGYLTLNNGSQSVGRSSFYCLEYFPSQMLRTGNNFTFSYTFEDVPFHSSYAHSQSLDRLMNPLIDQYLYYLARTQSNAGGTAGNRELQFYQGGPTTMAEQAKNWLPGPCYRQQRVSTTLSQNNNSNFAWTGATKYHLNGRDSLVNPGVAMATNKDDEDRFFPSSGILMFGKQGAGKDNVDYSNVMLTSEEEIKTTNPVATEQYGVVADNLQQQNTAPIVGAVNSQGALPGMVWQNRDVYLQGPIWAKIPHTDGNFHPSPLMGGFGLKHPPPQILIKNTPVPADPPTAFNQAKLNSFITQYSTGQVSVEIEWELQKENSKRWNPEIQYTSNYYKSTNVDFAVNTEGVYSEPRPIGTRYLTRNL

SEQ ID NO: 480 - DNA, 2208 bp, Adeno-associated virus
atggctgccgatggttatcttccagattggctcgaggacaacctctctgagggcattcacgagtggtgggacccgaaacctggagccccgaaacccaaagccaaccagcaaaagcaggacgacggccggggtctggtgcttcctggctacaagtacctcggacccttcaacggactcgacaagggggagcccgtcaacgcggcggacgcagcggccctcgagcacgacaaggcctacgaccagcagctcaaagcgggtgacaatccgtacctgcggtataatcacgccgacgccgagtttcaggagcgtctgcaagaagatacgtcttttgggggcaacctcgggcgagcagtcttccaggccaagaagcgggttctcgaacctctcggtctggttgaggaaggcgctaagacggctcctggaaagaagagaccggtagagccgtcaccacagcgttcccccgactcctccacgggcatcggcaagaaaggccagcagcccgccagaaagagactcaatttcggtcagactggcgactcagagtcagtccccgaccctcaacctatcggagaacctccagcagcgccctctagtgtgggatctggtacaatggctgcaggcggtggcgcaccaatggcagacaataacgaaggtgccgacggagtgggtagttcctcgggaaattggcattgcgattccacatggctgggcgacagagtcatcaccaccagcacccgaacctgggccctgcccacccacaacaaccacctctacaagcaaatctccaacgggacctcgggaggcagcaccaacgacaacgtctacttcggctacagcaccccctgggggtattttgacttcaacagattccactgtcacttctcaccacgtgaccggcagcgactcatcaacaacaactggggattccggcccaagagactcagcttcaagctcttcaacatccaggtcaaagaggtcacgcagaatgaaggcaccaagaccatcgccaataacctcaccagcaccatccaggtgtttacggactcggaataccagctgccgtacgtcctcggctctgcccaccagggctgcctgcctccgttcccggcggacgtcttcatgattcctcagtacggctacctgactctcaacaacggtagtcaggccgtgggacgttcctccttctactgcctggagtacttcccctctcagatgctgagaacgggcaacaacttttccttcagctacactttcgaggacgtgcctttccacagcagctacgcgcacagccagagtttggacaggctgatgaatcctctcatcgaccagtacctgtactacctgtcaagaacccagtctacggaaggcacagcgggaacccagcagttgctgttttctcaggccgggcctagcaacatgtcggctcaggccagaaactggctgcctggaccctgctacagacagcagcgcgtctccacgacactgtcgcaaaacaacaacagcaactttgcctggactggtgccaccaagtatcatctgaacggcagagactctctggtgaatccgggcgtcgccatggcaacccacaaggacgacgaggaacgcttcttcccttcgagcggagtcctgatttttggaaaaactggagcagctaataagactacactggaaaatgtgttaatgacaaatgaagaggaaattcgtcctaccaacccggtagccaccgaggaatacgggactgttagcagcaacctgcaggcggctaacactgcagcccagacacaagttgtcaacaaccagggagccttacctggtatggtctggcagaaccgggacgtgtacctgcagggtcccatctgggccaagattcctcacacggacggcaactttcacccgtctccgctgatgggcggctttggactgaagcatcctcagatcctgatcaaaaacactcctgttcctgctaatcccccggaggtgtttacgcctgccaagtttgcttctttcatcacacagtacagcaccggccaggtcagcgtggagatcgagtgggagctgcagaaggagaacagcaagcgctggaacccagagattcagtatacctccaattttgacaaacagactggtgtggactttgccgttgacagccagggtgtttattctgagcctcgccccattggtactcgttacctcacccgtaatctgtaa

SEQ ID NO: 481 - protein, 735 aa, Adeno-associated virus
MAADGYLPDWLEDNLSEGIHEWWDPKPGAPKPKANQQKQDDGRGLVLPGYKYLGPFNGLDKGEPVNAADAAALEHDKAYDQQLKAGDNPYLRYNHADAEFQERLQEDTSFGGNLGRAVFQAKKRVLEPLGLVEEGAKTAPGKKRPVEPSPQRSPDSSTGIGKKGQQPARKRLNFGQTGDSESVPDPQPIGEPPAAPSSVGSGTMAAGGGAPMADNNEGADGVGSSSGNWHCDSTWLGDRVITTSTRTWALPTHNNHLYKQISNGTSGGSTNDNVYFGYSTPWGYFDFNRFHCHFSPRDRQRLINNNWGFRPKRLSFKLFNIQVKEVTQNEGTKTIANNLTSTIQVFTDSEYQLPYVLGSAHQGCLPPFPADVFMIPQYGYLTLNNGSQAVGRSSFYCLEYFPSQMLRTGNNFSFSYTFEDVPFHSSYAHSQSLDRLMNPLIDQYLYYLSRTQSTEGTAGTQQLLFSQAGPSNMSAQARNWLPGPCYRQQRVSTTLSQNNNSNFAWTGATKYHLNGRDSLVNPGVAMATHKDDEERFFPSSGVLIFGKTGAANKTTLENVLMTNEEEIRPTNPVATEEYGTVSSNLQAANTAAQTQVVNNQGALPGMVWQNRDVYLQGPIWAKIPHTDGNFHPSPLMGGFGLKHPQILIKNTPVPANPPEVFTPAKFASFITQYSTGQVSVEIEWELQKENSKRWNPEIQYTSNFDKQTGVDFAVDSQGVYSEPRPIGTRYLTRNL

SEQ ID NO: 482 - protein, 738 aa, Adeno-associated virus
MAADGYLPDWLEDNLSEGIREWWDLKPGAPKPKANQQKQDDGRGLVLPGYKYLGPFNGLDKGEPVNAADAAALEHDKAYDQQLKAGDNPYLRYNHADAEFQERLQEDTSFGGNLGRAVFQAKKRVLEPLGLVEEGAKTAPGKKRPVEPSPQRSPDSSTGIGKKGQQPARKRLNFGQTGDSESVPDPQPIGEPPAAPSSVGSGTMAAGGGAPMADNNEGADGVGSSSGNWHCDSTWLGDRVITTSTRTWALPTYNNHLYKQISNGTSGGSTNDNTYFGYSTPWGYFDFNRFHCHFSPRDWQRPINNNWGFRPKRLSFKLFNIQVKEVTQNEGTKTIANNLTSTIQVFTDSEYQLPYVLGSAHQGCLPPFPADVFMIPQYGYLTLNNGSQAVGRSSFYCLEYFPSQMLRTGNNFSFSYPFEDVPFHSSYAHSQSLDRLMNPLIDQYLYYLSRTQSTGGTAGTQQLLFSQAGPSNMSAQARNWLPGPCYRQQRVSTTLSQNNNSNFAWTGATKYHLNGRDSLVNPGVAMATNKDDEDRFFPSSGILMFGKQGAGKDNVDYSNVMLTSEEEIKTTNPVATEQYGVVADNLQQQDTAPIVGAVNSQGALPGMVWQNRDVYLQGPIWAKIPHTDGNFHPSPLMGGFGLKHPPPQVLIKNTPVPADPPTAFNQAKLNSFITQYSTGQVSVEIEWELQKENSKRWNPEIQYTSNYYKSTNVDFAVNTEGVYSEPRPIGTRYLTRNL

SEQ ID NO: 483 - DNA, 2217 bp, Adeno-associated virus
atggctgccgatggttatcttccagattggctcgaggacaacctctctgagggcattcgcgagtggtgggacctgaaacctggagccccgaaacccaaggccaaccagcaaaagcaggacgacggccggggtctggtgcttcctggctacaagtacctcggacccttcaacggactcgacaagggggagcccgtcaacgcggcggacgcagcggccctcgagcacgacaaggcctacgaccagcagctcaaagcgggtgacaatccgtacctgcggtataatcacgccgacgccgagtttcaggagcgtctgcaagaagatacgtcttttgggggcaacctcgggcgagcagtcttccaggccaagaagcgggttctcgaacctctcggtctggttgaggaaggcgctaagacggctcctggaaagaagagaccggtagagccgtcaccacagcgttcccccgactcctccacgggcatcggcaagaaaggccagcagcccgccagaaagagactcaatttcggtcagactggcgactcagagtcagtccccgaccctcaacctatcggagaacctccagcagcgccctctagtgtgggatctggtacaatggctgcaggcggtggcgcaccaatggcagacaataacgaaggtgccgacggagtgggtagttcctcgggaaattggcattgcgattccacatggctgggcgacagagtcatcaccaccagcacccgaacctgggccctgcccacctacaacaaccacctctacaagcaaatctccaacgggacctcgggaggcagcaccaacgacaacacctactttggctacagcaccccctgggggtattttgactttaacagattccactgccacttctcaccacgtgactggcagcgacccatcaacaacaactggggattccggcccaagagactcagcttcaagctcttcaacatccaggtcaaagaggtcacgcagaatgaaggcaccaagaccatcgccaataacctcaccagcaccatccaggtgtttacggactcggaataccagctgccgtacgtcctcggctctgcccaccagggctgcctgcctccgttcccggcggacgtcttcatgattcctcagtacggctacctgactctcaacaacggtagtcaggccgtgggacgttcctccttctactgcctggagtacttcccctctcagatgctgagaacgggcaacaacttttccttcagctaccctttcgaggacgtgcctttccacagcagctacgcgcacagccagagtttggacaggctgatgaatcctctcatcgaccagtacctgtactacctgtcaagaacccagtctacgggaggcacagcgggaacccagcagttgctgttttctcaggccgggcctagcaacatgtcggctcaggccagaaactggctgcctggaccctgctacagacagcagcgcgtctccacgacactgtcgcaaaacaacaacagcaactttgcctggactggtgccaccaagtatcatctgaacggcagagactctctggtgaatccgggcgtcgccatggcaaccaacaaggacgacgaggaccgcttcttcccatccagcggcatcctcatgtttggcaagcagggagctggaaaagacaacgtggactatagcaacgtgatgctaaccagcgaggaagaaatcaagaccaccaaccccgtggccacagaacagtatggcgtggtggctgataacctacagcagcaagacaccgctcctattgtgggggccgtcaacagccagggagccttacctggcatggtctggcagaaccgggacgtgtacctgcagggtcctatttgggccaagattcctcacacagatggcaactttcacccgtctcctttaatgggcggctttggacttaaacatccgcctcctcaggtcctcatcaaaaacactcctgttcctgcggatcctccaacagcgttcaaccaggccaagctgaattctttcatcacgcagtacagcaccggacaagtcagcgtggagatcgagtgggagctgcagaaggagaacagcaagcgctggaacccagagattcagtatacttccaactactacaaatctacaaatgtggactttgctgttaatactgagggtgtttactctgagcctcgccccattggcactcgttacctcacccgtaatctgtaa

SEQ ID NO: 484 - DNA, 2214 bp, Adeno-associated virus
atggctgctgacggttatcttccagattggctcgaggacaacctctctgagggcattcgcgagtggtgggacctgaaacctggagcccccaagcccaaggccaaccagcagaagcaggacgacggccggggtctggtgcttcctggctacaagtacctcggacccttcaacggactcgacaagggggagcccgtcaacgcggcggacgcagcggccctcgagcacgacaaggcctacgaccagcagctcaaagcgggtgacaatccgtacctgcggtataaccacgccgacgccgagttccaggagcgtctgcaagaagatacgtcttttgggggcaacctcgggcgagcagtcttccaggccaagaagcgggttctcgaacctctcggtctggctgaggaagctgctaagacggctcctggaaagaagagaccggtagaaccgtcacctcagcgttcccccgactcctccacgggcatcggcaagaaaggccagcagcccgctagaaagagactgaactttgggcagactggcgactcagagtcagtccccgaccctcaaccaatcggagagccaccagcaggcccctctggtctgggatctggtacaatggctgcaggcggtggcgcaccaatggctgacaataacaagggcgccgacggagtgggtaatgcctcaggaaattggcattgcgattccacatggctgggcgacagagtcatcaccaccagcacccgaacctgggctttgcccacctacaacaaccacctctacaagcaaatctccagtcagtcagcaggtagcaccaacgacaacgtctacttcggctacagcaccccctgggggtattttgacttcaacagattccactgtcacttctcaccacgtgactggcagcggctcatcaacaacaactggggattccggcccaagaagctcaacttcaagctgttcaacatccaggtcaaggaggtcacaacgggtgacggcgtcacgaccatcgccaataaccttaccagcacggttcaggtcttttcggactcggaataccagctgccctacgtcctcggctccgcacaccagggctgcctgcctccgttcccggcggacgtcttcatgattccccagtacggctacctgactctgaacaatgacagccaatcggtgggtcgttcctctttctactgcctggaatatttcccttctcaaatgctgagaacgggcaacaacttcaccttcagctacaccttcgaggacgttcccttccacagcagctacgcacacagccagagcctggaccggctgatgaatcctcttatcgaccagtacctgtattacctggccagaacacagagcaacgcaggaggcacagctggcaatcgggaactgcagttttatcagggcgggcctaccaccatggccgaacaagccaaaaactggctgcctggaccttgcttccggcaacaaagagtctccaagacgctggatcaaaacaacaacagcaactttgcttggactggtgccaccaaataccatctaaatggaagaaattcattggttaatcccggtgtcgccatggcaacccacaaggacgacgaggaacgcttcttcccttcgagcggagtcctgatttttggaaaaactggagcagctaataagactacactggaaaatgtgttaatgacaaatgaagaggaaattcgtcctaccaacccggtagccaccgaggaatacgggactgttagcagcaacctgcaggcggctaacactgcagcccagacacaagttgtcaacaaccagggagccttacctggtatggtctggcagaaccgggacgtgtacctgcagggtcccatctgggccaagattcctcacacggacggcaactttcacccgtctccgctgatgggcggctttggactgaagcatccgcctcctcagatcctgatcaaaaacactcctgttcctgctaatcccccggaggtgtttacgcctgccaagtttgcttctttcatcacacagtacagcaccggccaggtcagcgtggagatcgagtgggagctgcagaaggagaacagcaagcgctggaacccagagattcagtatacctccaattttgacaaacagactggtgtggactttgccgttgacagccagggtgtttattctgagcctcgccccattggtactcgttacctcacccgtaatctgtaa

SEQ ID NO: 485 - protein, 737 aa, Adeno-associated virus
MAADGYLPDWLEDNLSEGIREWWDLKPGAPKPKANQQKQDDGRGLVLPGYKYLGPFNGLDKGEPVNAADAAALEHDKAYDQQLKAGDNPYLRYNHADAEFQERLQEDTSFGGNLGRAVFQAKKRVLEPLGLAEEAAKTAPGKKRPVEPSPQRSPDSSTGIGKKGQQPARKRLNFGQTGDSESVPDPQPIGEPPAGPSGLGSGTMAAGGGAPMADNNKGADGVGNASGNWHCDSTWLGDRVITTSTRTWALPTYNNHLYKQISSQSAGSTNDNVYFGYSTPWGYFDFNRFHCHFSPRDWQRLINNNWGFRPKKLNFKLFNIQVKEVTTGDGVTTIANNLTSTVQVFSDSEYQLPYVLGSAHQGCLPPFPADVFMIPQYGYLTLNNDSQSVGRSSFYCLEYFPSQMLRTGNNFTFSYTFEDVPFHSSYAHSQSLDRLMNPLIDQYLYYLARTQSNAGGTAGNRELQFYQGGPTTMAEQAKNWLPGPCFRQQRVSKTLDQNNNSNFAWTGATKYHLNGRNSLVNPGVAMATHKDDEERFFPSSGVLIFGKTGAANKTTLENVLMTNEEEIRPTNPVATEEYGTVSSNLQAANTAAQTQVVNNQGALPGMVWQNRDVYLQGPIWAKIPHTDGNFHPSPLMGGFGLKHPPPQILIKNTPVPANPPEVFTPAKFASFITQYSTGQVSVEIEWELQKENSKRWNPEIQYTSNFDKQTGVDFAVDSQGVYSEPRPIGTRYLTRNL

SEQ ID NO: 486 - DNA, 2217 bp, Adeno-associated virus
atggctgccgatggttatcttccagattggctcgaggacaacctctctgagggcattcgcgagtggtgggacctgaaacctggagccccgaaacccaaagccaaccagcaaaagcaggacgacggccggggtctggtgcttcctggctacaagtacctcggacccttcaacggactcgacaagggggagcccgtcaacgcggcggacgcagcggccctcgagcacgacaaggcctacgaccagcagctcaaagcgggtgacaatccgtacctgcggtataatcacgccgacgccgagtttcaggagcgtctgcaagaagatacgtcttttgggggcaacctcgggcgagcagtcttccaggccaagaagcgggttctcgaacctctcggtctggttgaggaaggcgctaagacggctcctggaaagaagagaccggtagagccgtcaccacagcgttcccccgactcctccacgggcatcggcaagaaaggccagcagcccgccagaaagagactcaatttcggtcagactggcgactcagagtcagtccccgaccctcaacctatcggagaacctccagcagcgccctctagtgtgggatctggtacaatggctgcaggcggtggcgcaccaatggcagacaataacgaaggtgccgacggagtgggtagttcctcgggaaattggcattgcgattccacatggctgggcgacagagtcatcaccaccagcacccgaacctgggccctgcccacctacaacaaccacctctacaagcaaatctccaacgggacctcgggaggcagcaccaacgacaacacctactttggctacagcaccccctgggggtattttgactttaacagattccactgccacttctcaccacgtgactggcagcgactcatcaacaacaactggggattccggcccaagagactcagcttcaagctcttcaacatccaggtcaaagaggtcacgcagaatgaaggcaccaagaccatcgccaataacctcaccagcaccatccaggtgtttacggactcggaataccagctgccgtacgtcctcggctctgcccaccagggctgcctgcctccgttcccggcggacgtcttcatgattcctcagtacggctacctgactctcaacaacggtagtcaggccgtgggacgttcctccttctactgcctggagtacttcccctctcagatgctgagaacgggcaacaacttttccttcagctacactttcgaggacgtgcctttccacagcagctacgcgcacagccagagtttggacaggctgatgaatcctctcatcgaccagtacctgtactacctgtcaagaacccagtctacgggaggcacagcgggaacccagcagttgctgttttctcaggccgggcctagcaacatgtcggctcaggccagaaactggctgcctggaccctgctacagacagcagcgcgtctccacgacactgtcgcaaaacaacaacagcaactttgcctggactggtgccaccaagtatcatctgaacggcagagactctctggtgaatccgggcgtcgccatggcaaccaacaaggacgacgaggaccgcttcttcccatccagcggcatcctcatgtttggcaagcagggagctggaaaagacaacgtggactatagcaacgtgatgctaaccagcgaggaagaaatcaagaccaccaaccccgtggccacagaacagtatggcgtggtggctgataacctacagcagcaaaacaccgctcctattgtgggggccgtcaacagccagggagccttacctggcatggtctggcagaaccgggacgtgtacctgcagggtcctatttgggccaagattcctcacacagatggcaactttcacccgtctcctttaatgggcggctttggacttaaacatccgcctcctcagatcctcatcaaaaacactcctgttcctgcggatcctccaacagcgttcaaccaggccaagctgaattctttcatcacgcagtacagcaccggacaagtcagcgtggagatcgtgtgggagctgcagaaggagaacagcaagcgcaggaacccagagattcagtatacttccaactactacaaatctacaaatgtggactttgctgttaatactgagggtgtttactctgagcctcgccccattggcactcgttacctcacccgtaatctgtaa

SEQ ID NO: 487 - protein, 738 aa, Adeno-associated virus
MAADGYLPDWLEDNLSEGIREWWDLKPGAPKPKANQQKQDDGRGLVLPGYKYLGPFNGLDKGEPVNAADAAALEHDKAYDQQLKAGDNPYLRYNHADAEFQERLQEDTSFGGNLGRAVFQAKKRVLEPLGLVEEGAKTAPGKKRPVEPSPQRSPDSSTGIGKKGQQPARKRLNFGQTGDSESVPDPQPIGEPPAAPSSVGSGTMAAGGGAPMADNNEGADGVGSSSGNWHCDSTWLGDRVITTSTRTWALPTYNNHLYKQISNGTSGGSTNDNTYFGYSTPWGYFDFNRFHCHFSPRDWQRLINNNWGFRPKRLSFKLFNIQVKEVTQNEGTKTIANNLTSTIQVFTDSEYQLPYVLGSAHQGCLPPFPADVFMIPQYGYLTLNNGSQAVGRSSFYCLEYFPSQMLRTGNNFSFSYTFEDVPFHSSYAHSQSLDRLMNPLIDQYLYYLSRTQSTGGTAGTQQLLFSQAGPSNMSAQARNWLPGPCYRQQRVSTTLSQNNNSNFAWTGATKYHLNGRDSLVNPGVAMATNKDDEDRFFPSSGILMFGKQGAGKDNVDYSNVMLTSEEEIKTTNPVATEQYGVVADNLQQQNTAPIVGAVNSQGALPGMVWQNRDVYLQGPIWAKIPHTDGNFHPSPLMGGFGLKHPPPQILIKNTPVPADPPTAFNQAKLNSFITQYSTGQVSVEIVWELQKENSKRRNPEIQYTSNYYKSTNVDFAVNTEGVYSEPRPIGTRYLTRNL

SEQ ID NO: 488 - protein, 738 aa, Adeno-associated virus
MAADGYLPDWLEDNLSEGIREWWDLKPGAPKPKANQQKQDDGRGLVLPGYKYLGPFNGLDKGEPVNAADAAALEHDKAYDQQLKAGDNPYLRYNHADAEFQERLQEDTSFGGNLGRAVFQAKKRVLEPLGLVEEGAKTAPGKKRPVEPSPQRSPDSSTGIGKKGQQPARKRLNFGQTGDSESVPDPQPIGEPPAAPSSVGSGTMAAGGGAPMADNNEGADGVGSSSGNWHCDSTWLGDRVITTSTRTWALPTYNNHLYKQISNGTSGGSTNDNTYFGYSTPWGYFDFNRFHCHFSPRDWQRLINNNWGFRPKRLSFKLFNIQVKEVTQNEGTKTIANNLTSTIQVFTDSEYQLPYVLGSAHQGCLPPFPADVFMIPQYGYLTLNNGSQAVGRSSFYCLEYFPSQMLRTGNNFSFSYTFEDVPFHSSYAHSQSLDRLMNPLIDQYLYYLSRTQSTGGTAGTQQLLFSQAGPSNMSAQARNWLPGPCYRQQRVSTTLSQNNNSNFAWTGATKYHLNGRDSLVNPGVAMATNKDDEDRFFPSSGILMFGKQGAGKDNVDYSNVMLTSEEEIKTTNPVATEQYGVVADNLQQQNTAPIVGAVNSQGALPGMVWQNRDVYLQGPIWAKIPHTDGNFHPSPLMGGFGLKHPPPQILIKNTPVPADPPTAFNQAKLNSFITQYSTGQVSVEIEWELQKENSKRWNPEIQYTSNYYKSTNVDFAVNTEGVYSEPRPIGTRYLTRNL

SEQ ID NO: 489 - protein, 738 aa, Adeno-associated virus
MAADGYLPDWLEDNLSEGIREWWDLKPGAPKPKANQQKQDDGRGLVLPGYKYLGPFNGLDKGEPVNAADAAALEHDKAYDQQLKAGDNPYLRYNHADAEFQERLQEDTSFGGNLGRAVFQAKKRVLEPLGLVEEGAKTAPGKKRPVEPSPQRSPDSSTGIGKKGQQPARKRLNFGQTGDSESVPDPQPIGEPPAAPSSVGSGTMAAGGGAPMADNNEGADGVGSSSGNWHCDSTWLGDRVITTSTRTWALPTYNNHLYKQISNGTSGGSTNDNTYFGYSTPWGYFDFNRFHCHFSPRDWQRLINNNWGFRPKRLSFKLFNIQVKEVTQNEGTKTIANNLTSTIQVFTDSEYQLPYVLGSAHQGCLPPFPADVFMIPQYGYLTLNNGSQAVGRSSFYCLEYFPSQMLRTGNNFSFSYTFEDVPFHSSYAHSQSLDRLMNPLIDQYLYYLSRTQSTGGTAGTQQLLFSQAGPSNMSAQARNWLPGPCYRQQRVSTTLSQNNNSNFAWTGATKYHLNGRDSLVNPGVAMATNKDDEDRFFPSSGILMFGKQGAGKDNVDYSNVMLTSEEEIKTTNPVATEQYGVVADNLQQQNTAPIVGAVNSQGALPGMVWQNRDVYLQGPIWAKIPHTDGNFHPSPLMGGFGLKHPPPQILIKNTPVPADPPTAFNQAKLNSFITQYSTGQVSVEIVWELQKENSKRWNPEIQYTSNYYKSTNVDFAVNTEGVYSEPRPIGTRYLTRNL

SEQ ID NO: 490 - protein, 738 aa, Adeno-associated virus; identical to SEQ ID NO: 488

SEQ ID NO: 491 - DNA, 2214 bp, Adeno-associated virus
atggctgctgacggttatcttccagattggctcgaggacaacctctctgagggcattcgcgagtggtgggacctgaaacctggagcccccaagcccaaggccaaccagcagaagcaggacgacggccggggtctggtgcttcctggctacaagtacctcggacccttcaacggactcgacaagggggagcccgtcaacgcggcggacgcagcggccctcgagcacgacaaggcctacgaccagcagctcaaagcgggtgacaatccgtacctgcggtataaccacgccgacgccgagtttcaggagcgtctgcaagaagatacgtcttttgggggcaacctcgggcgagcagtcttccaggccaagaagcgggttctcgaacctctcggtctggttgaggaagctgctaagacggctcctggaaagaagagaccggtagaaccgtcacctcagcgttcccccgactcctccacgggcatcggcaagaaaggccagcagcccgctagaaagagactgaactttgggcagactggcgactcagagtcagtccccgaccctcaaccaatcggagaaccaccagcaggcccctctggtctgggatctggtacaatggctgcaggcggtggcgctccaatggcagacaataacgaaggcgccgacggagtgggtaatgcctcaggaaattggcattgcgattccacatggctgggcgacagagtcatcaccaccagcacccgaacctgggctttgcccacctacaacaaccacctctacaagcaaatctccagtcagtcagcaggtagcaccaacgacaacgtctacttcggctacagcaccccctgggggtattttgacttcaacagattccactgtcacttctcaccacgtgactggcagcggctcatcaacaacaactggggattccggcccaagaagctcaacttcaagctgttcaacatccaggtcaaggaggtcacaacgaatgacggcgtcacgaccatcgccaataaccttaccagcacggttcaggtcttttcggactcggaataccagctgccctacgtcctcggctccgcacaccagggctgcctgcctccgttcccggcggacgtcttcatgattccccagtacggctacctgactctgaacaatggcagccaatcggtgggtcgttcctctttctactgcctggaatatttcccttctcaaatgctgagaacgggcaacaacttcaccttcagctacaccttcgaggacgttcccttccacagcagctacgcacacagccagagcctggaccggctgatgaatcctcttatcgaccagtacctgtattacctggccagaacacagagcaacgcaggaggcacagctggcaatcgggaactgcagttttatcagggcgggcctaccaccatggccgaacaagccaaaaactggctgcctagaccttgcttccggcaacaaagagtctccaagacgctggatcaaaacaacaacagcaactttgcttggactggtgccaccaaataccatctaaatggaagaaattcattggttaatcccggtgtcgccatggcaacccacaaggacgacgaggaacgcttcttcccttcgagcggagtcctgatttttggaaaaactggagcagctaataagactacactggaaaatgtgttaatgacaaatgaagaggaaattcgtcctaccaacccggtagccaccgaggaatacgggactgttagcagcaacctgcaggcggctaacactgcagcccagacacaagttgtcaacaaccagggagccttacctggtatggtctggcagaaccgggacgtgtacctgcagggtcccatctgggccaagattcctcacacggacggcaactttcacccgtctccgctgatgggcggctttggactgaagcatccgcctcctcagatcctgatcaaaaacactcctgttcctgctaatcccccggaggtgtttacgcctgccaagtttgcttctttcatcacacagtacagcaccggccaggtcagcgtggagatcgagtgggagctgcagaaggagaacagcaagcgctggaacccagagattcagtatacctccaattttgacaaacagactggtgtggactttgccgttgacagccagggtgtttattctgagcctcgccccattggtactcgttacctcacccgtaatctgtaa

SEQ ID NO: 492 - protein, 737 aa, Adeno-associated virus
MAADGYLPDWLEDNLSEGIREWWDLKPGAPKPKANQQKQDDGRGLVLPGYKYLGPFNGLDKGEPVNAADAAALEHDKAYDQQLKAGDNPYLRYNHADAEFQERLQEDTSFGGNLGRAVFQAKKRVLEPLGLVEEAAKTAPGKKRPVEPSPQRSPDSSTGIGKKGQQPARKRLNFGQTGDSESVPDPQPIGEPPAGPSGLGSGTMAAGGGAPMADNNEGADGVGNASGNWHCDSTWLGDRVITTSTRTWALPTYNNHLYKQISSQSAGSTNDNVYFGYSTPWGYFDFNRFHCHFSPRDWQRLINNNWGFRPKKLNFKLFNIQVKEVTTNDGVTTIANNLTSTVQVFSDSEYQLPYVLGSAHQGCLPPFPADVFMIPQYGYLTLNNGSQSVGRSSFYCLEYFPSQMLRTGNNFTFSYTFEDVPFHSSYAHSQSLDRLMNPLIDQYLYYLARTQSNAGGTAGNRELQFYQGGPTTMAEQAKNWLPRPCFRQQRVSKTLDQNNNSNFAWTGATKYHLNGRNSLVNPGVAMATHKDDEERFFPSSGVLIFGKTGAANKTTLENVLMTNEEEIRPTNPVATEEYGTVSSNLQAANTAAQTQVVNNQGALPGMVWQNRDVYLQGPIWAKIPHTDGNFHPSPLMGGFGLKHPPPQILIKNTPVPANPPEVFTPAKFASFITQYSTGQVSVEIEWELQKENSKRWNPEIQYTSNFDKQTGVDFAVDSQGVYSEPRPIGTRYLTRNL

SEQ ID NO: 493 - DNA, 2214 bp, Adeno-associated virus
atggctgctgacggttatcttccagattggctcgaggacaacctctctgagggcattcgcgagtggtgggacctgaaacctggagcccccaagcccaaggccaaccagcagaagcaggacgacggccggggtctggtgcttcctggctacaagtacctcggacccttcaacggactcgacaagggggagcccgtcaacgcggcggacgcagcggccctcgagcacgacaaggcctacgaccagcagctcaaagcgggtgacaatccgtacctgcggtataaccatgccgacgccgagtttcaggagcgtctgcaagaagatacgtcttttgggggcaacctcgggcgagcagtcctccaggccaagaagcgggttctcgaacctctcggtctggttgaggaagctgctaagacggctcctggaaagaagagaccggtagaaccgtcacctcagcgttcccccgactcctccacgggcatcggcaagaaaggccagcagcccgctagaaagagactgaactttgggcagactggcgactcagagtcagtccccgaccctcaaccaatcggagaaccaccagcaggcccctctggtctgggatctggtacaatggctgcaggcggtggcgctccaatggcagacaataacgaaggcgccgacggagtgggtaatgcctcaggaaattggcattgcgattccacatggctgggcgacagagtcatcaccaccagcacccgaacctgggctttgcccacctacaacaaccacctctacaagcaaatctccagtcagtcagcaggtagcaccaacgacaacgtctacttcggctacagcaccccctgggggtattttgacttcaacagattccactgtcacttctcaccacgtgactggcagcggctcatcaacaacaactggggattccggcccaagaagctcaacttcaagctgttcaacatccaggtcaaggaggtcacaacgaatgacggcgtcacgaccatcgccaataaccttaccagcacggttcaggtcttttcggactcggaataccagctgccctacgtcctcggctccgcacaccagggctgcctgcctccgttcccggcggacgtcttcatgattccccagtacggctacctgactctgaacaatggcagccaatcggtgggtcgttcctctttctactgcctggaatatttcccttctcaaatgctgagaacgggcaacaacttcaccttcagctacaccttcgaggacgttcccttccacagcagctacgcacacagccagagcctggaccggctgatgaatcctcttatcgaccagtacctgtattacctggccagaacacagagcaacgcaggaggcacagctggcaatcgggaactgcagttttatcagggcgggcctaccaccatggccgaacaagccaaaaactggctgcctggaccttgcttccggcaacaaagagtctccaagacgctggatcaaaacaacaacagcaactttgcttggactggtgccaccaaataccatctaaatggaagaaattcattggttaatcccggtgtcgccatggcaacccacaaggacgacgaggaacgcttcttcccttcgagcggagtcctgatttttggaaaaactggagcagctaataagactacactggaaaatgtgttaatgacaaatgaagaggaaattcgtcctaccaacccggtagccaccgaggaatacgggactgttagcagcaacctgcaggcggctaacactgcagcccagacacaagttgtcaacaaccagggagccttacctggtatggtctggcagaaccgggacgtgtacctgcagggtcccatctgggccaagattcctcacacggacggcaactttcacccgtctccgctgatgggcggctttggactgaagcatccgcctcctcagatcctgatcaaaaacactcctgttcctgctaatcccccggaggtgtttacgcctgccaagtttgcttctttcatcacacagtacagcaccggccaggtcagcgtggagatcgagtgggagctgcagaaggagaacagcaagcgctggaacccagagattcagtatacctccaattttgacaaacagactggtgtggactttgccgttgacagccagggtgtttattctgagcctcgccccattggtactcgttacctcacccgtaatctgtaa

SEQ ID NO: 494 - protein, 737 aa, Adeno-associated virus; identical to SEQ ID NO: 453

SEQ ID NO: 495 - protein, 737 aa, Adeno-associated virus
MAADGYLPDWLEDNLSEGIREWWDLKPGAPKPKANQQKQDDGRGLVLPGYKYLGPFNGLDKGEPVNAADAAALEHDKAYDQQLKAGDNPYLRYNHADAEFQERLQEDTSFGGNLGRAVLQAKKRVLEPLGLVEEAAKTAPGKKRPVEPSPQRSPDSSTGIGKKGQQPARKRLNFGQTGDSESVPDPQPIGEPPAGPSGLGSGTMAAGGGAPMADNNEGADGVGNASGNWHCDSTWLGDRVITTSTRTWALPTYNNHLYKQISSQSAGSTNDNVYFGYSTPWGYFDFNRFHCHFSPRDWQRLINNNWGFRPKKLNFKLFNIQVKEVTTNDGVTTIANNLTSTVQVFSDSEYQLPYVLGSAHQGCLPPFPADVFMIPQYGYLTLNNGSQSVGRSSFYCLEYFPSQMLRTGNNFTFSYTFEDVPFHSSYAHSQSLDRLMNPLIDQYLYYLARTQSNAGGTAGNRELQFYQGGPTTMAEQAKNWLPGPCFRQQRVSKTLDQNNNSNFAWTGATKYHLNGRNSLVNPGVAMATHKDDEERFFPSSGVLIFGKTGAANKTTLENVLMTNEEEIRPTNPVATEEYGTVSSNLQAANTAAQTQVVNNQGALPGMVWQNRDVYLQGPIWAKIPHTDGNFHPSPLMGGFGLKHPPPQILIKNTPVPANPPEVFTPAKFASFITQYSTGQVSVEIEWELQKENSKRWNPEIQYTSNFDKQTGVDFAVDSQGVYSEPRPIGTRYLTRNL

SEQ ID NO: 496 - DNA, 2217 bp, Adeno-associated virus
atggctgccgatggttatcttccagattggctcgaggacaacctctctgagggcattcgcgagtggtgggacctgaaacctggagccccgaaacccaaagccaaccagcaaaagcaggacgacggccggggtctggtgcttcctggctacaagtacctcggacccttcaacggactcgacaagggggagcccgtcaacgcggcggacgcagcggccctcgagcacgacaaggcctacgaccagcagctcaaagcgggtgacaatccgtacctgcggtataatcacgccgacgccgagtttcaggagcgtctgcaagaagatacgtcttttgggggcaacctcgggcgagcagtcttccaggccaagaagcgggttctcgaacctctcggtctggttgaggaaggcgctaagacggctcctggaaagaagagaccggtagagccgtcaccacagcgttcccccgactcctccacgggcatcggcaagaaaggccagcagcccgccagaaagagactcaatttcggtcagactggcgactcagagtcagtccccgaccctcaacctatcggagaacctccagcagcgccctctagtgtgggatctggtacaatggctgcaggcggtggcgcaccaatggcagacaataacgaaggtgccgacggagtgggtagttcctcgggaaattggcattgcgattccacatggctgggcgacagagtcatcaccaccagcacccgaacctgggccctgcccacctacaacaaccacctctacaagcaaatctccaacgggacctcgggaggcagcaccaacgacaacacctactttggctacagcaccccctgggggtattttgactttaacagattccactgccacttctcaccacgtgactggcagcgactcatcaacaacaactggggattccggcccaagagactcagcttcaagctcttcaacatccaggtcaaagaggtcacgcagaatgaaggcaccaagaccatcgccaataacctcaccagcaccatccaggtgtttacggactcggaataccagctgccgtacgtcctcggctctgcccaccagggctgcctgcctccgttcccggcggacgtcttcatgattcctcagtacggctacctgactctcaacaacggtagtcaggccgtgggacgttcctccttctactgcctggagtacttcccctctcagatgctgagaacgggcaacaacttttccttcagctacactttcgaggacgtgcctttccacagcagctacgcgcacagccagagtttggacaggctgatgaatcctctcatcgaccagtacctgtactacctgtcaagaacccagtctacgggaggcacagcgggaacccagcagttgctgttttctcaggccgggcctagcaacatgtcggctcaggccagaaactggctgcctggaccctgctacagacagcagcgcgtctccacgacactgtcgcaaaacaacaacagcaactttgcctggactggtgccaccaagtatcatctgaacggcagagactctctggtgaatccgggcgtcgccatggcaaccaacaaggacgacgaggaccgcttcttcccacccagcggcatcctcatgtttggcaagcagggagctggaaaagacaacgtggactatagcaacgtgatgctaaccagcgaggaagaaatcaagaccaccaaccccgtggccacagaacagtatggcgtggtggctgataacctacagcagcaaaacaccgctcctattgtgggggccgtcaacagccagggagccttacctggcatggtctggcagaaccgggacgtgtacctgcagggtcctatttgggccaagattcctcacacagatggcaactttcacccgtctcctttaatgggcggctttggacttaaacatccgcctcctcagatcctcatcaaaaacactcctgttcctgcggatcctccaacagcgttcaaccaggccaagctgaattctttcatcacgcagtacagcaccggacaagtcagcgtggtgatcgagtgggagctgcagaaggagaacagcaagcgctggaacccagagattcagtatacttccaactactacaaatctacaaatgtggactttgctgttaatactgagggtgtttactctgagcttcgccccattggcactcgttacctcacccgtaatctgtaa

SEQ ID NO: 497 - protein, 738 aa, Adeno-associated virus
MAADGYLPDWLEDNLSEGIREWWDLKPGAPKPKANQQKQDDGRGLVLPGYKYLGPFNGLDKGEPVNAADAAALEHDKAYDQQLKAGDNPYLRYNHADAEFQERLQEDTSFGGNLGRAVFQAKKRVLEPLGLVEEGAKTAPGKKRPVEPSPQRSPDSSTGIGKKGQQPARKRLNFGQTGDSESVPDPQPIGEPPAAPSSVGSGTMAAGGGAPMADNNEGADGVGSSSGNWHCDSTWLGDRVITTSTRTWALPTYNNHLYKQISNGTSGGSTNDNTYFGYSTPWGYFDFNRFHCHFSPRDWQRLINNNWGFRPKRLSFKLFNIQVKEVTQNEGTKTIANNLTSTIQVFTDSEYQLPYVLGSAHQGCLPPFPADVFMIPQYGYLTLNNGSQAVGRSSFYCLEYFPSQMLRTGNNFSFSYTFEDVPFHSSYAHSQSLDRLMNPLIDQYLYYLSRTQSTGGTAGTQQLLFSQAGPSNMSAQARNWLPGPCYRQQRVSTTLSQNNNSNFAWTGATKYHLNGRDSLVNPGVAMATNKDDEDRFFPPSGILMFGKQGAGKDNVDYSNVMLTSEEEIKTTNPVATEQYGVVADNLQQQNTAPIVGAVNSQGALPGMVWQNRDVYLQGPIWAKIPHTDGNFHPSPLMGGFGLKHPPPQILIKNTPVPADPPTAFNQAKLNSFITQYSTGQVSVVIEWELQKENSKRWNPEIQYTSNYYKSTNVDFAVNTEGVYSELRPIGTRYLTRNL

SEQ ID NO: 498 - DNA, 2214 bp, Adeno-associated virus
atggctgctgacggttatcttccagattggctcgaggacaacctctctgagggcattcgcgagtggtgggacctgaaacctggagcccccaagcccaaggccaaccagcagaagcaggacgacggccggggtctggtgcttcctggctacaagtacctcggacccttcaacggactcgacaagggggagcccgtcaacgcggcggacgcagcggccctcgagcacgacaaggcctacgaccagcagctcaaagcgggtgacaatccgtacctgcggtataaccacgccgacgccgagtttcaggagcgtctgcaagaagatacgtcttttgggggcaacctcgggcgagcagtcttccaggccaagaagcgggttctcgaacctctcggtctggttgaggaagctgctaagacggctcctggaaagaagagaccggtagaaccgtcacctcagcgttcccccgactcctccacgggcatcggcaagaaaggccagcagcccgctagaaagagactgaactttgggcagactggcgactcagagtcagtccccgaccctcaaccaatcggagaaccaccagcaggcccctctggtctgggatctggtacaatggctgcaggcggtggcgccccaatggcagacaataacgaaggcgccgacggagtgggtaatgcctcaggaaattggcattgcgattccacatggctgggcgacagagtcatcaccaccagcacccgaacctgggctttgcccacctacaacaaccacctctacaagcaaatctccagtcagtcagcaggtagcaccaacgacaacgtctacttcggctacagcaccccctgggggtattttgacttcaacagattccactgtcacttctcaccacgtgactggcagcggctcatcaacaacaactggggattccggcccaagaagctcaacttcaagctgttcaacatccaggtcaaggaggtcacaacgaatgacggcgtcacgaccatcgccaataaccttaccagcacggttcaggtcttttcggactcggaataccagctgccctacgtcctcggctccgcacaccagggctgcctgcctccgttcccggcggacgtcttcatgattccccagtacggctacctgactctgaacaatggcagccaatcggtgggtcgttcctctttctactgcctggaatatttcccttctcaaatgctgagaacgggcaacaacttcaccatcagctacaccttcgaggacgttcccttccacagcagctacgcacacagccagagcctggaccggctgatgaatcctcttatcgaccagtacctgtattacctggccagaacacagagcaacgcaggaggcacagctggcaatcaggaactgcagttttatcagggcgggcctaccaccatggccgaacaagccaaaaactggctgcctggaccttgcttccggcaacaaagagtctccaagacgctggatcaaaacaacaacagcaactttgcttggactggtgccaccaaataccatctaaatggaagaaattcattggttaatcccggtgtcgccatggcaacccacaaggacgacgaggaacgcttcttcccttcgagcggagtcctgatttttggaaaaactggagcagctaataagactacactggaaaatgtgttaatgacaaatgaagaggaaattcgtcctaccaacccggtagccaccgaggaatacgggactgttagcagcaacctgcaggcggctaacactgcagcccagacacaagttgtcaacaaccagggagccttacctggtatggtctggcagaaccgggacgtgtacctgcagggtcccatctgggccaagattcctcacacagatggcaactttcacccgtctcctttaatgggcggctttggacttaaacatccgcctcctcagatcctcatcaaaaacactcctgttcctgcggatcctccaacagcgttcaaccaggccaagctgaattctttcatcacgcagtacagcaccggacaagtcagcgtggagatcgagtgggagctgcagaaggagaacagcaagcgctggaacccagagattcagtatacttccaactactacaaatctacaaatgtggactttgctgttaatactgagggtgtttactctgagcctcgccccattggcactcgttacctcacccgtaatctgtaa

SEQ ID NO: 499 - protein, 737 aa, Adeno-associated virus
MAADGYLPDWLEDNLSEGIREWWDLKPGAPKPKANQQKQDDGRGLVLPGYKYLGPFNGLDKGEPVNAADAAALEHDKAYDQQLKAGDNPYLRYNHADAEFQERLQEDTSFGGNLGRAVFQAKKRVLEPLGLVEEAAKTAPGKKRPVEPSPQRSPDSSTGIGKKGQQPARKRLNFGQTGDSESVPDPQPIGEPPAGPSGLGSGTMAAGGGAPMADNNEGADGVGNASGNWHCDSTWLGDRVITTSTRTWALPTYNNHLYKQISSQSAGSTNDNVYFGYSTPWGYFDFNRFHCHFSPRDWQRLINNNWGFRPKKLNFKLFNIQVKEVTTNDGVTTIANNLTSTVQVFSDSEYQLPYVLGSAHQGCLPPFPADVFMIPQYGYLTLNNGSQSVGRSSFYCLEYFPSQMLRTGNNFTISYTFEDVPFHSSYAHSQSLDRLMNPLIDQYLYYLARTQSNAGGTAGNQELQFYQGGPTTMAEQAKNWLPGPCFRQQRVSKTLDQNNNSNFAWTGATKYHLNGRNSLVNPGVAMATHKDDEERFFPSSGVLIFGKTGAANKTTLENVLMTNEEEIRPTNPVATEEYGTVSSNLQAANTAAQTQVVNNQGALPGMVWQNRDVYLQGPIWAKIPHTDGNFHPSPLMGGFGLKHPPPQILIKNTPVPADPPTAFNQAKLNSFITQYSTGQVSVEIEWELQKENSKRWNPEIQYTSNYYKSTNVDFAVNTEGVYSEPRPIGTRYLTRNL

SEQ ID NO: 500 - DNA, 2217 bp, Adeno-associated virus
atggctgccgatggttatcttccagattggctcgaggacaacctctctgagggcattcgcgagtggtgggacctgaaacctggagccccgaaacccaaagccaaccagcaaaagcaggacgacggccggggtctggtgcttcctggctacaagtacctcggacccttcaacggactcgacaagggggagcccgtcaacgcggcggacgcagcggccctcgagcacgacaaggcctacgaccagcagctcaaagcgggtgacaatccgtacctgcggtataatcacgccgacgccgagtttcaggagcgtctgcaagaagatacgtcttttgggggcaacctcgggcgagcagtcttccaggccaagaagcgggttctcgaacctctcggtctggttgaggaaggcgctaagacggctcctggaaagaagagaccggtagagccgtcaccacagcgttcccccgactcctccacgggcatcggcaagaaaggccagcagcccgccagaaagagactcaatttcggtcagactggcgactcagagtcagtccccgaccctcaacctatcggagaacctccagcagcgccctctagtgtgggatctggtacaatggctgcaggcggtggcgcaccaatggcagacaataacgaaggtgccgacggagtgggtagttcctcgggaaattggcattgcgattccacatggctgggcgacagagtcatcaccaccagcacccgaacctgggccctgcccgcctacaacaaccacctctacaagcaaatctccaacgggacctcgggaggcagcaccaacgacaacacctactttggctacagcaccccctgggggtattttgactttaacagattccactgccacttctcaccacgtgactggcagcgactcatcaacaacaactggggattccggcccaagagactcagcttcaagctcttcaacatccaggtcaaagaggtcacgcagaatgaaggcaccaagaccatcgccaataacctcaccagcaccatccaggtgtttacggactcggaataccagctgccgtacgtcctcggctctgcccaccagggctgcctgcctccgttcccggcggatgtcttcatgattcctcagtacggctacctgactctcaacaacggtagtcaggccgtgggacgttcctccttctactgcctggagtacttcccctctcagatgctgagaacgggcaacaacttttccttcagctacactttcgaggacgtgcctttccacagcagctacgcgcacagccagagtttggacaggctgatgaatcctctcatcgaccagtacctgtactacctgtcaagaacccagtctacgggaggcacagcgggaacccagcagttgctgttttctcaggccgggcctagcaacatgtcggctcaggccagaaactggctgcctggaccctgctacagacagcagcgcgtctccacgacactgtcgcaaaacaacaacagcaactttgcctggactggtgccaccaagtatcatctgagcggcagagactctctggtgaatccgggcgtcgccatggcaaccaacaaggacgacgaggaccgcttcttcccatccagcggcatcctcatgtttggcaagcagggagctggaaaagacaacgtggactatagcaacgtgatgctaaccagcgaggaagaaatcaagaccaccaaccccgtggccacagaacagtatggcgtggtggctgataacctacagcagcaaaacaccgctcctattgtgggggccgtcaacagccagggagccttacctggcatggtctggcagaaccgggacgtgtacctgcagggtcctatttgggccaagattcctcacacagatggcaactttcacccgtctcctttaatgggcggctttggacttaaacatccgcctcctcagatcctcatcaaaaacactcctgttcctgcggatcctccaacagcgttcaaccaggccaagctgaattcttccatcacgcagtacagcaccggacaagtcagcgtggagatcgagtgggagctgcagaaggagaacagcaagcgctggaacccagagattcagtatacttccaactactacaaatctacaaatgtggactttgctgttaatactgagggtgtttactctgagcctcgccccattggcactcgttacctcacccgtaatttgtaa

SEQ ID NO: 501 - protein, 738 aa, Adeno-associated virus
MAADGYLPDWLEDNLSEGIREWWDLKPGAPKPKANQQKQDDGRGLVLPGYKYLGPFNGLDKGEPVNAADAAALEHDKAYDQQLKAGDNPYLRYNHADAEFQERLQEDTSFGGNLGRAVFQAKKRVLEPLGLVEEGAKTAPGKKRPVEPSPQRSPDSSTGIGKKGQQPARKRLNFGQTGDSESVPDPQPIGEPPAAPSSVGSGTMAAGGGAPMADNNEGADGVGSSSGNWHCDSTWLGDRVITTSTRTWALPAYNNHLYKQISNGTSGGSTNDNTYFGYSTPWGYFDFNRFHCHFSPRDWQRLINNNWGFRPKRLSFKLFNIQVKEVTQNEGTKTIANNLTSTIQVFTDSEYQLPYVLGSAHQGCLPPFPADVFMIPQYGYLTLNNGSQAVGRSSFYCLEYFPSQMLRTGNNFSFSYTFEDVPFHSSYAHSQSLDRLMNPLIDQYLYYLSRTQSTGGTAGTQQLLFSQAGPSNMSAQARNWLPGPCYRQQRVSTTLSQNNNSNFAWTGATKYHLSGRDSLVNPGVAMATNKDDEDRFFPSSGILMFGKQGAGKDNVDYSNVMLTSEEEIKTTNPVATEQYGVVADNLQQQNTAPIVGAVNSQGALPGMVWQNRDVYLQGPIWAKIPHTDGNFHPSPLMGGFGLKHPPPQILIKNTPVPADPPTAFNQAKLNSSITQYSTGQVSVEIEWELQKENSKRWNPEIQYTSNYYKSTNVDFAVNTEGVYSEPRPIGTRYLTRNL

SEQ ID NO: 502 - protein, 736 aa, Adeno-associated virus; identical to SEQ ID NO: 2

SEQ ID NO: 503 - DNA, 2217 bp, Adeno-associated virus
atggctgctgacggttatcttccagattggctcgaggacaacctctctgagggcattcgcgagtggtgggacctgaaacctggagcccccaagcccaaggccaaccagcagaagcaggacgacggccggggtctggtgcttcctggctacaagtacctcggacccttcaacggactcgacaagggggagcccgtcaacgcggcggacgcagcggccctcgagcacgacaaggcctacgaccagcagctcaaagcgggtgacaatccgtacctgcggtataaccacgccgacgccgagtttcaggagcgtctgcaagaagatacgtcttttgggggcaacctcgggcgagcagtcttccaggccaagaagcgggttctcgaacctctcggtctggttgaggaagctgctaagacggctcctggaaagaagagaccggtagaaccgtcacctcagcgttcccccgactcctccacgggcatcggcaagaaaggccagcagcccgctaaaaagagactgaactttggtcagactggcgactcagagtcagtccccgaccctcaaccaatcggagaaccaccagcaggcccctctggtctgggatctggtacaatggctgcaggcggtggcgctccaatggcagacaataacgaaggcgccgacggagtgggtagttcctcaggaaattggcattgcgattccacatggctgggcgacagagtcatcaccaccagcacccgaacctgggccctgcccacctacaacaaccacctctacaagcaaatatccaatgggacatcgggaggaagcaccaacgacaacacctacttcggctacagcaccccctgggggtattttgacttcaacagattccactgccacttctcaccacgtgactggcagcgactcatcaacaacaactggggattccggccaaaaagactcagcttcaagctcttcaacatccaggtcaaggaggtcacgcagaatgaaggcaccaagaccatcgccaataaccttaccagcacgattcaggtatttacggactcggaataccagctgccgtacgtcctcggctccgcgcaccagggctgcctgcctccgttcccggcggacgtcttcatgattccccagtacggctaccttacactgaacaatggaagtcaagccgtaggccgttcctccttctactgcctggaatattttccatctcaaatgctgcgaactggaaacaattttgaattcagctacaccttcgaggacgtgcctttccacagcagctacgcacacagccagagcttggaccgactgatgaatcctctcatcgaccagtacctgtactacttatccagaactcagtccacaggaggaactcaaggtacccagcaattgttattttctcaagctgggcctgcaaacatgtcggctcaggctaagaactggctacctggaccttgctaccggcagcagcgagtctctacgacactgtcgcaaaacaacaacagcaactttgcttggactggtgccaccaaatatcacctgaacggaagagactctttggtaaatcccggtgtcgccatggcaacccacaaggacgacgaggaacgcttcttcccgtcgagtggagtcctgatgtttggaaaacagggtgctggaagagacaatgtggactacagcagcgttatgctaaccagcgaagaagaaattaaaaccactaaccctgtagccacagaacaatacggtgtggtggctgacaacttgcagcaaaccaatacagggcctattgtgggaaatgtcaacagccaaggagccttacctggcatggtctggcagaaccgagacgtgtacctgcagggtcccatctgggccaagattcctcacacggacggcaacttccacccttcaccgctaatgggaggatttggactgaagcacccacctcctcagatcctgatcaagaacacgccggtacctgcggatcctccaacaacgttcagccaggcgaaattggcttccttcattacgcagtacagcaccggacaggtcagcgtggaaatcgagtgggagctgcagaaggagaacagcaaacgctggaacccagagattcagtacacttcaaactactacaaatctacaaatgtggactttgctgtcaatacagagggaacttattctgagcctcgccccattggtactcgttacctcacccgtaatctgtaa

SEQ ID NO: 504 - protein, 738 aa, Adeno-associated virus
MAADGYLPDWLEDNLSEGIREWWDLKPGAPKPKANQQKQDDGRGLVLPGYKYLGPFNGLDKGEPVNAADAAALEHDKAYDQQLKAGDNPYLRYNHADAEFQERLQEDTSFGGNLGRAVFQAKKRVLEPLGLVEEGAKTAPGKKRPVEPSPQRSPDSSTGIGKKGQQPARKRLNFGQTGDSESVPDPQPLGEPPAAPSSVGSGTMAAGGGAPMADNNEGADGVGSSSGNWHCDSTWLGDRVITTSTRTWALPTYNNHLYKQISNGTSGGSTNDNTYFGYSTPWGYFDFNRFHCHFSPRDWQRLINNNWGFRPKRLSFKLFNIQVKEVTQNEGTKTIANNLTSTIQVFTDSEYQLPYVLGSAHQGCLPPFPADVFMIPQYGYLTLNNGSQAVGRSSFYCLEYFPSQMLRTGNNFSFSYTFEDVPFHSSYAHSQSLDRLMNPLIDQYLYYLSRTQSTGGTAGTQQLLFSQAGPSNMSAQARNWLPGPCYRQQRVSTTLSQNNNSNFAWTGATKYHLNGRDSLVNPGVAMATNKDDEDRFFPSSGILMFGKQGAGKDNVDYSNVMLTSEEEIKTTNPVATEQYGVVADNLQRQNTAPIVGAVNSQGALPGMVWQNRDVYLQGPIWAKIPHTDGNFHPSPLMGGFGLKHPPPQILIKNTPVPADPPTAFNQAKLNSFITQYSTGQVSVEIEWELQKENSKRWNPEIQYTSNYYKSTNVDFAVNTEGVYSEPRPIGTRYLTRNL

SEQ ID NO: 505 - protein, 736 aa, Adeno-associated virus
MAADGYLPDWLEDNLSEGIREWLNLKPGAPQPKANQQKQDNARGLVLPGYKYLGPFNGLDKGDPVNEADAAALEHDKAYGQQLKAGDNPYLKYNHADAEFQERLQKDTSFGGNLGKAVFQAKKRILEPLGLVETPAKTAPGKKRPVDPSPQRSPDSSSGIGKKSPHPARKRLNFGQTGEAESVPDPQPIGEPPSDPSSVGSGTMAAGGGAPMADNNEGADGVGNSSGNWHCDSTWLGDRVITTSTRTWALPTYNNHLYKQISSQSGATNDNHYFGYSTPWGYFDFNRFHCHFSPRDWQRLINNNWGFRPKRLSFKLFNIQVKEVTQNDGTTTIANNLTSTVQVFTDSEYQLPYVLGSAHQGCLPPFPADVFMIPQYGYLTLNNGSQAVGRSSFYCLEYFPSQMLRTGNNFQFSYTFEDVPFHSSYAHSQSLDRLMNPLIDQYLYYLSKTQGTNATVQGAKLQFSQAGPSNMRDQARNWLPGPCYRQQRVSKTANDNNNSEYAWTGATKYHLNGRDSLVNPGPAMASHKDDEEKFFPMNGTLVFGKNGAGNSNVDIENVMITDEEEIRTTNPVATEQYGVVSDNLQSSNTRPITGDVDSQGVLPGMVWQDRDVYLQGPIWAKIPHTDGHFHPSPLMGGFGLKHPPPQILIKNTPVPANPATTFTPGKFASFITQYSTGQVSVQIEWELQKENSKRWNPEIQYTSNYNKSVNVDFTVDTNGVYSEPRPIGTRYLTRNL

SEQ ID NO: 506 - protein, 736 aa, Adeno-associated virus; identical to SEQ ID NO: 81

SEQ ID NO: 507 - protein, 736 aa, Adeno-associated virus
MAADGYLPDWLEDNLSEGIREWWDLKPGAPKPKANQQKQDDGRGLVLPGYKYLGPFNGLDKGEPVNAADAAALEHDKAYDQQLKAGDNPYLRYNHADAEFQERLQEDTSFGGNLGRAVFQAKKRVLEPLGLVEEGAKTAPGKKRPVEQSPQEPDSSSGIGKTGQQPAKKRLNFGQTGDSESVPDPQPLGEPPAAPSGLGPNTMASGGGAPMADNNEGADGVGNSSGNWHCDSTWLGDRVITTSTRTWALPTYNNHLYKQISNGTSGGSTNDNTYFGYSTPWGYFDFNRFHCHFSPRDWQRLINNNWGFRPKRLNFKLFNIQVKEVTTNEGTKTIANNLTSTVQVFTDSEYQLPYVLGSAHQGCLPPFPADVFMVPQYGYLTLNNGSQALGRSSFYCLEYFPSQMLRTGNNFQFSYTFEDVPFHSSYAHSQSLDRLMNPLIDQYLYYLVRTQTTGTGGTQTLAFSQAGPSSMANQARNWVPGPCYRQQRVSTTTNQNNNSNFAWTGAAKFKLNGRDSLMNPGVAMASHKDDEDRFFPSSGVLIFGKQGAGNDGVDYSQVLITDEEEIKATNPVATEEYGAVAINNQAANTQAQTGLVHNQGVIPGMVWQNRDVYLQGPIWAKIPHTDGNFHPSPLMGGFGLKHPPPQILIKNTPVPADPPLTFNQAKLNSFITQYSTGQVSVEIEWELQKENSKRWNPEIQYTSNYYKSTNVDFAVNTEGVYSEPRPIGTRYLTRNL

SEQ ID NO: 508 - protein, 736 aa, Artificial Sequence; identical to SEQ ID NO: 507
  source: /note="Description of Artificial Sequence: Synthetic polypeptide"

SEQ ID NO: 509 - protein, 736 aa, Artificial Sequence
  source: /note="Description of Artificial Sequence: Synthetic polypeptide"
MAADGYLPDWLEDNLSEGIREWWDLKPGAPKPKANQQKQDDGRGLVLPGYKYLGPFNGLDKGEPVNAADAAALEHDKAYDQQLKAGDNPYLRYNHADAEFQERLQEDTSFGGNLGRAVFQAKKRVLEPLGLVEEGAKTAPGKKRPVEQSPQEPDSSSGIGKTGQQPAKKRLNFGQTGDSESVPDPQPLGEPPAAPSGLGPNTMASGGGAPMADNNEGADGVGNSSGNWHCDSTWLGDRVITTSTRTWALPTYNNHLYKQISNGTSGGSTNDNTYFGYSTPWGYFDFNRFHCHFSPRDWQRLINNNWGFRPKRLNFKLFNIQVKEVTTNEGTKTIANNLTSTVQVFTDSEYQLPYVLGSAHQGCLPPFPADVFMVPQYGYLTLNNGSQALGRSSFYCLEYFPSQMLRTGNNFQFSYTFEDVPFHSSYAHSQSLDRLMNPLIDQYLYYLVRTQTTGTGGTQTLAFSQAGPSSMANQARNWVPGPCYRQQRVSTTTNQNNNSNFAWTGAAKFKLNGRDSLMNPGVAMASHKDDEDRFFPSSGVLIFGKQGAGNDGVDYSQVLITDEEEIKATNPVATEEYGAVAINNQRANTQAQTGLVHNQGVIPGMVWQNRDVYLQGPIWAKIPHTDGNFHPSPLMGGFGLKHPPPQILIKNTPVPADPPLTFNQAKLNSFITQYSTGQVSVEIEWELQKENSKRWNPEIQYTSNYYKSTNVDFAVNTEGVYSEPRPIGTRYLTRNL

SEQ ID NO: 510 - protein, 736 aa, Artificial Sequence
  source: /note="Description of Artificial Sequence: Synthetic polypeptide"
MAADGYLPDWLEDNLSEGIREWWDLKPGAPKPKANQQKQDDGRGLVLPGYKYLGPFNGLDKGEPVNAADAAALEHDKAYDQQLKAGDNPYLRYNHADAEFQERLQEDTSFGGNLGRAVFQAKKRVLEPLGLVEEGAKTAPGKKRPVEQSPQEPDSSSGIGKTGQQPAKKRLNFGQTGDSESVPDPQPLGEPPAAPSGLGPNTMASGGGAPMADNNEGADGVGNSSGNWHCDSTWLGDRVITTSTRTWALPTYNNHLYKQISNGTSGGSTNDNTYFGYSTPWGYFDFNRFHCHFSPRDWQRLINNNWGFRPKRLNFKLFNIQVKEVTTNEGTKTIANNLTSTVQVFTDSEYQLPYVLGSAHQGCLPPFPADVFMVPQYGYLTLNNGSQALGRSSFYCLEYFPSQMLRTGNNFQFSYTFEDVPFHSSYAHSQSLDRLMNPLIDQYLYYLVRTQTTGTGGTQTLAFSQAGPSSMANQARNWVPGPCYRQQRVSTTTNQNNNSNFAWTGAAKFKLNGRDSLMNPGVAMASHKDDEDAFFPSSGVLIFGKQGAGNDGVDYSQVLITDEEEIKATNPVATEEYGAVAINNQAANTQAQTGLVHNQGVIPGMVWQNRDVYLQGPIWAKIPHTDGNFHPSPLMGGFGLKHPPPQILIKNTPVPADPPLTFNQAKLNSFITQYSTGQVSVEIEWELQKENSKRWNPEIQYTSNYYKSTNVDFAVNTEGVYSEPRPIGTRYLTRNL

SEQ ID NO: 511 - DNA, 1803 bp, Bovine adeno-associated virus
acggcgcctgcggcaaaaaagaggcctctagagcagagtcctcaagagccagactcctcgagcggagttggcaagaaaggcaaacagcctgccagaaagagactcaactttgacgacgaacctggagccggagacgggcctcccccagaaggaccatcttccggagctatgtctactgagactgaaatgcgtgcagcagctggcggaaatggtggcgatgcgggacaaggtgccgagggagtgggtaatgcctccggtgattggcattgcgattccacttggtcagagagccacgtcaccaccacctcaacccgcacctgggtcctgccgacctacaacaaccacctgtacctgcggctcggctcgagcaacgccagcgacaccttcaacggattctccaccccctggggatactttgactttaaccgcttccactgccacttctcgccaagagactggcaaaggctcatcaacaaccactggggactgcgccccaaaagcatgcaagtccgcatcttcaacatccaagttaaggaggtcacgacgtctaacggggagacgaccgtatccaacaacctcaccagcacggtccagatctttgcggacagcacgtacgagctcccgtacgtgatggatgcaggtcaggagggcagcttgcctcctttccccaacgacgtgttcatggtgcctcagtacgggtactgcggactggtaaccggaggcagctctcaaaaccagacagacagaaatgccttctactgtctggagtactttcccagccagatgctgagaaccggaaacaactttgagatggtgtacaagtttgaaaacgtgcccttccactccatgtacgctcacagccagagcctggataggctgatgaacccgctgctggaccagtacctgtgggagctccagtctaccacctctggaggaactctcaaccagggcaattcagccaccaactttgccaagctgaccaaaacaaacttttctggctaccgcaaaaactggctcccggggcccatgatgaagcagcagagattctccaagactgccagtcaaaactacaagattccccagggaagaaacaacagtctgctccattatgagaccagaactaccctcgacggaagatggagcaattttgccccgggaacggccatggcaaccgcagccaacgacgccaccgacttctctcaggcccagctcatctttgcggggcccaacatcaccggcaacaccaccacagatgccaataacctgatgttcacttcagaagatgaacttagggccaccaacccccgggacactgacctgtttggccacctggcaaccaaccagcaaaacgccaccaccgttcctaccgtagacgacgtggacggagtcggcgtgtacccgggaatggtgtggcaggacagagacatttactaccaagggcccatttgggccaaaattccacacacggatggacactttcacccgtctcctctcattggcggatttggactgaaaagcccgcctccacaaatattcatcaaaaacactcctgtacccgccaatcccgcaacgaccttctctccggccagaatcaacagcttcatcacccagtacagcaccggacaggtggctgtcaaaatagaatgggaaatccagaaggagcggtccaagagatggaacccagaggtccagttcacgtccaactacggagcacaggactcgcttctctgggctcccgacaacgccggagcctacaaagagcccagggccattggatcccgatacctcaccaaccacctctag

SEQ ID NO: 512 - DNA, 1617 bp, Bovine adeno-associated virus
atgcgtgcagcagctggcggaaatggtggcgatgcgggacaaggtgccgagggagtgggtaatgcctccggtgattggcattgcgattccacttggtcagagagccacgtcaccaccacctcaacccgcacctgggtcctgccgacctacaacaaccacctgtacctgcggctcggctcgagcaacgccagcgacaccttcaacggattctccaccccctggggatactttgactttaaccgcttccactgccacttctcgccaagagactggcaaaggctcatcaacaaccactggggactgcgccccaaaagcatgcaagtccgcatcttcaacatccaagttaaggaggtcacgacgtctaacggggagacgaccgtatccaacaacctcaccagcacggtccagatctttgcggacagcacgtacgagctcccgtacgtgatggatgcaggtcaggagggcagcttgcctcctttccccaacgacgtgttcatggtgcctcagtacgggtactgcggactggtaaccggaggcagctctcaaaaccagacagacagaaatgccttctactgtctggagtactttcccagccagatgctgagaaccggaaacaactttgagatggtgtacaagtttgaaaacgtgcccttccactccatgtacgctcacagccagagcctggataggctgatgaacccgctgctggaccagtacctgtgggagctccagtctaccacctctggaggaactctcaaccagggcaattcagccaccaactttgccaagctgaccaaaacaaacttttctggctaccgcaaaaactggctcccggggcccatgatgaagcagcagagattctccaagactgccagtcaaaactacaagattccccagggaagaaacaacagtctgctccattatgagaccagaactaccctcgacggaagatggagcaattttgccccgggaacggccatggcaaccgcagccaacgacgccaccgacttctctcaggcccagctcatctttgcggggcccaacatcaccggcaacaccaccacagatgccaataacctgatgttcacttcagaagatgaacttagggccaccaacccccgggacactgacctgtttggccacctggcaaccaaccagcaaaacgccaccaccgttcctaccgtagacgacgtggacggagtcggcgtgtacccgggaatggtgtggcaggacagagacatttactaccaagggcccatttgggccaaaattccacacacggatggacactttcacccgtctcctctcattggcggatttggactgaaaagcccgcctccacaaatattcatcaaaaacactcctgtacccgccaatcccgcaacgaccttctctccggccagaatcaacagcttcatcacccagtacagcaccggacaggtggctgtcaaaatagaatgggaaatccagaaggagcggtccaagagatggaacccagaggtccagttcacgtccaactacggagcacaggactcgcttctctgggctcccgacaacgccggagcctacaaagagcccagggccattggatcccgatacctcaccaaccacctctag

SEQ ID NO: 513 - DNA, 1173 bp, Bovine adeno-associated virus
atggcgctggtaagctggctggtggaacatggcatcacttccgagaagcagtggattcaggagaatcaggagagctacctgtccttcaactccacgggaaactctcggagccagattaaagccgcgcttgacaacgcgtcaaaaattatgagtctgaccaaatctgcctcagactatctcgtgggacagactgttccagaggacatttctgaaaacagaatctggcagatttttgatctcaacggctacgacccggcatacgcgggctctgttctctacggctggtgcactcgcgcctttggaaagaggaacaccgtctggctgtatggacccgcgaccaccggaaagaccaacatcgcggaagccatctctcacaccgtgcccttttatggctgtgtgaactggactaatgagaactttccctttaatgactgtgtggaaaaaatgttgatctggtgggaggagggaaagatgaccagcaaggtggtggaacccgccaaggccatcttgggggggtctagagtacgagtggatcaaaaatgtaaatcctctgtacaagtagactctaccccggtgattatcacctccaatactaacatgtgtgtggtggtggatgggaactccacgacctttgaacaccagcagccgctggaagaccgcatgttcagatttgaactcatgcggcggctcccgccagattttggcaagattaccaagcaggaagtcaaagacttttttgcttgggcaaaggtcaaccaggtgccggtgactcacgagtttatggttcccaagaaagtggcgggaactgagagggcggagacttctagaaaacgcccactggatgacgtcaccaataccaactataaaagtccggagaagcgggcccggctctcagttgttcctgagacgcctcgcagttcagacgtgcctgtagagcccgctcctctgcgacctctcaactggtcttccaggtatgaatgcagatgtgactatcatgctaaatttgactctgtaacgggggaatgtgacgagtgtgaatatttgaatcggggcaaaaatggctgtatctttcataatgctacacattgtcaaatttgtcacgctgttcctccatgggaaaaggaaaatgtgtcagattttaatgattttgatgactgtaataaagagcagtaa

SEQ ID NO: 514 - DNA, 1833 bp, Bovine adeno-associated virus
atggctaccttctatgaagtcattgttcgcgttccatttgatgtggaagagcacctgcctggaatttctgacaactttgtagactgggtaactggtcaaatttgggagctgcctcccgagtcagatttgaatttgactctgattgagcagcctcagctgacggtggctgacagaattcgccgcgtgttcctgtacgagtggaacaaattttccaagcaggagagcaaattctttgtgcagtttgaaaagggatctgaatattttcatctgcacacgctcgtggagacctccggcatctcttctatggtccttggccgctacgtgagtcagattcgcgcccagctggtgaaggtggtgttccagaacattgagccgcggattaacgactgggtcgccatcaccaaggtaaagaagggcggagccaataaggtggtggattctgggtatattcccgcctacctgctgccgaaggtccaaccagagcttcagtgggcgtggactaacctcgaagagtataaattggccgccctcaatctggaggagcgcaaacggctcgtcgctcagtttcagcttgagtcctcgcagcgctcgcaagaggcatcttcccagagggacgtttcggctgacccggtcatcaagagcaagacttcccagaaatacatggcgctggtaagctggctggtggaacatggcatcacttccgagaagcagtggattcaggagaatcaggagagctacctgtccttcaactccacgggaaactctcggagccagattaaagccgcgcttgacaacgcgtcaaaaattatgagtctgaccaaatctgcctcagactatctcgtgggacagactgttccagaggacatttctgaaaacagaatctggcagatttttgatctcaacggctacgacccggcatacgcgggctctgttctctacggctggtgcactcgcgcctttggaaagaggaacaccgtctggctgtatggacccgcgaccaccggaaagaccaacatcgcggaagccatctctcacaccgtgcccttttatggctgtgtgaactggactaatgagaactttccctttaatgactgtgtggaaaaaatgttgatctggtgggaggagggaaagatgaccagcaaggtggtggaacccgccaaggccatcttgggggggtctagagtacgagtggatcaaaaatgtaaatcctctgtacaagtagactctaccccggtgattatcacctccaatactaacatgtgtgtggtggtggatgggaactccacgacctttgaacaccagcagccgctggaagaccgcatgttcagatttgaactcatgcggcggctcccgccagattttggcaagattaccaagcaggaagtcaaagacttttttgcttgggcaaaggtcaaccaggtgccggtgactcacgagtttatggttcccaagaaagtggcgggaactgagagggcggagacttctagaaaacgcccactggatgacgtcaccaataccaactataaaagtccggagaagcgggcccggctctcagttgttcctgagacgcctcgcagttcagacgtgcctgtagagcccgctcctctgcgacctctcaactggtcttccaggtatgaatgcagatgtgactatcatgctaaatttgactctgtaacgggggaatgtgacgagtgtgaatatttgaatcggggcaaaaatggctgtatctttcataatgctacacattgtcaaatttgtcacgctgttcctccatgggaaaaggaaaatgtgtcagattttaatgattttgatgactgtaataaagagcagtaa

SEQ ID NO: 515 - DNA, 2211 bp, Bovine adeno-associated virus
atgtcttttgttgaccaccctccagattggttggaatcgatcggcgacggctttcgtgaatttctcggccttgaggcgggtcccccgaaacccaaggccaatcaacagaagcaagataacgctcgaggtcttgtgcttcctgggtacaagtatcttggtcctgggaacggccttgataagggcgatcctgtcaattttgctgacgaggttgcccgagagcacgacctctcctaccagaaacagcttgaggcgggcgataacccttacctcaagtacaaccacgcggacgcagagtttcaggagaaactcgcttctgacacttcttttgggggaaaccttgggaaggctgttttccaggctaaaaagaggattctcgaacctcttggcctggttgagacgccggataaaacggcgcctgcggcaaaaaagaggcctctagagcagagtcctcaagagccagactcctcgagcggagttggcaagaaaggcaaacagcctgccagaaagagactcaactttgacgacgaacctggagccggagacgggcctcccccagaaggaccatcttccggagctatgtctactgagactgaaatgcgtgcagcagctggcggaaatggtggcgatgcgggacaaggtgccgagggagtgggtaatgcctccggtgattggcattgcgattccacttggtcagagagccacgtcaccaccacctcaacccgcacctgggtcctgccgacctacaacaaccacctgtacctgcggctcggctcgagcaacgccagcgacaccttcaacggattctccaccccctggggatactttgactttaaccgcttccactgccacttctcgccaagagactggcaaaggctcatcaacaaccactggggactgcgccccaaaagcatgcaagtccgcatcttcaacatccaagttaaggaggtcacgacgtctaacggggagacgaccgtatccaacaacctcaccagcacggtccagatctttgcggacagcacgtacgagctcccgtacgtgatggatgcaggtcaggagggcagcttgcctcctttccccaacgacgtgttcatggtgcctcagtacgggtactgcggactggtaaccggaggcagctctcaaaaccagacagacagaaatgccttctactgtctggagtactttcccagccagatgctgagaaccggaaacaactttgagatggtgtacaagtttgaaaacgtgcccttccactccatgtacgctcacagccagagcctggataggctgatgaacccgctgctggaccagtacctgtgggagctccagtctaccacctctggaggaactctcaaccagggcaattcagccaccaactttgccaagctgaccaaaacaaacttttctggctaccgcaaaaactggctcccggggcccatgatgaagcagcagagattctccaagactgccagtcaaaactacaagattccccagggaagaaacaacagtctgctccattatgagaccagaactaccctcgacggaagatggagcaattttgccccgggaacggccatggcaaccgcagccaacgacgccaccgacttctctcaggcccagctcatctttgcggggcccaacatcaccggcaacaccaccacagatgccaataacctgatgttcacttcagaagatgaacttagggccaccaacccccgggacactgacctgtttggccacctggcaaccaaccagcaaaacgccaccaccgttcctaccgtagacgacgtggacggagtcggcgtgtacccgggaatggtgtggcaggacagagacatttactaccaagggcccatttgggccaaaattccacacacggatggacactttcacccgtctcctctcattggcggatttggactgaaaagcccgcctccacaaatattcatcaaaaacactcctgtacccgccaatcccgcaacgaccttctctccggccagaatcaacagcttcatcacccagtacagcaccggacaggtggctgtcaaaatagaatgggaaatccagaaggagcggtccaagagatggaacccagaggtccagttcacgtccaactacggagcacaggactcgcttctctgggctcccgacaacgccggagcctacaaagagcccagggccattggatcccgatacctcaccaaccacctctag

SEQ ID NO: 516 - DNA, 4694 bp, Bovine adeno-associated virus
gtggcactcccccccctgtcgcgttcgctcgttcgctggctcgattgggggggtggcagctcaaagagctgccagacgacggccctctgggccgtcgcccccccaatcgagccagcgaacgagcgaacgcgacaggggggggagtgccacactctctagcaagggggttttgtaggtggtgatgtcattgttgatgtcattatagttgtcacgcgatagttaatgattaacagtcatgtgatgtgtgttatccaataggatgaaagcgcgcgaatgagatctcgcgagacttccggggtataaaaggggtgagtgaacgagcccgccgccattctctgctctggactgctagaggaccctcgctgccatggctaccttctatgaagtcattgttcgcgttccatttgatgtggaagagcacctgcctggaatttctgacaactttgtagactgggtaactggtcaaatttgggagctgcctcccgagtcagatttgaatttgactctgattgagcagcctcagctgacggtggctgacagaattcgccgcgtgttcctgtacgagtggaacaaattttccaagcaggagagcaaattctttgtgcagtttgaaaagggatctgaatattttcatctgcacacgctcgtggagacctccggcatctcttctatggtccttggccgctacgtgagtcagattcgcgcccagctggtgaaggtggtgttccagaacattgagccgcggattaacgactgggtcgccatcaccaaggtaaagaagggcggagccaataaggtggtggattctgggtatattcccgcctacctgctgccgaaggtccaaccagagcttcagtgggcgtggactaacctcgaagagtataaattggccgccctcaatctggaggagcgcaaacggctcgtcgctcagtttcagcttgagtcctcgcagcgctcgcaagaggcatcttcccagagggacgtttcggctgacccggtcatcaagagcaagacttcccagaaatacatggcgctggtaagctggctggtggaacatggcatcacttccgagaagcagtggattcaggagaatcaggagagctacctgtccttcaactccacgggaaactctcggagccagattaaagccgcgcttgacaacgcgtcaaaaattatgagtctgaccaaatctgcctcagactatctcgtgggacagactgttccagaggacatttctgaaaacagaatctggcagatttttgatctcaacggctacgacccggcatacgcgggctctgttctctacggctggtgcactcgcgcctttggaaagaggaacaccgtctggctgtatggacccgcgaccaccggaaagaccaacatcgcggaagccatctctcacaccgtgcccttttatggctgtgtgaactggactaatgagaactttccctttaatgactgtgtggaaaaaatgttgatctggtgggaggagggaaagatgaccagcaaggtggtggaacccgccaaggccatcttgggggggtctagagtacgagtggatcaaaaatgtaaatcctctgtacaagtagactctaccccggtgattatcacctccaatactaacatgtgtgtggtggtggatgggaactccacgacctttgaacaccagcagccgctggaagaccgcatgttcagatttgaactcatgcggcggctcccgccagattttggcaagattaccaagcaggaagtcaaagacttttttgcttgggcaaaggtcaaccaggtgccggtgactcacgagtttatggttcccaagaaagtggcgggaactgagagggcggagacttctagaaaacgcccactggatgacgtcaccaataccaactataaaagtccggagaagcgggcccggctctcagttgttcctgagacgcctcgcagttcagacgtgcctgtagagcccgctcctctgcgacctctcaactggtcttccaggtatgaatgcagatgtgactatcatgctaaatttgactctgtaacgggggaatgtgacgagtgtgaatatttgaatcggggcaaaaatggctgtatctttcataatgctacacattgtcaaatttgtcacgctgttcctccatgggaaaaggaaaatgtgtcagattttaatgattttgatgactgtaataaagagcagtaaataaagtgagtagtcatgtcttttgttgaccaccctccagattggttggaatcgatcggcgacggctttcgtgaatttctcggccttgaggcgggtcccccgaaacccaaggccaatcaacagaagcaagataacgctcgaggtcttgtgcttcctgggtacaagtatcttggtcctgggaacggccttgataagggcgatcctgtcaattttgctgacgaggttgcccgagagcacgacctctcctaccagaaacagcttgaggcgggcgataacccttacctcaagtacaaccacgcggacgcagagtttcaggagaaactcgcttctgacacttcttttgggggaaaccttgggaaggctgttttccaggctaaaaagaggattctcgaacctcttggcctggttgagacgccggataaaacggcgcctgcggcaaaaaagaggcctctagagcagagtcctcaagagccagactcctcgagcggagttggcaagaaaggcaaacagcctgccagaaagagactcaactttgacgacgaacctggagccggagacgggcctcccccagaaggaccatcttccggagctatgtctactgagactgaaatgcgtgcagcagctggcggaaatggtggcgatgcgggacaaggtgccgagggagtgggtaatgcctccggtgattggcattgcgattccacttggtcagagagccacgtcaccaccacctcaacccgcacctgggtcctgccgacctacaacaaccacctgtacctgcggctcggctcgagcaacgccagcgacaccttcaacggattctccaccccctggggatactttgactttaaccgcttccactgccacttctcgccaagagactggcaaaggctcatcaacaaccactggggactgcgccccaaaagcatgcaagtccgcatcttcaacatccaagttaaggaggtcacgacgtctaacggggagacgaccgtatccaacaacctcaccagcacggtccagatctttgcggacagcacgtacgagctcccgtacgtgatggatgcaggtcaggagggcagcttgcctcctttccccaacgacgtgttcatggtgcctcagtacgggtactgcggactggtaaccggaggcagctctcaaaaccagacagacagaaatgccttctactgtctggagtactttcccagccagatgctgagaaccggaaacaactttgagatggtgtacaagtttgaaaacgtgcccttccactccatgtacgctcacagccagagcctggataggctgatgaacccgctgctggaccagtacctgtgggagctccagtctaccacctctggaggaactctcaaccagggcaattcagccaccaactttgccaagctgaccaaaacaaacttttctggctaccgcaaaaactggctcccggggcccatgatgaagcagcagagattctccaagactgccagtcaaaactacaagattccccagggaagaaacaacagtctgctccattatgagaccagaactaccctcgacggaagatggagcaattttgccccgggaacggccatggcaaccgcagccaacgacgccaccgacttctctcaggcccagctcatctttgcggggcccaacatcaccggcaacaccaccacagatgccaataacctgatgttcacttcagaagatgaacttagggccaccaacccccgggacactgacctgtttggccacctggcaaccaaccagcaaaacgccaccaccgttcctaccgtagacgacgtggacggagtcggcgtgtacccgggaatggtgtggcaggacagagacatttactaccaagggcccatttgggccaaaattccacacacggatggacactttcacccgtctcctctcattggcggatttggactgaaaagcccgcctccacaaatattcatcaaaaacactcctgtacccgccaatcccgcaacgaccttctctccggccagaatcaacagcttcatcacccagtacagcaccggacaggtggctgtcaaaatagaatgggaaatccagaaggagcggtccaagagatggaacccagaggtccagttcacgtccaactacggagcacaggactcgcttctctgggctcccgacaacgccggagcctacaaagagcccagggccattggatcccgatacctcaccaaccacctctagcccaattctgttgcataccctcaataaaccgtgtattcgtttcagtaaaatactgcctcttgtggtcattcggcgtacaacagcttacaacaacaacaaaacccccttgctagagagtgtggcactcccccccctgtcgcgttcgctcgttcgctggctcgattgggggggtggcagctcaaagagctgccagacgacggccctctgggccgtcgcccccccaatcgagccagcgaacgagcgaacgcgacaggggggggagtgccac

SEQ ID NO: 517 - protein, 390 aa, Bovine adeno-associated virus
MALVSWLVEHGITSEKQWIQENQESYLSFNSTGNSRSQIKAALDNASKIMSLTKSASDYLVGQTVPEDISENRIWQIFDLNGYDPAYAGSVLYGWCTRAFGKRNTVWLYGPATTGKTNIAEAISHTVPFYGCVNWTNENFPFNDCVEKMLIWWEEGKMTSKVVEPAKAILGGSRVRVDQKCKSSVQVDSTPVIITSNTNMCVVVDGNSTTFEHQQPLEDRMFRFELMRRLPPDFGKITKQEVKDFFAWAKVNQVPVTHEFMVPKKVAGTERAETSRKRPLDDVTNTNYKSPEKRARLSVVPETPRSSDVPVEPAPLRPLNWSSRYECRCDYHAKFDSVTGECDECEYLNRGKNGCIFHNATHCQICHAVPPWEKENVSDFNDFDDCNKEQ

SEQ ID NO: 518 - protein, 610 aa, Bovine adeno-associated virus
MATFYEVIVRVPFDVEEHLPGISDNFVDWVTGQIWELPPESDLNLTLIEQPQLTVADRIRRVFLYEWNKFSKQESKFFVQFEKGSEYFHLHTLVETSGISSMVLGRYVSQIRAQLVKVVFQNIEPRINDWVAITKVKKGGANKVVDSGYIPAYLLPKVQPELQWAWTNLEEYKLAALNLEERKRLVAQFQLESSQRSQEASSQRDVSADPVIKSKTSQKYMALVSWLVEHGITSEKQWIQENQESYLSFNSTGNSRSQIKAALDNASKIMSLTKSASDYLVGQTVPEDISENRIWQIFDLNGYDPAYAGSVLYGWCTRAFGKRNTVWLYGPATTGKTNIAEAISHTVPFYGCVNWTNENFPFNDCVEKMLIWWEEGKMTSKVVEPAKAILGGSRVRVDQKCKSSVQVDSTPVIITSNTNMCVVVDGNSTTFEHQQPLEDRMFRFELMRRLPPDFGKITKQEVKDFFAWAKVNQVPVTHEFMVPKKVAGTERAETSRKRPLDDVTNTNYKSPEKRARLSVVPETPRSSDVPVEPAPLRPLNWSSRYECRCDYHAKFDSVTGECDECEYLNRGKNGCIFHNATHCQICHAVPPWEKENVSDFNDFDDCNKEQ

SEQ ID NO: 519 - protein, 538 aa, Bovine adeno-associated virus
MRAAAGGNGGDAGQGAEGVGNASGDWHCDSTWSESHVTTTSTRTWVLPTYNNHLYLRLGSSNASDTFNGFSTPWGYFDFNRFHCHFSPRDWQRLINNHWGLRPKSMQVRIFNIQVKEVTTSNGETTVSNNLTSTVQIFADSTYELPYVMDAGQEGSLPPFPNDVFMVPQYGYCGLVTGGSSQNQTDRNAFYCLEYFPSQMLRTGNNFEMVYKFENVPFHSMYAHSQSLDRLMNPLLDQYLWELQSTTSGGTLNQGNSATNFAKLTKTNFSGYRKNWLPGPMMKQQRFSKTASQNYKIPQGRNNSLLHYETRTTLDGRWSNFAPGTAMATAANDATDFSQAQLIFAGPNITGNTTTDANNLMFTSEDELRATNPRDTDLFGHLATNQQNATTVPTVDDVDGVGVYPGMVWQDRDIYYQGPIWAKIPHTDGHFHPSPLIGGFGLKSPPPQIFIKNTPVPANPATTFSPARINSFITQYSTGQVAVKIEWEIQKERSKRWNPEVQFTSNYGAQDSLLWAPDNAGAYKEPRAIGSRYLTNHL

SEQ ID NO: 520 - protein, 736 aa, Artificial Sequence
  source: /note="Description of Artificial Sequence: Synthetic polypeptide"
MSFVDHPPDWLESIGDGFREFLGLEAGPPKPKANQQKQDNARGLVLPGYKYLGPGNGLDKGDPVNFADEVAREHDLSYQKQLEAGDNPYLKYNHADAEFQEKLASDTSFGGNLGKAVFQAKKRILEPLGLVETPDKTAPAAKKRPLEQSPQEPDSSSGVGKKGKQPARKRLNFDDEPGAGDGPPPEGPSSGAMSTETEMRAAAGGNGGDAGQGAEGVGNASGDWHCDSTWSESHVTTTSTRTWVLPTYNNHLYLRLGSSNASDTFNGFSTPWGYFDFNRFHCHFSPRDWQRLINNHWGLRPKSMQVRIFNIQVKEVTTSNGETTVSNNLTSTVHIFADSTYELPYVMDAGQEGSLPPFPNDVFMVPQYGYCGLVTGGSSQNQTDRNAFYCLEYFPSQMLRTGNNFEMVYKFENVPFHSMYAHSQSLDRLMNPLLDQYLWELQSTTSGGTLNQGNSATNFAKLTNKNFSGYRKNWLPGPMMKQQRFSKTASQNYKIPQGGNNSLLHYETRTTLDRRWSNFAPGTAMATAANDATDFSQAQLIFAGPNITGNTTTDANNLMFTSEDELRATNPRDTDLFGHLATNQQNATTVPTVDDVDGVGVYPGMVWQDRDIYYQGPIWAKIPHTDGHFHPSPLIGGFGLKSPPPQIFIKNTPVPANPATTFSPARINSFITQYSTGQVAVKIEWEIQKERSKRWNPEVQFTSNYGAQDSLLWAPDNAGAYKEPRAIGSRYLTNHL

SEQ ID NO: 521 - protein, 736 aa, Artificial Sequence
  source: /note="Description of Artificial Sequence: Synthetic polypeptide"
MSFVDHPPDWLESIGDGFREFLGLEAGPPKPKANQQKQDNARGLVLPGYKYLGPGNGLDKGDPVNFADEVAREHDLSYQKQLEAGDNPYLKYNHADAEFQEKLASDTSFGGNLGKAVFQAKKRILEPLGLVETPDKTAPAAKKRPLEQSPQEPDSSSGVGKKGKQPARKRLNFDDEPGAGDGPPPEGPSSGAMSTETEMRAAAGGNGGDAGQGAEGVGNASGDWHCDSTWSESHVTTTSTRTWVLPTYNNHLYLRLGSSNASDTFNGFSTPWGYFDFNRFHCHFSPRDWQRLINNHWGLRPKSMQVRIFNIQVKEVTTSNGETTVSNNLTSTVQIFADSTYELPYVMDAGQEGSLPPFPNDVFMVPQYGYCGLVTGGSSQNQTDRNAFYCLEYFPSQMLRTGNNFEMVYKFENVPFHSMYAHSQSLDRLMNPLLDQYLWELQSTTSGGTLNQGNSATNFAKLTKTNFSGYRKNWLPGPMMKQQRFSKTASQNYKIPQGRNNSLLHYETRTTLDGRWSNFAPGTAMATAANDATDFSQAQLIFAGPNITGNTTTDANNLMFTSEDELRATNPRDTDLFGHLATNQQNATTVPTVDDVDGVGVYPGMVWQDRDIYYQGPIWAKIPHTDGHFHPSPLIGGFGLKSPPPQIFIKNTPVPANPATTFSPARINSFITQYSTGQVAVKIEWEIQKERSKRWNPEVQFTSNYGAQDSLLWAPDNAGAYKEPRAIGSRYLTNHL

SEQ ID NO: 522 - protein, 736 aa, Bovine adeno-associated virus; identical to SEQ ID NO: 521

SEQ ID NO: 523 - protein, 600 aa, Bovine adeno-associated virus
TAPAAKKRPLEQSPQEPDSSSGVGKKGKQPARKRLNFDDEPGAGDGPPPEGPSSGAMSTETEMRAAAGGNGGDAGQGAEGVGNASGDWHCDSTWSESHVTTTSTRTWVLPTYNNHLYLRLGSSNASDTFNGFSTPWGYFDFNRFHCHFSPRDWQRLINNHWGLRPKSMQVRIFNIQVKEVTTSNGETTVSNNLTSTVQIFADSTYELPYVMDAGQEGSLPPFPNDVFMVPQYGYCGLVTGGSSQNQTDRNAFYCLEYFPSQMLRTGNNFEMVYKFENVPFHSMYAHSQSLDRLMNPLLDQYLWELQSTTSGGTLNQGNSATNFAKLTKTNFSGYRKNWLPGPMMKQQRFSKTASQNYKIPQGRNNSLLHYETRTTLDGRWSNFAPGTAMATAANDATDFSQAQLIFAGPNITGNTTTDANNLMFTSEDELRATNPRDTDLFGHLATNQQNATTVPTVDDVDGVGVYPGMVWQDRDIYYQGPIWAKIPHTDGHFHPSPLIGGFGLKSPPPQIFIKNTPVPANPATTFSPARINSFITQYSTGQVAVKIEWEIQKERSKRWNPEVQFTSNYGAQDSLLWAPDNAGAYKEPRAIGSRYLTNHL

SEQ ID NO: 524 - DNA, 2214 bp, Artificial Sequence
  source: /note="Description of Artificial Sequence: Synthetic polynucleotide"
atggctgccgatggttatcttccagattggctcgaggacactctctctgaaggaataagacagtggtggaagctcaaacctggcccaccaccaccaaagcccgcagagcggcataaggacgacagcaggggtcttgtgcttcctgggtacaagtacctcggacccttcaacggactcgacaagggagagccggtcaacgaggcagacgccgcggccctcgagcacgacaaagcctacgaccggcagctcgacagcggagacaacccgtacctcaagtacaaccacgccgacgcggagtttcaggagcgccttaaagaagatacgtcttttgggggcaacctcgggcgagcagtcttccaggccaaaaagaggcttcttgaacctcttggtctggttgaggaagcggctaagacggctcctggaaagaagaggcctgtagagcagtctcctcaggaaccggactcctcctcgggcatcggcaagacaggccagcagcccgctaaaaagagactcaatttcggtcagactggcgacacagagtcagtcccagaccctcaaccaatcggagaacctcccgcagccccctcaggtgtgggatctcttacaatggcttcaggtggtggcgcaccagtggcagacaataacgaaggtgccgatggagtgggtagttcctcgggaaattggcattgcgattcccaatggctgggggacagagtcatcaccaccagcacccgaacctgggccctgcccacctacaacaatcacctctacaagcaaatctccaacgggacatcgggaggagccaccaacgacaacacctacttcggctacagcaccccctgggggtattttgactttaacagattccactgccacttttcaccacgtgactggcagcgactcatcaacaacaactggggattccggcccaagagactcagcttcaagctcttcaacatccaggtcaaggaggtcacgcagaatgaaggcaccaagaccatcgccaataaccttaccagcacggtccaggtcttcacggactcggagtaccagctgccgtacgttctcggctctgcccaccagggctgcctgcctccgttcccggcggacgtgttcatgattccccagtacggctacctaacactcaacaacggtagtcaggccgtgggacgctcctccttctactgcctggaatactttccttcgcagatgctgagaaccggcaacaacttccagtttacttacaccttcgaggacgtgcctttccacagcagctacgcccacagccagagcttggaccggctgatgaatcctctgattgaccagtacctgtactacttgtctcggactcaaacaacaggaggcacggcaaatacgcagactctgggcttcagccaaggtgggcctaatacaatggccaatcaggcaaagaactggctgccaggaccctgttaccgccaacaacgcgtctcaacgacaaccgggcaaaacaacaatagcaactttgcctggactgctgggaccaaataccatctgaatggaagaaattcattggctaatcctggcatcgctatggcaacacacaaagacgacaaggagcgtttttttcccagtaacgggatcctgatttttggcaaacaaaatgctgccagagacaatgcggattacagcgatgtcatgctcaccagcgaggaagaaatcaaaaccactaaccctgtggctacagaggaatacggtatcgtggcagataacttgcagcagcaaaacacggctcctcaaattggaactgtcaacagccagggggccttacccggtatggtttggcagaaccgggacgtgtacctgcagggtcccatctgggccaagattcctcacacggacggcaacttccacccgtctccgctgatgggcggctttggcctgaaacatcctccgcctcagatcctgatcaagaacacgcctgtacctgcggatcctccgaccaccttcaaccagtcaaagctgaactctttcatcacgcaatacagcaccggacaggtcagcgtggaaattgaatgggagctgcagaaggaaaacagcaagcgctggaaccccgagatccagtacacctccaactactacaaatctacaagtgtggactttgctgttaatacagaaggcgtgtactctgaaccccaccccattggcacccgttacctcacccgtcccctgtaa

SEQ ID NO: 525 - protein, 737 aa, Artificial Sequence
  source: /note="Description of Artificial Sequence: Synthetic polypeptide"
MAADGYLPDWLEDTLSEGIRQWWKLKPGPPPPKPAERHKDDSRGLVLPGYKYLGPFNGLDKGEPVNEADAAALEHDKAYDRQLDSGDNPYLKYNHADAEFQERLKEDTSFGGNLGRAVFQAKKRLLEPLGLVEEAAKTAPGKKRPVEQSPQEPDSSSGIGKTGQQPAKKRLNFGQTGDTESVPDPQPIGEPPAAPSGVGSLTMASGGGAPVADNNEGADGVGSSSGNWHCDSQWLGDRVITTSTRTWALPTYNNHLYKQISNGTSGGATNDNTYFGYSTPWGYFDFNRFHCHFSPRDWQRLINNNWGFRPKRLSFKLFNIQVKEVTQNEGTKTIANNLTSTVQVFTDSEYQLPYVLGSAHQGCLPPFPADVFMIPQYGYLTLNNGSQAVGRSSFYCLEYFPSQMLRTGNNFQFTYTFEDVPFHSSYAHSQSLDRLMNPLIDQYLYYLSRTQTTGGTANTQTLGFSQGGPNTMANQAKNWLPGPCYRQQRVSTTTGQNNNSNFAWTAGTKYHLNGRNSLANPGIAMATHKDDKERFFPSNGILIFGKQNAARDNADYSDVMLTSEEEIKTTNPVATEEYGIVADNLQQQNTAPQIGTVNSQGALPGMVWQNRDVYLQGPIWAKIPHTDGNFHPSPLMGGFGLKHPPPQILIKNTPVPADPPTTFNQSKLNSFITQYSTGQVSVEIEWELQKENSKRWNPEIQYTSNYYKSTSVDFAVNTEGVYSEPHPIGTRYLTRPL

SEQ ID NO: 526 - protein, 736 aa, Artificial Sequence
  source: /note="Description of Artificial Sequence: Synthetic polypeptide"
MAADGYLPDWLEDNLSEGIREWWDLKPGAPKPKANQQKQDDGRGLVLPGYKYLGPFNGLDKGEPVNAADAAALEHDKAYDQQLKAGDNPYLRYNHADAEFQERLQEDTSFGGNLGRAVFQAKKRVLEPLGLVEEGAKTAPGKKRPVEQSPQEPDSSSGIGKTGQQPAKKRLNFGQTGDTESVPDPQPIGEPPAAPSGVGSLTMASGGGAPVADNNEGADGVGSSSGNWHCDSQWLGDRVITTSTRTWALPTYNNHLYKQISSASTGASNDNHYFGYSTPWGYFDFNRFHCHFSPRDWQRLINNNWGFRPKRLNFKLFNIQVKEVTDNNGVKTIANNLTSTVQVFTDSDYQLPYVLGSAHQGCLPPFPADVFMIPQYGYLTLNNGSQAVGRSSFYCLEYFPSQMLRTGNNFQFTYTFEDVPFHSSYAHSQSLDRLMNPLIDQYLYYLSRTQTTGGTANTQTLGFSQGGPNTMANQAKNWLPGPCYRQQRVSTTTGQNNNSNFAWTAGTKYHLNGRNSLANPGIAMATHKDDKERFFPSNGILIFGKQNAARDNADYSDVMLTSEEEIKTTNPVATEEYGIVADNLQQQNTAPQIGTVNSQGALPGMVWQNRDVYLQGPIWAKIPHTDGNFHPSPLMGGFGLKHPPPQILIKNTPVPADPPTTFNQSKLNSFITQYSTGQVSVEIEWELQKENSKRWNPEIQYTSNYYKSTSVDFAVNTEGVYSEPHPIGTRYLTRPL

SEQ ID NO: 527 - protein, 736 aa, Artificial Sequence
  source: /note="Description of Artificial Sequence: Synthetic polypeptide"
MAADGYLPDWLEDTLSEGIRQWWKLKPGPPPPKPAERHKDDSRGLVLPGYKYLGPFNGLDKGEPVNEADAAALEHDKAYDRQLDSGDNPYLKYNHADAEFQERLQGDTSFGGNLGRAVFQAKKRVLEPLGLVEEGAKTAPGKKRPVEQSPQEPDSSSGIGETGQQPAKKRLNFGQTGDSESVPDPQPLGEPPATPAAVGPTTMASGGGAPMADNNEGADGVGSSSGNWHCDSQWLGDRVITTSTRTWALPTYNNHLYKQISSASTGASNDNHYFGYSTPWGYFDFNRFHCHFSPRDWQRLINNNWGFRPKRLSFKLFNIQVKEVTDNNGVKTIANNLTSTVQVFTDSEYQLPYVLGSAHQGCLPPFPADVFMIPQYGYLTLNNGSQAVGRSSFYCLEYFPSQMLRTGNNFTFSYTFEDVPFHSSYAHSQSLDRLMNPLIDQYLYYLSRTQTTGGTANTQTLGFSQGGPNTMANQAKNWLPGPCYRQQRVSTTTGQNNNSNFAWTAGTKYHLNGRNSLANPGIAMATHKDDKERFFPSNGILIFGKQNAARDNADYSDVMLTSEEEIKTTNPVATEEYGIVADNLQQQNTAPQIGTVNSQGALPGMVWQNRDVYLQGPIWAKIPHTDGNFHPSPLMGGFGLKHPPPQILIKNTPVPADPPTTFNQSKLNSFITQYSTGQVSVEIEWELQKENSKRWNPEIQYTSNYYKSTSVDFAVNTEGVYSEPHPIGTRYLTRPL

SEQ ID NO: 528 - DNA, 2181 bp, Artificial Sequence
  source: /note="Description of Artificial Sequence: Synthetic polynucleotide"
atgtcttttgttgatcaccctccagattggttggaagaagttggtgaaggtcttcgcgagtttttgggccttgaagcgggcccaccgaaaccaaaacccaatcagcagcatcaagatcaagcccgtggtcttgtgctgcctggttataactatctcggacccggaaacggtctcgatcgaggagagcctgtcaacagggcagacgaggtcgcgcgagagcacgacatctcgtacaacgagcagcttgaggcgggagacaacccctacctcaagtacaaccacgcggacgccgagtttcaggagaagctcgccgacgacacatccttcgggggaaacctcggaaaggcagtctttcaggccaagaaaagggttctcgaaccttttggcctggttgaagagggtgctaagacggcccctaccggaaagcggatagacgaccactttccaaaaagaaagaaggctcggaccgaagaggactccaagccttccacctcgtcagacgccgaagctggacccagcggatcccagcagctgcaaatcccagcacaaccagcctcaagtttgggagctgatacaatgtctgcgggaggtggcggcccattgggcgacaataaccaaggtgccgatggagtgggcaatgcctcgggagattggcattgcgattccacgtggatgggggacagagtcgtcaccaagtccacccgcacctgggtgctgcccagctacaacaaccaccagtaccgagagatcaaaagcggctccgtcgacggaagcaacgccaacgcctactttggatacagcaccccctgggggtactttgactttaaccgcttccacagccactggagcccccgagactggcaaagactcatcaacaactattggggcttcagaccccggtctctcagagtcaaaatcttcaacatccaagtcaaagaggtcacggtgcaggactccaccaccaccatcgccaacaacctcacctccaccgtccaagtgtttacggacgacgactaccaactcccgtacgtcgtcggcaacgggaccgagggatgcctgccggccttccccccgcaggtctttacgctgccgcagtacggctacgcgacgctgaaccgagacaacggagacaacccgacagagcggagcagcttcttttgcctagagtactttcccagcaagatgctgaggacgggcaacaactttgagtttacctacagctttgaagaggtgcccttccactgcagcttcgccccgagccagaacctctttaagctggccaacccgctggtggaccagtacctgtaccgcttcgtgagcacctcggccacgggcgccatccagttccaaaagaacctggcgggcagatacgccaacacctacaaaaactggttcccggggcccatgggccgaacccagggctggaacacgagctctggggtcagcagcaccaacagagtcagcgtcaacaacttttccgtctcaaaccggatgaacctggagggggccagctaccaagtgaacccccagcccaacgggatgacaaacacgctccaaggcagcaaccgctacgcgctggaaaacaccatgatcttcaacgctcaaaacgccacgccgggaactacctcggtgtacccagaggacaatctactgctgaccagcgagagcgagactcagcccgtcaaccgggtggcttacaacacgggcggtcagatggccaccaacgcccagaacgccaccacggctcccacggtcgggacctacaacctccaggaagtgcttcctggcagcgtatggatggagagggacgtgtacctccaaggacccatctgggccaagatcccagagacgggggcgcactttcacccctctccggccatgggcggattcggactcaaacacccgccgcccatgatgctcatcaaaaacacgccggtgcccggcaacatcaccagcttctcggacgtgcccgtcagcagcttcatcacccagtacagcaccgggcaggtcaccgtggagatggaatgggagctcaaaaaggaaaactccaagaggtggaacccagagatccagtacaccaacaactacaacgacccccagtttgtggactttgctccagacggctccggcgaatacagaaccaccagagccatcggaacccgatacctcacccgacccctt

SEQ ID NO: 529 - protein, 726 aa, Artificial Sequence
  source: /note="Description of Artificial Sequence: Synthetic polypeptide"
MSFVDHPPDWLEEVGEGLREFLGLEAGPPKPKPNQQHQDQARGLVLPGYNYLGPGNGLDRGEPVNRADEVAREHDISYNEQLEAGDNPYLKYNHADAEFQEKLADDTSFGGNLGKAVFQAKKRVLEPFGLVEEGAKTAPTGKRIDDHFPKRKKARTEEDSKPSTSSDAEAGPSGSQQLQIPAQPASSLGADTMSAGGGGPLGDNNQGADGVGNASGDWHCDSTWMGDRVVTKSTRTWVLPSYNNHQYREIKSGSVDGSNANAYFGYSTPWGYFDFNRFHSHWSPRDWQRLINNYWGFRPRSLRVKIFNIQVKEVTVQDSTTTIANNLTSTVQVFTDDDYQLPYVVGNGTEGCLPAFPPQVFTLPQYGYATLNRDNGDNPTERSSFFCLEYFPSKMLRTGNNFEFTYSFEEVPFHCSFAPSQNLFKLANPLVDQYLYRFVSTSATGAIQFQKNLAGRYANTYKNWFPGPMGRTQGWNTSSGSSTNRVSVNNFSVSNRMNLEGASYQVNPQPNGMTNTLQGSNRYALENTMIFNAQNATPGTTSVYPEDNLLLTSESETQPVNRVAYNTGGQMATNAQNATTAPTVGTYNLQEVLPGSVWMERDVYLQGPIWAKIPETGAHFHPSPAMGGFGLKHPPPMMLIKNTPVPGNITSFSDVPVSSFITQYSTGQVTVEMEWELKKENSKRWNPEIQYTNNYNDPQFVDFAPDGSGEYRTTRAIGTRYLTRPL

SEQ ID NO: 530 - protein, 735 aa, Artificial Sequence
  source: /note="Description of Artificial Sequence: Synthetic polypeptide"
MAADGYLPDWLEDTLSEGIRQWWKLKPGPPPPKPAERHKDDSRGLVLPGYKYLGPFNGLDKGEPVNEADAAALEHDKAYDRQLDSGDNPYLKYNHADAEFQERLKEDTSFGGNLGRAVFQAKKRILEPLGLVEEPVKTAPGKKRPVEHSPAEPDSSSGTGKSGQQPARKRLNFGQTGDADSVPDPQPLGQPPAAPSGLGTNTMASGSGAPMADNNEGADGVGNSSGNWHCDSTWMGDRVITTSTRTWALPTYNNHLYKQISSQSGASNDNHYFGYSTPWGYFDFNRFHCHFSPRDWQRLINNNWGFRPKRLSFKLFNIQVKEVTQNDGTTTIANNLTSTVQVFTDSEYQLPYVLGSAHQGCLPPFPADVFMVPQYGYLTLNNGSQAVGRSSFYCLEYFPSQMLRTGNNFTFSYTFEDVPFHSSYAHSQSLDRLMNPLIDQYLYYLSRTNTPSGTTTMSRLQFSQAGASDIRDQSRNWLPGPCYRQQRVSKTAADNNNSDYSWTGATKYHLNGRDSLVNPGPAMASHKDDEEKYFPQSGVLIFGKQDSGKTNVDIEKVMITDEEEIRTTNPVATEQYGSVSTNLQSGNTQAATSDVNTQGVLPGMVWQDRDVYLQGPIWAKIPHTDGHFHPSPLMGGFGLKHPPPQILIKNTPVPANPSTTFSAAKFASFITQYSTGQVSVEIEWELQKENSKRWNPEIQYTSNYNKSVNVDFTVDTNGVYSEPRPIGTRYLTRNL

SEQ ID NO: 531 - DNA, 1797 bp, Artificial Sequence
  source: /note="Description of Artificial Sequence: Synthetic polynucleotide"
acggctccgaccggagacaagcggaaaggcgaagacgaacctcgtttgcccgacacttcttcacagactcccaagaaaaacaagaagcctcgcaaggaaagaccttccggcggggcagaagatccgggcgaaggcacctcttccaacgctggagcagcagcacccgcctctagtgtgggatcatctatcatggctgaaggaggtggcggcccagtgggcgatgcaggccagggtgccgatggagtgggcaattcctccggaaattggcattgcgattcccaatggctggaaaacggagtcgtcactcgaaccacccgaacctgggtcttgcccagctacaacaaccacctgtacaaacgaatccaaggacccagcggaggcgacaacaacaacaaattctttggattcagcaccccctggggatactttgactacaatcgattccactgccacttttccccgcgagactggcaacgactcatcaacaacaactggggcatccgtcccaaagcgatgcgctttagactctttaacatccaggttaaagaggtcacggtccaagacttcaacaccaccatcggcaacaacctcaccagtacggtccaggtctttgcggacaaggactaccaactgccgtacgtcctcggatcggctaccgaaggcaccttcccgccgttcccagcggatatctacacgatcccgcagtacgggtactgcacgctaaactacaacaacgaggcggtggatcgttcggccttctactgtctggactactttccctcagacatgctgcggacaggaaataactttgagtttacttacaccttcgaggacgttcctttccatagcatgtttgcccacaaccagacgctagaccggctgatgaatcccctcgtggatcagtacctctgggctttcagctccgtcagccaagcaggctcatctggacgagctcttcattactcgcgggcgactaaaaccaacatggcggctcaatataggaactggttacctgggcctttcttccgtgatcagcaaatctttacgggcgctagcaacatcactaaaaataacgtctttagcgtttgggaaaaaggcaagcaatgggaactcgacaatcggaccaacctaatgcagcccggtcctgcggcagcgaccacctttagcggagaacctgaccgtcaagccatgcaaaacacgctggcttttagcaggaccgtctacgatcaaacgaccgccacgaccgatcgtaaccagatactcatcaccaacgaagacgaaatcagacccaccaactcggtcggtatcgacgcgtggggagcagttcccaccaacaaccagtcgatcgtgacccccggcactcgcgcggccgtcaacaatcaaggggcgcttcccgggatggtgtggcaaaacagagacatttaccctacagggacccatttggccaaaattcccgacactgacaatcacttccatccgtccccgcttattgggcggtttggctgcaagcatccccctccccagattttcattaaaaacacacccgtccctgccaacccttcggaaacgttccagacggccaaagtggcctccttcatcaaccagtactcgaccggacagtgcaccgtcgaaatcttttgggaactcaagaaggaaacctccaagcgctggaaccccgaaatccagttcacctccaactttggcaacgcggccgacatccagtttgccgtctccgacacgggatcctattccgaacctcgtcccatcggtacccgttaccttaccaaacctctgtaa

SEQ ID NO: 532 - DNA, 1989 bp, Artificial Sequence
  source: /note="Description of Artificial Sequence: Synthetic polynucleotide"
atgaggtcgtactacgaggtcatcgttcagctgcccaacgacgtcgagagtcaggtacctggaatctccgattcgttcgtcaactggattacgtcgcgagaatggacgttgcctgaggacgccgattgggatttggaccaggtcgatcaagttcaactgacgctcggcgacaaaatccaacgggagattcgaactcattgggggacgatggccaaagaaccggactttcactattttatccaactggaacaaggtgaggtgttctttcatttacacgtcctgctggaaacgtgttccgtaaagccgatggtactcggaagatatatccgacatattcaacaaaaaattgtgagtaaagtctactgcgccacgagcctacgatggaaggatggatgcgtggtgaccaagaccaaaaatttcgggggcgcgaacaaggtccgggccgagtcgtatattcccgcctacctgatcccgaaacagcaaccggaagtgcagtgggcgtggactaacgtgcccgagtatataaaagcgtgcttgcaccgagaactgcgtgccagtctcgcgcgacttcacttcgaggaggcgggcgtctcgcaatccaaggaaaatctcgcgagaactgcagacggcgctcccgtgatgccgacccgcgtcagcaaacgctacatggagctcgtggattggctcgtggagaaggggatcaccaccgagaaggaatggctgctggaaaacagagaaagctttcggagctttcaggcctcgagcaactcggcgcgtcagatcaagacggccctgcaaggcgccattcaggagatgcttctgaccaagacggcggaggactacctcgtcggaaaggatcccgtctcggacgacgacatccgtcagaaccgcatctacaagattctggaactgaaccactacgacccagcgtacgtggggagtattttggtcgggtggtgccagaagaaatggggcaagcgaaacacgctgtggctgttcggacatgcgaccaccggcaagaccaacatcgcggaggctattgcccatgctgtgccgttctatggatgcgttaactggaccaacgagaactttccgttcaacgactgcgtcgaaaaaatgattatctggtgggaggagggcaaaatgaccgccaaagtggtggaaacagccaaggcgattctgggaggatctcgggtgagagtggaccaaaaatgcaaagcttcggttccgatcgaaccgacgccggtcattattaccagtaacaccaacatgtgttatgtcatcgacgggaacacgaccacgttcgagcataagcagccgttggaggacaggatgtttaagctcgaattgctgactcggttgcctgatgactttggtaaggtgaccaaacaggaggtgcgtcaattcttcaggtggtctcaggatcacctgacccctgtgatcccagaattcctagtgcggaaggcggagtctcgcaaaagacccgccccttccggggaaggctatataagcccgacaaagcggcccgcgctcgcagagcagcagcaggcgtcggagagcgcggacccggttcccaccaggtatcgtatcaaatgctcgaaacattgcggtatggataaaatgttgtttccttgccaaatttgtgaatcgatgaacagagatattaatatttgtgctattcataaaacgaccgactgtaaagagtgtttccccgactacggggataaagatgatgtagaactacccccctgtacagaacacaacgtgtctcgttgttatcaatgtcattcgggcgaattgtatcgcgtgacttcggactctgacgagaaacctgcccccgagagtgatgaaggcaccgagccatcctatgctccctgcacgattcaccacctgatgggcaagagtcacgggttagtcacttgcgcggcgtgtcggttgaaaaatagtacgttgcatgatgacttggatgacggtgatctcgaacaataa

SEQ ID NO: 533 - DNA, 1626 bp, Artificial Sequence
  source: /note="Description of Artificial Sequence: Synthetic polynucleotide"
atgaggtcgtactacgaggtcatcgttcagctgcccaacgacgtcgagagtcaggtacctggaatctccgattcgttcgtcaactggattacgtcgcgagaatggacgttgcctgaggacgccgattgggatttggaccaggtcgatcaagttcaactgacgctcggcgacaaaatccaacgggagattcgaactcattgggggacgatggccaaagaaccggactttcactattttatccaactggaacaaggtgaggtgttctttcatttacacgtcctgctggaaacgtgttccgtaaagccgatggtactcggaagatatatccgacatattcaacaaaaaattgtgagtaaagtctactgcgccacgagcctacgatggaaggatggatgcgtggtgaccaagaccaaaaatttcgggggcgcgaacaaggtccgggccgagtcgtatattcccgcctacctgatcccgaaacagcaaccggaagtgcagtgggcgtggactaacgtgcccgagtatataaaagcgtgcttgcaccgagaactgcgtgccagtctcgcgcgacttcacttcgaggaggcgggcgtctcgcaatccaaggaaaatctcgcgagaactgcagacggcgctcccgtgatgccgacccgcgtcagcaaacgctacatggagctcgtggattggctcgtggagaaggggatcaccaccgagaaggaatggctgctggaaaacagagaaagctttcggagctttcaggcctcgagcaactcggcgcgtcagatcaagacggccctgcaaggcgccattcaggagatgcttctgaccaagacggcggaggactacctcgtcggaaaggatcccgtctcggacgacgacatccgtcagaaccgcatctacaagattctggaactgaaccactacgacccagcgtacgtggggagtattttggtcgggtggtgccagaagaaatggggcaagcgaaacacgctgtggctgttcggacatgcgaccaccggcaagaccaacatcgcggaggctattgcccatgctgtgccgttctatggatgcgttaactggaccaacgagaactttccgttcaacgactgcgtcgaaaaaatgattatctggtgggaggagggcaaaatgaccgccaaagtggtggaaacagccaaggcgattctgggaggatctcgggtgagagtggaccaaaaatgcaaagcttcggttccgatcgaaccgacgccggtcattattaccagtaacaccaacatgtgttatgtcatcgacgggaacacgaccacgttcgagcataagcagccgttggaggacaggatgtttaagctcgaattgctgactcggttgcctgatgactttggtaaggtgaccaaacaggaggtgcgtcaattcttcaggtggtctcaggatcacctgacccctgtgatcccagaattcctagtgcggaaggcggagtctcgcaaaagacccgccccttccggggaaggctatataagcccgacaaagcggcccgcgctcgcagagcagcagcaggcgtcggagagcgcggacccggttcccaccagattggttggagcggttggtcaaaaagggagtgaatgctgcagctga

SEQ ID NO: 534 - DNA, 1323 bp, Artificial Sequence
  source: /note="Description of Artificial Sequence: Synthetic polynucleotide"
atggagctcgtggattggctcgtggagaaggggatcaccaccgagaaggaatggctgctggaaaacagagaaagctttcggagctttcaggcctcgagcaactcggcgcgtcagatcaagacggccctgcaaggcgccattcaggagatgcttctgaccaagacggcggaggactacctcgtcggaaaggatcccgtctcggacgacgacatccgtcagaaccgcatctacaagattctggaactgaaccactacgacccagcgtacgtggggagtattttggtcgggtggtgccagaagaaatggggcaagcgaaacacgctgtggctgttcggacatgcgaccaccggcaagaccaacatcgcggaggctattgcccatgctgtgccgttctatggatgcgttaactggaccaacgagaactttccgttcaacgactgcgtcgaaaaaatgattatctggtgggaggagggcaaaatgaccgccaaagtggtggaaacagccaaggcgattctgggaggatctcgggtgagagtggaccaaaaatgcaaagcttcggttccgatcgaaccgacgccggtcattattaccagtaacaccaacatgtgttatgtcatcgacgggaacacgaccacgttcgagcataagcagccgttggaggacaggatgtttaagctcgaattgctgactcggttgcctgatgactttggtaaggtgaccaaacaggaggtgcgtcaattcttcaggtggtctcaggatcacctgacccctgtgatcccagaattcctagtgcggaaggcggagtctcgcaaaagacccgccccttccggggaaggctatataagcccgacaaagcggcccgcgctcgcagagcagcagcaggcgtcggagagcgcggacccggttcccaccaggtatcgtatcaaatgctcgaaacattgcggtatggataaaatgttgtttccttgccaaatttgtgaatcgatgaacagagatattaatatttgtgctattcataaaacgaccgactgtaaagagtgtttccccgactacggggataaagatgatgtagaactacccccctgtacagaacacaacgtgtctcgttgttatcaatgtcattcgggcgaattgtatcgcgtgacttcggactctgacgagaaacctgcccccgagagtgatgaaggcaccgagccatcctatgctccctgcacgattcaccacctgatgggcaagagtcacgggttagtcacttgcgcggcgtgtcggttgaaaaatagtacgttgcatgatgacttggatgacggtgatctcgaacaataa

SEQ ID NO: 535 - DNA, 960 bp, Artificial Sequence
  source: /note="Description of Artificial Sequence: Synthetic polynucleotide"
atggagctcgtggattggctcgtggagaaggggatcaccaccgagaaggaatggctgctggaaaacagagaaagctttcggagctttcaggcctcgagcaactcggcgcgtcagatcaagacggccctgcaaggcgccattcaggagatgcttctgaccaagacggcggaggactacctcgtcggaaaggatcccgtctcggacgacgacatccgtcagaaccgcatctacaagattctggaactgaaccactacgacccagcgtacgtggggagtattttggtcgggtggtgccagaagaaatggggcaagcgaaacacgctgtggctgttcggacatgcgaccaccggcaagaccaacatcgcggaggctattgcccatgctgtgccgttctatggatgcgttaactggaccaacgagaactttccgttcaacgactgcgtcgaaaaaatgattatctggtgggaggagggcaaaatgaccgccaaagtggtggaaacagccaaggcgattctgggaggatctcgggtgagagtggaccaaaaatgcaaagcttcggttccgatcgaaccgacgccggtcattattaccagtaacaccaacatgtgttatgtcatcgacgggaacacgaccacgttcgagcataagcagccgttggaggacaggatgtttaagctcgaattgctgactcggttgcctgatgactttggtaaggtgaccaaacaggaggtgcgtcaattcttcaggtggtctcaggatcacctgacccctgtgatcccagaattcctagtgcggaaggcggagtctcgcaaaagacccgccccttccggggaaggctatataagcccgacaaagcggcccgcgctcgcagagcagcagcaggcgtcggagagcgcggacccggttcccaccagattggttggagcggttggtcaaaaagggagtgaatgctgcagctga

SEQ ID NO: 536 - DNA, 1608 bp, Artificial Sequence
  source: /note="Description of Artificial Sequence: Synthetic polynucleotide"
atggctgaaggaggtggcggcccagtgggcgatgcaggccagggtgccgatggagtgggcaattcctccggaaattggcattgcgattcccaatggctggaaaacggagtcgtcactcgaaccacccgaacctgggtcttgcccagctacaacaaccacctgtacaaacgaatccaaggacccagcggaggcgacaacaacaacaaattctttggattcagcaccccctggggatactttgactacaatcgattccactgccacttttccccgcgagactggcaacgactcatcaacaacaactggggcatccgtcccaaagcgatgcgctttagactctttaacatccaggttaaagaggtcacggtccaagacttcaacaccaccatcggcaacaacctcaccagtacggtccaggtctttgcggacaaggactaccaactgccgtacgtcctcggatcggctaccgaaggcaccttcccgccgttcccagcggatatctacacgatcccgcagtacgggtactgcacgctaaactacaacaacgaggcggtggatcgttcggccttctactgtctggactactttccctcagacatgctgcggacaggaaataactttgagtttacttacaccttcgaggacgttcctttccatagcatgtttgcccacaaccagacgctagaccggctgatgaatcccctcgtggatcagtacctctgggctttcagctccgtcagccaagcaggctcatctggacgagctcttcattactcgcgggcgactaaaaccaacatggcggctcaatataggaactggttacctgggcctttcttccgtgatcagcaaatctttacgggcgctagcaacatcactaaaaataacgtctttagcgtttgggaaaaaggcaagcaatgggaactcgacaatcggaccaacctaatgcagcccggtcctgcggcagcgaccacctttagcggagaacctgaccgtcaagccatgcaaaacacgctggcttttagcaggaccgtctacgatcaaacgaccgccacgaccgatcgtaaccagatactcatcaccaacgaagacgaaatcagacccaccaactcggtcggtatcgacgcgtggggagcagttcccaccaacaaccagtcgatcgtgacccccggcactcgcgcggccgtcaacaatcaaggggcgcttcccgggatggtgtggcaaaacagagacatttaccctacagggacccatttggccaaaattcccgacactgacaatcacttccatccgtccccgcttattgggcggtttggctgcaagcatccccctccccagattttcattaaaaacacacccgtccctgccaacccttcggaaacgttccagacggccaaagtggcctccttcatcaaccagtactcgaccggacagtgcaccgtcgaaatcttttgggaactcaagaaggaaacctccaagcgctggaaccccgaaatccagttcacctccaactttggcaacgcggccgacatccagtttgccgtctccgacacgggatcctattccgaacctcgtcccatcggtacccgttaccttaccaaacctctgtaa

SEQ ID NO: 537 - DNA, 2232 bp, Artificial Sequence
  source: /note="Description of Artificial Sequence: Synthetic polynucleotide"
atgtctctcatttctgatgcgattccagattggttggagcggttggtcaaaaagggagtgaatgctgcagctgatttctaccatttggaaagcggtcctcctcgtcctaaggcaaatcagcaaactcaagaatctcttgaaaaggacgattcgagaggtctcgtgttcccaggctacaattatctaggccctttcaacggtctagataaaggagaacccgtcaacgaggcagacgctgccgccttagaacacgacaaggcttacgacctcgaaatcaaggacgggcacaacccgtactttgagtacaacgaggccgacagacgtttccaggaacgtctcaaagacgatacctcctttggaggcaatttaggtaaagccatcttccaggccaaaaagagggttctcgaaccctttggtctggtggaagactcaaagacggctccgaccggagacaagcggaaaggcgaagacgaacctcgtttgcccgacacttcttcacagactcccaagaaaaacaagaagcctcgcaaggaaagaccttccggcggggcagaagatccgggcgaaggcacctcttccaacgctggagcagcagcacccgcctctagtgtgggatcatctatcatggctgaaggaggtggcggcccagtgggcgatgcaggccagggtgccgatggagtgggcaattcctccggaaattggcattgcgattcccaatggctggaaaacggagtcgtcactcgaaccacccgaacctgggtcttgcccagctacaacaaccacctgtacaaacgaatccaaggacccagcggaggcgacaacaacaacaaattctttggattcagcaccccctggggatactttgactacaatcgattccactgccacttttccccgcgagactggcaacgactcatcaacaacaactggggcatccgtcccaaagcgatgcgctttagactctttaacatccaggttaaagaggtcacggtccaagacttcaacaccaccatcggcaacaacctcaccagtacggtccaggtctttgcggacaaggactaccaactgccgtacgtcctcggatcggctaccgaaggcaccttcccgccgttcccagcggatatctacacgatcccgcagtacgggtactgcacgctaaactacaacaacgaggcggtggatcgttcggccttctactgtctggactactttccctcagacatgctgcggacaggaaataactttgagtttacttacaccttcgaggacgttcctttccatagcatgtttgcccacaaccagacgctagaccggctgatgaatcccctcgtggatcagtacctctgggctttcagctccgtcagccaagcaggctcatctggacgagctcttcattactcgcgggcgactaaaaccaacatggcggctcaatataggaactggttacctgggcctttcttccgtgatcagcaaatctttacgggcgctagcaacatcactaaaaataacgtctttagcgtttgggaaaaaggcaagcaatgggaactcgacaatcggaccaacctaatgcagcccggtcctgcggcagcgaccacctttagcggagaacctgaccgtcaagccatgcaaaacacgctggcttttagcaggaccgtctacgatcaaacgaccgccacgaccgatcgtaaccagatactcatcaccaacgaagacgaaatcagacccaccaactcggtcggtatcgacgcgtggggagcagttcccaccaacaaccagtcgatcgtgacccccggcactcgcgcggccgtcaacaatcaaggggcgcttcccgggatggtgtggcaaaacagagacatttaccctacagggacccatttggccaaaattcccgacactgacaatcacttccatccgtccccgcttattgggcggtttggctgcaagcatccccctccccagattttcattaaaaacacacccgtccctgccaacccttcggaaacgttccagacggccaaagtggcctccttcatcaaccagtactcgaccggacagtgcaccgtcgaaatcttttgggaactcaagaaggaaacctccaagcgctggaaccccgaaatccagttcacctccaactttggcaacgcggccgacatccagtttgccgtctccgacacgggatcctattccgaacctcgtcccatcggtacccgttaccttaccaaacctctgtaa

SEQ ID NO: 538 - protein, 535 aa, Artificial Sequence
  source: /note="Description of Artificial Sequence: Synthetic polypeptide"
MAEGGGGPVGDAGQGADGVGNSSGNWHCDSQWLENGVVTRTTRTWVLPSYNNHLYKRIQGPSGGDNNNKFFGFSTPWGYFDYNRFHCHFSPRDWQRLINNNWGIRPKAMRFRLFNIQVKEVTVQDFNTTIGNNLTSTVQVFADKDYQLPYVLGSATEGTFPPFPADIYTIPQYGYCTLNYNNEAVDRSAFYCLDYFPSDMLRTGNNFEFTYTFEDVPFHSMFAHNQTLDRLMNPLVDQYLWAFSSVSQAGSSGRALHYSRATKTNMAAQYRNWLPGPFFRDQQIFTGASNITKNNVFSVWEKGKQWELDNRTNLMQPGPAAATTFSGEPDRQAMQNTLAFSRTVYDQTTATTDRNQILITNEDEIRPTNSVGIDAWGAVPTNNQSIVTPGTRAAVNNQGALPGMVWQNRDIYPTGTHLAKIPDTDNHFHPSPLIGRFGCKHPPPQIFIKNTPVPANPSETFQTAKVASFINQYSTGQCTVEIFWELKKETSKRWNPEIQFTSNFGNAADIQFAVSDTGSYSEPRPIGTRYLTKPL

SEQ ID NO: 539 - protein, 440 aa, Artificial Sequence
  source: /note="Description of Artificial Sequence: Synthetic polypeptide"
MELVDWLVEKGITTEKEWLLENRESFRSFQASSNSARQIKTALQGAIQEMLLTKTAEDYLVGKDPVSDDDIRQNRIYKILELNHYDPAYVGSILVGWCQKKWGKRNTLWLFGHATTGKTNIAEAIAHAVPFYGCVNWTNENFPFNDCVEKMIIWWEEGKMTAKVVETAKAILGGSRVRVDQKCKASVPIEPTPVIITSNTNMCYVIDGNTTTFEHKQPLEDRMFKLELLTRLPDDFGKVTKQEVRQFFRWSQDHLTPVIPEFLVRKAESRKRPAPSGEGYISPTKRPALAEQQQASESADPVPTRYRIKCSKHCGMDKMLFPCQICESMNRDINICAIHKTTDCKECFPDYGDKDDVELPPCTEHNVSRCYQCHSGELYRVTSDSDEKPAPESDEGTEPSYAPCTIHHLMGKSHGLVTCAACRLKNSTLHDDLDDGDLEQ

SEQ ID NO: 540 - protein, 319 aa, Artificial Sequence
  source: /note="Description of Artificial Sequence: Synthetic polypeptide"
MELVDWLVEKGITTEKEWLLENRESFRSFQASSNSARQIKTALQGAIQEMLLTKTAEDYLVGKDPVSDDDIRQNRIYKILELNHYDPAYVGSILVGWCQKKWGKRNTLWLFGHATTGKTNIAEAIAHAVPFYGCVNWTNENFPFNDCVEKMIIWWEEGKMTAKVVETAKAILGGSRVRVDQKCKASVPIEPTPVIITSNTNMCYVIDGNTTTFEHKQPLEDRMFKLELLTRLPDDFGKVTKQEVRQFFRWSQDHLTPVIPEFLVRKAESRKRPAPSGEGYISPTKRPALAEQQQASESADPVPTRLVGAVGQKGSECCS

SEQ ID NO: 541 - protein, 662 aa, Artificial Sequence
  source: /note="Description of Artificial Sequence: Synthetic polypeptide"
MRSYYEVIVQLPNDVESQVPGISDSFVNWITSREWTLPEDADWDLDQVDQVQLTLGDKIQREIRTHWGTMAKEPDFHYFIQLEQGEVFFHLHVLLETCSVKPMVLGRYIRHIQQKIVSKVYCATSLRWKDGCVVTKTKNFGGANKVRAESYIPAYLIPKQQPEVQWAWTNVPEYIKACLHRELRASLARLHFEEAGVSQSKENLARTADGAPVMPTRVSKRYMELVDWLVEKGITTEKEWLLENRESFRSFQASSNSARQIKTALQGAIQEMLLTKTAEDYLVGKDPVSDDDIRQNRIYKILELNHYDPAYVGSILVGWCQKKWGKRNTLWLFGHATTGKTNIAEAIAHAVPFYGCVNWTNENFPFNDCVEKMIIWWEEGKMTAKVVETAKAILGGSRVRVDQKCKASVPIEPTPVIITSNTNMCYVIDGNTTTFEHKQPLEDRMFKLELLTRLPDDFGKVTKQEVRQFFRWSQDHLTPVIPEFLVRKAESRKRPAPSGEGYISPTKRPALAEQQQASESADPVPTRYRIKCSKHCGMDKMLFPCQICESMNRDINICAIHKTTDCKECFPDYGDKDDVELPPCTEHNVSRCYQCHSGELYRVTSDSDEKPAPESDEGTEPSYAPCTIHHLMGKSHGLVTCAACRLKNSTLHDDLDDGDLEQ

SEQ ID NO: 542 - protein, 541 aa, Artificial Sequence
  source: /note="Description of Artificial Sequence: Synthetic polypeptide"
MRSYYEVIVQLPNDVESQVPGISDSFVNWITSREWTLPEDADWDLDQVDQVQLTLGDKIQREIRTHWGTMAKEPDFHYFIQLEQGEVFFHLHVLLETCSVKPMVLGRYIRHIQQKIVSKVYCATSLRWKDGCVVTKTKNFGGANKVRAESYIPAYLIPKQQPEVQWAWTNVPEYIKACLHRELRASLARLHFEEAGVSQSKENLARTADGAPVMPTRVSKRYMELVDWLVEKGITTEKEWLLENRESFRSFQASSNSARQIKTALQGAIQEMLLTKTAEDYLVGKDPVSDDDIRQNRIYKILELNHYDPAYVGSILVGWCQKKWGKRNTLWLFGHATTGKTNIAEAIAHAVPFYGCVNWTNENFPFNDCVEKMIIWWEEGKMTAKVVETAKAILGGSRVRVDQKCKASVPIEPTPVIITSNTNMCYVIDGNTTTFEHKQPLEDRMFKLELLTRLPDDFGKVTKQEVRQFFRWSQDHLTPVIPEFLVRKAESRKRPAPSGEGYISPTKRPALAEQQQASESADPVPTRLVGAVGQKGSECCS

SEQ ID NO: 543 - protein, 743 aa, Artificial Sequence
  source: /note="Description of Artificial Sequence: Synthetic polypeptide"
MSLISDAIPDWLERLVKKGVNAAADFYHLESGPPRPKANQQTQESLEKDDSRGLVFPGYNYLGPFNGLDKGEPVNEADAAALEHDKAYDLEIKDGHNPYFEYNEADRRFQERLKDDTSFGGNLGKAIFQAKKRVLEPFGLVEDSKTAPTGDKRKGEDEPRLPDTSSQTPKKNKKPRKERPSGGAEDPGEGTSSNAGAAAPASSVGSSIMAEGGGGPVGDAGQGADGVGNSSGNWHCDSQWLENGVVTRTTRTWVLPSYNNHLYKRIQGPSGGDNNNKFFGFSTPWGYFDYNRFHCHFSPRDWQRLINNNWGIRPKAMRFRLFNIQVKEVTVQDFNTTIGNNLTSTVQVFADKDYQLPYVLGSATEGTFPPFPADIYTIPQYGYCTLNYNNEAVDRSAFYCLDYFPSDMLRTGNNFEFTYTFEDVPFHSMFAHNQTLDRLMNPLVDQYLWAFSSVSQAGSSGRALHYSRATKTNMAAQYRNWLPGPFFRDQQIFTGASNITKNNVFSVWEKGKQWELDNRTNLMQPGPAAATTFSGEPDRQAMQNTLAFSRTVYDQTTATTDRNQILITNEDEIRPTNSVGIDAWGAVPTNNQSIVTPGTRAAVNNQGALPGMVWQNRDIYPTGTHLAKIPDTDNHFHPSPLIGRFGCKHPPPQIFIKNTPVPANPSETFQTAKVASFINQYSTGQCTVEIFWELKKETSKRWNPEIQFTSNFGNAADIQFAVSDTGSYSEPRPIGTRYLTKPL

SEQ ID NO: 544 - protein, 598 aa, Artificial Sequence
  source: /note="Description of Artificial Sequence: Synthetic polypeptide"
TAPTGDKRKGEDEPRLPDTSSQTPKKNKKPRKERPSGGAEDPGEGTSSNAGAAAPASSVGSSIMAEGGGGPVGDAGQGADGVGNSSGNWHCDSQWLENGVVTRTTRTWVLPSYNNHLYKRIQGPSGGDNNNKFFGFSTPWGYFDYNRFHCHFSPRDWQRLINNNWGIRPKAMRFRLFNIQVKEVTVQDFNTTIGNNLTSTVQVFADKDYQLPYVLGSATEGTFPPFPADIYTIPQYGYCTLNYNNEAVDRSAFYCLDYFPSDMLRTGNNFEFTYTFEDVPFHSMFAHNQTLDRLMNPLVDQYLWAFSSVSQAGSSGRALHYSRATKTNMAAQYRNWLPGPFFRDQQIFTGASNITKNNVFSVWEKGKQWELDNRTNLMQPGPAAATTFSGEPDRQAMQNTLAFSRTVYDQTTATTDRNQILITNEDEIRPTNSVGIDAWGAVPTNNQSIVTPGTRAAVNNQGALPGMVWQNRDIYPTGTHLAKIPDTDNHFHPSPLIGRFGCKHPPPQIFIKNTPVPANPSETFQTAKVASFINQYSTGQCTVEIFWELKKETSKRWNPEIQFTSNFGNAADIQFAVSDTGSYSEPRPIGTRYLTKPL

SEQ ID NO: 545 - DNA, 4694 bp, Artificial Sequence
  source: /note="Description of Artificial Sequence: Synthetic polynucleotide"
tggccagtttccaagacaggctcgctcgctcactcgggccggggccccaaaggggcccctagcgaccgcttcgcggtcgcggcccgagtgagcgagcgagcctgtcttggaaactggccagcactccggtgaggtaatgccgtcacgtggtcgggaatgggaacgggaaatctcgcgagaacgtaaacaaatataagacggcgccacacggcgctgcgtcatacgcgcgcgcgcaccggcgagatgaggtcgtactacgaggtcatcgttcagctgcccaacgacgtcgagagtcaggtacctggaatctccgattcgttcgtcaactggattacgtcgcgagaatggacgttgcctgaggacgccgattgggatttggaccaggtcgatcaagttcaactgacgctcggcgacaaaatccaacgggagattcgaactcattgggggacgatggccaaagaaccggactttcactattttatccaactggaacaaggtgaggtgttctttcatttacacgtcctgctggaaacgtgttccgtaaagccgatggtactcggaagatatatccgacatattcaacaaaaaattgtgagtaaagtctactgcgccacgagcctacgatggaaggatggatgcgtggtgaccaagaccaaaaatttcgggggcgcgaacaaggtccgggccgagtcgtatattcccgcctacctgatcccgaaacagcaaccggaagtgcagtgggcgtggactaacgtgcccgagtatataaaagcgtgcttgcaccgagaactgcgtgccagtctcgcgcgacttcacttcgaggaggcgggcgtctcgcaatccaaggaaaatctcgcgagaactgcagacggcgctcccgtgatgccgacccgcgtcagcaaacgctacatggagctcgtggattggctcgtggagaaggggatcaccaccgagaaggaatggctgctggaaaacagagaaagctttcggagctttcaggcctcgagcaactcggcgcgtcagatcaagacggccctgcaaggcgccattcaggagatgcttctgaccaagacggcggaggactacctcgtcggaaaggatcccgtctcggacgacgacatccgtcagaaccgcatctacaagattctggaactgaaccactacgacccagcgtacgtggggagtattttggtcgggtggtgccagaagaaatggggcaagcgaaacacgctgtggctgttcggacatgcgaccaccggcaagaccaacatcgcggaggctattgcccatgctgtgccgttctatggatgcgttaactggaccaacgagaactttccgttcaacgactgcgtcgaaaaaatgattatctggtgggaggagggcaaaatgaccgccaaagtggtggaaacagccaaggcgattctgggaggatctcgggtgagagtggaccaaaaatgcaaagcttcggttccgatcgaaccgacgccggtcattattaccagtaacaccaacatgtgttatgtcatcgacgggaacacgaccacgttcgagcataagcagccgttggaggacaggatgtttaagctcgaattgctgactcggttgcctgatgactttggtaaggtgaccaaacaggaggtgcgtcaattcttcaggtggtctcaggatcacctgacccctgtgatcccagaattcctagtgcggaaggcggagtctcgcaaaagacccgccccttccggggaaggctatataagcccgacaaagcggcccgcgctcgcagagcagcagcaggcgtcggagagcgcggacccggttcccaccaggtatcgtatcaaatgctcgaaacattgcggtatggataaaatgttgtttccttgccaaatttgtgaatcgatgaacagagatattaatatttgtgctattcataaaacgaccgactgtaaagagtgtttccccgactacggggataaagatgatgtagaactacccccctgtacagaacacaacgtgtctcgttgttatcaatgtcattcgggcgaattgtatcgcgtgacttcggactctgacgagaaacctgcccccgagagtgatgaaggcaccgagccatcctatgctccctgcacgattcaccacctgatgggcaagagtcacgggttagtcacttgcgcggcgtgtcggttgaaaaatagtacgttgcatgatgacttggatgacggtgatctcgaacaataaatgattgaaatgtagccatgtctctcatttctgatgcgattccagattggttggagcggttggtcaaaaagggagtgaatgctgcagctgatttctaccatttggaaagcggtcctcctcgtcctaaggcaaatcagcaaactcaagaatctcttgaaaaggacgattcgagaggtctcgtgttcccaggctacaattatctaggccctttcaacggtctagataaaggagaacccgtcaacgaggcagacgctgccgccttagaacacgacaaggcttacgacctcgaaatcaaggacgggcacaacccgtactttgagtacaacgaggccgacagacgtttccaggaacgtctcaaagacgatacctcctttggaggcaatttaggtaaagccatcttccaggccaaaaagagggttctcgaaccctttggtctggtggaagactcaaagacggctccgaccggagacaagcggaaaggcgaagacgaacctcgtttgcccgacacttcttcacagactcccaagaaaaacaagaagcctcgcaaggaaagaccttccggcggggcagaagatccgggcgaaggcacctcttccaacgctggagcagcagcacccgcctctagtgtgggatcatctatcatggctgaaggaggtggcggcccagtgggcgatgcaggccagggtgccgatggagtgggcaattcctccggaaattggcattgcgattcccaatggctggaaaacggagtcgtcactcgaaccacccgaacctgggtcttgcccagctacaacaaccacctgtacaaacgaatccaaggacccagcggaggcgacaacaacaacaaattctttggattcagcaccccctggggatactttgactacaatcgattccactgccacttttccccgcgagactggcaacgactcatcaacaacaactggggcatccgtcccaaagcgatgcgctttagactctttaacatccaggttaaagaggtcacggtccaagacttcaacaccaccatcggcaacaacctcaccagtacggtccaggtctttgcggacaaggactaccaactgccgtacgtcctcggatcggctaccgaaggcaccttcccgccgttcccagcggatatctacacgatcccgcagtacgggtactgcacgctaaactacaacaacgaggcggtggatcgttcggccttctactgtctggactactttccctcagacatgctgcggacaggaaataactttgagtttacttacaccttcgaggacgttcctttccatagcatgtttgcccacaaccagacgctagaccggctgatgaatcccctcgtggatcagtacctctgggctttcagctccgtcagccaagcaggctcatctggacgagctcttcattactcgcgggcgactaaaaccaacatggcggctcaatataggaactggttacctgggcctttcttccgtgatcagcaaatctttacgggcgctagcaacatcactaaaaataacgtctttagcgtttgggaaaaaggcaagcaatgggaactcgacaatcggaccaacctaatgcagcccggtcctgcggcagcgaccacctttagcggagaacctgaccgtcaagccatgcaaaacacgctggcttttagcaggaccgtctacgatcaaacgaccgccacgaccgatcgtaaccagatactcatcaccaacgaagacgaaatcagacccaccaactcggtcggtatcgacgcgtggggagcagttcccaccaacaaccagtcgatcgtgacccccggcactcgcgcggccgtcaacaatcaaggggcgcttcccgggatggtgtggcaaaacagagacatttaccctacagggacccatttggccaaaattcccgacactgacaatcacttccatccgtccccgcttattgggcggtttggctgcaagcatccccctccccagattttcattaaaaacacacccgtccctgccaacccttcggaaacgttccagacggccaaagtggcctccttcatcaaccagtactcgaccggacagtgcaccgtcgaaatcttttgggaactcaagaaggaaacctccaagcgctggaaccccgaaatccagttcacctccaactttggcaacgcggccgacatccagtttgccgtctccgacacgggatcctattccgaacctcgtcccatcggtacccgttaccttaccaaacctctgtaaattaaacccttcaataaaccgtttatgcgtaactgtatttccgtctcctgtcgttattcagtcacatgatgcggcattacctcaccggagtgctggccagtttccaagacaggctcgctcgctcactcgggccggggccccaaaggggcccctagcgaccgcttcgcggtcgcggcccgagtgagcgagcgagcctgtcttggaaactggcca

SEQ ID NO: 546 - DNA, 2211 bp, Artificial Sequence
  source: /note="Description of Artificial Sequence: Synthetic polynucleotide"
atggctgctgatggttatcttccagattggctcgaggacactctctctgaaggaataagacagtggtggaagctcaaacctggcccaccaccaccaaagcccgcagagcggcataaggacgacagcaggggtcttgtgcttcctgggtacaagtacctcggacccttcaacggactcgacaagggagagccggtcaacgaggcagacgcagcggccctcgagcacgacaaggcctacgaccagcagctcaaggccggtgacaacccctacctcaagtacaaccacgccgacgcggagttccagcagcggcttcagggcgacacatcgtttgggggcaacctcggcagagcagtcttccaggccaaaaagagggttcttgaacctcttggtctggttgagcaagcgggtgagacggctcctggaaagaagagaccgttgattgaatccccccagcagcccgactcctccacgggtatcggcaaaaaaggcaagcagccggctaaaaagagactcaattttggtcagactggcgactcagagtcagtccccgacccacaacctctcggagaacctccagcaacccccgctgctgtgggacctactacaatggcttcaggtggtggcgcaccaatggcagacaataacgaaggcgccgacggagtgggtaatgcctcaggaaattggcattgcgattccacatggctgggcgacagagtcatcaccaccagcacccgcacctgggccttgcccacctacaataaccacctctacaagcaaatctccagtgcttcaacgggggccagcaacgacaaccactacttcggctacagcaccccctgggggtattttgacttcaacagattccactgccacttttcaccacgtgactggcagcgactcatcaacaacaattggggattccggcccaagagactcaacttcaaactcttcaacatccaagtcaaggaggtcacgacgaatgatggcgtcacaaccatcgctaataaccttaccagcacggttcaagtcttctcggactcagactatcagctcccgtacgtgctcgggtcggctcacgagggctgcctcccgccgttcccagcagacgtcttcatggtgccacagtatggatacctcaccctgaacaacgggagtcaggcagtaggacgctcttcattttactgcctggagtactttccttctcagatgctgcgtaccggaaacaactttaccttcagctacacttttgaggacgttcctttccacagcagctacgctcacagccagagtctggaccgtctcatgaatcctctcatcgaccagtacctgtattacctgaacagaactcagaatcagtccggaagtgcccaaaacaaggacttgctgtttagccgggggtctccagctggcatgtctgttcagcccaaaaactggctacctggaccctgttatcggcagcagcgcgtttctaaaacaaaaacagacaacaacaacagcaactttacctggactggtgcttcaaaatataaccttaatgggcgtgaatctataatcaaccctggcactgctatggcctcacacaaagacgacaaagacaagttctttcccatgagcggtgtcatgatttttggaaaggagagcgccggagcttcaaacactgcattggacaatgtcatgatcacagacgaagaggaaatcaaagccactaaccccgtggccaccgaaagatttgggactgtggcagtcaatctccagagcagcagcacagaccctgcgaccggagatgtgcatgttatgggagccttacctggaatggtgtggcaagacagagacgtatacctgcagggtcccatttgggccaaaattcctcacacagatggacactttcacccgtctcctcttatgggcggctttggactcaagaacccgcctcctcagatcctcatcaaaaacacgcctgttcctgcgaatcctccggcggagttttcagctacaaagtttgcttcattcatcacccaatactccacaggacaagtgagtgtggaaattgaatgggagctgcagaaagaaaacagcaagcgctggaatcccgaagtgcagtacacatccaattatgcaaaatctgccaacgttgattttactgtggacaacaatggactttatactgagcctcgccccattggcacccgttacctcacccgtcccctgtaa

SEQ ID NO: 547 - protein, 736 aa, Artificial Sequence
  source: /note="Description of Artificial Sequence: Synthetic polypeptide"
MAADGYLPDWLEDTLSEGIRQWWKLKPGPPPPKPAERHKDDSRGLVLPGYKYLGPFNGLDKGEPVNEADAAALEHDKAYDQQLKAGDNPYLKYNHADAEFQQRLQGDTSFGGNLGRAVFQAKKRVLEPLGLVEQAGETAPGKKRPLIESPQQPDSSTGIGKKGKQPAKKRLNFGQTGDSESVPDPQPLGEPPATPAAVGPTTMASGGGAPMADNNEGADGVGNASGNWHCDSTWLGDRVITTSTRTWALPTYNNHLYKQISSASTGASNDNHYFGYSTPWGYFDFNRFHCHFSPRDWQRLINNNWGFRPKRLNFKLFNIQVKEVTTNDGVTTIANNLTSTVQVFSDSDYQLPYVLGSAHEGCLPPFPADVFMVPQYGYLTLNNGSQAVGRSSFYCLEYFPSQMLRTGNNFTFSYTFEDVPFHSSYAHSQSLDRLMNPLIDQYLYYLNRTQNQSGSAQNKDLLFSRGSPAGMSVQPKNWLPGPCYRQQRVSKTKTDNNNSNFTWTGASKYNLNGRESIINPGTAMASHKDDKDKFFPMSGVMIFGKESAGASNTALDNVMITDEEEIKATNPVATERFGTVAVNLQSSSTDPATGDVHVMGALPGMVWQDRDVYLQGPIWAKIPHTDGHFHPSPLMGGFGLKNPPPQILIKNTPVPANPPAEFSATKFASFITQYSTGQVSVEIEWELQKENSKRWNPEVQYTSNYAKSANVDFTVDNNGLYTEPRPIGTRYLTRPL

SEQ ID NO: 548 - DNA, 2211 bp, Artificial Sequence
  source: /note="Description of Artificial Sequence: Synthetic polynucleotide"
atggcttccgatggttatcttccagattggctcgaggacaacctctctgagggcatccgcgagtggtgggacttgaaacctggagccccgaaacccaaagccaaccagcaaaagcaggacgacggccggggtctggtgcttcctggctacaagtacctcggacccttcaacggactcgacaagggggagcccgtcaacgcggcggatgcagcggccctcgagcacgacaaggcctacgaccagcagctcagagcgggtgacaatccgtacctgcggtataaccacgccgacgccgagtttcaggagcgtctgcaagaagatacgtcttttgggggcaacctcgggcgagcagtcttccaggccaagaagagggttctcgaaccttttggtctggttgaggaaggtgctaagacggctcctggaaagaaacgtccggtagagcagtcgccacaagagccagactcctcctcgggcattggcaagacaggccagcagcccgctaaaaagagactcaattttggtcagactggcgactcagagtcagtccccgacccacaacctctcggagaacctccagcaacccccgctgctgtgggacctactacaatggcttcaggcggtggcgcaccaatggcagacaataacgaaggcgccgacggagtgggtaatgcctcaggaaattggcattgcgattccacatggctgggcgacagagtcatcaccaccagcacccgaacatgggccttgcccacctataacaaccacctctacaagcaaatctccagtgcttcaacgggggccagcaacgacaaccactacttcggctacagcaccccctgggggtattttgatttcaacagattccactgccatttctcaccacgtgactggcagcgactcatcaacaacaattggggattccggcccaagagactcaacttcaaactcttcaacatccaagtcaaggaggtcacgacgaatgatggcgtcacaaccatcgctaataaccttaccagcacggttcaagtcttctcggactcggagtaccagcttccgtacgtcctcggctctgcgcaccagggctgcctccctccgttcccggcggacgtgttcatgattccgcagtacggctacctaacgctcaacaatggcagccaggcagtgggacggtcatccttttactgcctggaatatttcccatcgcagatgctgagaacgggcaataactttaccttcagctacaccttcgaggacgtgcctttccacagcagctacgcgcacagccagagcctggaccggctgatgaatcctctcatcgaccagtacctgtattacctgaacagaactcagaatcagtccggaagtgcccaaaacaaggacttgctgtttagccgggggtctccagctggcatgtctgttcagcccaaaaactggctacctggaccctgttaccggcagcagcgcgtttctaaaacaaaaacagacaacaacaacagcaactttacctggactggtgcttcaaaatataaccttaatgggcgtgaatctataatcaaccctggcactgctatggcctcacacaaagacgacaaagacaagttctttcccatgagcggtgtcatgatttttggaaaggagagcgccggagcttcaaacactgcattggacaatgtcatgatcacagacgaagaggaaatcaaagccactaaccccgtggccaccgaaagatttgggactgtggcagtcaatctccagagcagcagcacagaccctgcgaccggagatgtgcatgttatgggagccttacctggaatggtgtggcaagacagagacgtatacctgcagggtcccatttgggccaaaattcctcacacagatggacactttcacccgtctcctcttatgggcggctttggacttaagcacccgcctcctcagatcctcatcaaaaacacgcctgttcctgcgaatcctccggcagagttttcggctacaaagtttgcttcattcatcacccagtattctactggccaagtcagcgtggagattgaatgggagctgcagaaagaaaacagcaaacgctggaatcccgaagtgcagtatacatctaactatgcaaaatctgccaacgttgatttcactgtggacaacaatggactttatactgagcctcgtcccattggcacccgttacctcacccgtcccctgtaa

SEQ ID NO: 549 - protein, 736 aa, Artificial Sequence
  source: /note="Description of Artificial Sequence: Synthetic polypeptide"
MASDGYLPDWLEDNLSEGIREWWDLKPGAPKPKANQQKQDDGRGLVLPGYKYLGPFNGLDKGEPVNAADAAALEHDKAYDQQLRAGDNPYLRYNHADAEFQERLQEDTSFGGNLGRAVFQAKKRVLEPFGLVEEGAKTAPGKKRPVEQSPQEPDSSSGIGKTGQQPAKKRLNFGQTGDSESVPDPQPLGEPPATPAAVGPTTMASGGGAPMADNNEGADGVGNASGNWHCDSTWLGDRVITTSTRTWALPTYNNHLYKQISSASTGASNDNHYFGYSTPWGYFDFNRFHCHFSPRDWQRLINNNWGFRPKRLNFKLFNIQVKEVTTNDGVTTIANNLTSTVQVFSDSEYQLPYVLGSAHQGCLPPFPADVFMIPQYGYLTLNNGSQAVGRSSFYCLEYFPSQMLRTGNNFTFSYTFEDVPFHSSYAHSQSLDRLMNPLIDQYLYYLNRTQNQSGSAQNKDLLFSRGSPAGMSVQPKNWLPGPCYRQQRVSKTKTDNNNSNFTWTGASKYNLNGRESIINPGTAMASHKDDKDKFFPMSGVMIFGKESAGASNTALDNVMITDEEEIKATNPVATERFGTVAVNLQSSSTDPATGDVHVMGALPGMVWQDRDVYLQGPIWAKIPHTDGHFHPSPLMGGFGLKHPPPQILIKNTPVPANPPAEFSATKFASFITQYSTGQVSVEIEWELQKENSKRWNPEVQYTSNYAKSANVDFTVDNNGLYTEPRPIGTRYLTRPL

SEQ ID NO: 550 - DNA, 2211 bp, Artificial Sequence
  source: /note="Description of Artificial Sequence: Synthetic polynucleotide"
atggctgctgatggttatcttccagattggctcgaggacactctctctgaaggaataagacagtggtggaagctcaaacctggcccaccaccaccaaagcccgcagagcggcataaggacgacagcaggggtcttgtgcttcctgggtacaagtacctcggacccttcaacggactcgacaagggagagccggtcaacgaggcagacgcagcggccctcgagcacgacaaggcctacgaccagcagctcaaggccggtgacaacccctacctcaagtacaaccacgccgacgcggagttccagcagcggcttcagggcgacacatcgtttgggggcaacctcggcagagcagtcttccaggccaaaaagagggttcttgaacctcttggtctggttgagcaagcgggtgagacggctcctggaaagaagagaccgttgattgaatccccccagcagcccgactcctccacgggtatcggcaaaaaaggcaagcagccggctaaaaagagactcaattttggtcagactggcgactcagagtcagtccccgacccacaacctctcggagaacctccagcaacccccgctgctgtgggacctactacaatggcttcaggtggtggcgcaccaatggcagacaataacgaaggcgccgacggagtgggtaatgcctcaggaaattggcattgcgattccacatggctgggcgacagagtcatcaccaccagcacccgcacctgggccttgcccacctacaataaccacctctacaagcaaatctccagtgcttcaacgggggccagcaacgacaaccactacttcggctacagcaccccctgggggtattttgacttcaacagattccactgccacttttcaccacgtgactggcagcgactcatcaacaacaattggggattccggcccaagagactcaacttcaaactcttcaacatccaagtcaaggaggtcacgacgaatgatggcgtcacaaccatcgctaataaccttaccagcacggttcaagtcttctcggactcagactatcagctcccgtacgtgctcgggtcggctcacgagggctgcctcccgccgttcccagcagacgtcttcatggtgccacagtatggatacctcaccctgaacaacgggagtcaggcagtaggacgctcttcattttactgcctggagtactttccttctcagatgctgcgtaccggaaacaactttaccttcagctacacttttgaggacgttcctttccacagcagctacgctcacagccagagtctggaccgtctcatgaatcctctcatcgaccagtacctgtattacctgaacagaactcagaatcagtccggaagtgcccaaaacaaggacttgctgtttagccgggggtctccaactggcatgtctgttcagcccaaaaactggctacctggaccctgttatcggcagcagcgcgtttctaaaacaaaaacagacaacaacaacagcaactttacctggactggtgcttcaaaatataaccttaatgggcgtgaatctataatcaaccctggcactgctatggcctcacacaaagacgacaaagacaagttctttcccatgagcggtgtcatgatttttggaaaggagagcgccggagcttcaaacactgcattggacaatgtcatgatcacagacgaagaggaaatcaaagccactaaccccgtggccactgaaagatttgggactgtggcagtcaatctccagagcagcagcacagaccctgcgaccggagatgtgcatgccatgggagccttacctggaatggtgtggcaagacagagacgtatacctgcagggtcctatttgggccaaaattcctcacacggatggacactttcacccgtctcctctcatgggcggctttggactcaagaacccgcctcctcagatcctcatcaaaaacacgcctgttcctgcgaatcctccggcggagttttcagctacaaagtttgcttcattcatcacccagtattccacaggacaagtgagcgtggagattgaatgggagctgcagaaagaaaacagcaaacgctggaatcccgaagtgcagtatacatctaactatgcaaaatctgccaacgttgatttcactgtggacaacaatggactttatactgagcctcgccccattggcacccgttacctcacccgtcccctgtaa

SEQ ID NO: 551 - protein, 736 aa, Artificial Sequence
  source: /note="Description of Artificial Sequence: Synthetic polypeptide"
MAADGYLPDWLEDTLSEGIRQWWKLKPGPPPPKPAERHKDDSRGLVLPGYKYLGPFNGLDKGEPVNEADAAALEHDKAYDQQLKAGDNPYLKYNHADAEFQQRLQGDTSFGGNLGRAVFQAKKRVLEPLGLVEQAGETAPGKKRPLIESPQQPDSSTGIGKKGKQPAKKRLNFGQTGDSESVPDPQPLGEPPATPAAVGPTTMASGGGAPMADNNEGADGVGNASGNWHCDSTWLGDRVITTSTRTWALPTYNNHLYKQISSASTGASNDNHYFGYSTPWGYFDFNRFHCHFSPRDWQRLINNNWGFRPKRLNFKLFNIQVKEVTTNDGVTTIANNLTSTVQVFSDSDYQLPYVLGSAHEGCLPPFPADVFMVPQYGYLTLNNGSQAVGRSSFYCLEYFPSQMLRTGNNFTFSYTFEDVPFHSSYAHSQSLDRLMNPLIDQYLYYLNRTQNQSGSAQNKDLLFSRGSPTGMSVQPKNWLPGPCYRQQRVSKTKTDNNNSNFTWTGASKYNLNGRESIINPGTAMASHKDDKDKFFPMSGVMIFGKESAGASNTALDNVMITDEEEIKATNPVATERFGTVAVNLQSSSTDPATGDVHAMGALPGMVWQDRDVYLQGPIWAKIPHTDGHFHPSPLMGGFGLKNPPPQILIKNTPVPANPPAEFSATKFASFITQYSTGQVSVEIEWELQKENSKRWNPEVQYTSNYAKSANVDFTVDNNGLYTEPRPIGTRYLTRPL

SEQ ID NO: 552 - DNA, 2211 bp, Artificial Sequence
  source: /note="Description of Artificial Sequence: Synthetic polynucleotide"
atggctgccgatggttatcttccagattggctcgaggacaacctctctgagggcattcgcgagtggtgggcgctgaaacctggagccccgaagcccaaagccaaccagcaaaagcaggacgacggccggggtctggtgcttcctggctacaagtacctcggacccttcaacggactcgacaagggggagcccgtcaacgcggcggatgcagcggccctcgagcacgacaaggcctacgaccagcagctcaaagcgggtgacaatccgtacctgcggtataaccacgccgacgccgagtttcaggagcgtctgcaagaagatacgtcttttgggggcaacctcgggcgagcagtcttccaggccaagaagcgggttctcgaacctctcggtctggttgaggaaggcgctaagacggctcctggaaagaaacgtccggtagagcaatcgccacaagagccagactcctcctcgggcatcggcaagacaggccagcagcccgctaaaaagagactcaattttggtcagactggcgactcagagtcagtccccgacccacaacctctcggagaacctccagcaacccccgctgctgtgggacctactacaatggcttcaggcggtggcgcaccaatggcagacaataacgaaggcgccgacggagtgggtaatgcctcaggaaattggcattgcgattccacatggctgggcgacagagtcatcaccaccagcacccgaacatgggccttgcccacctataacaaccacctctacaagcaaatctccagtgcttcgacgggggccagcaacgacaaccactacttcggctacagcaccccctgggggtattttgactttaacagattccactgccacttttcaccacgtgactggcagcgactcatcaacaacaactggggattccggcccaagagactcagcttcaagctcttcaacatccaggtcaaggaggtcacgacgaatgatggcgtcacaaccatcgctaataaccttaccagcacggttcaagtcttctcggactcggagtaccagcttccgtacgtcctcggctctgcgcaccagggctgcctccctccgttcccggcggacgtgttcatgattccgcaatacggctacctgacgctcaacaatggcagccaagccgtgggacgttcatccttttactgcctggaatatttcccttctcagatgctgagaacgggcaacaactttaccttcagctacacctttgaggaagtgcctttccacagcagctacgcgcacagccagagcctggaccggctgatgaatcctctcatcgatcaatacctgtattacctgaacagaactcaaaatcagtccggaagtgcccaaaacaaggacttgctgtttagccgtgggtctccagctggcatgtctgttcagcccaaaaactggctacctggaccctgttatcggcagcagcgcgtttctaaaacaaaaacagacaacaacaacagcaattttacctggactggtgcttcaaaatataacctcaatgggcgtgaatccatcatcaaccctggcactgctatggcctcacataaagacgacgaagacaagttctttcccatgagcggtgtcatgatttttggaaaagagagcgccggagcttcaaacactgcattggacaatgtcatgattacagacgaagaggaaattaaagccactaaccctgtggccaccgaaagatttgggaccgtggcagtcaatttccagagcagcagcacagaccctgcgaccggagatgtgcatgctatgggagcattacctggcatggtgtggcaagatagagacgtgtacctgcagggtcccatttgggccaaaattcctcacacagatggacactttcacccgtctcctcttatgggcggctttggactcaagaacccgcctcctcagatcctcatcaaaaacacgcctgttcctgcgaatcctccggcggagttttcagctacaaagtttgcttcattcatcacccaatactccacaggacaagtgagcgtggagattgaatgggagctgcagaaagaaaacagcaaacgctggaatcccgaagtgcagtatacatctaactatgcaaaatctgccaacattgatttcactgtggacaacaatggactttatactgagcctcgccccattggcacccgttacctcacccgtccccagtaa

SEQ ID NO: 553 - protein, 736 aa, Artificial Sequence
  source: /note="Description of Artificial Sequence: Synthetic polypeptide"
MAADGYLPDWLEDNLSEGIREWWALKPGAPKPKANQQKQDDGRGLVLPGYKYLGPFNGLDKGEPVNAADAAALEHDKAYDQQLKAGDNPYLRYNHADAEFQERLQEDTSFGGNLGRAVFQAKKRVLEPLGLVEEGAKTAPGKKRPVEQSPQEPDSSSGIGKTGQQPAKKRLNFGQTGDSESVPDPQPLGEPPATPAAVGPTTMASGGGAPMADNNEGADGVGNASGNWHCDSTWLGDRVITTSTRTWALPTYNNHLYKQISSASTGASNDNHYFGYSTPWGYFDFNRFHCHFSPRDWQRLINNNWGFRPKRLSFKLFNIQVKEVTTNDGVTTIANNLTSTVQVFSDSEYQLPYVLGSAHQGCLPPFPADVFMIPQYGYLTLNNGSQAVGRSSFYCLEYFPSQMLRTGNNFTFSYTFEEVPFHSSYAHSQSLDRLMNPLIDQYLYYLNRTQNQSGSAQNKDLLFSRGSPAGMSVQPKNWLPGPCYRQQRVSKTKTDNNNSNFTWTGASKYNLNGRESIINPGTAMASHKDDEDKFFPMSGVMIFGKESAGASNTALDNVMITDEEEIKATNPVATERFGTVAVNFQSSSTDPATGDVHAMGALPGMVWQDRDVYLQGPIWAKIPHTDGHFHPSPLMGGFGLKNPPPQILIKNTPVPANPPAEFSATKFASFITQYSTGQVSVEIEWELQKENSKRWNPEVQYTSNYAKSANIDFTVDNNGLYTEPRPIGTRYLTRPQ

SEQ ID NO: 554 - DNA, 2211 bp, Artificial Sequence
  source: /note="Description of Artificial Sequence: Synthetic polynucleotide"
atggctgccgatggttatcttccagattggctcgaggacaacctctctgagggcattcgcgagtggtgggacttgaaacctggagccccgaaacccaaagccaaccagcaaaagcaggacgacggccggggtctggtgcttcctggctacaagtacctcggacccttcaacggactcgacaagggggagcccgtcaacgcggcggatgcagcggccctcgagcacgacaaggcctacgaccagcagctcaaagcgggtgacaatccgtaccttcggtataaccacgccgacgccgagtttcaggagcgtctgcaagaagatacgtcttttgggggcaacctcgggcgagcagtcttccaggccaaaaagagggttctcgaacctctcggtctggttgaggaagcggctaagacggctcctggaaagaaacgtccggtagagcagtcgccacaagagccagactcctcctcgggcattggcaagacaggccagcagcccgctaaaaagagactcaattttggtcagactggcgactcagagtcagtccccgacccacaacctctcggagaacctcccgcagccccctcaggtgtgggatctcttacaatggcttcaggtggtggcgcaccaatggcagacaataacgaaggcgccgacggagtgggtaatgcctcaggaaattggcattgcgattccacatggctgggcgacagagtcatcaccaccagcacccgcacctgggccttgcccacctacaataaccacctctacaagcaaatctccagtgcttcaacgggggccagcaacgacaaccactacttcggctacagcaccccctgggggtattttgacttcaacagattccactgccacttttcaccacgtgactggcaaagactcatcaacaacaattggggattccggcccaagagactcaacttcaagctcttcaacatccaagtcaaggaggtcacgacgaatgatggcgtcacgaccatcgctaataaccttaccagcacggttcaagtcttctcggactcggagtaccagttgccgtacgtcctcggctctgcgcaccagggctgcctccctccgttcccggcggacgtgttcatgattccgcagtacggctacctaacgctcaacaatggcagccaggcagtgggacggtcatccttttactgcctggaatatttcccatcgcagatgctgagaacgggcaacaactttaccttcagctacacctttgaggaagtgcctttccacagcagctacgcgcacagccagagcctggaccggctgatgaatcctctcatcgaccagtacctgtattacctgaacagaactcaaaatcagtccggaagtgcccaaaacaaggacttgctgtttagccgtgggtctccagctggcatgtctgttcagcccaaaaactggctacctggaccctgttaccggcagcagtgcgtttctaaaacaaaaacagacaacaacaacagcaactttacctggactggtgcttcaaaatataaccttaatgggcgtgaatctataatcaaccctggcactgctatggcctcacacaaagacgacaaagacaagttctttcccatgagcggtgtcatgatttttggaaaggagagcgccggagcttcaaacactgcattggacaatgtcatgatcacagacgaagaggaaatcaaagccactaaccccgtggccaccgaaagatttgggactgtggcagtcaatctccagagcagcagcacagaccctgcgaccggagatgtgcatgttatgggagccttacctggaatggtgtggcaagacagagacgtatacctgcagggtcctatttgggccaaaattcctcacacagatggacactttcacccgtctcctcttatgggcggctttggactcaagaacccgcctcctcagatcctcatcaaaaacacgcctgttcctgcgaatcctccggcggagttttcagctacaaagtttgcttcattcatcacccaatactccacaggacaagtgagcgtggagattgaatgggagctgcagaaagaaaacagcaagcgctggaatcccgaagtgcagtacacatccaattatgcaaaatctgccaacgttgatttcactgtggacaacaatggactttatactgagcctcgccccattggcacccgttacctcacccgtcccctgtaa

SEQ ID NO: 555 - protein, 736 aa, Artificial Sequence
  source: /note="Description of Artificial Sequence: Synthetic polypeptide"
MAADGYLPDWLEDNLSEGIREWWDLKPGAPKPKANQQKQDDGRGLVLPGYKYLGPFNGLDKGEPVNAADAAALEHDKAYDQQLKAGDNPYLRYNHADAEFQERLQEDTSFGGNLGRAVFQAKKRVLEPLGLVEEAAKTAPGKKRPVEQSPQEPDSSSGIGKTGQQPAKKRLNFGQTGDSESVPDPQPLGEPPAAPSGVGSLTMASGGGAPMADNNEGADGVGNASGNWHCDSTWLGDRVITTSTRTWALPTYNNHLYKQISSASTGASNDNHYFGYSTPWGYFDFNRFHCHFSPRDWQRLINNNWGFRPKRLNFKLFNIQVKEVTTNDGVTTIANNLTSTVQVFSDSEYQLPYVLGSAHQGCLPPFPADVFMIPQYGYLTLNNGSQAVGRSSFYCLEYFPSQMLRTGNNFTFSYTFEEVPFHSSYAHSQSLDRLMNPLIDQYLYYLNRTQNQSGSAQNKDLLFSRGSPAGMSVQPKNWLPGPCYRQQCVSKTKTDNNNSNFTWTGASKYNLNGRESIINPGTAMASHKDDKDKFFPMSGVMIFGKESAGASNTALDNVMITDEEEIKATNPVATERFGTVAVNLQSSSTDPATGDVHVMGALPGMVWQDRDVYLQGPIWAKIPHTDGHFHPSPLMGGFGLKNPPPQILIKNTPVPANPPAEFSATKFASFITQYSTGQVSVEIEWELQKENSKRWNPEVQYTSNYAKSANVDFTVDNNGLYTEPRPIGTRYLTRPL

SEQ ID NO: 556 - DNA, 2211 bp, Artificial Sequence
  source: /note="Description of Artificial Sequence: Synthetic polynucleotide"
atggctgccgatggttatcttccagattggctcgaggacaacctctctgagggcattcgcgaatggtgggacttgaaacctggagccccgaaacccaaagtcaaccagcaaaagcaggacaacgctcggggtcttgtgcttccgggttacaaatacctcggacccttcaacggactcgacaagggggagcccgtcaacgcggcggacgcagcggccctcgagcacgacaaggcctacgaccagcagctcaaagcgggtgacaatccgtaccttcggtataaccacgccgacgccgagtttcaggagcgtctgcaagaagatacgtcttttgggggcaaccttggacgagcagtcttccaggccaagaagagggttctcgaaccttttggtctggttgaggaaggtgctaagacggctcctggaaagaaacgtccggtagagcagtcgccacaagagccagactcctcctcgggcattggcaagacaggccagcagcccgctaaaaagagactcaattttggtcagactggcgactcagagtcagtccccgacccacaacctctcggagaacctccagcaacccccgctgctgtgggacctactacaatggcttcaggcggtggcgcaccaatggcagacaataacgaaggcgccgacggagtgggtaatgcctcaggaaattggcattgcgattccacatggctgggcgacagagtcatcaccaccagcacccgcacctgggccttgcccacctacaataaccacctctacaagcaaatctccagtgcttcaacgggggccagcaacgacaaccactacttcggctacagcaccccctgggggtattttgacttcaacagattccactgccacttttcaccacgtgactggcaaagactcatcaacaacaattggggattccggcccaagagactcaacttcaagctcttcaacatccaagtcaaggaggtcacgacgaatgatggcgtcacgaccatcgctaataaccttaccagcacggttcaagtcttctcggactcggagtaccagttgccgtacgtcctcggctctgcgcaccagggctgcctccctccgttcccggcggacgtgttcatgattccgcaatacggctacctgacgctcaacaatggcagccaggcagtgggacggtcatccttttactgcctggaatatttcccatcgcagatgctgagaacgggcaataactttaccttcagctacacttttgaggacgttcctttccacagcagctacgctcacagccagagcctggaccggctgatgaatcctctcatcgaccagtacctgtattacctgaacagaactcagaatcagtccggaagtgcccaaaacaaggacttgctgtttagccgtgggtctccaactggcatgtctgttcagcccaaaaactggctacctggaccctgttatcggcagcagcgcgtttctaaaacaaaaacagacaacaacaacagcaactttacctggactggtgcttcaaaatataaccttaatgggcgtgaatctataatcaaccctggcactgctatggcctcacacaaagacgacgaagacaagttctttcccatgagcggtgtcatgatttttggaaaggagagcgccggagcttcaaacactgcattggacaatgtcatgatcacagacgaagaggaaatcaaagccactaaccccgtggccactgaaagatttgggactgtggcagtcaatctccagagcagcagcacagaccctgcgaccggagatgtgcatgccatgggagccttacctggaatggtgtggcaagacagagacgtatacctgcagggtcctatttgggccaaaattcctcacacggatggacactttcacccgtctcctctcatgggcggctttggacttaagcacccgcctcctcagatcctcatcaaaaacacgcctgttcctgcgaatcctccggcagagttttcggctacaaagtttgcttcattcatcacccagtattccacaggacaagtgagcgtggagattgaatgggagctgcagaaagaaaacagcaaacgctggaatcccgaagtgcagtatacatctaactatgcaaaatctgccaacgttgatttcactgtggacaacaatggactttatactgagcctcgccccattggcacccgttacctcacccgtcccctgtaa

SEQ ID NO: 557 - protein, 736 aa, Artificial Sequence
  source: /note="Description of Artificial Sequence: Synthetic polypeptide"
MAADGYLPDWLEDNLSEGIREWWDLKPGAPKPKVNQQKQDNARGLVLPGYKYLGPFNGLDKGEPVNAADAAALEHDKAYDQQLKAGDNPYLRYNHADAEFQERLQEDTSFGGNLGRAVFQAKKRVLEPFGLVEEGAKTAPGKKRPVEQSPQEPDSSSGIGKTGQQPAKKRLNFGQTGDSESVPDPQPLGEPPATPAAVGPTTMASGGGAPMADNNEGADGVGNASGNWHCDSTWLGDRVITTSTRTWALPTYNNHLYKQISSASTGASNDNHYFGYSTPWGYFDFNRFHCHFSPRDWQRLINNNWGFRPKRLNFKLFNIQVKEVTTNDGVTTIANNLTSTVQVFSDSEYQLPYVLGSAHQGCLPPFPADVFMIPQYGYLTLNNGSQAVGRSSFYCLEYFPSQMLRTGNNFTFSYTFEDVPFHSSYAHSQSLDRLMNPLIDQYLYYLNRTQNQSGSAQNKDLLFSRGSPTGMSVQPKNWLPGPCYRQQRVSKTKTDNNNSNFTWTGASKYNLNGRESIINPGTAMASHKDDEDKFFPMSGVMIFGKESAGASNTALDNVMITDEEEIKATNPVATERFGTVAVNLQSSSTDPATGDVHAMGALPGMVWQDRDVYLQGPIWAKIPHTDGHFHPSPLMGGFGLKHPPPQILIKNTPVPANPPAEFSATKFASFITQYSTGQVSVEIEWELQKENSKRWNPEVQYTSNYAKSANVDFTVDNNGLYTEPRPIGTRYLTRPL

SEQ ID NO: 558 - DNA, 2208 bp, Artificial Sequence
  source: /note="Description of Artificial Sequence: Synthetic polynucleotide"
  modified_base (955)..(955): a, c, t, or g
  modified_base (971)..(972): a, c, t, or g
  modified_base (981)..(981): a, c, t, or g
  modified_base (986)..(986): a, c, t, or g
  modified_base (1235)..(1235): a, c, t, or g
  modified_base (1694)..(1696): a, c, t, or g
  modified_base (1698)..(1698): a, c, t, or g
  modified_base (1763)..(1765): a, c, t, or g
  modified_base (1778)..(1778): a, c, t, or g
  modified_base (2204)..(2204): a, c, t, or g
atggctgccgatggttatcttccagattggctcgaggacaacctctctgagggcattcgcgaatggtgggacttgaaacctggagccccgaaacccaaagtcaaccagcaaaagcaggacaacgctcggggtcttgtgcttccgggttacaaatacctcggacccttcaacggactcgacaagggggagcccgtcaacgcggcggacgcagcggccctcgagcacgacaaggcctacgaccagcagctcaaagcgggtgacaatccgtaccttcggtataaccacgccgacgccgagtttcaggagcgtctgcaagaagatacgtcttttgggggcaaccttggacgagcagtcttccaggccaagaagagggttctcgaaccttttggtctggttgaggaaggtgctaagacggctcctggaaagaaacgtccggtagagcagtcgccacaagagccagactcctcctcgggcattggcaagacaggccagcagcccgctaaaaagagactcaattttggtcagactggcgactcagagtcagtccccgacccacaacctctcggagaacctccagcaacccccgctgctgtgggacctactacaatggcttcaggcggtggcgcaccaatggcagacaataacgaaggcgccgacggagtgggtaatgcctcaggaaattggcattgcgattccacatggctgggcgacagagtcatcaccaccagcacccgaacatgggccttgcccacctataacaaccacctctacaagcaaatctccagtgcttcaacgggggccagcaacgacaaccactacttcggctacagcaccccctgggggtattttgatttcaacagattccactgccacttttcaccacgtgactggcagcgactcatcaataacaattggggattccggcccaagagactcaacttcaaactcttcaacntccaagtcaaggaggnnacgacgaangatgncgtcacaaccatcgctaataaccttaccagcacggttcaagtcttctcggactcggagtaccagcttccgtacgtcctcggctctgcgcaccagggctgcctccctccgttcccggcggacgtgttcatgattccgcaatacggctacctgacgctcaacaatggcagccaggcagtgggacggtcatccttttactgcctggaatatttcccatcgcagatgctgagaacgggcaataactttacctncagctacacttttgaggacgttcctttccacagcagctacgctcacagccagagcctggaccggctgatgaatcctctcatcgaccagtacctgtattacctgaacagaactcagaatcagtccggaagtgcccaaaacaaggacttgctgtttagccgtgggtctccaactggcatgtctgttcagcccaaaaactggctacctggaccctgttatcggcagcagcgcgtttctaaaacaaaaacagacaacaacaacagcaactttacctggactggtgcttcaaaatataaccttaatgggcgtgaatctataatcaaccctggcactgctatggcctcacacaaagacgacgaagacaagttctttcccatgagcggtgtcatgatttttggaaaggagagcgccggagcttcaaacactgcattggacaatgtcatgatcacagacgaagagannncnaagccactaaccccgtggccactgaaagatttgggactgtggcagtcaatctccaagcagcacannnaccctgcgaccgnagatgtgcatgccatgggagccttacctggaatggtgtggcaagacagagacgtatacctgcagggtcctatttgggccaaaattcctcacacggatggacactttcacccgtctcctctcatgggcggctttggacttaagcacccgcctcctcagatcctcatcaaaaacacgcctgttcctgcgaatcctccggcagagttttcggctacaaagtttgcttcattcatcacccagtattccacaggacaagtgagcgtggagattgaatgggagctgcagaaagaaaacagcaaacgctggaatcccgaagtgcagtatacatctaactatgcaaaatctgccaacgttgatttcactgtggacaacaatggactttatactgagcctcgccccattggcacccgttacctcacccgtccccngtaa

SEQ ID NO: 559 - protein, 723 aa, Artificial Sequence
  source: /note="Description of Artificial Sequence: Synthetic polypeptide"
MAADGYLPDWLEDNLSEGIREWWDLKPGAPKPKVNQQKQDNARGLVLPGYKYLGPFNGLDKGEPVNAADAAALEHDKAYDQQLKAGDNPYLRYNHADAEFQERLQEDTSFGGNLGRAVFQAKKRVLEPFGLVEEGAKTAPGKKRPVEQSPQEPDSSSGIGKTGQQPAKKRLNFGQTGDSESVPDPQPLGEPPATPAAVGPTTMASGGGAPMADNNEGADGVGNASGNWHCDSTWLGDRVITTSTRTWALPTYNNHLYKQISSASTGASNDNHYFGYSTPWGYFDFNRFHCHFSPRDWQRLINNNWGFRPKRLNFKLFNQVKETTDVTTIANNLTSTVQVFSDSEYQLPYVLGSAHQGCLPPFPADVFMIPQYGYLTLNNGSQAVGRSSFYCLEYFPSQMLRTGNNFTSYTFEDVPFHSSYAHSQSLDRLMNPLIDQYLYYLNRTQNQSGSAQNKDLLFSRGSPTGMSVQPKNWLPGPCYRQQRVSKTKTDNNNSNFTWTGASKYNLNGRESIINPGTAMASHKDDEDKFFPMSGVMIFGKESAGASNTALDNVMITDEEATNPVATERFGTVAVNLQSSPATDVHAMGALPGMVWQDRDVYLQGPIWAKIPHTDGHFHPSPLMGGFGLKHPPPQILIKNTPVPANPPAEFSATKFASFITQYSTGQVSVEIEWELQKENSKRWNPEVQYTSNYAKSANVDFTVDNNGLYTEPRPIGTRYLTRP

SEQ ID NO: 560 - DNA, 2208 bp, Artificial Sequence
  source: /note="Description of Artificial Sequence: Synthetic polynucleotide"
atggctgccgatggttatcttccagattggctcgaggacactctctctgaaggaataagacagtggtggaagctcaaacctggcccaccaccaccaaagcccgcagagcggcataaggacgacagcaggggtcttgtgcttcctgggtacaagtacctcggacccttcaacggactcgacaagggagagccggtcaacgaggcagacgccgcggccctcgagcacgacaaagcctatgaccggcagctcgacagcggagacaacccgtacctcaagtacaaccacgccgacgcggagtttcaggagcgccttaaagaagatacgtcttttgggggcaacctcggacgagcagtcttccaggcgaaaaagagggttcttgaacctctgggcctggttgaggaacctgttaagacggctccgggaaaaaagaggccggtagagcactctcctgtggagccagactcctcctcgggaaccggaaaggcgggtcagcagcctgcaagaaaaagattgaattttggtcagactggagacgcagactcagtacctgacccccagcctctcggacagccaccagcagccccctctggtctgggaactaatacgatggctacaggcagtggcgcaccaatggcagacaataacgagggcgccgacggagtgggtaattcctcgggaaattggcattgcgattccacatggatgggcgacagagtcatcaccaccagcacccgaacctgggccctgcccacctacaacaaccacctctacaaacaaatttccagccaatcaggagcctcgaacgacaatcactactttggctacagcaccccttgggggtattttgacttcaacagattccactgccacttttcaccacgtgactggcaaagactcatcaacaacaactggggattccgacccaagagactcaagttcaagctctttaacattcaagtcaaagaggtcacgcagaatgacggtacgacgacgattgccaataaccttaccagcacggttcaggtgtttactgactcggagtaccagctcccgtacgtcctcggctcggcgcatcaaggatgcctcccgccgttcccagcagacgtcttcatggtgccacagtatggatacctcaccctgaacaacgggagtcaggcagtaggacgctcttcattttactgcctggagtactttccttctcagatgctgcgtaccggtaacaactttaccttcagctacacttttgaggacgttcctttccacagcagctacgctcacagccagagtctggaccgtctcatgaatcctctcatcgaccagtacctgtattacttgagcagaacagacgctccaagtggaaccaccacgcagtcaaggcttcagttttctcaggccggagcgagtgacattcgggaccagtctaggaactggcttcctggaccctgttaccgccagcagcgagtatcaaagacatctgcggataacaacaacagtgaatactcgtggactggagctaccaagtaccacctcaatggcagagactctctggtgaatccgggcccggccatggcaagccacaaggacgatgaagaaaagttttttcctcagagcggggttctcatctttgggaagcaaggctcagagaaaacaagtgtggacattgaaaaggtcatgattacagacgaagaggaaatcaggacaaccaatcccgtggctacggagcagtatggttctgtatctaccaacctccagagaggcaacagacaagcagctaccgcagatgtcaacacacaaggcgttcttccaggcatggtctggcaggacagagatgtgtaccttcaggggcccatctgggcaaagattccacacacggacggacattttcacccctctcccctcatgggtggattcggacttaaacaccctcctccacagattctcatcaagaacaccccggtacctgcgaatccttcgaccaccttcagtgcggcaaagtttgcttccttcatcacacagtactccacgggacaggtcagcgtggagatcgagtgggagctgcagaaggaaaacagcaaacgctggaatcccgaagttcagtacacttccaactacaacaagtctgttaatgtggactttactgtggacactaatggcgtgtattcagagcctcgccccattggcaccagatacctgactcgtaatctgtaa

SEQ ID NO: 561 - protein, 735 aa, Artificial Sequence
  source: /note="Description of Artificial Sequence: Synthetic polypeptide"
MAADGYLPDWLEDTLSEGIRQWWKLKPGPPPPKPAERHKDDSRGLVLPGYKYLGPFNGLDKGEPVNEADAAALEHDKAYDRQLDSGDNPYLKYNHADAEFQERLKEDTSFGGNLGRAVFQAKKRVLEPLGLVEEPVKTAPGKKRPVEHSPVEPDSSSGTGKAGQQPARKRLNFGQTGDADSVPDPQPLGQPPAAPSGLGTNTMATGSGAPMADNNEGADGVGNSSGNWHCDSTWMGDRVITTSTRTWALPTYNNHLYKQISSQSGASNDNHYFGYSTPWGYFDFNRFHCHFSPRDWQRLINNNWGFRPKRLKFKLFNIQVKEVTQNDGTTTIANNLTSTVQVFTDSEYQLPYVLGSAHQGCLPPFPADVFMVPQYGYLTLNNGSQAVGRSSFYCLEYFPSQMLRTGNNFTFSYTFEDVPFHSSYAHSQSLDRLMNPLIDQYLYYLSRTDAPSGTTTQSRLQFSQAGASDIRDQSRNWLPGPCYRQQRVSKTSADNNNSEYSWTGATKYHLNGRDSLVNPGPAMASHKDDEEKFFPQSGVLIFGKQGSEKTSVDIEKVMITDEEEIRTTNPVATEQYGSVSTNLQRGNRQAATADVNTQGVLPGMVWQDRDVYLQGPIWAKIPHTDGHFHPSPLMGGFGLKHPPPQILIKNTPVPANPSTTFSAAKFASFITQYSTGQVSVEIEWELQKENSKRWNPEVQYTSNYNKSVNVDFTVDTNGVYSEPRPIGTRYLTRNL

SEQ ID NO: 562 - DNA, 2208 bp, Artificial Sequence
  source: /note="Description of Artificial Sequence: Synthetic polynucleotide"
atggctgccgatggttatcttccagattggctcgaggacactctctctgaaggaataagacagtggtggaagctcaaacctggcccaccaccaccaaagcccgcagagcggcataaggacgacagcaggggtcttgtgcttcctgggtacaagtacctcggacccttcaacggactcgacaagggagagccggtcaacgaggcagacgccgcggccctcgagcacgacaaagcctatgaccggcagctcgacagcggagacaacccgtacctcaagtacaaccacgccgacgcggagtttcaggagcgccttaaagaagatacgtcttttgggggcaacctcggacgagcagtcttccaggcgaaaaagagggttcttgaacctctgggcctggttgaggaacctgttaagacggctccgggaaaaaagaggccggtagagcactctcctgtggagccagactcctcctcgggaaccggaaaggcgggccagcagcctgcaagaaaaagattgaattttggtcagactggagacgcaaactcagtacctgacccccagcctctcggacagccaccagcagccccctctggtctgggaactaatacgatggctacaggcagtggcgcaccaatggcagacaataacgagggcgccgacggagtgggtaattcctcgggaaattggcattgcgattccacatggatgggcgacagagtcatcaccaccagcacccgaacctgggccctgcccacctacaacaaccacctctacaaacaaatttccagccaatcaggagcctcgaacgacaatcactactttggctacagcaccccttgggggtattttgacttcaacagattccactgccacttttcaccacgtgactggcaaagactcatcaacaacaactggggattccgacccaagagactcaagttcaagctctttaacattcaagtcaaagaggtcacgcagaatgacggtacgacgacgattgccaataaccttaccagcacggttcaggtgtttactgactcggagtaccagctcccgtacgtcctcggctcggcgcatcaaggatgcctcccgccgttcccagcagacgtcttcatggtgccacagtatggatacctcaccctgaacaacgggagtcgggcagtaggacgctcttcattttactgcctggagtactttccttctcagatgctgcgtaccggtaacaactttaccttcagctacacttttgaggacgttcctttccacagcagctacgctcacagccagagtctggaccgtctcatgaatcctctcatcgaccagtacctgtattacttgagcagaacagacactccaagtggaaccaccacgcagtcaaggcttcagttttctcaggccggagcgagtgacattcgggaccagtctaggaactggcttcctggaccctgttaccgccagcagcgagtatcaaagacatctgcggataacaacaacagtgaatactcgtggactggagctaccaagtaccacctcaatggcagagactctctggtgaatccgggcccggccatggcaagccacaaggacgatgaagaaaagttttttcctcagagcggggttctcatctttgggaagcaaggctcagagaaaacaagtgtggacattgaaaaggtcatgattacagacgaagaggaaatcaggacgaccaatcccgtggctacggagcagtatggttctgtatctaccaacctccagagaggcaacagacaagcagctaccgcagatgtcaacacacaaggcgttcttccaggcatggtctggcaggacagagatgtgtaccttcaggggcccatctgggcaaagattccacacacggacggacattttcacccctctcccctcatgggtggattcggacttaaacaccctcctccacagattctcatcaagaacaccccggtacctgcgaatccttcgaccaccttcagtgcggcaaagtttgcttccttcatcacacagtactccacgggacaggtcagcgtggagatcgagtgggagctgcagaaggaaaacagcaaacgctggaatcccgaagttcagtacacttccaactacaacaagtctgttaatgtggactttactgtggacactaatggcgtgtatacagagcctcgccccattggcaccagatacctgactcgtaatctgtaa

SEQ ID NO: 563 - protein, 735 aa, Artificial Sequence
  source: /note="Description of Artificial Sequence: Synthetic polypeptide"
MAADGYLPDWLEDTLSEGIRQWWKLKPGPPPPKPAERHKDDSRGLVLPGYKYLGPFNGLDKGEPVNEADAAALEHDKAYDRQLDSGDNPYLKYNHADAEFQERLKEDTSFGGNLGRAVFQAKKRVLEPLGLVEEPVKTAPGKKRPVEHSPVEPDSSSGTGKAGQQPARKRLNFGQTGDANSVPDPQPLGQPPAAPSGLGTNTMATGSGAPMADNNEGADGVGNSSGNWHCDSTWMGDRVITTSTRTWALPTYNNHLYKQISSQSGASNDNHYFGYSTPWGYFDFNRFHCHFSPRDWQRLINNNWGFRPKRLKFKLFNIQVKEVTQNDGTTTIANNLTSTVQVFTDSEYQLPYVLGSAHQGCLPPFPADVFMVPQYGYLTLNNGSRAVGRSSFYCLEYFPSQMLRTGNNFTFSYTFEDVPFHSSYAHSQSLDRLMNPLIDQYLYYLSRTDTPSGTTTQSRLQFSQAGASDIRDQSRNWLPGPCYRQQRVSKTSADNNNSEYSWTGATKYHLNGRDSLVNPGPAMASHKDDEEKFFPQSGVLIFGKQGSEKTSVDIEKVMITDEEEIRTTNPVATEQYGSVSTNLQRGNRQAATADVNTQGVLPGMVWQDRDVYLQGPIWAKIPHTDGHFHPSPLMGGFGLKHPPPQILIKNTPVPANPSTTFSAAKFASFITQYSTGQVSVEIEWELQKENSKRWNPEVQYTSNYNKSVNVDFTVDTNGVYTEPRPIGTRYLTRNL

SEQ ID NO: 564 - DNA, 2211 bp, Artificial Sequence
  source: /note="Description of Artificial Sequence: Synthetic polynucleotide"
atggctgccgatggttatcttccagattggctcgaggacactctctctgaaggaataagacagtggtggaagctcaaacctggcccaccaccaccaaagcccgcagagcggcataaggacgacagcaggggtcttgtgcttcctgggtacaagtacctcggacccttcaacggactcgacaagggagagccggtcaacgaggcagacgccgcggccctcgagcacgacaaggcctacgaccagcagctcaaagcgggtgacaatccgtacctgcggtataaccacgccgacgccgagtttcaggagcgtctgcaagaagatacgtcttttgggggcaacctcgggcgagcagtcttccaggccaagaagcgggttctcgaacctctcggtctggttgaggaaggcgctaagacggctcctggaaagaaacgtccggtagagcagtcgccacaagagccagactcctcctcgggcatcggcaagacaggccagcagcccgctaaaaagagactcaattttggtcagactggcgactcagagtcagtccccgacccacaacctctcggagaacctccagcaacccccgctgctgtgggacctactacaatggcttcaggcggtggcgcaccaatggcagacaataacgaaggcgccgacggagtgggtaatgcctcaggaaattggcattgcgattccacatggctgggcgacagagtcatcaccaccagcacccgaacatgggccttgcccacctataacaaccacctctacaagcaaatctccagtgcttcgacgggggccagcaacgacaaccactacttcggctacagcaccccctgggggtattttgactttaacagattccactgccacttttcaccacgtgactggcagcgactcatcaacaataactggggattccggcccaagagactcagcttcaagctcttcaacatccaggtcaaggaggtcacgacgaatgatggcgtcacaaccatcgctaataaccttaccagcacggttcaagtcttctcggactcggagtaccagcttccgtacgtcctcggctctgcgcaccagggctgcctccctccgttcccggcggacgtgttcatgattccgcaatacggctacctgacgctcaacaatggcagccaagccgtgggacgttcatccttttactgcctggaatatttcccttctcagatgctgagaacgggcaacaactttaccttcagctacacctttgaggaagtgcctttccacagcagctacgcgcacagccagagcctggaccggctgatgaatcctctcatcgatcaatacctgtattacctgaacagaactcaaaatcagtccggaagtgcccaaaacaaggacttgctgtttagccgtgggtctccagctggcatgtctgttcagcccaaaaactggctacctggaccctgttatcggcagcagcgcgtttctaaaacaaaaacagacaacaacaacagcaattttacctggactggtgcttcaaaatataacctcaatgggcgtgaatccatcatcaaccctggcactgctatggcctcacacaaagacgacgaagacaagttctttcccatgagcggtgtcatgatttttggaaaagagagcgccggagcttcaaacactgcattggacaatgtcatgattacggacgaagaggaaattaaagccactaaccctgtggccaccgaaagatttgggaccgtggcagtcaatttccagagcagcagcacagaccctgcgaccggagatgtgcatgctatgggagcattacctggcatggtgtggcaagatagagacgtgtacctgcagggtcccatttgggccaaaattcctcacacagatggacactttcacccgtctcctcttatgggcggctttggactcaagaacccgcctcctcagatcctcatcaaaaacacgcctgttcctgcgaatcctccggcggagttttcagctacaaagtttgcttcattcatcactcaatactccacaggacaagtgagcgtggaaattgaatgggagctgcagaaagaaaacagcaaacgctggaatcccgaagtgcagtatacatctaactatgcaaaatctgccaacgttgatttcactgtggacaacaatggactttatactgagcctcgccccattggcacccgttacctcacccgtcccctgtaa

SEQ ID NO: 565 - protein, 736 aa, Artificial Sequence
  source: /note="Description of Artificial Sequence: Synthetic polypeptide"
MAADGYLPDWLEDTLSEGIRQWWKLKPGPPPPKPAERHKDDSRGLVLPGYKYLGPFNGLDKGEPVNEADAAALEHDKAYDQQLKAGDNPYLRYNHADAEFQERLQEDTSFGGNLGRAVFQAKKRVLEPLGLVEEGAKTAPGKKRPVEQSPQEPDSSSGIGKTGQQPAKKRLNFGQTGDSESVPDPQPLGEPPATPAAVGPTTMASGGGAPMADNNEGADGVGNASGNWHCDSTWLGDRVITTSTRTWALPTYNNHLYKQISSASTGASNDNHYFGYSTPWGYFDFNRFHCHFSPRDWQRLINNNWGFRPKRLSFKLFNIQVKEVTTNDGVTTIANNLTSTVQVFSDSEYQLPYVLGSAHQGCLPPFPADVFMIPQYGYLTLNNGSQAVGRSSFYCLEYFPSQMLRTGNNFTFSYTFEEVPFHSSYAHSQSLDRLMNPLIDQYLYYLNRTQNQSGSAQNKDLLFSRGSPAGMSVQPKNWLPGPCYRQQRVSKTKTDNNNSNFTWTGASKYNLNGRESIINPGTAMASHKDDEDKFFPMSGVMIFGKESAGASNTALDNVMITDEEEIKATNPVATERFGTVAVNFQSSSTDPATGDVHAMGALPGMVWQDRDVYLQGPIWAKIPHTDGHFHPSPLMGGFGLKNPPPQILIKNTPVPANPPAEFSATKFASFITQYSTGQVSVEIEWELQKENSKRWNPEVQYTSNYAKSANVDFTVDNNGLYTEPRPIGTRYLTRPL

SEQ ID NO: 566 - protein, 735 aa, Artificial Sequence
  source: /note="Description of Artificial Sequence: Synthetic polypeptide"
MAADGYLPDWLEDTLSEGIRQWWKLKPGPPPPKPAERHKDDSRGLVLPGYKYLGPFNGLDKGEPVNEADAAALEHDKAYDRQLDSGDNPYLKYNHADAEFQERLKEDTSFGGNLGRAVFQAKKRVLEPLGLVEEPVKTAPGKKRPVEHSPVEPDSSSGTGKAGQQPARKRLNFGQTGDADSVPDPQPLGQPPAAPSGLGTNTMATGSGAPMADNNEGADGVGNSSGNWHCDSTWMGDRVITTSTRTWALPTYNNHLYKQISSQSGASNDNHYFGYSTPWGYFDFNRFHCHFSPRDWQRLINNNWGFRPKRLKFKLFNIQVKEVTQNDGTTTIANNLTSTVQVFTDSEYQLPYVLGSAHQGCLPPFPADVFMVPQYGYLTLNNGSQAVGRSSFYCLEYFPSQMLRTGNNFTFSYTFEDVPFHSSYAHSQSLDRLMNPLIDQYLYYLSRTDTPSGTTTQSRLQFSQAGASDIRNQSRNWLPGPCYRQQRVSKTSADNNNSEYSWTGATKYHLNGRDSLVNPGPAMASHKDDEEKFFPQSGVLIFGKQGSEKTSVDIEKVMITDEEEIRTTNPVATEQYGSVSTNLQRGNRQAATADVNTQGVLPGMVWQDRDVYLQGPIWAKIPHTDGHFHPSPLMGGFGLKHPPPQILIKNTPVPANPSTTFSAAKFASFITQYSTGQVSVEIEWELQKENSKRWNPEVQYTSNYNKSVNVDFTVDTNGVYSEPRPIGTRYLTRNQ

SEQ ID NO: 567 - DNA, 2208 bp, Artificial Sequence
  source: /note="Description of Artificial Sequence: Synthetic polynucleotide"
atggctgccgatggttatcttccagattggctcgaggacactctctctgaaggaataagacagtggtggaagctcaaacctggcccaccaccaccaaagcccgcagagcggcataaggacgacagcaggggtcttgtgcttcctgggtacaagtacctcggacccttcaacggactcgacaagggagagccggtcaacgaggcagacgccgcggccctcgagcacgacaaagcctatgaccggcagctcgacagcggagacaacccgtacctcaagtacaaccacgccgacgcggagtttcaggaacgccttaaagaagatacgtcttttgggggcaacctcggacgagcagtcttccaggcgaaaaagagggttcttgaacctctgggcctggttgaggaacctgttaagacggctccgggaaaaaagaggccggtagagcactctcctgtggagccagactcctcctcgggaaccggaaaggcgggccagcagcctgcaagaaaaagattgaattttggtcagactggagacgcagactcagtacctgacccccagcctctcggacagccaccagcagccccctctggtctgggaactaatacgatggctacaggcagtggcgcaccaatggcagacaataacgagggcgccgacggagtgggtaattcctcgggaaattggcattgcgattccacatggatgggcgacagagtcatcaccaccagcacccgaacctgggccctgcccacctacaacaaccacctctacaaacaaatttccagccaatcaggagcctcgaacgacaatcactactttggctacagcaccccttgggggtattttgacttcaacagattccactgccacttttcaccacgtgactggcaaagactcatcaacaacaactggggattccgacccaagagactcaagttcaagctctttaacattcaagtcaaagaggtcacgcagaatgacggtacgacgacgattgccaataaccttaccagcacggttcaggtgtttactgactcggagtaccagctcccgtacgtcctcggctcggcgcatcaaggatgcctcccgccgttcccagcagacgtcttcatggtgccacagtatggatacctcaccctgaacaacgggagtcaggcagtaggacgctcttcattttactgcctggagtactttccttctcagatgctgcgtaccggtaacaactttaccttcagctacacttttgaggacgttcctttccacagcagctacgctcacagccagagtctggaccgtctcatgaatcctctcatcgaccagtacctgtattacttgagcagaacagacactccaagtggaaccaccacgcagtcaaggcttcagttttctcaggccggagcgagtgacattcggaaccagtctaggaactggcttcctggaccctgttaccgccagcagcgagtatcaaagacatctgcggataacaacaacagtgaatactcgtggactggagctaccaagtaccacctcaatggcagagactctctggtgaatccgggcccggccatggcaagccacaaggacgatgaagaaaagttttttcctcagagcggggttctcatctttgggaagcaaggctcagagaaaacaagtgtggacattgaaaaggtcatgattacagacgaagaggaaatcaggacaaccaatcccgtggctacggagcagtatggttctgtatctaccaacctccagagaggcaacagacaagcagctaccgcagatgtcaacacacaaggcgttcttccaggcatggtctggcaggacagagatgtgtaccttcaggggcccatctgggcaaagattccacacacggacggacattttcacccctctcccctcatgggtggattcggacttaaacaccctcctccacagattctcatcaagaacaccccggtacctgcgaatccttcgaccaccttcagtgcggcaaagtttgcttccttcatcacacagtactccacgggacaggtcagcgtggagatcgagtgggagctgcagaaggaaaacagcaaacgctggaatcccgaagttcagtacacttccaactacaacaagtctgttaatgtggactttactgtggacactaatggcgtgtattcagagcctcgccccattggcaccagatacctgactcgtaatcagtaa

SEQ ID NO: 568 - DNA, 2208 bp, Artificial Sequence
  source: /note="Description of Artificial Sequence: Synthetic polynucleotide"
atggctgccgatggttatcttccagattggctcgaggacactctctctgaaggaataagacagtggtggaagctcaaacctggcccaccaccaccaaagcccgcagagcggcataaggacgacagcaggggtcttgtgcttcctgggtacaagtacctcggacccttcaacggactcgacaagggagagccggtcaacgaggcagacgccgcggccctcgagcacgacaaagcctatgaccggcagctcgacagcggagacaacccgtacctcaagtacaaccacgccgacgcggagtttcaggagcgccttaaagaagatacgtcttttgggggcaacctcggacgagcagtcttccaggcgaaaaagagggttcttgaacctctgggcctggttgaggaacctgttaagacggctccgggaaaaaagaggccggtagagcactctcctgtggagccagactcctcctcgggaaccggaaaggcgggccagcagcctgcaagaaaaagattgaattttggtcagactggagacgcagactcagtacctgatccccagcctctcggacagccaccagcagccccctctggtctgggaactaatacgatggctacaggcagtggcgcaccaatggcagacaataacgagggcgccgacggagtgggtaattcctcgggaaattggcattgcgattccacatggatgggcgacagagtcatcaccaccagcacccgaacctgggccctgcccacctacaacaaccacctctacaaacaaatttccagccaatcaggagcctcgaacgacaatcactactttggctacagcaccccttgggggtattttgacttcaacagattccactgccacttttcaccacgtgactggcaaagactcatcaacaacaactggggattccgacccaagagactcaagttcaagctctttaacattcaagtcaaagaggtcacgcagaatgacggtacgacgacgattgccaataaccttaccagcacggttcaggtgtttactgactcggagtaccagctcccgtatgtcctcggctcggcgcatcaaggatgcctcccgccgttcccagcagacgtcttcatggtgccacagtatggatacctcaccctgaacaacgggagtcaggcagtaggacgctcttcattttactgcctggagtactttccttctcagatgctgcgtaccggtaacaactttaccttcagctacacttttgaggacgttcctttccacagcagctacgctcacagccagagtctggaccgtctcatgaatcctctcatcgaccagtacctgtattacttgagcagaacagacactccaagtggaaccaccacgcagtcaaggcttcagttttctcaggccggagcgagtgacattcgggaccagtctaggaactggcttcctggaccctgttaccgccagcagcgagtatcaaagacatctgcggataacaacaacagtgaatactcgtggactggagctaccaagtaccacctcaatggcagagactctctggtgaatccgggcccggccatggcaagccacaaggacgatgaagaaaagttttttcctcagagcggggttctcatctttgggaagcaaggctcagagaaaacaagtgtggacattgaaaaggtcatgattacagacgaagaggaaatcaggacaaccaatcccgtggctacggagcagtatggttctgtatctaccaacctccagagaggcaacagacaagcagctaccgcagatgtcaacacacaaggcgttcttccaggcatggtctggcaggacagagatgtgtaccttcaggggcccatctgggcaaagattccacacacggacggacattttcacccctctcccctcatgggtggattcggacttaaacaccctcctccacagattctcatcaagaacaccccggtacctgcgaatccttcgaccaccttcagtgcggcaaagtttgcttccttcatcacacagtactccacgggacaggtcagcgtggagatcgagtgggagctgcagaaggaaaacagcaaacgctggaatcccgaagttcagtacacttccaactacaacaagtctgttaatgtggactttactgtggacactaatggcgtgtattcagagcctcgccccattggcaccagatacctgactcgtaatctgtaa

SEQ ID NO: 569 - protein, 735 aa, Artificial Sequence
  source: /note="Description of Artificial Sequence: Synthetic polypeptide"
MAADGYLPDWLEDTLSEGIRQWWKLKPGPPPPKPAERHKDDSRGLVLPGYKYLGPFNGLDKGEPVNEADAAALEHDKAYDRQLDSGDNPYLKYNHADAEFQERLKEDTSFGGNLGRAVFQAKKRVLEPLGLVEEPVKTAPGKKRPVEHSPVEPDSSSGTGKAGQQPARKRLNFGQTGDADSVPDPQPLGQPPAAPSGLGTNTMATGSGAPMADNNEGADGVGNSSGNWHCDSTWMGDRVITTSTRTWALPTYNNHLYKQISSQSGASNDNHYFGYSTPWGYFDFNRFHCHFSPRDWQRLINNNWGFRPKRLKFKLFNIQVKEVTQNDGTTTIANNLTSTVQVFTDSEYQLPYVLGSAHQGCLPPFPADVFMVPQYGYLTLNNGSQAVGRSSFYCLEYFPSQMLRTGNNFTFSYTFEDVPFHSSYAHSQSLDRLMNPLIDQYLYYLSRTDTPSGTTTQSRLQFSQAGASDIRDQSRNWLPGPCYRQQRVSKTSADNNNSEYSWTGATKYHLNGRDSLVNPGPAMASHKDDEEKFFPQSGVLIFGKQGSEKTSVDIEKVMITDEEEIRTTNPVATEQYGSVSTNLQRGNRQAATADVNTQGVLPGMVWQDRDVYLQGPIWAKIPHTDGHFHPSPLMGGFGLKHPPPQILIKNTPVPANPSTTFSAAKFASFITQYSTGQVSVEIEWELQKENSKRWNPEVQYTSNYNKSVNVDFTVDTNGVYSEPRPIGTRYLTRNL

SEQ ID NO: 570 - DNA, 2601 bp, Artificial Sequence
  source: /note="Description of Artificial Sequence: Synthetic polynucleotide"
ccatcgacgtcagacgcggaagcttcgatcaactacgcggacaggtaccaaaacaaatgttctcgtcacgtgggcatgaatctgatgctgtttccctgcagacaatgcgagagactgaatcagaattcaaatatctgcttcactcacggtgtcaaagactgtttagagtgctttcccgtgtcagaatctcaacccgtttctgtcgtcaaaaaggcgtatcagaaactgtgctacattcatcacatcatgggaaaggtgccagacgcttgcactgcttgcgacctggtcaatgtggacttggatgactgtgtttctgaacaataaatgacttaaaccaggtatgactgccgatggttatcttccagattggctcgaggacaaccttagtgaaggaattcgcgagtggtgggctttgaaacctggagcccctcaacccaaggcaaatcaacaacatcaagacaacgctcgaggtcttgtgcttccgggttacaaataccttggacccggcaacggactcgacaagggggagccggtcaacgcagcagacgcggcggccctcgagcacgacaaggcctacgaccagcagctcaaggccggagacaacccgtacctcaagtacaaccacgccgacgccgagttccaggagcggctcaaagaagatacgtcttttgggggcaacctcgggcgagcagtcttccaggccaaaaagaggcttcttgaacctcttggtctggttgaggaagcggctaagacggctcctggaaagaagaggcctgtagagcagtctcctcaggaaccggactcctccgcgggtattggcaaatcgggtgcacagcccgctaaaaagagactcaatttcggtcagactggcgacacagagtcagtcccagaccctcaaccaatcggagaacctcccgcagccccctcaggtgtgggatctcttacaatggcttcaggtggtggcgcaccagtggcagacaataacgaaggtgccgatggagtgggtagttcctcgggaaattggcattgcgattcccaatggctgggggacagagtcatcaccaccagcacccgaacctgggccctgcccacctacaacaatcacctctacaagcaaatctccaacagcacatctggaggatcttcaaatgacaacgcctacttcggctacagcaccccctgggggtattttgacttcaacagattccactgccacttctcaccacgtgactggcagcgactcatcaacaacaactggggattccggcctaagcaactcaacttcaagctcttcaacattcaggtcaaagaggttacggacaacaatggagtcaagaccatcgccaataaccttaccagcacggtccaggtcttcacggactcagactatcagctcccgtacgtgctcgggtcggctcacgagggctgcctcccgccgttcccagcggacgttttcatgattcctcagtacgggtatctgacgcttaatgatggaagccaggccgtgggtcgttcgtccttttactgcctggaatatttcccgtcgcaaatgctaagaacgggtaacaacttccagttcagctacgagtttgagaacgtacctttccatagcagctacgctcacagccaaagcctggaccgactaatgaatccactcatcgaccaatacttgtactatctctcaaagactattaacggttctggacagaatcaacaaacgctaaaattcagtgtggccggacccagcaacatggctgtccagggaagaaactacatacctggacccagctaccgacaacaacgtgtctcaaccactgtgactcaaaacaacaacagcgaatttgcttggcctggagcttcttcttgggctctcaatggacgtaatagcttgatgaatcctggacctgctatggccagccacaaagaaggagaggaccgtttctttcctttgtctggatctttaatttttggcaaacaaggaactggaagagacaacgtggatgcggacaaagtcatgataaccaacgaagaagaaattaaaactactaacccggtagcaacggagtcctatggacaagtggccacaaaccaccagagtgcccaagcacaggcgcagaccggctgggttcaaaaccaaggaatacttccgggtatggtttggcaggacagagatgtgtacctgcaaggacccatttgggccaaaattcctcacacggacggcaactttcacccttctccgctgatgggagggtttggaatgaagcacccgcctcctcagatcctcatcaaaaacacacctgtacctgcggatcctccaacggccttcaacaaggacaagctgaactctttcatcacccagtattctactggccaagtcagcgtggagatcgagtgggagctgcagaaggaaaacagcaagcgctggaacccggagatccagtacacttccaactattacaagtctaataatgttgaatttgctgttaatactgaaggtgtatatagtgaaccccgccccattggcaccagatacctgactcgtaatctgtaattgcttgttaatcaataaaccgtttaattcgtttcagttgaactgcggcc

SEQ ID NO: 571 - DNA, 2601 bp, Artificial Sequence
  source: /note="Description of Artificial Sequence: Synthetic polynucleotide"
ccatcgacgtcagacgcggaagcttcgatcaactacgcggacaggtaccaaaacaaatgttctcgtcacgtgggcatgaatctgatgctgtttccctgcagacaatgcgagagactgaatcagaattcaaatatctgcttcactcacggtgtcaaagactgtttagagtgctttcccgtgtcagaatctcaacccgtttctgtcgtcaaaaaggcgtatcagaaactgtgctacattcatcacatcatgggaaaggtgccagacgcttgcactgcttgcgacctggtcaatgtggacttggatgactgtgtttctgaacaataaatgacttaaaccaggtatggctgccgatggttatcttccagattggctcgaggacaaccttagtgaaggaattcgcgagtggtgggctttgaaacctggagcccctcaacccaaggcaaatcaacaacatcaagacaacgctcgaggtcttgtgcttccgggttacaaataccttggacccggcaacggactcgacaagggggagccggtcaacgcagcagacgcggcggccctcgagcacgacaaggcctacgaccagcagctcaaggccggagacaacccgtacctcaagtacaaccacgccgacgccgagttccaggagcggctcaaagaagatacgtcttttgggggcaacctcgggcgagcagtcttccaggccaaaaagaggcttcttgaacctcttggtctggttgaggaagcggctaagacggctcctggaaagaagaggcctgtagagcagtctcctcaggaaccggactcctccgcgggtattggcaaatcgggtgcacagcccgctaaaaagagactcaatttcggtcagactggcgacacagagtcagtcccagaccctcaaccaatcggagaacctcccgcagccccctcaggtgtgggatctcttacaatggcttcaggtggtggcgcaccagtggcagacaataacgaaggtgccgatggagtgggtagttcctcgggaaattggcattgcgattcccaatggctgggggacagagtcatcaccaccagcacccgaacctgggccctgcccacctacaacaatcacctctacaagcaaatctccaacagcacatctggaggatcttcaaatgacaacgcctacttcggctacagcaccccctgggggtattttgacttcaacagattccactgccacttctcaccacgtgactggcagcgactcatcaacaacaactggggattccggcctaagcgactcaacttcaagctcttcaacattcaggtcaaagaggttacggacaacaatggagtcaagaccatcgccaataaccttaccagcacggtccaggtcttcacggactcagactatcagctcccgtacgtgctcgggtcggctcacgagggctgcctcccgccgttcccagcggacgttttcatgattcctcagtacgggtatctgacgcttaatgatggaagccaggccgtgggtcgttcgtccttttactgcctggaatatttcccgtcgcaaatgctaagaacgggtaacaacttccagttcagctacgagtttgagaacgtacctttccatagcagctacgctcacagccaaagcctggaccgactaatgaatccactcatcgaccaatacttgtactatctctcaaagactattaacggttctggacagaatcaacaaacgctaaaattcagtgtggccggacccagcaacatggctgtccagggaagaaactacatacctggacccagctaccgacaacaacgtgtctcaaccactgtgactcaaaacaacaacagcgaatttgcttggcctggggcttcttcttgggctctcaatggacgtaatagcttgatgaatcctggacctgctatggccagccacaaagaaggagaggaccgtttctttcctttgtctggatctttaatttttggcaaacaaggaactggaagagacaacgtggatgcggacaaagtcatgataaccaacgaagaagaaattaaaactactaacccggtagcaacggagtcctatggacaagtggccacaaaccaccagagtgcccaagcacaggcgcagaccggctgggttcaaaaccaaggaatacttccgggtatggtttggcaggacagagatgtgtacctgcaaggacccatttgggccaaaattcctcacacgggcggcaactttcacccttctccgctgatgggagggtttggaatgaagcacccgcctcctcagatcctcatcaaaaacacacctgtacctgcggatcctccaacggccttcaacaaggacaagctgaactctttcatcacccagtattctactggccaagtcagcgtggagatcgagtgggagctgcagaaggaaaacagcaagcgctggaacccggagatccagtacacttccaactattacaagtctaataatgttgaatttgctgttaatactggaggtgtatatagtgaaccccgccccattggcaccagatacctgactcgtaatctgtaattgcttgttaatcaataaaccgtttaattcgtttcagttgaactgcggcc

SEQ ID NO: 572 - DNA, 2601 bp, Artificial Sequence
  source: /note="Description of Artificial Sequence: Synthetic polynucleotide"
ccatcgacgtcagacgcggaagcttcgatcaactacgcggacaggtaccaaaacaaatgttctcgtcacgtgggcatgaatctgatgctgtttccctgcagacaatgcgagagactgaatcagaattcaaatatctgcttcactcacggtgtcaaagactgtttagagtgctttcccgtgtcagaatctcaacccgtttctgtcgtcaaaaaggcgtatcagaaactgtgctacattcatcacatcatgggaaaggtgccagacgcttgcactgcttgcgacctggtcaatgtggactcggatgactgtgtttctgaacaataaatgacttaaaccaggtatggctgccgatggttatcttccagattggctcgaggacaaccttagtgaaggaattcgcgagtggtgggctttgaaacctggagcccctcaacccaaggcaaatcaacaacatcaagacaacgctcgaggtcttgtgcttccgggttacaaataccttggacccggcaacggactcgacaagggggagccggtcaacgcagcagacgcggcggccctcgagcacgacaaggcctacgaccagcagctcaaggccggagacaacccgtacctcaagtacaaccacgccgacgccgagttccaggagcggctcaaagaagatacgtcttttgggggcaacctcgggcgagcagtcttccaggccaaaaagaggcttcttgaacctcttggtctggttgaggaagcggctaagacggctcctggaaagaagaggcctgtagagcagtctcctcaggaaccggactcctccgcgggtattgacaaatcgggtgcacagcccgctaaaaagagactcaatttcggtcagactggcgacacagagtcagtcccagaccctcaaccaatcggagaacctcccgcagccccctcaggtgtgggatctcttacaatggcttcaggtggtggcgcaccagtggcagacaataacgaaggtgccgatggagtgggtagttcctcgggaaattggcattgcgattcccaatggctgggggacagagtcatcaccaccagcacccgaacctgggccctgcccacctacaacaatcacctctacaagcaaatctccaacagcacatctggaggatcttcaaatgacaacgcctacttcggctacagcaccccctgggggtattttgacttcaacagattccactgccacttctcaccacgtgactggcagcgactcatcaacaacaactggggattccggcctaagcgactcaacttcaagctcttcaacattcaggtcaaagaggttacggacaacaatggagtcaagaccatcgccaataaccttaccagcacggtccaggtcttcacggactcggactatcagctcccgtacgtgctcgggtcggctcacgagggctgcctcccgccgttcccagcggacgttttcatgattcctcagtacgggtatctgacgcttaatgatggaagccaggccgtgggtcgttcgtccttttactgcctggaatatttcccgtcgcaaatgctaagaacgggtaacaacttccagttcagctacgagtttgagaacgtacctttccatagcagctacgctcacagccaaagcctggaccgactaatgaatccactcatcgaccaatacttgtactatctctcaaagactattaacggttctggacagaatcaacaaacgctaaaattcagtgtggccggacccagcaacatggctgtccagggaagaaactacatacctggacccagctaccgacaacaacgtgtctcaaccactgtgactcaaaacaacaacagcgaatttgcttggcctggagcttcttcttgggctctcaatggacgtaatagcttgatgaatcctggacctgctatggccagccacaaagaaggagaggaccgtttctttcctttgtctggatctttaatttttggcaaacaaggaactggaagagacaacgtggatgcggacaaagtcatgataaccaacgaagaagaaattaaaactactaacccggtagcaacggagtcctatggacaagtggccacaaaccaccagagtgcccaagcacaggcgcagaccggctgggttcaaaaccaaggaatacttccgggtatggtttggcaggacagagatgtgtacctgcaaggacccatttgggccaaaattcctcacacggacggcaactttcacccttctccgctgatgggagggtttggaatgaagcacccgcctcctcagatcctcatcaaaaacacacctgtacctgcggatcctccaacggccttcaacaaggacaagctgaactctttcatcacccagtattctactggccaagtcagcgtggagatcgagtgggagctgcagaaggaaaacagcaagcgctggaacccggagatccagtacacttccaactattacaagtctaataatgttgaatttgctgttaatactgaaggtgtatatagtgaaccccgccccattggcaccagatacctgactcgtaatctgtaattgcttgttaatcaataaaccgtttaattcgtttcagttgaactgcggcc

SEQ ID NO: 573 - DNA, 2601 bp, Artificial Sequence
  source: /note="Description of Artificial Sequence: Synthetic polynucleotide"
ccatcgacgtcagacgcggaagcttcgatcaactacgcggacaggtaccaaaacaaatgttctcgtcacgtgggcatgaatctgatgctgtttccctgcagacaatgcgagagactgaatcagaattcaaatatctgcttcactcacggtgtcaaagactgtttagagtgctttcccgtgtcagaatctcaacccgtttctgtcgtcaaaaaggcgtatcagaaactgtgctacattcatcacatcatgggaaaggtgccagacgcttgcactgcttgcgacctggtcaatgtggacttggatgactgtgtttctgaacaataaatgacttaaaccaggtatggctgccgatggttatcttccagattggctcgaggacaaccttagtgaaggaattcgcgagtggtgggctttgaaacctggagcccctcaacccaaggcaaatcaacaacatcaagacaacgctcgaggtcttgtgcttccgggttacaaataccttggacccggcaacggactcgacaagggggagccggtcaacgcagcagacgcggcggccctcgagcacgacaaggcctacgaccagcagctcaaggccggagacaacccgtacctcaagtacaaccacgccgacgccgagttccaggagcggctcaaagaagatacgtcttttgggggcaacctcgggcgagcagtcctccaggccaaaaagaggcttcttgaacctcttggtctggttgaggaagcggctaagacggctcctggaaagaagaggcctgtagagcagtctcctcaggaaccggactcctccgcgggtattggcaaatcgggtgcacagcccgctaaaaagagactcaatttcggtcagactggcgacacagagtcagtcccagaccctcaaccaatcggagaacctcccgcagccccctcaggtgtgggatctcttacaatggcttcaggtggtggcgcaccagtggcagacaataacgaaggtgccgatggagtgggtagttcctcgggaaattggcattgcgattcccaatggctgggggacagagtcatcaccaccagcacccgaacctgggccctgcccacctacaacaatcacctctacaagcaaatctccaacagcacatctggaggatcttcaaatgacaacgcctacttcggctacagcaccccctgggggtattttgacttcaacagattccactgccacttctcaccacgtgactggcagcgactcatcaacaacaactggggattccggcctaagcgactcaacttcaagctcttcaacattcaggtcaaagaggttacggacaacaatggagtcaagaccatcgccaataaccttaccagcacggtccaggtcttcacggactcagactatcagctcccgtacgtgctcgggtcggctcacgagggctgcctcccgccgttcccagcggacgttttcatgattcctcagtacgggtatctgacgcttaatgatggaagccaggccgtgggtcgttcgtccttttactgcctggaatatttcccgtcgcaaatgctaagaacgggtaacaacttccagttcagctacgagtttgagaacgtacctttccatagcagctacgctcacagccaaagcctggaccgactaatgaatccactcatcgaccaatacttgtactatctctcaaagactattaacggttctggacagaatcaacaaacgctaaaattcagtgtggccggatccagcaacatggctgtccagggaagaaactacatacctggacccagctaccgacaacaacgtgtctcaaccactgtgactcaaaacaacaacagcgaatttgcttggcctggagcttcttcttgggctctcaatggacgtaatagcttgatgaatcctggacctgctatggccagccacaaagaaggagaggaccgtttctttcctttgtctggatctttaatttttggcaaacaaggaactggaagagacaacgtggatgcggacaaagtcatgataaccaacgaagaagaaattaaaactactaacccggtagcaacggagtcctatggacaagtggccacaaaccaccagagtgcccaagcacaggcgcagaccggctgggttcaaaaccaaggaatacttccaggtatggtttggcaggacagagatgtgtacctgcaaggacccatttgggccaaaattcctcacacggacggcaactttcacccttctccgctgatgggagggtttggaatgaagcacccgcctcctcagatcctcatcaaaaacacacctgtacctgcggatcctccaacggccttcaacaaggacaagctgaactctttcatcacccagtattctactggccaagtcagcgtggagatcgagtgggagctgcagaaggaaaacagcaagcgctggaacccggagatccagtacacttccaactattacaagtctaataatgttgaatttgctgttaatactgaaggtgtatatagtgaaccccgccccattggcaccagatacctgactcgtaatctgtaattgcttgttaatcaataaaccgtttaattcgtttcagttgaactgcggcc

SEQ ID NO: 574 - DNA, 2601 bp, Artificial Sequence
  source: /note="Description of Artificial Sequence: Synthetic polynucleotide"
ccatcgacgtcagacgcggaagcttcgatcaactacgcggacaggtaccaaaacaaatgttctcgtcacgtgggcatgaatctgatgctgtttccctgcagacaatgcgagagactgaatcagaattcaaatatctgcttcactcacggtgtcaaagactgtttagagtgctttcccgtgtcagaatctcaacccgtttctgtcgtcaaaaaggcgtatcagaaactgtgctacattcatcacatcatgggaaaggtgccagacgcttgcactgcttgcgacctggtcaatgtggacttggatgactgtgtttctgaacaataaatgacttaaaccaggtatggctgccgatggttatcttccagattggctcgaggacaaccttagtgaaggaattcgcgagtggtgggctttgaaacctggagcccctcaacccaaggcaaatcaacaacatcaagacaacgctcgaggtcttgtgcttccgggttacaaataccttggacccggcaacggactcgacaagggggagccggtcaacgcagcagacgcggcggccctcgagcacgacagggcctacgaccagcagctcaaggccggagacaacccgtacctcaagtacaaccacgccgacgccgagttccaggagcggctcaaagaagatacgtcttttgggggcaacctcgggcgagcagtcttccaggccaaaaagaggcttcttgaacctcttggtctggttgaggaagcggctaagacggctcctggaaagaagaggcctgtagagcagtctcctcaggaaccggactcctccgcgggtattggcaaatcgggtgcacagcccgctaaaaagagactcaatttcggtcagactggcgacacagagtcagtcccagaccctcaaccaatcggagaacctcccgcagccccctcaggtgtgggatctcttacaatggcttcaggtggtggcgcaccagtggcagacaataacgaaggtgccgatggagtgggtagttcctcgggaaattggcattgcgattcccaatggctgggggacagagtcatcaccaccagcacccgaacctgggccctgcccacctacaacaatcacctctacaagcaaatctccaacagcacatctggaggatcttcaaatgacaacgcctacttcggctacagcaccccctgggggtattttgacttcaacagattccactgccacttctcaccacgtgactggcagcgactcatcaacaacaactggggattccggcctaagcgactcaacttcaagctcttcaacattcaggtcaaagaggttacggacaacaatggagtcaagaccatcgccaataaccttaccagcacggtccaggtcttcacggactcagactatcagctcccgtacgtgctcgggtcggctcacgagggctgcctcccgccgttcccagcggacgttttcatgattcctcagtacgggtatctgacgcttaatgatggaagccaggccgtgggtcgttcgtccttttactgcctggaatatttcccgtcgcaaatgctaagaacgggtaacaacttccagttcagctacgagtttgagaacgtacctttccatagcagctacgctcacagccaaagcctggaccgactaatgaatccactcatcgaccaatacttgtactatctctcaaagactattaacggttctggacagaatcaacaaacgctaaaattcagtgtggccggacctagcaacatggctgtccagggaagaaactacatacctggacccagctaccgacaacaacgtgtctcaaccactgtgactcaaaacaacaacagcgaatttgcttggcctggagcttcttcttgggctctcaatggacgtaatagcttgatgaatcctggacctgctatggccagccacaaagaaggagaggaccgtttctttcctttgtctggatctttaatttttggcaaacaaggaactggaagagacaacgtggatgcggacaaagtcatgataaccaacgaagaagaaattaaaactactaacccggtagcaacggagtcctatggacaagtggccacaaaccaccagagtgcccaagcacaggcgcagaccggctgggttcaaaaccaaggaatacttccgggtatggtttggcaggacagagatgtgtacctgcaaggacccatttgggccaaaattcctcacacggacggcaactttcacccttctccgctgatgggagggtttggaatgaagcacccgcctcctcagatcctcatcaaaaacacacctgtacctgcggatcctccaacggccttcaacaaggacaagctgaactctttcatcacccagtattctactggccaagtcagcgtggagatcgagtgggagctgcagaagaaaaacagcaagcgctggaacccggagatccagtacacttccaactattacaagtctaataatgttgaatttgctgttaacactgaaggtgtatatagtgaaccccgccccattggcaccagatacctgactcgtaatctgtaattgcttgttaatcaataaaccgtttaattcgtttcagttgaactgcggcc

SEQ ID NO: 575 - DNA, 2601 bp, Artificial Sequence
  source: /note="Description of Artificial Sequence: Synthetic polynucleotide"
ccatcgacgtcagacgcggaagcttcgatcaactacgcggacaggtaccaaaacaaatgttctcgtcacgtgggcatgaatctgatgctgtttccctgcagacaatgcgagagactgaatcagaattcaaatatctgcttcactcacggtgtcaaagactgtttagagtgctttcccgtgtcagaatctcaacccgtttctgtcgtcaaaaaggcgtatcagaaactgtgctacattcatcacatcatgggaaaggtgccagacgcttgcactgcttgcgacctggtcaatgtggacttggatgactgtgtttctgaacaataaatgacttaaaccaggtatggctgccgatggttatcttccagattggctcgaggacaaccttagtgaaggaattcgcgagtggtgggctttgaaacctggagcccctcaacccaaggcaaatcaacaacatcaagacaacgctcgaggtcttgtgcttccgggttacaaataccttggacccggcaacggactcgacaagggggagccggtcaacgcagcagacgcggcggccctcgagcacgacaaggcctacgaccagcagctcaaggccggagacaacccgtacctcaagtacaaccacgccgacgccgagttccaggagcggctcaaagaagatacgtcttttgggggcaacctcgggcgagcagtcttccaggccaaaaagaggcttcttgaacctcttggtctggttgaggaagcggctaagacggctcctggaaagaagaggcctgtagagcagtctcctcaggaaccggactcctccgcgggtattggcaaatcgggtgcacagcccgctaaaaagagactcaatttcggtcagactggcgacacagagtcagtcccagaccctcaaccaatcggagaacctcccgcagccccctcaggtgtgggatctcttacaatggcttcaggtggtggcgcaccagtggcagacaataacgaaggtgccgatggagtgggtagttcctcgggaaattggcattgcgattcccaatggctgggggacagagtcatcaccaccagcacccgaacctgggccctgcccacctacaacaatcacctctacaagcaaatctccaacagcacatctggaggatcttcaaatgacaacgcctacttcggctacagcaccccctgggggtattttgacttcaacagattccactgccacttctcaccacgtgactggcagcgactcatcaacaacaactggggattccggcctaagcgactcaacttcaagctcttcaacattcaggtcaaagaggttacggacaacaatggagtcaagaccatcgccaataaccttaccagcacggtccaggtcttcacggactcagactatcagctcccgtacgtgctcgggtcggctcacgagggctgcctcccgccgttcccagcggacgttttcatgattcctcagtacgggtatctgacgcttaatgatggaagccaggccgtgggtcgttcgtccttttactgcctggaatatttcccgtcgcaaatgctaagaacgggtaacaacttccagttcagctacgagtttgagaacgtacctttccatagcagctacgctcacagccaaagcctggaccgactaatgaatccactcatcgaccaatacttgtactatctctcaaagactattaacggttctggacagaatcaacaaacgctaaaattcagtgtggccggacccagcaacatggctgtccagggaagaaactacatacctggacccagctaccgacaacaacgtgtctcaaccactgtgactcaaaacaacaacagcgaatttgcttggcctggagcttcttcttgggctctcaatggacgtaatagcttgatgaatcctggacctgctatggccagccacaaagaaggagaggaccgtttctttcctttgtctggatctttaatttttggcaaacaaggaactggaagagacaacgtggatgcggacaaagtcatgataaccaacgaagaagaaattaaaactactaacccggtagcaacggagtcctatggacaagtggccacaaaccaccagagtgcccaagcacgggcgcagaccggctgggttcaaaaccaaggaatacttccgggtatggtttggcaggacagagatgtgtacctgcaaggacccatttgggccaaaattcctcacacggacggcaactttcacccttctccgctgatgggagggtttggaatgaagcacccgcctcctcagatcctcatcaaaaacacacctgtacctgcggatcctccaacggccttcaacaaggacaagctgaactctttcatcacccagtattctactggccaagtcagcgtggagatcgagtgggagctgcagaaggaaaacagcaagcgctggaacccggagatccagtacacttccaactattacaagtctaataatgttgaatttgctgttaatactgaaggtgtatatagtgaaccccgccccattggcaccagatacctgactcgtaatctgtaattgcttgttaatcaataaaccgtttaattcgtttcagttgaactgcggcc

SEQ ID NO: 576 - DNA, 2601 bp, Artificial Sequence
  source: /note="Description of Artificial Sequence: Synthetic polynucleotide"
ccatcgacgtcagacgcggaagcttcgatcaactacgcggacaggtaccaaaacaaatgttctcgtcacgtgggcatgaatctgatgctgtttccctgcagacaatgcgagagactgaatcagaattcaaatatctgcttcactcacggtgtcaaagactgtttagagtgctttcccgtgtcagaatctcaacccgtttctgtcgtcaaaaaggcgtatcagaaactgtgctacattcatcacatcatgggaaaggtgccagacgcttgcactgcttgcgacctggtcaatgtggacttggatgactgtgtttctgaacaataaatgacttaaaccaggtatggctgccgatggttatcttccagattggctcgaggacaaccttagtgaaggaattcgcgagtggtgggctttgaaacctggagcccctcaacccaaggcaaatcaacaacatcaagacaacgctcgaggtcttgtgcttccgggttacaaataccttggacccggcaacggactcgacaagggggagccggtcaacgcagtagacgcggcggccctcgagcacgacaaggcctacgaccagcagctcaaggccggagacaacccgtacctcaagtacaaccacgccgacgccgagttccaggagcggctcaaagaagatacgtcttttgggggcaacctcgggcgagcagtcttccaggccaaaaagaggcttcttgaacctcttggtctggttgaggaagcggctaagacggctcctggaaagaagaggcctgtagagcagtctcctcaggaaccggactcctccgcgggtattggcaaatcgggtgcacagcccgctaaaaagagactcaatttcggtcagactggcgacacagagtcagtcccagaccctcaaccaatcggagaacctcccgcagccccctcaggtgtgggatctcttacaatggcttcaggtggtggcgcaccagtggcagacaataacgaaggtgccgatggagtgggtagttcctcgggaaattggcattgcgattcccaatggctgggggacagagtcatcaccaccagcacccgaacctgggccctgcccacctacaacaatcacctctacaagcaaatctccaacagcacatctggaggatcttcaaatgacaacgcctacttcggctacagcaccccctgggggtattttgacttcaacagattccactgccacttctcaccacgtgactggcagcgactcatcaacaacaactggggatttcggcctaagcgactcaacttcaagctcttcaacattcaggtcaaagaggttacggacaacaatggagtcaagaccatcgccaataaccttaccagcacggtccaggtcttcacggactcagactatcagctcccgtacgtgctcgggtcggctcacgagggctgcctcccgccgttcccagcggacgttttcatgattcctcagtacgggtatctgacgcttaatgatggaagccaggccgtgggtcgttcgtccttttactgcctggaatatttcccgtcgcaaatgctaagaacgggtaacaacttccagttcagctacgagtttgagaacgtacctttccatagcagctacgctcacagccaaagcctggaccgactaatgaatccactcatcgaccaatacttgtactatctctcaaagactattaacggttctggacagaatcaacaaacgctaaaattcagtgtggccggacccagcaacatggctgtccagggaagaaactacatacctggacccagctaccgacaacaacgtgtctcaaccactgtgactcaaaacaacaacagcgaatttgcttggcctggagcttcttcttgggctctcaatggacgtaatagcttgatgaatcctggacctgctatggccagccacaaagaaggagaggaccgtttctttcctttgtctggatctttaatttttggcaaacaaggaactggaagagacaacgtggatgcggacaaagtcatgataaccaacgaagaagaaattaaaactactaacccggtagcaacggagtcctatggacaagtggccacaaaccaccagagtgcccaagcacaggcgcagaccggctgggttcaaaaccaaggaatacttccgggtatggtttggcaggacagagatgtgtacctgcaaggacccatttgggccaaaattcctcacacggacggcaactttcacccttctccgctgatgggagggtttggaatgaagcacccgcctcctcagatcctcatcaaaaacacacctgtacctgcggatcctccaacggccttcaacaaggacaagctgaactctttcatcacccagtattctactggccaagtcagcgtggagatcgagtgggagctgcagaaggaaaacagcaagcgctggaacccggagatccagtacacttccaactattacaagtctaataatgttgaatttgctgttaatactgaaggtgtatatagtgaaccccgccccattggcaccagatacctgactcgtaatctgtaattgcttgttaatcaataaaccgtttaattcgtttcagttgaactgcggcc

SEQ ID NO: 577 - DNA, 2580 bp, Artificial Sequence
  source: /note="Description of Artificial Sequence: Synthetic polynucleotide"
ccatcgacgtcagacgcggaagcttcgatcaactacgcggacaggtaccaaaacaaatgttctcgtcacgtgggcatgaatctgatgctgtttccctgcagacaatgcgagagactgaatcagaattcaaatatctgcttcactcacggtgtcaaagactgtttagagtgctttcccgtgtcagaatctcaacccgtttctgtcgtcaaaaaggcgtatcagaaactgtgctacattcatcacatcatgggaaaggtgccagacgcttgcactgcttgcgacctggtcaatgtggacttggatgactgtgtttctgaacaataaatgacttaaaccaggtatggctgccgatggttatcttccagattggctcgaggacaaccttagtgaaggaattcgcgagtggtgggctttgaaacctggagcccctcaacccaaggcaaatcaacaacatcaagacaacgctcgaggtcttgtgcttccgggttacaaataccttggacccggcaacggactcgacaagggggagccggtcaacgcagcagacgcggcggccctcgagcacgacaaggcctacgaccagcagctcaaggccggagacaacccgtacctcaagtacaaccacgccgacgccgagttccaggagcggctcaaagaagatacgtcttttgggggcaacctcgggcgagcagtcttccaggccaaaaagaggcttcttgaacctcttggtctggttgaggaagcggctaagacggctcctggaaagaagaggcctgtagagcagtctcctcgggaaccggactcctccgcgggtattggcaaatcgggtgcacagcccgctaaaaagagactcaatttcggtcagactggcgacacagagtcagtcccagaccctcaaccaatcggagaacctcccgcagccccctcaggtgtgggatctcttacaatggcttcaggtggtggcgcaccagtggcagacaataacgaaggtgccgatggagtgggtagttcctcgggaaattggcattgcgattcccaatggctgggggacagagtcatcaccaccagcacccgaacctgggccctgcccacctacaacaatcacctctacaagcaaatctccaacagcacatctggaggatcttcaaatgacaacgcctacttcggctacagcaccccctgggggtattttgacttcaacagattccactgccacttctcaccacgtgactggcagcgactcatcaacaacaactggggattccggcctaagcgactcaacttcaagctcttcaacattcaggtcaaagaggttacggacaacaatggagtcaagaccatcgccaataaccttaccagcacggtccaggtcttcacggactcagactatcagctcccgtacgtgctcgggtcggctcacgagggctgcctcccgccgttcccagcggacgttttcatgattcctcagtacgggtatctgacgcttaatgatggaagccaggccgtgggtcgttcgtccttttactgcctggaatatttcccgtcgcaaatgctaagaacgggtaacaacttccagttcagctacgagtttgagaacgtacctttccatagcagctacgctcacagccaaagcctggaccgactaatgaatccactcatcgaccaatacttgtactatctctcaaagactattaacggttctggacagaatcaacaaacgctaaaattcagtgtggccggacccagcaacatggctgtccagggaagaaactacatacctggacccagctaccgacaacaacgtgtctcaaccactgtgactcaaaacaacaacagcgaatttgcttggcctggagcttcttcttgggctctcaatggacgtaatagcttgatgaatcctggacctgctatggccagccacaaagaaggagaggaccgtttctttcctttgtctggatctttaatttttggcaaacaaggaactggaagagacaacgtggatgcggacaaagtcatgataaccaacgaagaagaaattaaaactactaacccggtagcaacggagtcctatggacaagtggccacaaaccaccagagtgcccaagcacaggcgcagaccggctgggttcaaaaccaaggaatacttccgggtatggtttggcaggacagagatgtgtacctgcaaggacccatttgggccaaaattcctcacacggacggcaactttcacccttctccgctgatgggagggtttggaatgaagcacccgcctcctcagatcctcatcaaaaacacacctgtacctgcggatcctccaacggccttcaacaaggacaagctgaactctttcatcacccagtattctactggccaagtcagcgtggagatcgagtgggaactgcagaaggaaaacagcaagcgctggaacccggagatccagtacacttccaactattacaagtctaataatgttgaatttgctgttaatactgaaggtgtatatagtgaaccccgccccattggcaccagatacctgactcgtaatctgtaattgcttgttaatcaataaaccgtttaatt

SEQ ID NO: 578 - DNA, 2601 bp, Artificial Sequence
  source: /note="Description of Artificial Sequence: Synthetic polynucleotide"
ccatcgacgtcagacgcggaagcttcgatcaactacgcggacaggtaccaaaacaaatgttctcgtcacgtgggcatgaatctgatgctgtttccctgcagacaatgcgagagactgaatcagaattcaaatatctgcttcactcacggtgtcaaagactgtttagagtgctttcccgtgtcagaatctcaacccgtttctgtcgtcaaaaaggcgtatcagaaactgtgctacattcatcacatcatgggaaaggtgccagacgcttgcactgcttgcgacctggtcaatgtggacttggatgactgtgtttctgaacaataaatgacttaaaccaggtatggctgccgatggttatcttccagattggctcgaggacaaccttagtgaaggaattcgcgagtggtgggctttgaaacctggagcccctcaacccaaggcaaatcaacaacatcaagacaacgctcgaggtcttgtgcttccgggttacaaataccttggacccggcaacggactcgacaagggggagccggtcaacgcagcagacgcggcggccctcgagcacgacaaggcctacgaccagcagctcaaggccggagacaacccgtacctcaagtacaaccacgccgacgccgagttccaggagcggctcaaagaagatacgtcttttgggggcaacctcgggcgagcagtctttcaggccaaaaagaggcttcttgaacctcttggtctggttgaggaagcggctaagacggctcctggaaagaagaggcctgtagagcagtctcctcaggaaccggactcctccgcgggtattggcaaatcgggtgcacagcccgctaaaaagagactcaatttcggtcagactggcgacacagagtcagtcccagaccctcaaccaatcggagaacctcccgcagccccctcaggtgtgggatctcttacaatggcttcatgtggtggcgcaccagtggcagacaataacgaaggtgccgatggagtgggtagttcctcgggaaattggcattgcgattcccaatggctgggggacagagtcatcaccaccagcacccgaacctgggccctgcccacctacaacaatcacctctacaagcaaatctccaacagcacatctggaggatcttcaaatgacaacgcctacttcggctacagcaccccctgggggtattttgacttcaacagattccactgccacttctcaccacgtgactggcagcgactcatcaacaacaactggggattccggcctaagcgactcaacttcaagctcttcaacattcaggtcaaagaggttacggacaacaatggagtcaagaccatcgccaataaccttaccagcacggtccaggtcttcacggactcagactatcagctcccgtacgtgctcgggtcggctcacgagggctgcctcccgccgttcccagcggacgttttcatgattcctcagtacgggtatctgacgcttaatgatggaagccaggccgtgggtcgttcgtccttttactgcctggaatatttcccgtcgcaaatgctaagaacgggtaacaacttccagttcagctacgagtttgagaacgtacctttccatagcagctacgctcacagccaaagcctggaccgactaatgaatccactcatcgaccaatacttgtactatctctcaaagactattaacggttctggacagaatcaacaaacgctaaaattcagtgtggccggacccagcaacatggctgtccagggaagaaactacatacctggacccagctaccgacaacaacgtgtctcaaccactgtgactcaaaacaacaacagcgaatttgcttggcctggagcttcttcttgggctctcaatggacgtaatagcttgatgaatcctggacctgctatggccagccacaaagaaggagaggaccgtttctttcctttgtctggatctttaatttttggcaaacaaggaactggaagagacaacgtggatgcggacaaagtcatgataaccaacgaagaagaaattaaaactactaacccggtagcaacggagtcctatggacaagtggccacaaaccaccagagtgcccaagcacaggcgcagaccggctgggttcaaaaccaaggaatacttccgggtatggtttggcaggacagagatgtgtacctgcaaggacccatttgggccaaaattcctcacacggacggcaactttcacccttctccgctgatgggagggtttggaatgaagcacccgcctcctcagatcctcatcaaaaacacacctgtacctgcggatcctccaacggccttcaacaaggacaagctgaactctttcatcacccagtattctactggccaagtcagcgtggagatcgagtgggagctgcagaaggaaaacagcaagcgctggaacccggagatccagtacacttccaactattacaagtctaataatgttgaatttgctgttaatactgaaggtgtatatagtgaaccccgccccattggcaccagatacctgactcgtaatctgtaattgcttgttaatcaataaaccgtttaattcgtttcagttgaactgcggcc

SEQ ID NO: 579 - DNA, 2601 bp, Artificial Sequence
  source: /note="Description of Artificial Sequence: Synthetic polynucleotide"
ccatcgacgtcagacgcggaagcttcgatcaactacgcggacaggtaccaaaacaaatgttctcgtcacgtgggcatgaatctgatgctgtttccctgcagacaatgcgagagactgaatcagaattcaaatatctgcttcactcacggtgtcaaagactgtttagagtgctttcccgtgtcagaatctcaacccgtttctgtcgtcaaaaaggcgtatcagaaactgtgctacattcatcacatcatgggaaaggtgccagacgcttgcactgcttgcgacctggtcaatgtggacttggatgactgtgtttctgaacaataaatgacttaaaccaggtatggctgccgatggttatcttccagattggctcgaggacaaccttagtgaaggaattcgcgagtggtgggctttgaaacctggagcccctcaacccaaggcaaatcaacaacatcaagacaacgctcgaggtcttgtgcttccgggttacaaataccttggacccggcaacggactcgacaagggggagccgatcaacgcagcagacgcggcggccctcgagcacgacaaggcctacgaccagcagctcaaggccggagacaacccgtacctcaagtacaaccacgccgacgccgagttccaggagcggctcaaagaagatacgtcttttgggggcaacctcgggcgagcagtcttccaggccaaaaagaggcttcttgaacctcttggtctggttgaggaagcggctaagacggctcctggaaagaagaggcctgtagagcagtctcctcaggaaccggactcctccgcgggtattggcaaatcgggtgcacagcccgctaaaaagagactcaatttcggtcagactggcgacacagagtcagtcccagaccctcaaccaatcggagaacctcccgcagccccctcaggtgtgggatctcttacaatggcttcaggtggtggcgcaccagtggcagacaataacgaaggtgccgatggagtgggtagttcctcgggaaattggcattgcgattcccaatggctgggggacagagtcatcaccaccagcacccgaacctgggccctgcccacctacaacaatcacctctacaagcaaatctccaacagcacatctggaggatcttcaaatgacaacgcctacttcggctacagcaccccctgggggtattttgacttcaacagattccactgccacttctcaccacgtgactggcagcgactcatcaacaacaactggggattccggcctaagcgactcaacttcaagctcttcaacattcaggtcaaagaggttacggacaacaatggagtcaagaccatcgccaataaccttaccagcacggtccaggtcttcacggactcagactatcagctcccgtacgtgctcgggtcggctcacgagggctgcctcccgccgttcccagcggacgttttcatgattcctcagtacgggtatctgacgcttaatgatggaagccaggccgtgggtcgttcgtccttttactgcctggaatatttcccgtcgcaaatgctaagaacgggtaacaacttccagttcagctacgagtttgagaacgtacctttccatagcagctacgctcacagccaaagcctggaccgactaatgaatccactcatcgaccaatacttgtactatctctcaaagactattaacggttctggacagaatcaacaaacgctaaaattcagtgtggccggacccagcaacatggctgtccagggaagaaactacatacctggacccagctaccgacaacaacgtgtctcaaccactgtgactcaaaacaacaacagcgaatttgcttggcctggagcttcttcttgggctctcaatggacgtaatagcttgatgaatcctggacctgctatggccagccacaaagaaggagaggaccgtttctttcctttgtctggatctttaatttttggcaaacaaggaactggaagagacaacgtggatgcggacaaagtcatgataaccaacgaagaagaaattaaaactactaacccggtagcaacggagtcctatggacaagtggccacaaaccaccagagtgcccaagcacaggcgcagaccggctgggttcaaaaccaaggaatacttccgggtatggtttggcaggacagagatgtgtacctgcaaggacccatttgggccaaaattcctcacacgtacggcaactttcacccttctccgctgatgggagggtttggaatgaagcacccgcctcctcagatcctcatcaaaaacacacctgtacctgcggatcctccaacggccttcaacaaggacaagctgaactctttcatcacccagtattctactggccaagtcagcgtggagatcgagtgggagctgcagaaggaaaacagcaagcgctggaacccggagatccagtacacttccaactattacaagtctaataatgttgaatttgctgttaatactgaaggtgtatatagtgaaccccgccccattggcaccagatacctgactcgtaatctgtaattgcttgttaatcaataaaccgtttaattcgtttcagttgaactgcggcc

SEQ ID NO: 580 - DNA, 2601 bp, Artificial Sequence
  source: /note="Description of Artificial Sequence: Synthetic polynucleotide"
ccatcgacgtcagacgcggaagcttcgatcaactacgcggacaggtaccaaaacaaatgttctcgccacgtgggcatgaatctgatgctgtttccctgcagacaatgcgagagactgaatcagaattcaaatatctgcttcactcacggtgtcaaagactgtttagagtgctttcccgtgtcagaatctcaacccgtttctgtcgtcaaaaaggcgtatcagaaactgtgctacattcatcacatcatgggaaaggtgccagacgcttgcactgcttgcgacctggtcaatgtggacttggatgactgtgtttctgaacaataaatgacttaaaccaggtatggctgccgatggttatcttccagattggctcgaggacaaccttagtgaaggaattcgcgagtggtgggctttgaaacctggagcccctcaacccaaggcaaatcaacaacatcaagacaacgctcgaggtcttgtgcttccgggttacaaataccttggacccggcaacggactcgacaagggggagccggtcaacgcagcagacgcggcggccctcgagcacgacaaggcctacgaccagcagctcaaggccggagacaacccgtacctcaagtacaaccacgccgacgccgagttccaggagcggctcaaagaagatacgtcttttgggggcaacctcgggcgagcagtcttccaggccaaaaagaggcttcttgaacctcttggtctggttgaggaagcggctaagacggctcctggaaagaagaggcctgtagagcagtctcctcaggaaccggactcctccgcgggtattggcaaatcgggtgcacagcccgctaaaaagagactcaatttcggtcagactggcgacacagagtcagtcccagaccctcaaccaatcggagaacctcccgctgccccctcaggtgtgggatctcttacaatggcttcaggtggtggcgcaccagtggcagacaataacgaaggtgccgatggagtgggtagttcctcgggaaattggcattgcgattcccaatggctgggggacagagtcatcaccaccagcacccgaacctgggccctgcccacctacaacaatcacctctacaagcaaatctccaacagcacatctggaggatcttcaaatgacaacgcctacttcggctacagcaccccctgggggtattttgacttcaacagattccactgccacttctcaccacatgactggcagcgactcatcaacaacaactggggattccggcctaagcgactcaacttcaagctcttcaacattcaggtcaaagaggttacggacaacaatggagtcaagaccatcgccaataaccttaccagcacggtccaggtcttcacggactcagactatcagctcccgtacgtgctcgggtcggctcacgagggctgcctcccgccgttcccagcggacgttttcatgattcctcagtacgggtatctgacgcttaatgatggaagccaggccgtgggtcgttcgtccttttactgcctggaatatttcccgtcgcaaatgctaagaacgggtaacaacttccagttcagctacgagtttgagaacgtacctttccatagcagctacgctcacagccaaagcctggaccgactaatgaatccactcatcgaccaatacttgtactatctctcaaagactattaacggttctggacagaatcaacaaacgctaaaattcaatgtggccggacccagcaacatggctgtccagggaagaaactacatacctggacccagctaccgacaacaacgtgtctcaaccactgtgactcaaaacaacaacagcgaatttgcctggcctagagcttcttcttgggctctcaatggacgtaatagcttgatgaatcctggacctgctatggccagccacaaagaaggagaggaccgtttctttcctttgtctggatctttaatttttggcaaacaaggaactggaagagacaacgtggatgcggacaaagtcatgataaccaacgaagaagaaattaaaactactaacccggtagcaacggagtcctatggacaagtggccacaaaccaccagagtgcccaagcacaggcgcagaccggctgggttcaaaaccaaggaatacttccgggtatggtttggcaggacagagatgtgtacctgcaaggacccatttgggccaaaattcctcacacggacggcaactttcacccttctccgctgatgggagggtttggaatgaagcacccgcctcctcagatcctcatcaaaaacacacctgtacctgcggatcctccaacggccttcaacaaggacaagctgaactctttcatcacccagtattctactggccaagtcagcatggagatcgagtgggagctgcagaaggaaaacagcaagcgctggaacccggagatccagtacacttccaactattacaagtctaataatgttgaatttgctgttaatactgaaggtgtatatagtgaaccccgccccattggcaccagatacctgactcgtaatctgtaattgcttgttaatcaataaaccgtttaattcgtttcagttgaactgcggcc

SEQ ID NO: 581 - DNA, 2601 bp, Artificial Sequence
  source: /note="Description of Artificial Sequence: Synthetic polynucleotide"
ccatcgacgtcagacgcggaagcttcgatcaactacgcggacaggtaccaaaacaaatgttctcgtcacgtgggcatgaatctgatgctgtttccctgcagacaatgcgagagactgaatcagaattcaaatatctgcttcactcacggtgtcaaagactgtttagagtgctttcccgtgtcagaatctcaacccgtttctgtcgtcaaaaaggcgtatcagaaactgtgctacattcatcacatcatgggaaaggtgccagacgcttgcactgcttgcgacctggtcaatgtggacttggatgactgtgtttctgaacaataaatgacttaaaccaggtatggctgccgatggttatcttccagattggctcgaggacaaccttagtgaaggaattcgcgagtggtgggctttgaaacctggagcccctcaacccaaggcaaatcaacaacatcaagacaacgctcgaggtcttgtgcttccgggttacaaataccttggacccggcaacggactcgacaagggggagccggtcaacgcagcagacgcggcggccctcgagcacgacaaggcctacgaccagcagctcaaggccggagacaacccgtacctcaagtacaaccacgccgacgccgagttccaggagcggctcaaagaagatacgtcttttgggggcaacctcgggcgagcagtcttccaggccaaaaagaggcttcttgaacctcttggtctggttgaggaagcggctaagacggctcctggaaagaagaggcctgtagagcagtctcctcaggaaccggactcctccgcgggtattggcaaatcgggtgcacagcccgctaaaaagagactcaatttcggtcagactggcgacacagagtcagtcccagaccctcaaccaatcggagaacctcccgcagccccctcaggtgtgggatctcttacaatggcttcaggtggtggcgcaccagtggcagacaataacgaaggtgccgatggagtgggtagttcctcgggaaattggcattgcgattcccaatggctgggggacagagtcatcaccaccagcacccgaacctgggccctgcccacctacaacaatcacctctacaagcaaatctccaacagcacatctggaggatcttcaaatgacaacgcctacttcggctacagcaccccctgggggtattttgacttcaacagattccactgccacttctcaccacgtgactggcagcgactcatcaacaacaactggggattccggcctaagcgactcaacttcaagctcttcaacattcaggtcaaagaggttacggacaacaatggagtcaagaccatcgccaataaccttaccagcacggtccaggtcttcacggactcagactatcagctcccgtacgtgctcgggtcggctcacgagggctgcctcccgccgttcccagcggacgttttcatgattcctcagtacgggtatctgacgcttaatgatggaagccaggccgtgggtcgttcgtccttttactgcctggaatatttcccgtcgcaaatgctaagaacgggtaacaacttccagttcagctacgagtttgagaacgtacctttccatagcagctacgctcacagccaaagcctggaccgactaatgaatccactcatcgaccaatacttgtactatctctcaaagactattaacggttctggacagaatcaacaaacgctaaaattcagtgtggccggacccagcaacatggctgtccagggaagaaactacatacctggacccagctaccgacaacaacgtgtctcaaccactgtgactcaaaacaacaacagcgaatttgcttggcctagagcttcttcttgggctctcaatggacgtaatagcttgatgaatcctggacctgctatggccagccacaaagaaggagaggaccgtttctttcctttgtctggatctttaatttttggcaaacaaggaactggaagagacaacgtggatgcggacaaagtcatgataaccaacgaagaagaaattaaaactactaacccggtagcaacggagtcctatggacaagtggccacaaaccaccagagtgcccaagcacaggcgcagaccggctgggttcaaaaccaaggaatacttccgggtatggtttggcaggacagagatgtgtacctgcaaggacccatttgggccaaaattcctcacacggacggcaactttcacccttctccgctgatgggagggtttggaatgaagcacccgcctcctcagatcctcatcaaaaacacacctgtacctgcggatcctccaacggccttcaacaaggacaagctgaactctttcatcacccagtattctactggccaagtcagcgtggagatcgagtgggagctgcagaaggaaaacagcaagcgctggaacccggagatccagtacacttccaactattacaagtctaataatgttgaatttgctgttaatactgaaggtgtatatagtgaaccccgccccattggcaccagatacctgactcgtaatctgtaattgcttgttaatcaataaaccgtttaattcgtttcagttgaactgcggcc

SEQ ID NO: 582 - DNA, 2601 bp, Artificial Sequence
  source: /note="Description of Artificial Sequence: Synthetic polynucleotide"
ccatcgacgtcagacgcggaagcttcgatcaactacgcggacaggtaccaaaacaaatgttctcgtcacgtgggcatgaatctgatgctgtttccctgcagacaatgcgagagactgaatcagaattcaaatatctgcttcactcacggtgtcaaagactgtttagagtgctttcccgtgtcagaatctcaacccgtttctgtcgtcaaaaaggcgtatcagaaactgtgctacattcatcacatcatgggaaaggtgccagacgcttgcactgcttgcgacctggtcaatgtggacttggatgactgtgtttctgaacaataaatgacttaaaccaggtatggctgccgatggttatcttccagattggctcgaggacaaccttagtgaaggaattcgcgagtggtgggctttgaaacctggagcccctcaacccaaggcaaatcaacaacatcaagacaacgctcgaggtcttgtgcttccgggttacaaataccttggacccggcaacggactcgacaagggggagccggtcaacgcagcagacgcggcggccctcgagcacgacaaggcctacgaccagcagctcaaggccggagacaacccgtacctcaagtacaaccacgccgacgccgagttccaggagcggctcaaagaagatacgtcttttgggggcaacctcgggcgagcagtcttccaggccaaaaagaggcttcttgaacctcttggtctggttgaggaagcggctaagacggctcctggaaagaagaggcctgtagagcagtctcctcaggaaccggactcctccgcgggtattggcaaatcgggtgcacagcccgctaaaaagagactcaatttcggtcagactggcgacacagagtcagtcccagaccctcaaccaatcggagaacctcccgcagccccctcaggtgtgggatctcttacaatggcttcaggtggtggcgcaccagtggcagacaataacgaaggtgccgatggagtgggtagttcctcgggaaattggcattgcgattcccaatggctgggggacagagtcatcaccaccagcacccgaacctgggccctgcccacctacaacaatcacctctacaagcaaatctccaacagcacatctggaggatcttcaaatgacaacgcctacttcggctacagcaccccctgggggtattttgacttcaacagattccactgccacttctcaccacgtgactggcagcgactcatcaacaacaactggggattccggcctaagcgactcaacttcaagctcttcaacattcaggtcaaagaggttacggacaacaatggagtcaagaccatcgccaataaccttaccagcacggtccaggtcttcacggactcagactatcagctcccgtacgtgctcgggtcggctcacgagggctgcctcccgccgttcccagcggacgttttcatgattcctcagtacgggtatctgacgcttaatgatggaagccaggccgtgggtcgttcgtccttttactgcctggaatatttcccgtcgcaaatgctaagaacgggtaacaacttccagttcagctacgagtttgagaacgtacctttccatagcagctacgctcacagccaaagcctggaccgactaatgaatccactcatcgaccaatacttgtactatctctcaaagactattaacggttctggacagaatcaacaaacgctaaaattcagtgtggccggacccagcaacatggctgtccagggaagaaactacatacctggacccagctaccgacaacaacgtgtctcaaccactgtgactcaaaacaacaacagcgaatttgcttggcctagagcttcttcttgggctctcaatggacgtaatagcttgatgaatcctggacctgctatggccagccacaaagaaggagaggaccgtttctttcctttgtctggatctttaatttttggcaaacaaggaactggaagagacaacgtggatgcggacaaagtcatgataaccaacgaagaagaaattaaaactactaacccggtagcaacggagtcctatggacaagtggccacaaaccaccagagtgcccaagcacaggcgcagaccggctgggttcaaaaccaaggaatacttccgggtatggtttggcaggacagagatgtgtacctgcaaggacccatttgggccaaaattcctcacacggacggcaactttcacccttctccgctgatgggagggtttggaatgaagcacccgcctcctcagatcctcatcaaaaacacacctgtacctgcggatcctccaacggccttcaacaaggacaagctgaactctttcatcacccagtattctactggccaagtcagcgtggagatcgagtgggagcggcagaaggaaaacagcaagcgctggaacccggagatccagtacacttccaactattacaagtctaataatgttgaatttgctgttaatactgaaggtgtatatagtgaaccccgccccattggcaccagatacctgactcgtaatctgtaattgcttgttaatcaataaaccgtttaattcgtttcagttgaactgcggcc

SEQ ID NO: 583 - DNA, 2601 bp, Artificial Sequence
  source: /note="Description of Artificial Sequence: Synthetic polynucleotide"
ccatcgacgtcagacgcggaagcttcgatcaactacgcggacaggtaccaaaacaaatgttctcgtcacgtgggcatgaatctgatgctgtttccctgcagacaatgcgagagactgaatcagaattcaaatatctgcttcactcacggtgtcaaagactgtttagagtgctttcccgtgtcagaatctcaacccgtttctgtcgtcaaaaaggcgtatcagaaactgtgctacattcatcacatcatgggaaaggtgccagacgcttgcactgcttgcgacctggtcaatgtggacttggatgactgtgtttctgaacaataaatgacttaaaccaggtatggctgccgatggttatcttccagattggctcgaggacaaccttagtgaaggaattcgcgagtggtgggctttgaaacctggagcccctcaacccaaggcaaatcaacaacatcaagacaacgctcgaggtcttgtgcttccgggttacaaataccttggacccggcaacggactcgacaagggggagccggtcaacgcagcagacgcggcggccctcgagcacgacaaggcctacgaccagcagctcaaggccggagacaacccgtacctcaagtacaaccacgccgacgccgagttccaggagcggctcaaagaagatacgtcttttgggggcaacctcgggcgagcagtcttccaggccaaaaagaggcttcttgaacctcttggtctggttgaggaagcggctaagacggctcctggaaagaagaggcctgtagagcagtctcctcaggaaccggactcctccgcgggtattggcaaatcgggtgcacagcccgctaaaaagagactcaatttcggtcagactggcgacacagagtcagtcccagaccctcaaccaatcggagaacctcccgcagccccctcaggtgtgggatctcttacaatggcttcaggtggtggcgcaccagtggcagacaataacgaaggtgccgatggagtgggtagttcctcgggaaattggcattgcgattcccaatggctgggggacagagtcatcaccaccagcacccgaacctgggccctgcccacctacaacaatcacctctacaagcaaatctccaacagcacatctggaggatcttcaaatgacaacgcctacttcggctacagcaccccctgggggtattttgacttcaacagattccactgccacttctcaccacgtgactggcagcgactcatcaacaacaactggggattccggcctaagcgactcaacttcaagctcttcaacattcaggtcaaagaggttacggacaacaatggagtcaagaccatcgccaataaccttaccagcacggtccaggtcttcgcggactcagactatcagctcccgtacgtgctcgggtcggctcacgagggctgcctcccgccgttcccagcggacgttttcatgattcctcagtacgggtatctgacgcttaatgatggaagccaggccgtgggtcgttcgtccttttactgcctggaatatttcccgtcgcaaatgctaagaacgggtaacaacttccagttcagctacgagtttgagaacgtacctttccatagcagctacgctcacagccaaagcctggaccgactaatgaatccactcatcgaccaatacttgtactatctctcaaagactattaacggttctggacagaatcaacaaacgctaaaattcagtgtggccggacccagcaacatggctgtccagggaagaaactacatacctggacccagctaccgacaacaacgtgtctcaaccactgtgactcaaaacaacaacagcgaatttgcttggcctagagcttcttcttgggctctcaatggacgtaatagcttgatgaatcctggacctgctatggccagccacaaagaaggagaggaccgtttctttcctttgtctggatctttaatttttggcaaacaaggaactggaagagacaacgtggatgcggacaaagtcatgataaccaacgaagaagaaattaaaactactaacccggtagcaacggagtcctatggacaagtggccacaaaccaccagagtgcccaagcacaggcgcagaccggctgggttcaaaaccaaggaatacttccgggtatggtttggcaggacagagatgtgtacctgcaaggacccatttgggccaaaattcctcacacggacggcaactttcacccttctccgctgatgggagggtttggaatgaagcacccgcctcctcagatcctcatcaaaaacacacctgtacctgcggatcctccaacggccttcaacaaggacaagctgaactctttcatcacccagtattctactggccaagtcagcgtggagatcgagtgggagctgcagaaggaaaacagcaagcgctggaacccggagatccagtacacttccaactattacaagtctaataatgttgaatttgctgttaatactgaaggtgtatatagtgaaccccgccccattggcaccagatacctgactcgtaatctgtaattgcttgttaatcaataaaccgtttaattcgtttcagttgaactgcggcc

SEQ ID NO: 584 - DNA, 2601 bp, Artificial Sequence
  source: /note="Description of Artificial Sequence: Synthetic polynucleotide"
ccatcgacgtcagacgcggaagcttcgatcaactacgcggacaggtaccaaaacaaatgttctcgtcacgtgggcatgaatctgatgctgtttccctgcagacaatgcgagagactgaatcagaattcaaatatctgcttcactcacggtgtcaaagactgtttagagtgctttcccgtgtcagaatctcaacccgtttctgtcgtcaaaaaggcgtatcagaaactgtgctacattcatcacatcatgggaaaggtgccagacgcttgcactgcttgcgacctggtcaatgtggacttggatgactgtgtttctgaacaataaatgacttaaaccaggtatggctgccgatggttatcttccagattggctcgaggacaaccttagtgaaggaattcgcgagtggtgggctttgaaacctggagcccctcaacccaaggcaaatcaacaacatcaagacaacgctcgaggtcttgtgcttccgggttacaaataccttggacccggcaacggactcgacaagggggagccggtcaacgcagcagacgcggcggccctcgagcacgacaaggcctacgaccagcagctcaaggccggagacaacccgtacctcaagtacaaccacgccgacgccgagttccaggagcggctcaaagaagatacgtcttttgggggcaacctcgggcgagcagtcttccaggccaaaaagaggcttcttgaacctcttggtctggttgaggaagcggctaagacggctcctggaaagaagaggcctgtagagcagtctcctcaggaaccggactcctccgcgggtattggcaaatcgggtgcacagcccgctaaaaagagactcaatttcggtcagactggcgacacagagtcagtcccagaccctcaaccaatcggagaacctcccgcagccccctcaggtgtgggatctcttacaatggcttcaggtggtggcgcaccagtggcagacaataacgaaggtgccgatggagtgggtagttcctcgggaaattggcattgcgattcccaatggctgggggacagagtcatcaccaccagcacccgaacctgggccctgcccacctacaacaatcacctctacaagcaaatctccaacagcacatctggaggatcttcaaatgacaacgcctacttcggctacagcaccccctgggggtattttgacttcaacagattccactgccacttctcaccacgtgactggcagcgactcatcaacaacaactggggattccggcctaagcgactcaacttcaagctcttcaacattcaggtcaaagaggttacggacaacaatggagtcaagaccatcgccaataaccttaccagcacggtccaggtcttcacggactcagactatcagctcccgtacgtgctcgggtcggctcacgagggctgcctcccgccgttcccagcggacgttttcatgattcctcagtacgggtatctgacgcttaatgatggaagccaggccgtgggtcgttcgtccttttactgcctggaatatttcccgtcgcaaatgctaagaacgggtaacaacttccagttcagctacgagtttgagaacgtacctttccatagcagctacgctcacagccaaagcctggaccgactaatgaatccactcatcgaccaatacttgtactatctctcaaagactattaacggttctggacagaatcaacaaacgctaaaattcagtgtggccggacccagcaacatggctgtccagggaagaaactacatacctggacccagctaccgacaacaacgtgtctcaaccactgtgactcaaaacaacaacagcgaaattgcttggcctagagcttcttcttgggctctcaatggacgtaatagcttgatgaatcctggacctgctatggccagccacaaagaaggagaggaccgtttctttcctttgtctggatctttaatttttggcaaacaaggaactggaagagacaacgtggatgcggacaaagtcatgataaccaacgaagaagaaattaaaactactaacccagtagcaacggagtcctatggacaagtggccacaaaccaccagagtgcccaagcacaggcgcagaccggctgggttcaaaaccaaggaatacttccgggtatggtttggcaggacagagatgtgtacctgcaaggacccatttgggccaaaattcctcacacggacggcaactttcacccttctccgctgatgggagggtttggaatgaagcacccgcctcctcagatcctcatcaaaaacacacctgtacctgcggatcctccaacggccttcaacaaggacaagctgaactctttcatcacccagtattctactggccaagtcagcgtggagatcgagtgggagctgcagaaggaaaacagcaagcgctggaacccggagatccagtacacttccaactattgcaagtctaataatgttgaatttgctgttaatactgaaggtgtatatagtgaaccccgccccattggcaccagatacctgactcgtaatctgtaattgcttgttaatcaataaaccgtttaattcgtttcagttgaactgcggcc

SEQ ID NO: 585 - DNA, 2601 bp, Artificial Sequence
  source: /note="Description of Artificial Sequence: Synthetic polynucleotide"
ccatcgacgtcagacgcggaagcttcgatcaactacgcggacaggtaccaaaacaaatgttctcgtcacgtgggcatgaatctgatgctgtttccctgcagacaatgcgagagactgaatcagaattcaaatatctgcttcactcacggtgtcaaagactgtttagagtgctttcccgtgtcagaatctcaacccgtttctgtcgtcaaaaaggcgtatcagaaactgtgctacattcatcacatcatgggaaaggtgccagacgcttgcactgcttgcgacctggtcaatgtggacttggatgtctgtgtttctgaacaataaatgacttaaaccaggtatggctgccgatggttatcttccagattggctcgaggacaaccttagtgaaggaattcgcgagtggtgggctttgaaacctggagcccctcaacccaaggcaaatcaacaacatcaagacaacgctcgaggtcttgtgcttccgggttacaaataccttggacccggcaacggactcgataagggggagccggtcaacgcagcagacgcggcggccctcgagcacgacaaggcctacgaccagcagctcaaggccggagacaacccgtacctcaagtacaaccacgccgacgccgagttccaggagcggctcaaagaagatacgtcttttgggggcaacctcgggcgagcagtcttccaggccaaaaagaggcttcttgaacctcttggtctggttgaggaagcggctaagacggctcctggaaagaagaggcctgtagagcagtctcctcaggaaccggactcctccgcgggtattggcaaatcgggtgcacagcccgctaaaaagagactcaatttcggtcagactggcgacacagagtcagtcccagaccctcaaccaatcggagaacctcccgcagccccctcaggtgtgggatctcttacaatggcttcaggtggtggcgcaccagtggcagacaataacgaaggtgccgatggagtgggtagttcctcgggaaattggcattgcgattcccaatggctgggggacagagtcatcaccaccagcacccgaacctgggccctgcccacctacaacaatcacctctacaagcaaatctccaacagcacatctggaggatcttcaaatgacaacgcctacttcggctacagcaccccctgggggtattttgacttcaacagattccactgccacttctcaccacgtgactggcagcgactcatcaacaacaactggggattccggcctaagcgactcaacttcaagctcttcaacattcaggtcaaagaggttacggacaacaatggagtcaagaccatcgccaataaccttaccagcacggtccaggtcttcacggactcagactatcagctcccgtacgtgctcgggtcggctcacgagggctgcctcccgccgttcccagcggacgttttcatgattcctcagtacgggtatctgacgcttaatgatggaagccaggccgtgggtcgttcgtccttttactgcctggaatatttcccgtcgcaaatgctaagaacgggtaacaacttccagttcagctacgagtttgagaacgtacctttccatagcagctacgctcacagccaaagcctggaccgactaatgaatccactcatcgaccaatacttgtactatctctcaaagactattaacggttctggacagaatcaacaaacgctaaaattcagtgtggccggacccagcaacatggctgtccagggaagaaactacatacctggacccagctaccgacaacaacgtgtctcaaccactgtgactcaaaacaacaacagcgaatttgcttggcctagagcttcttcttgggctctcaatggacgtaatagcttgatgaatcctggacctgctatggccagccacaaagaaggagaggaccgtttctttcctttgtctggatctttaatttttggcaaacaaggaactggaagagacaacgtggatgcggacaaagtcatgataaccaacgaagaagaaattaaaactactaacccggtagcaacggagtcctatggacaagtggccacaaaccaccagagtgcccaagcacaggcgcagaccggctgggttcaaaaccaaggaatacttccgggtatggtttggcaggacagagatgtgtacctgcaaggacccatttgggccaaaattcctcacacggacggcaactttcacccttctccgctgatgggagggtttggaatgaagcacccgcctcctcagatcctcatcaaaaacacacctgtacctgcggatcctccaacggccttcaacaaggacaagctgaactctttcatcacccagtattctactggccaagtcagcgtggagatcgagtgggagctgcagaaggaaaacagcaagcgctggaacccggagatccagtacacttccaactattacaagtctaataatgttgaatttgctgttaatactgaaggtgtatatagtgaaccccgccccattggcaccagatacctgactcgtaatctgtaattgcttgttaatcaataaaccgtttaattcgtttcagttgaactgcggcc

SEQ ID NO: 586 - protein, 736 aa, Artificial Sequence
  source: /note="Description of Artificial Sequence: Synthetic polypeptide"
MTADGYLPDWLEDNLSEGIREWWALKPGAPQPKANQQHQDNARGLVLPGYKYLGPGNGLDKGEPVNAADAAALEHDKAYDQQLKAGDNPYLKYNHADAEFQERLKEDTSFGGNLGRAVFQAKKRLLEPLGLVEEAAKTAPGKKRPVEQSPQEPDSSAGIGKSGAQPAKKRLNFGQTGDTESVPDPQPIGEPPAAPSGVGSLTMASGGGAPVADNNEGADGVGSSSGNWHCDSQWLGDRVITTSTRTWALPTYNNHLYKQISNSTSGGSSNDNAYFGYSTPWGYFDFNRFHCHFSPRDWQRLINNNWGFRPKQLNFKLFNIQVKEVTDNNGVKTIANNLTSTVQVFTDSDYQLPYVLGSAHEGCLPPFPADVFMIPQYGYLTLNDGSQAVGRSSFYCLEYFPSQMLRTGNNFQFSYEFENVPFHSSYAHSQSLDRLMNPLIDQYLYYLSKTINGSGQNQQTLKFSVAGPSNMAVQGRNYIPGPSYRQQRVSTTVTQNNNSEFAWPGASSWALNGRNSLMNPGPAMASHKEGEDRFFPLSGSLIFGKQGTGRDNVDADKVMITNEEEIKTTNPVATESYGQVATNHQSAQAQAQTGWVQNQGILPGMVWQDRDVYLQGPIWAKIPHTDGNFHPSPLMGGFGMKHPPPQILIKNTPVPADPPTAFNKDKLNSFITQYSTGQVSVEIEWELQKENSKRWNPEIQYTSNYYKSNNVEFAVNTEGVYSEPRPIGTRYLTRNL

SEQ ID NO: 587 - protein, 736 aa, Artificial Sequence
  source: /note="Description of Artificial Sequence: Synthetic polypeptide"
MAADGYLPDWLEDNLSEGIREWWALKPGAPQPKANQQHQDNARGLVLPGYKYLGPGNGLDKGEPVNAADAAALEHDKAYDQQLKAGDNPYLKYNHADAEFQERLKEDTSFGGNLGRAVFQAKKRLLEPLGLVEEAAKTAPGKKRPVEQSPQEPDSSAGIGKSGAQPAKKRLNFGQTGDTESVPDPQPIGEPPAAPSGVGSLTMASGGGAPVADNNEGADGVGSSSGNWHCDSQWLGDRVITTSTRTWALPTYNNHLYKQISNSTSGGSSNDNAYFGYSTPWGYFDFNRFHCHFSPRDWQRLINNNWGFRPKRLNFKLFNIQVKEVTDNNGVKTIANNLTSTVQVFTDSDYQLPYVLGSAHEGCLPPFPADVFMIPQYGYLTLNDGSQAVGRSSFYCLEYFPSQMLRTGNNFQFSYEFENVPFHSSYAHSQSLDRLMNPLIDQYLYYLSKTINGSGQNQQTLKFSVAGPSNMAVQGRNYIPGPSYRQQRVSTTVTQNNNSEFAWPGASSWALNGRNSLMNPGPAMASHKEGEDRFFPLSGSLIFGKQGTGRDNVDADKVMITNEEEIKTTNPVATESYGQVATNHQSAQAQAQTGWVQNQGILPGMVWQDRDVYLQGPIWAKIPHTGGNFHPSPLMGGFGMKHPPPQILIKNTPVPADPPTAFNKDKLNSFITQYSTGQVSVEIEWELQKENSKRWNPEIQYTSNYYKSNNVEFAVNTGGVYSEPRPIGTRYLTRNL

SEQ ID NO: 588 - protein, 736 aa, Artificial Sequence
  source: /note="Description of Artificial Sequence: Synthetic polypeptide"
MAADGYLPDWLEDNLSEGIREWWALKPGAPQPKANQQHQDNARGLVLPGYKYLGPGNGLDKGEPVNAADAAALEHDKAYDQQLKAGDNPYLKYNHADAEFQERLKEDTSFGGNLGRAVFQAKKRLLEPLGLVEEAAKTAPGKKRPVEQSPQEPDSSAGIDKSGAQPAKKRLNFGQTGDTESVPDPQPIGEPPAAPSGVGSLTMASGGGAPVADNNEGADGVGSSSGNWHCDSQWLGDRVITTSTRTWALPTYNNHLYKQISNSTSGGSSNDNAYFGYSTPWGYFDFNRFHCHFSPRDWQRLINNNWGFRPKRLNFKLFNIQVKEVTDNNGVKTIANNLTSTVQVFTDSDYQLPYVLGSAHEGCLPPFPADVFMIPQYGYLTLNDGSQAVGRSSFYCLEYFPSQMLRTGNNFQFSYEFENVPFHSSYAHSQSLDRLMNPLIDQYLYYLSKTINGSGQNQQTLKFSVAGPSNMAVQGRNYIPGPSYRQQRVSTTVTQNNNSEFAWPGASSWALNGRNSLMNPGPAMASHKEGEDRFFPLSGSLIFGKQGTGRDNVDADKVMITNEEEIKTTNPVATESYGQVATNHQSAQAQAQTGWVQNQGILPGMVWQDRDVYLQGPIWAKIPHTDGNFHPSPLMGGFGMKHPPPQILIKNTPVPADPPTAFNKDKLNSFITQYSTGQVSVEIEWELQKENSKRWNPEIQYTSNYYKSNNVEFAVNTEGVYSEPRPIGTRYLTRNL

SEQ ID NO: 589 - protein, 736 aa, Artificial Sequence
  source: /note="Description of Artificial Sequence: Synthetic polypeptide"
MAADGYLPDWLEDNLSEGIREWWALKPGAPQPKANQQHQDNARGLVLPGYKYLGPGNGLDKGEPVNAADAAALEHDKAYDQQLKAGDNPYLKYNHADAEFQERLKEDTSFGGNLGRAVLQAKKRLLEPLGLVEEAAKTAPGKKRPVEQSPQEPDSSAGIGKSGAQPAKKRLNFGQTGDTESVPDPQPIGEPPAAPSGVGSLTMASGGGAPVADNNEGADGVGSSSGNWHCDSQWLGDRVITTSTRTWALPTYNNHLYKQISNSTSGGSSNDNAYFGYSTPWGYFDFNRFHCHFSPRDWQRLINNNWGFRPKRLNFKLFNIQVKEVTDNNGVKTIANNLTSTVQVFTDSDYQLPYVLGSAHEGCLPPFPADVFMIPQYGYLTLNDGSQAVGRSSFYCLEYFPSQMLRTGNNFQFSYEFENVPFHSSYAHSQSLDRLMNPLIDQYLYYLSKTINGSGQNQQTLKFSVAGSSNMAVQGRNYIPGPSYRQQRVSTTVTQNNNSEFAWPGASSWALNGRNSLMNPGPAMASHKEGEDRFFPLSGSLIFGKQGTGRDNVDADKVMITNEEEIKTTNPVATESYGQVATNHQSAQAQAQTGWVQNQGILPGMVWQDRDVYLQGPIWAKIPHTDGNFHPSPLMGGFGMKHPPPQILIKNTPVPADPPTAFNKDKLNSFITQYSTGQVSVEIEWELQKENSKRWNPEIQYTSNYYKSNNVEFAVNTEGVYSEPRPIGTRYLTRNL

SEQ ID NO: 590 - protein, 736 aa, Artificial Sequence
  source: /note="Description of Artificial Sequence: Synthetic polypeptide"
MAADGYLPDWLEDNLSEGIREWWALKPGAPQPKANQQHQDNARGLVLPGYKYLGPGNGLDKGEPVNAADAAALEHDRAYDQQLKAGDNPYLKYNHADAEFQERLKEDTSFGGNLGRAVFQAKKRLLEPLGLVEEAAKTAPGKKRPVEQSPQEPDSSAGIGKSGAQPAKKRLNFGQTGDTESVPDPQPIGEPPAAPSGVGSLTMASGGGAPVADNNEGADGVGSSSGNWHCDSQWLGDRVITTSTRTWALPTYNNHLYKQISNSTSGGSSNDNAYFGYSTPWGYFDFNRFHCHFSPRDWQRLINNNWGFRPKRLNFKLFNIQVKEVTDNNGVKTIANNLTSTVQVFTDSDYQLPYVLGSAHEGCLPPFPADVFMIPQYGYLTLNDGSQAVGRSSFYCLEYFPSQMLRTGNNFQFSYEFENVPFHSSYAHSQSLDRLMNPLIDQYLYYLSKTINGSGQNQQTLKFSVAGPSNMAVQGRNYIPGPSYRQQRVSTTVTQNNNSEFAWPGASSWALNGRNSLMNPGPAMASHKEGEDRFFPLSGSLIFGKQGTGRDNVDADKVMITNEEEIKTTNPVATESYGQVATNHQSAQAQAQTGWVQNQGILPGMVWQDRDVYLQGPIWAKIPHTDGNFHPSPLMGGFGMKHPPPQILIKNTPVPADPPTAFNKDKLNSFITQYSTGQVSVEIEWELQKKNSKRWNPEIQYTSNYYKSNNVEFAVNTEGVYSEPRPIGTRYLTRNL

SEQ ID NO: 591 - protein, 736 aa, Artificial Sequence
  source: /note="Description of Artificial Sequence: Synthetic polypeptide"
MAADGYLPDWLEDNLSEGIREWWALKPGAPQPKANQQHQDNARGLVLPGYKYLGPGNGLDKGEPVNAADAAALEHDKAYDQQLKAGDNPYLKYNHADAEFQERLKEDTSFGGNLGRAVFQAKKRLLEPLGLVEEAAKTAPGKKRPVEQSPQEPDSSAGIGKSGAQPAKKRLNFGQTGDTESVPDPQPIGEPPAAPSGVGSLTMASGGGAPVADNNEGADGVGSSSGNWHCDSQWLGDRVITTSTRTWALPTYNNHLYKQISNSTSGGSSNDNAYFGYSTPWGYFDFNRFHCHFSPRDWQRLINNNWGFRPKRLNFKLFNIQVKEVTDNNGVKTIANNLTSTVQVFTDSDYQLPYVLGSAHEGCLPPFPADVFMIPQYGYLTLNDGSQAVGRSSFYCLEYFPSQMLRTGNNFQFSYEFENVPFHSSYAHSQSLDRLMNPLIDQYLYYLSKTINGSGQNQQTLKFSVAGPSNMAVQGRNYIPGPSYRQQRVSTTVTQNNNSEFAWPGASSWALNGRNSLMNPGPAMASHKEGEDRFFPLSGSLIFGKQGTGRDNVDADKVMITNEEEIKTTNPVATESYGQVATNHQSAQARAQTGWVQNQGILPGMVWQDRDVYLQGPIWAKIPHTDGNFHPSPLMGGFGMKHPPPQILIKNTPVPADPPTAFNKDKLNSFITQYSTGQVSVEIEWELQKENSKRWNPEIQYTSNYYKSNNVEFAVNTEGVYSEPRPIGTRYLTRNL

SEQ ID NO: 592 - protein, 736 aa, Artificial Sequence
  source: /note="Description of Artificial Sequence: Synthetic polypeptide"
MAADGYLPDWLEDNLSEGIREWWALKPGAPQPKANQQHQDNARGLVLPGYKYLGPGNGLDKGEPVNAVDAAALEHDKAYDQQLKAGDNPYLKYNHADAEFQERLKEDTSFGGNLGRAVFQAKKRLLEPLGLVEEAAKTAPGKKRPVEQSPQEPDSSAGIGKSGAQPAKKRLNFGQTGDTESVPDPQPIGEPPAAPSGVGSLTMASGGGAPVADNNEGADGVGSSSGNWHCDSQWLGDRVITTSTRTWALPTYNNHLYKQISNSTSGGSSNDNAYFGYSTPWGYFDFNRFHCHFSPRDWQRLINNNWGFRPKRLNFKLFNIQVKEVTDNNGVKTIANNLTSTVQVFTDSDYQLPYVLGSAHEGCLPPFPADVFMIPQYGYLTLNDGSQAVGRSSFYCLEYFPSQMLRTGNNFQFSYEFENVPFHSSYAHSQSLDRLMNPLIDQYLYYLSKTINGSGQNQQTLKFSVAGPSNMAVQGRNYIPGPSYRQQRVSTTVTQNNNSEFAWPGASSWALNGRNSLMNPGPAMASHKEGEDRFFPLSGSLIFGKQGTGRDNVDADKVMITNEEEIKTTNPVATESYGQVATNHQSAQAQAQTGWVQNQGILPGMVWQDRDVYLQGPIWAKIPHTDGNFHPSPLMGGFGMKHPPPQILIKNTPVPADPPTAFNKDKLNSFITQYSTGQVSVEIEWELQKENSKRWNPEIQYTSNYYKSNNVEFAVNTEGVYSEPRPIGTRYLTRNL

SEQ ID NO: 593 - protein, 736 aa, Artificial Sequence
  source: /note="Description of Artificial Sequence: Synthetic polypeptide"
MAADGYLPDWLEDNLSEGIREWWALKPGAPQPKANQQHQDNARGLVLPGYKYLGPGNGLDKGEPVNAADAAALEHDKAYDQQLKAGDNPYLKYNHADAEFQERLKEDTSFGGNLGRAVFQAKKRLLEPLGLVEEAAKTAPGKKRPVEQSPREPDSSAGIGKSGAQPAKKRLNFGQTGDTESVPDPQPIGEPPAAPSGVGSLTMASGGGAPVADNNEGADGVGSSSGNWHCDSQWLGDRVITTSTRTWALPTYNNHLYKQISNSTSGGSSNDNAYFGYSTPWGYFDFNRFHCHFSPRDWQRLINNNWGFRPKRLNFKLFNIQVKEVTDNNGVKTIANNLTSTVQVFTDSDYQLPYVLGSAHEGCLPPFPADVFMIPQYGYLTLNDGSQAVGRSSFYCLEYFPSQMLRTGNNFQFSYEFENVPFHSSYAHSQSLDRLMNPLIDQYLYYLSKTINGSGQNQQTLKFSVAGPSNMAVQGRNYIPGPSYRQQRVSTTVTQNNNSEFAWPGASSWALNGRNSLMNPGPAMASHKEGEDRFFPLSGSLIFGKQGTGRDNVDADKVMITNEEEIKTTNPVATESYGQVATNHQSAQAQAQTGWVQNQGILPGMVWQDRDVYLQGPIWAKIPHTDGNFHPSPLMGGFGMKHPPPQILIKNTPVPADPPTAFNKDKLNSFITQYSTGQVSVEIEWELQKENSKRWNPEIQYTSNYYKSNNVEFAVNTEGVYSEPRPIGTRYLTRNL

SEQ ID NO: 594 - protein, 736 aa, Artificial Sequence
  source: /note="Description of Artificial Sequence: Synthetic polypeptide"
MAADGYLPDWLEDNLSEGIREWWALKPGAPQPKANQQHQDNARGLVLPGYKYLGPGNGLDKGEPVNAADAAALEHDKAYDQQLKAGDNPYLKYNHADAEFQERLKEDTSFGGNLGRAVFQAKKRLLEPLGLVEEAAKTAPGKKRPVEQSPQEPDSSAGIGKSGAQPAKKRLNFGQTGDTESVPDPQPIGEPPAAPSGVGSLTMASCGGAPVADNNEGADGVGSSSGNWHCDSQWLGDRVITTSTRTWALPTYNNHLYKQISNSTSGGSSNDNAYFGYSTPWGYFDFNRFHCHFSPRDWQRLINNNWGFRPKRLNFKLFNIQVKEVTDNNGVKTIANNLTSTVQVFTDSDYQLPYVLGSAHEGCLPPFPADVFMIPQYGYLTLNDGSQAVGRSSFYCLEYFPSQMLRTGNNFQFSYEFENVPFHSSYAHSQSLDRLMNPLIDQYLYYLSKTINGSGQNQQTLKFSVAGPSNMAVQGRNYIPGPSYRQQRVSTTVTQNNNSEFAWPGASSWALNGRNSLMNPGPAMASHKEGEDRFFPLSGSLIFGKQGTGRDNVDADKVMITNEEEIKTTNPVATESYGQVATNHQSAQAQAQTGWVQNQGILPGMVWQDRDVYLQGPIWAKIPHTDGNFHPSPLMGGFGMKHPPPQILIKNTPVPADPPTAFNKDKLNSFITQYSTGQVSVEIEWELQKENSKRWNPEIQYTSNYYKSNNVEFAVNTEGVYSEPRPIGTRYLTRNL

SEQ ID NO: 595 - protein, 736 aa, Artificial Sequence
  source: /note="Description of Artificial Sequence: Synthetic polypeptide"
MAADGYLPDWLEDNLSEGIREWWALKPGAPQPKANQQHQDNARGLVLPGYKYLGPGNGLDKGEPINAADAAALEHDKAYDQQLKAGDNPYLKYNHADAEFQERLKEDTSFGGNLGRAVFQAKKRLLEPLGLVEEAAKTAPGKKRPVEQSPQEPDSSAGIGKSGAQPAKKRLNFGQTGDTESVPDPQPIGEPPAAPSGVGSLTMASGGGAPVADNNEGADGVGSSSGNWHCDSQWLGDRVITTSTRTWALPTYNNHLYKQISNSTSGGSSNDNAYFGYSTPWGYFDFNRFHCHFSPRDWQRLINNNWGFRPKRLNFKLFNIQVKEVTDNNGVKTIANNLTSTVQVFTDSDYQLPYVLGSAHEGCLPPFPADVFMIPQYGYLTLNDGSQAVGRSSFYCLEYFPSQMLRTGNNFQFSYEFENVPFHSSYAHSQSLDRLMNPLIDQYLYYLSKTINGSGQNQQTLKFSVAGPSNMAVQGRNYIPGPSYRQQRVSTTVTQNNNSEFAWPGASSWALNGRNSLMNPGPAMASHKEGEDRFFPLSGSLIFGKQGTGRDNVDADKVMITNEEEIKTTNPVATESYGQVATNHQSAQAQAQTGWVQNQGILPGMVWQDRDVYLQGPIWAKIPHTYGNFHPSPLMGGFGMKHPPPQILIKNTPVPADPPTAFNKDKLNSFITQYSTGQVSVEIEWELQKENSKRWNPEIQYTSNYYKSNNVEFAVNTEGVYSEPRPIGTRYLTRNL

SEQ ID NO: 596 - protein, 736 aa, Artificial Sequence
  source: /note="Description of Artificial Sequence: Synthetic polypeptide"
MAADGYLPDWLEDNLSEGIREWWALKPGAPQPKANQQHQDNARGLVLPGYKYLGPGNGLDKGEPVNAADAAALEHDKAYDQQLKAGDNPYLKYNHADAEFQERLKEDTSFGGNLGRAVFQAKKRLLEPLGLVEEAAKTAPGKKRPVEQSPQEPDSSAGIGKSGAQPAKKRLNFGQTGDTESVPDPQPIGEPPAAPSGVGSLTMASGGGAPVADNNEGADGVGSSSGNWHCDSQWLGDRVITTSTRTWALPTYNNHLYKQISNSTSGGSSNDNAYFGYSTPWGYFDFNRFHCHFSPHDWQRLINNNWGFRPKRLNFKLFNIQVKEVTDNNGVKTIANNLTSTVQVFTDSDYQLPYVLGSAHEGCLPPFPADVFMIPQYGYLTLNDGSQAVGRSSFYCLEYFPSQMLRTGNNFQFSYEFENVPFHSSYAHSQSLDRLMNPLIDQYLYYLSKTINGSGQNQQTLKFNVAGPSNMAVQGRNYIPGPSYRQQRVSTTVTQNNNSEFAWPRASSWALNGRNSLMNPGPAMASHKEGEDRFFPLSGSLIFGKQGTGRDNVDADKVMITNEEEIKTTNPVATESYGQVATNHQSAQAQAQTGWVQNQGILPGMVWQDRDVYLQGPIWAKIPHTDGNFHPSPLMGGFGMKHPPPQILIKNTPVPADPPTAFNKDKLNSFITQYSTGQVSMEIEWELQKENSKRWNPEIQYTSNYYKSNNVEFAVNTEGVYSEPRPIGTRYLTRNL

SEQ ID NO: 597 - protein, 736 aa, Artificial Sequence
  source: /note="Description of Artificial Sequence: Synthetic polypeptide"
MAADGYLPDWLEDNLSEGIREWWALKPGAPQPKANQQHQDNARGLVLPGYKYLGPGNGLDKGEPVNAADAAALEHDKAYDQQLKAGDNPYLKYNHADAEFQERLKEDTSFGGNLGRAVFQAKKRLLEPLGLVEEAAKTAPGKKRPVEQSPQEPDSSAGIGKSGAQPAKKRLNFGQTGDTESVPDPQPIGEPPAAPSGVGSLTMASGGGAPVADNNEGADGVGSSSGNWHCDSQWLGDRVITTSTRTWALPTYNNHLYKQISNSTSGGSSNDNAYFGYSTPWGYFDFNRFHCHFSPRDWQRLINNNWGFRPKRLNFKLFNIQVKEVTDNNGVKTIANNLTSTVQVFTDSDYQLPYVLGSAHEGCLPPFPADVFMIPQYGYLTLNDGSQAVGRSSFYCLEYFPSQMLRTGNNFQFSYEFENVPFHSSYAHSQSLDRLMNPLIDQYLYYLSKTINGSGQNQQTLKFSVAGPSNMAVQGRNYIPGPSYRQQRVSTTVTQNNNSEFAWPRASSWALNGRNSLMNPGPAMASHKEGEDRFFPLSGSLIFGKQGTGRDNVDADKVMITNEEEIKTTNPVATESYGQVATNHQSAQAQAQTGWVQNQGILPGMVWQDRDVYLQGPIWAKIPHTDGNFHPSPLMGGFGMKHPPPQILIKNTPVPADPPTAFNKDKLNSFITQYSTGQVSVEIEWELQKENSKRWNPEIQYTSNYYKSNNVEFAVNTEGVYSEPRPIGTRYLTRNL

SEQ ID NO: 598 - protein, 736 aa, Artificial Sequence
  source: /note="Description of Artificial Sequence: Synthetic polypeptide"
MAADGYLPDWLEDNLSEGIREWWALKPGAPQPKANQQHQDNARGLVLPGYKYLGPGNGLDKGEPVNAADAAALEHDKAYDQQLKAGDNPYLKYNHADAEFQERLKEDTSFGGNLGRAVFQAKKRLLEPLGLVEEAAKTAPGKKRPVEQSPQEPDSSAGIGKSGAQPAKKRLNFGQTGDTESVPDPQPIGEPPAAPSGVGSLTMASGGGAPVADNNEGADGVGSSSGNWHCDSQWLGDRVITTSTRTWALPTYNNHLYKQISNSTSGGSSNDNAYFGYSTPWGYFDFNRFHCHFSPRDWQRLINNNWGFRPKRLNFKLFNIQVKEVTDNNGVKTIANNLTSTVQVFTDSDYQLPYVLGSAHEGCLPPFPADVFMIPQYGYLTLNDGSQAVGRSSFYCLEYFPSQMLRTGNNFQFSYEFENVPFHSSYAHSQSLDRLMNPLIDQYLYYLSKTINGSGQNQQTLKFSVAGPSNMAVQGRNYIPGPSYRQQRVSTTVTQNNNSEFAWPRASSWALNGRNSLMNPGPAMASHKEGEDRFFPLSGSLIFGKQGTGRDNVDADKVMITNEEEIKTTNPVATESYGQVATNHQSAQAQAQTGWVQNQGILPGMVWQDRDVYLQGPIWAKIPHTDGNFHPSPLMGGFGMKHPPPQILIKNTPVPADPPTAFNKDKLNSFITQYSTGQVSVEIEWERQKENSKRWNPEIQYTSNYYKSNNVEFAVNTEGVYSEPRPIGTRYLTRNL

SEQ ID NO: 599 - protein, 736 aa, Artificial Sequence
  source: /note="Description of Artificial Sequence: Synthetic polypeptide"
MAADGYLPDWLEDNLSEGIREWWALKPGAPQPKANQQHQDNARGLVLPGYKYLGPGNGLDKGEPVNAADAAALEHDKAYDQQLKAGDNPYLKYNHADAEFQERLKEDTSFGGNLGRAVFQAKKRLLEPLGLVEEAAKTAPGKKRPVEQSPQEPDSSAGIGKSGAQPAKKRLNFGQTGDTESVPDPQPIGEPPAAPSGVGSLTMASGGGAPVADNNEGADGVGSSSGNWHCDSQWLGDRVITTSTRTWALPTYNNHLYKQISNSTSGGSSNDNAYFGYSTPWGYFDFNRFHCHFSPRDWQRLINNNWGFRPKRLNFKLFNIQVKEVTDNNGVKTIANNLTSTVQVFADSDYQLPYVLGSAHEGCLPPFPADVFMIPQYGYLTLNDGSQAVGRSSFYCLEYFPSQMLRTGNNFQFSYEFENVPFHSSYAHSQSLDRLMNPLIDQYLYYLSKTINGSGQNQQTLKFSVAGPSNMAVQGRNYIPGPSYRQQRVSTTVTQNNNSEFAWPRASSWALNGRNSLMNPGPAMASHKEGEDRFFPLSGSLIFGKQGTGRDNVDADKVMITNEEEIKTTNPVATESYGQVATNHQSAQAQAQTGWVQNQGILPGMVWQDRDVYLQGPIWAKIPHTDGNFHPSPLMGGFGMKHPPPQILIKNTPVPADPPTAFNKDKLNSFITQYSTGQVSVEIEWELQKENSKRWNPEIQYTSNYYKSNNVEFAVNTEGVYSEPRPIGTRYLTRNL

SEQ ID NO: 600 - protein, 736 aa, Artificial Sequence
  source: /note="Description of Artificial Sequence: Synthetic polypeptide"
MAADGYLPDWLEDNLSEGIREWWALKPGAPQPKANQQHQDNARGLVLPGYKYLGPGNGLDKGEPVNAADAAALEHDKAYDQQLKAGDNPYLKYNHADAEFQERLKEDTSFGGNLGRAVFQAKKRLLEPLGLVEEAAKTAPGKKRPVEQSPQEPDSSAGIGKSGAQPAKKRLNFGQTGDTESVPDPQPIGEPPAAPSGVGSLTMASGGGAPVADNNEGADGVGSSSGNWHCDSQWLGDRVITTSTRTWALPTYNNHLYKQISNSTSGGSSNDNAYFGYSTPWGYFDFNRFHCHFSPRDWQRLINNNWGFRPKRLNFKLFNIQVKEVTDNNGVKTIANNLTSTVQVFTDSDYQLPYVLGSAHEGCLPPFPADVFMIPQYGYLTLNDGSQAVGRSSFYCLEYFPSQMLRTGNNFQFSYEFENVPFHSSYAHSQSLDRLMNPLIDQYLYYLSKTINGSGQNQQTLKFSVAGPSNMAVQGRNYIPGPSYRQQRVSTTVTQNNNSEIAWPRASSWALNGRNSLMNPGPAMASHKEGEDRFFPLSGSLIFGKQGTGRDNVDADKVMITNEEEIKTTNPVATESYGQVATNHQSAQAQAQTGWVQNQGILPGMVWQDRDVYLQGPIWAKIPHTDGNFHPSPLMGGFGMKHPPPQILIKNTPVPADPPTAFNKDKLNSFITQYSTGQVSVEIEWELQKENSKRWNPEIQYTSNYCKSNNVEFAVNTEGVYSEPRPIGTRYLTRNL

SEQ ID NO: 601 - protein, 736 aa, Artificial Sequence; identical to SEQ ID NO: 597
  source: /note="Description of Artificial Sequence: Synthetic polypeptide"

SEQ ID NO: 602 - DNA, 2208 bp, Artificial Sequence
  source: /note="Description of Artificial Sequence: Synthetic polynucleotide"
atggctgccgatggttatcttccagattggctcgaggacaaccttagtgaaggaattcgcgagtggtgggctttgaaacctggagcccctcaacccaaggcaaatcaacaacatcaagacaacgctcgaggtcttgtgcttccgggttacaaataccttggacccggcaacggactcgacaagggggagccggtcaacgcagcagacgcggcggccctcgagcacgacaaggcctacgaccagcagctcaaggccggagacaacccgtacctcaagtacaaccacgccgacgccgagttccaggagcggctcaaagaagatacgtcttttgggggcaacctcgggcgagcagtcttccaggccaaaaagaggcttcttgaacctcttggtctggttgaggaagcggctaagacggctcctggaaagaagaggcctgtagagcagtctcctcaggaaccggactcctccgcgggtattggcaaatcgggtgcacagcccgctaaaaagagactcaatttcggtcagactggcgacacagagtcagtcccagaccctcaaccaatcggagaacctcccgcagccccctcaggtgtgggatctcttacaatggcttcaggtggtggcgcaccagtggcagacaataacgaaggtgccgatggagtgggtagttcctcgggaaattggcattgcgattcccaatggctgggggacagagtcatcaccaccagcacccgaacctgggccctgcccacctacaacaatcacctctacaagcaaatctccaacagcacatctggaggatcttcaaatgacaacgcctacttcggctacagcaccccctgggggtattttgacttcaacagattccactgccacttctcaccacgtgactggcagcgactcatcaacaacaactggggattccggcctaagcgactcaacttcaagctcttcaacattcaggtcaaagaggttacggacaacaatggagtcaagaccatcgccaataaccttaccagcacggtccaggtcttcacggactcagactatcagctcccgtacgtgctcgggtcggctcacgagggctgcctcccgccgttcccagcggacgttttcatgattcctcagtacgggtatctgacgcttaatgatggaagccaggccgtgggtcgttcgtccttttactgcctggaatatttcccgtcgcaaatgctaagaacgggtaacaacttccagttcggctacgagtttgagaacgtacctttccatagcagctacgctcacagccaaagcctggaccgactaatgaatccactcatcgaccaatacttgtactatctctcaaagactattaacggttctggacagaatcaacaaacgctaaaattcagtgtggccggacccagcaacatggctgtccagggaagaaactacatacctggacccagctaccgacaacaacgtgtctcaaccactgtgactcaaaacaacaacagcgaatttgcttggcctggagcttcttcttgggctctcaatggacgtaatagcttgatgaatcctggacctgctatggccagccacaaagaaggagaggaccgtttctttcctttgtctggatctttaatttttggcaaacaaggaactggaagagacaacgtggatgcggacaaagtcatgataaccaacgaagaagaaattaaaactactaacccggtagcaacggagtcctatggacaagtggccacaaaccaccagagtgcccaagcacaggcgcagaccggctgggttcaaaaccaaggaatacttccgggtatggtttggcaggacagagatgtgtacctgcaaggacccatttgggccaaaattcctcacacggacggcaactttcacccttctccgctgatgggagggtttggaatgaagcacccgcctcctcagatcctcatcaaaaacacacctgtacctgcggatcctccaacggccttcaacaaggacaagctgaactctttcatcacccagtattctactggccaagtcagcgtggagatcgagtgggagctgcagaaggaaaacagcaagcgctgggacccggagatccagtacacttccaactattacaagtctaataatgttgaatttgctgttaatactgaaggtgtatatagtgaaccccgccccattggcaccagatacctgactcgtaatctg

SEQ ID NO: 603 - DNA, 2208 bp, Artificial Sequence
  source: /note="Description of Artificial Sequence: Synthetic polynucleotide"
atggctgccgatggttatcttccagattggctcgaggacaaccttagtgaaggaattcgcgagtggtgggctttgaaacctggagcccctcaacccaaggcaaatcaacaacatcaagacaacgctcgaggtcttgtgcttccgggttacaaataccttggacccggcaacggactcgacaagggggagccggtcaacgcagcagacgcggcggccctcgagcacgacaaggcctacgaccagcagctcaaggccggagacaacccgtacctcaagtacaaccacgccgacgccgagttccaggagcggctcaaagaagatacgtcttttgggggcaacctcgggcgagcagtcttccaggccaaaaagaggcttcttgaacctcttggtctggttgaggaagcggctaagacggctcctggaaagaagaggcctgtagagcagtctcctcaggaaccggactcctccgcgggtattggcaaatcgggtgcacagcccgctaaaaagagactcaatttcggtcagactggcgacacagagtcagtcccagaccctcaaccaatcggagaacctcccgcagccccctcaggtgtgggatctcttacaatggcttcaggtggtggcgcaccagtggcagacaataacgaaggtgccgatggagtgggtagttcctcgggaaattggcattgcgattcccaatggctgggggacagagtcatcaccaccagcacccgaacctgggccctgcccacctacaacaatcacctctacaagcaaatctccaacagcacatctggaggatcttcaaatgacaacgcctacttcggctacagcaccccctgggggtattttgacttcaacagattccactgccgcttctcaccacgtgactggcagcgactcatcaacaacaactggggattccggcctaagcgactcaacttcaagctcttcaacattcaggtcaaagaggttacggacaacaatggagtcaagaccatcgccaataaccttaccagcacggtccaggtcttcacggactcagactatcagctcccgtacgtgctcgggtcggctcacgagggctgcctcccgccgttcccagcggacgttttcatgattcctcagtacgggtatctgacgcttaatgatggaagccaggccgtgggtcgttcgtccttttactgcctggaatatttcccgtcgcaaatgctaagaacgggtaacaacttccagttcagctacgagtttgagaacgtacctttccatagcagctacgctcacagccaaagcctggaccgactaatgaatccactcatcgaccaatacttgtactatctctcaaagactattaacggttctggacagaatcaacaaacgctaaaattcagtgtggccggacccagcaacatggctgtccagggaagaaactacatacctggacccagctaccgacaacaacgtgtctcaaccactgtgactcaaaacaacaacagcgaatttgcttggcctggagcttcttcttgggctctcaatggacgtaatagcttgatgaatcctggacctgctatggccagccacaaagaaggagaggaccgtttctttcctttgtctggatctttaatttttggcaaacaaggaactggaagagacaacgtggatgcggacaaagtcatgataaccaacgaagaagaaattaaaactactaacccggtagcaacggagtcctatggacaagtggccacaaaccaccagagtgcccaagcacaggcgcagaccggctgggttcaaaaccaaggaatacttccgggtatggtttggcaggacagagatgtgtacctgcaaggacccatttgggccaaaattcctcacacggacggcaactttcacccttctccgctgatgggagggtttggaatgaagcacccgcctcctcagatcctcatcaaaaacgcccctgtacctgcggatcctccaacggccttcaacaaggacaagctgaactctttcatcacccagtattctactggccaagtcagcgtggagatcgagtgggagctgcagaaggaaaacagcaagcgctggaacccggagatccagtacacttccaactattacaagtctaataatgttgaatttgctgttaatactgaaggtgtatatagtgaaccccgccccattggcaccagatacctgactcgtaatctg

SEQ ID NO: 604 - DNA, 2208 bp, Artificial Sequence
  source: /note="Description of Artificial Sequence: Synthetic polynucleotide"
atggctgccgatggttatcttccagattggctcgaggacaaccttagtgaaggaattcgcgagtggtgggctttgaaacctggagcccctcaacccaaggcaaatcaacaacatcaagacaacgctcgaggtcttgtgcttccgggttacaaataccttggacccggcaacggactcgacaagggggagccggtcagcgcagcagacgcggcggccctcgagcacgacaaggcctacgaccagcagctcaaggccggagacaacccgtacctcaagtacaaccacgccgacgccgagttccaggagcggctcaaagaagatacgtcttttgggggcaacctcgggcgagcagtcttccaggccaaaaagaggcttcttgaacctcttggtctggttgaggaagcggctaagacggctcctggaaagaagaggcctgtagagcagtctcctcaggaaccggactcctccgcgggtattggcaaatcgggtgcacagcccgctaaaaagagactcaatttcggtcagactggcgacacagagtcagtcccagaccctcaaccaatcggagaacctcccgcagccccctcaggtgtgggatctcttacaatggcttcaggtggtggcgcaccagtggcagacaataacgaaggtgccgatggagtgggtagttcctcgggaaattggcattgcgattcccaatggctgggggacagagtcatcaccaccagcacccgaacctgggccctgcccacctacaacaatcacctctacaagcaaatctccaacagcacatctggaggatcttcaaatgacaacgcctacttcggctacagcaccccctgggggtattttgacttcaacagattccactgccacttctcaccgcgtgactggcagcgactcatcaacaacaactggggattccggcctaagcgactcaacttcaagctcttcaacattcaggtcaaagaggttacggacaacaatggagtcaagaccatcgccaataaccttaccagcacggtccaggtcttcacggactcagactatcagctcccgtacgtgctcgggtcggctcacgagggctgcctcccgccgttcccagcggacgttttcatgattcctcagtacgggtatctgacgcttaatgatggaagccaggccgtgggtcgttcgtccttttactgcctggaatatttcccgtcgcaaatgctaagaacgggtaacaacttccagttcagctacgagtttgagaacgtacctttccatagcagctacgctcacagccaaagcctggaccgactaatgaatccactcatcgaccaatacttgtactatctctcaaagactattaacggttctggacagaatcaacaaacgctaaaattcagtgtggccggacccagcaacatggctgtccagggaagaaactacatacctggacccagctaccgacaacaacgtgtctcaaccactgtgactcaaaacaacaacagcgaatttgcttggcctggagcttcttcttgggctctcaatggacgtaatagcttgatgaatcctggacctgctatggccagccacaaagaaggagaggaccgtttctttcctttgtctggatctttaatttttggcaaacaaggaactggaagagacaacgtggatgcggacaaagtcatgataaccaacgaagaagaaattaaaactactaacccggtagcaacggagtcctatggacaagtggccacaaaccaccagagtgcccaagcacaggcgcagaccggctgggttcaaaaccaaggaatacttccgggtatggtttggcaggacagagatgtgtacctgcaaggacccatttgggccaaaattcctcacacggacggcaactttcacccttctccgctgatgggagggtttggaatgaagcacccgcctcctcagatcctcatcaaaaacacacctgtacctgcggatcctccaacggccttcaacaaggacaagctgaactctttcatcacccagtattctactggccaagtcagcgtggagatcgagtgggagctgcagaaggaaaacagcaagcgctggaacccggagatccagtacacttccaactattacaagtctaataatgttgaatttgctgttaatactgaaggtgtatatagtgaaccccgccccattggcaccagatacctgactcgtaatctg

SEQ ID NO: 605 - DNA, 2208 bp, Artificial Sequence
  source: /note="Description of Artificial Sequence: Synthetic polynucleotide"
atggctgccgatggttatcttccagattggctcgaggacaaccttagtgaaggaattcgcgagtggtgggctttgaaacctggagcccctcaacccaaggcaaatcaacaacatcaagacaacgctcgaggtcttgtgcttccgggttacaaataccttggacccggcaacggactcgacaagggggagccggtcaacgcagcagacgcggcggccctcgagcacgacaaggcctacgaccagcagctcaaggccggagacaacccgtacctcaagtacaaccacgccgacgccgagttccaggagcggctcaaagaagatacgtcttttgggggcaacctcgggcgagcagtcttccaggccaaaaagaggcttcttgaacctcttggtctggttgaggaagcggctaagacggctcctggaaagaagaggcctgtagagcagtctcctcaggaaccggactcctccgcgggtattggcaaatcgggtgcacagcccgctaaaaagagactcaatttcggtcagactggcgacacagagtcagtcccagaccctcaaccaatcggagaacctcccgcagccccctcaggtgtgggatctcttacaatggcttcaggtggtggcgcaccagtggcagacaataacgaaggtgccgatggagtgggtagttcctcgggaaattggcattgcgattcccaatggctgggggacagagtcatcaccaccagcacccgaacctgggccctgcccacctacaacaatcacctctacaagcaaatctccaacagcacatctggaggatcttcaaatgacaacgcctacttcggctacagcaccccctgggggtattttgacttcaacagattccactgccacttctcaccacgtgactggcagcgactcatcaacaacaactggggattccggcctaagcgactcaacttcaagctcttcaacattcaggtcaaagaggttacggacaacaatggagtcaagaccatcgccaataaccttaccagcacggtccaggtcttcacggactcagactatcagctcccgtacgtgctcgggtcggctcacgagggctgcctcccgccgttcccagcggacgttttcatgattcctcagtacgggtatctgacgcttaatgatggaagccaggccgtgggtcgttcgtccttttactgcctggaatatttcccgtcgcaaatgctaagaacgggtaacaacttccagttcagctacgagtttgagaacgtacctttccatagcagctacgctcacagccaaagcctggaccgactaatgaatccactcatcgaccaatacttgtactatctctcaaagactattaacggttctggacagaatcaacaaacgctaaaattcagtgtggccggacccagcaacacggctgtccagggaagaaactacatacctggacccagctaccgacaacaacgtgtctcaaccactgtgactcaaaacaacaacagcgaatttgcttggcctggagcttcttcttgggctctcaatggacgtaatagcttgatgaatcctggacctgctatggccagccacaaagaaggagaggaccgtttctttcctttgtctggatctttaatttttggcaaacaaggaactggaagagacaacgtggatgcggacaaagtcatgataaccaacgaagaagaaattaaaactactaacccggtagcaacggagtcctatggacaagtggccacaaaccaccagagtgcccaagcacaggcgcagaccggctgggttcaaaaccaaggaatacttccgggtatggtttggcaggacagagatgtgtacctgcaaggacccatttgggccaaaattcctcacacggacggcaactttcacccttctccgctgatgggagggtttggaatgaagcacccgcctcctcagatcctcatcaaaaacacacctgtacctgcggatcctccaacggccttcaacaaggacaagctgaactctttcatcacccagtattctactggccaagtcagcgtggagatcgagtgggagctgcagaaggaaaacagcaagcgctggaacccggagatccagtacacttccaactattacaagtctaataatgttgaatttgctgttaatactgaaggtgtatatagtgaaccccgccccattggcaccagatacctgactcgtaatctg

SEQ ID NO: 606 - DNA, 2208 bp, Artificial Sequence
  source: /note="Description of Artificial Sequence: Synthetic polynucleotide"
atggctgccgatggttatcttccagattggctcgaggacaaccttagtgaaggaattcgcgagtggtgggctttgaaacctggagcccctcaacccaaggcaaatcaacaacatcaagacaacgctcgaggtcttgtgcttccgggttacaaataccttggacccggcaacggactcgacaagggggagccggtcaacgcagcagacgcggcggccctcgagcacgacaaggcctacgaccagcagctcaaggccggagacaacccgtacctcaagtacaaccacgccgacgccgagttccaggagcggctcaaagaagatacgtcttttgggggcaacctcgggcgagcagtcttccaggccaaaaagaggcttcttgaacctcttggtctggttgaggaagcggctaagacggctcctggaaagaagaggcctgtagagcagtctcctcaggaaccggactcctccgcgggtattggcaaatcgggtgcacagcccgctaaaaagagactcaatttcggtcagactggcgacacagagtcagtcccagaccctcaaccaatcggagaacctcccgcagccccctcaggtgtgggatctcttacaatggcttcaggtggtggcgcaccagtggcagacaataacgaaggtgccgatggagtgggtagttcctcgggaaattggcattgcgattcccaatggctgggggacagagtcatcaccaccagcacccgaacctgggccctgcccacctacaacaatcacctctacaagcaaatctccaacagcacatctggaggatcttcaaatgacaacgcctacttcggctacagcaccccctgggggtattttgacttcaacagattccactgccacttctcaccacgtgactggcagcgactcatcaacaacaactggggattccggcctaagcggctcaacttcaagctcttcaacattcaggtcaaagaggttacggacaacaatggagtcaagaccatcgccaataaccttaccagcacggtccaggtcttcacggactcagactatcagctcccgtacgtgctcgggtcggctcacgagggctgcctcccgccgttcccagcggacgttttcatgattcctcagtacgggtatctgacgcttaatgatggaagccaggccgtgggtcgttcgtccttttactgcctggaatatttcccgtcgcaaatgctaagaacgggtagcaacttccagttcagctacgagtttgagaacgtacctttccatagcagctacgctcacagccaaagcctggaccgactaatgaatccactcatcgaccaatacttgtactatctctcaaagactattaacggttctggacagaatcaacaaacgctaaaattcagtgtggccggacccagcaacatggctgtccagggaagaaactacatacctggacccagctaccgacaacaacgtgtctcaaccactgtgactcaaaacaacaacagcgaatttgcttggcctggagcttcttcttgggctctcaatggacgtaatagcttgatgaatcctggacctgctatggccagccacaaagaaggagaggaccgtttctttcctttgtctggatctttaatttttggcaaacaaggaactggaagagacaacgtggatgcggacaaagtcatgataaccaacgaagaagaaattaaaactactaacccggcagcaacggagtcctatggacaagtggccacaaaccaccagagtgcccaagcacaggcgcagaccggctgggttcaaaaccaaggaatacttccgggtatggtttggcaggacagagatgtgtacctgcaaggacccatttgggccaaaattcctcacacggacggcaactttcacccttctccgctgatgggagggtttggaatgaagcacccgcctcctcagatcctcatcaaaaacacacctgtacctgcggatcctccaacggccttcaacaaggacaagctgaactctttcatcacccagtattctactggccaagtcagcgtggagatcgagtgggagctgcagaaggaaaacagcaagcgctggaacccggagatccagcacacttccaactattacaagtctaataatgttgaatttgctgttaatactgaaggtgtatatagtgaaccccgccccattggcaccagatacctgactcgtaatctg

SEQ ID NO: 607 - DNA, 2208 bp, Artificial Sequence
  source: /note="Description of Artificial Sequence: Synthetic polynucleotide"
atggctgccgatggttatcttccagattggctcgaggacaaccttagtgaaggaattcgcgagtggtgggctttgaaacctggagcccctcaacccaaggcaaatcaacaacatcaagacaacgctcgaggtcttgtgcttccgggttacaaataccttggacccggcaacggactcgacaagggggagccggtcaacgcagcagacgcggcggccctcgagcacgacaaggcctacgaccagcagctcaaggccggagacaacccgtacctcaagtacaaccacgccgacgccgagttccaggagcggctcaaagaagatacgtcttttgggggcaacctcgggcgagcagtcttccaggccaaaaagaggcttcttgaacctcttggtctggttgaggaagcggctaagacggctcctggaaagaagaggcctgtagagcagtctcctcaggaaccggactcctccgcgggtattggcaaatcgggtgcacagcccgctaaaaagagactcaatttcggtcagactggcgacacagagtcagtcccagaccctcaaccaatcggagaacctcccgcagccccctcaggtgtgggatctcttacaatggcttcaggtggtggcgcaccagtggcagacaataacgaaggtgccgatggagtgggtagttcctcgggaaattggcattgcgattcccaatggctgggggacagagtcatcaccaccagcacccgaacctgggccctgcccacctacaacaatcacctctacaagcaaatctccaacagcacatctggaggatcttcaaatgacaacgcctacttcggctacagcaccccctgggggtattttgacttcaacagattccactgccacttctcaccacgtgactggcagcgactcatcaacaacaactggggattccggcctaagcgactcaacttcaggctcttcaacattcaggtcaaagaggttacggacaacaatggagtcaagaccatcgccaataaccttaccagcacggtccaggtcttcacggactcagactatcagctcccgtacgtgctcgggtcggctcacgagggctgcctcccgccgttcccagcggacgttttcatgattcctcagtacgggtatctgacgcttaatgatggaagccaggccgtgggtcgttcgtccttttactgcctggaatatttcccgtcgcaaatgctaagaacgggtaacaacttccagttcagctacgagtttgagaacgtacctttccatagcagctacgctcacagccaaagcctggaccgactaatgaatccactcatcgaccaatacttgtactatctctcaaagactattaacggttctggacagaatcaacaaacgctaaaattcagtgtggccggacccagcaacatggctgtccagggaagaaactacatacctggacccagctaccgacaacaacgtgtctcaaccactgtgactcaaaacaacaacagcgaatttgcttggcctggagcttcttcttgggctctcaatggacgtaatagcttgatgaatcctggacctgctatggccagccacaaagaaggagaggaccgtttctttcctttgtctggatctttaatttttggcaaacaaggaactggaagagacaacgtggatgcggacaaagtcatgataaccaacgaagaagaaattaaaactactaacccggtagcaacggagtcctatggacaagtggccacaaaccaccagagtgcccaagcacaggcgcagaccggctgggttcaaagccaaggaatacttccgggtatggtttggcaggacagagatgtgtacctgcaaggacccatttgggccaaaattcctcacacggacggcaactttcacccttctccgctgatgggagggtttggaatgaagcacccgcctccccagatcctcatcaaaaacacacctgtacctgcggatcctccaacggccttcaacaaggacaagctgaactctttcatcacccagtattctactggccaagtcagcgtggagatcgagtgggagctgcagaaggaaaacagcaagcgctggaacccggagatccagtacacttccaactattacaagtctaataatgttgaatttgctgttaatactgaaggtgtatatagtgaaccccgccccattggcaccagatacctgactcgtaatctg

SEQ ID NO: 608 - DNA, 2205 bp, Artificial Sequence
  source: /note="Description of Artificial Sequence: Synthetic polynucleotide"
atggctgccgatggttatcttccagattggctcgaggacaaccttagtgaaggaattcgcgagtggtgggctttgaaacctggagcccctcaacccaaggcaaatcaacaacatcaagacaacgcccgaggtcttgtgcttccgggttacaaataccttggacccggcaacggactcgacaagggggagccggtcaacgcagcagacgcggcggccctcgagcacgacaaggcctacgaccagcagctcaaggccggagacaacccgtacctcaagtacaaccacgccgacgccgagttccaggagcggctcaaagaagatacgtcttttgggggcaacctcgggcgagcagtcttccaggccaaaaagaggcttcttgaacctcttggtctggttgaggaagcggctaagacggctcctggaaagaagaggcctgtagagcagtctcctcaggaaccggactcctccgcgggtattggcaaatcgggtgcacagcccgctaaaaagagactcaatttcggtcagactggcgacacagagtcagtcccagaccctcaaccaatcggagaacctcccgcagccccctcaggtgtgggatctcttacaatggcttcaggtggtggcgcaccagtggcagacaataacgaaggtgccgatggagtgggtagttcctcgggaaattggcattgcgattcccaatggctgggggacagagtcatcaccaccagcacccgaacctgggccctgcccacctacaacaatcacctctacaagcaaatctccaacagcacatctggaggatcttcaaatgacaacgcctacttcggctacagcaccccctggaggtattttgacttcaacagattccactgccacttctcaccacgtgactggcagcgactcatcaacaactggggattccggcctaagcgactcaacttcaagctcttcaacattcaggtcaaagaggttacggacaacaatggagtcaagaccatcgccaataaccttaccagcacggtccaggccttcacggactcagactatcagctcccgtacgtgctcgggtcggctcacgagggctgcctcccgccgttcccagcggacgttttcatgattcctcagtacgggtatctgacgcttaatgatggaagccaggccgtgggtcgttcgtccttttactgcctggaatatttcccgtcgcaaatgctaagaacgggtaacaacttccagttcagctacgagtttgagaacgtacctttccatagcagctacgctcacagccaaagcctggaccgactaatgaatccactcatcgaccaatacttgtactatctctcaaagactattaacggttctggacagaatcaacaaacgctaaaattcagtgtggccggacccagcaacatggctgtccagggaagaaactacatacctggacccagctaccgacaacaacgtgtctcaaccactgtgactcaaaacaacaacagcgaatttgcttggcctggagcttcttcttgggctctcaatggacgtaatagcttgatgaatcctggacctgctatggccagccacaaagaaggagaggaccgtttctttcctttgtctggatctttaatttttggcaaacaaggaactggaagagacaacgtggatgcggacaaagtcatgataaccaacgaagaagaaattaaaactactaacccggtagcaacggagtcctatggacaagtggccacaaaccaccagagtgcccaagcacaggcgcagaccggctgggttcaaaaccaaggaatacttccgggtatggtttggcaggacagagatgtgtacctgcaaggacccatttgggccaaaattcctcacacggacggcaactttcacccttctccgctgatgggagggtttggaatgaagcacccgcctcctcagatcctcatcaaaaacacacctgtacctgcggatcctccaacggccttcaacaaggacgagctgaactctttcatcacccagtattctactggccaagtcagcgtggagatcgagtgggagctgcagaaggaaaacagcaagcgctggaacccggagatccagtacacttccaactattacaagtctaataatgttgaatttgctgttaatactgaaggtgtatatagtgaaccccgccccattggcaccagatacctgactcgtaatctg

SEQ ID NO: 609 - DNA, 2205 bp, Artificial Sequence
  source: /note="Description of Artificial Sequence: Synthetic polynucleotide"
atggctgccgatggttatcttccagattggctcgaggacaaccttagtgaaggaattcgcgagtggtgggctttgaaacctggagcccctcaacccaaggcaaatcaacaacatcaagacaacgctcgaggtcttgtgcttccgggttacaaataccttggacccggcaacggactcgacaagggggagccggtcaacgcagcagacgcggcggccctcgagcacgacaaggcctacgaccagcagctcaaggccggagacaacccgtacctcaagtacaaccacgccgacgccgagttccaggagcggctcaaagaagatacgtcttttgggggcaacctcgggcgagcagtcttccaggacaaaaagaggcttcttgaacctcttggtctggttgaggaagcggctaagacggctcctggaaagaagaggcctgtagagcagtctcctcaggaaccggactcctccgcgggtattggcaaatcgggtgcacagcccgctaaaaagagactcaatttcggtcagactggcgacacagagtcagtcccagaccctcaaccaatcggagaacctcccgcagccccctcaggtgtgggatctcttacaatggcttcaggtggtggcgcaccagtggcagacaataacgaaggtgccgatggagtgggtagttcctcgggaaattggcattgcgattcccaatggctgggggacagagtcatcaccaccagcacccgaacctgggccctgcccacctacaacaatcacctctacaagcaaatctccaacagcacatctggaggatcttcaaatgacaacgcctacttcggctacagcaccccctgggggtattttgacttcaacagattccactgccacttctcaccacgtgactggcagcgactcatcaacaactggggattccggcctaagcgactcaacttcaagctcttcaacattcaggtcaaagaggttacggacaacaatggagtcaagaccatcgccaataaccttaccagcacggtccaggtcttcacggactcagactatcagctcccgtacgtgctcgggtcggctcacgagggctgcctcccgccgttcccagcggacgttttcatgattcctcagtacgggtatctgacgcttaatgatggaagccaggccgtgggtcgttcgtccttttactgcctggaatatttcccgtcgcaaatgctaagaacgggtaacaacttccaattcagctacgagtttgagaacgtacctttccatagcagctacgctcacagccaaagcctggaccgactaatgaatccactcatcgaccaatacttgtactatctctcaaagactattaacggttctggacagaatcaacaaacgctaaaattcagtgtggccggacccagcaacatggctgtccagggaagaaactacatacctggacccagctaccgacaacaacgtgtctcaaccactgtgactcaaaacaacaacagcgaatttgcttggcctggagcttcttcttgggctctcaatggacgtaatagcttgatgaatcctggacctgctatggccagccacaaagaaggagaggaccgtttctttcctttgtctggatctttaatttttggcaaacaaggaactggaagagacaacgtggatgcggacaaagtcatgataaccaacgaagaagaaattaaaactactaacccggtagcaacggagtcctatggacaagtggccacaaaccaccagagtgcccaagcacaggcgcagaccggctgggttcaaaaccaaggaatacttccgggtatggtttggcaggacagagatgtgtacctgcaaggacccatttgggccaaaattcctcacacggacggcaactttcacccttctccgctgatgggagggtttggaatgaagcacccgcctcctcagatcctcatcaaaaacacacctgtacctgcggatcctccaacggccttcaacaaggacaagctgaactctttcatcacccagtattctactggccaagtcagcgtggagatcgagtgggagctgcagaaggaaaacagcaagcgctggaacccggagatccagtacacttccaactattacaagtctaataatgttgaatttgctgttaatactgaaggtgtatatagtgaaccccgccccattggcaccagatacctgactcgtaatctg

SEQ ID NO: 610 - DNA, 2208 bp, Artificial Sequence
  source: /note="Description of Artificial Sequence: Synthetic polynucleotide"
atggctgccgatggttatcttccagattggctcgaggacaaccttagtgaaggaattcgcgagtggtgggctttgaaacctggagcccctcaacccaaggcaaatcaacaacatcaagacaacgctcgaggtcttgtgcttccgggttacaaataccttggacccggcaacggactcgacaagggggagccggtcaacgcagcagacgcggcggccctcgagcacgacaaggcctacgaccagcagctcaaggccggagacaacccgtacctcaagtacaaccacgccgacgccgagttccaggagcggctcaaagaagatacgtcttttgggggcaacctcgggcgagcagtcttccaggccaaaaagaggcttcttgaacctcttggtctggttgaggaagcggctaagacggctcctggaaagaagaggcctgtagagcagtctcctcaggaaccggactcctccgcgggtattggcaaatcgggtgcacagcccgctaaaaagagactcaatttcggtcagactggcgacacagagtcagtcccagaccctcaaccaatcggagaacctcccgcagccccctcaggtgtgggatctcttacaatggcttcaggtggtggcgcaccagtggcagacaataacgaaggtgccgatggagtgggtagttcctcgggaaattggcattgcgattcccaatggctgggggacagagccatcaccaccagcacccgaacctgggccctgcccacctacaacaatcacctctacaagcaaatctccaacagcacatctggaggatcttcaaatgacaacgcctacttcggctacagcaccccctgggggtattttgacttcaacagattccactgccacttctcaccacgtgactggcagcggctcatcaacaacaactggggattccggcctaagcgactcaacttcaagctcttcaacattcaggtcaaagaggttacggacaacaatggagtcaagaccatcgccaataaccttaccagcacggtccaggtcttcacggactcagactatcagctcccgtacgtgctcgggtcggctcacgagggctgcctcccgccgttcccagcggacgttttcatgattcctcagtacgggtatctgacgcttaatgatggaagccaggccgtgggtcgttcgtccttttactgcctggaatatttcccgtcgcaaatgctaagaacgggtaacaacttccagttcagctacgagtttgagaacgtacctttccatagcagctacgctcacagccaaagcctggaccgactaatgaatccactcatcgaccaatacttgtactatctctcaaagactattaacggttctggacagaatcaacaaacgctaaaattcagtgtggccggacccagcaacatggctgtccagggaagaaactacatacctggacccagctaccgacaacaacgtgtctcaaccactgtgactcaaaacaacaacagcgaatttgcttggcctggagcttcttcttgggctctcaatggacgtaatagcttgatgaatcctggacctgctatggccagccacaaagaaggagaggaccgtttctttcctttgtctggatctttaatttttggcaaacaaggaactggaagagacaacgtggatgcggacaaagtcatgacaaccaacgaagaagaaattaaaactactaacccggtagcaacggagtcctatggacaagtggccacaaaccaccagagtgcccaagcacaggcgcagaccggctgggttcaaaaccaaggaatacttccgggtatggtttggcaggacagagatgtgtacctgcaaggacccatttgggccaaaattcctcacacggacggcaactttcacccttctccgctgatgggagggtttggaatgaagcacccgcctcctcagatcctcatcaaaaacacacctgtacctgcggatcctccaacggccttcaacaaggacaagctgaactctttcatcacccagtattctactggccaagtcagcgtggagatcgagtgggagctgcagaaggaaaacagcaagcgctggaacccggagatccagtacacttccaactattacaagtctaataatgttgaatttgctgttaatactgaaggtgtatatagtgaaccccgccccattggcaccagatacctgactcgtaatctg

SEQ ID NO: 611 - DNA, 2208 bp, Artificial Sequence
  source: /note="Description of Artificial Sequence: Synthetic polynucleotide"
atggctgccgatggttatcttccagattggctcgaggacaaccttagtgaaggaattcgcgagtggtgggctttgaaacctggagcccctcaacccaaggcaaatcaacaacatcaagacaacgctcgaggtcttgtgcttccgggttacaaataccttggacccggcaacggactcgacaagggggagccggtcaatgcagcagacgcggcggccctcgagcacgacaaggcctacgaccagcagctcaaggccggagacaacccgtacctcaagtacaaccacgccgacgccgagttccaggagcggctcaaagaagatacgtcttttgggggcaacctcgggcgagcagtcttccagaccaaaaagaggcttcttgaacctcttggtctggttgaggaagcggctaagacggctcctggaaagaagaggcctgtagagcagtctcctcaggaaccgggctcctccgcgggtattggcaaatcgggtgcacagcccgctaaaaagagactcaatttcggtcagactggcgacacagagtcagtcccagaccctcaaccaatcggagaacctcccgcagccccctcaggtgtgggatctcttacaatggcttcaggtggtggcgcaccagtggcagacaataacgaaggtgccgatggagtgggtagttcctcgggaaattggcattgcgattcccaatggctgggggacagagtcatcaccaccagcacccgaacctgggccctgcccacctacaacaatcacctctacaagcaaatctccaacagcacatctggaggatcttcaaatgacaacgcctacttcggctacagcaccccctgggggtattttgacttcaacagattccactgccacttctcaccacgtgactggcagcgactcatcaacaacaactggggattccggcctaagcgactcaacttcaagctcttcaacattcaggtcaaagaggttacggacaacaatggagtcaagaccatcgccaataaccttaccagcacggtccaggtcttcacggactcagactatcagctcccgtacgtgctcgggtcggctcacgagggctgcctcccgccgttcccagcggacgttttcatgattcctcagtacgggtatctgacgcttaatgatggaagccaggccgtgggtcgttcgtccttttactgcctggaatatttcccgtcgcaaatgctaagaacgggtaacaacttccagttcagctacgagtttgagaacgtacctttccatagcagctacgctcacagccaaagcctggaccgactaatgaatccactcatcgaccaatacttgcactatctctcaaagactattaacggttctggacagaatcaacaaacgctaaaattcagtgtggccggacccagcaacatggctgtccagggaagaaactacatacctggacccagctaccgacaacaacgtgtctcaaccactgtgactcaaaacaacaacagcgaatttgcttggcctggagcttcttcttgggctctcaatggacgtaatagcttgatgaatcctggacctgctatggccagccacaaagaaggagaggaccgtttctttcctttgtctggatctttaatttttggcaaacaaggaactggaagagacaacgtggatgcggacaaagtcatgataaccaacgaagaagaaattaaaactactaacccggtagcaacggagtcctatggacaagtggccacaaaccaccagagtgcccaagcacaggcgcagaccggctgggttcaaaaccaaggaatacttccgggtatggtttggcaggacagagatgtgtacctgcaaggacccatttgggccaaaattcctcacacggacggcaactttcacccttctccgctgatgggagggtttggaatgaagcacccgcctcctcagatcctcatcaaaaacacacctgtacctgcggatcctccaacggccttcaacaaggacaagctgaactctttcatcacccagtattctactggccaagtcagcgtggagatcgagtgggagctgcagaaggaaaacagcaagcgctggaacccggagatccagtacacttccaactattacaagtctaataatgttgaatttgctgttaatactgaaggtgtatatagtgaaccccgccccattggcaccagatacctgactcgtaatctg

SEQ ID NO: 612 - DNA, 2208 bp, Artificial Sequence
  source: /note="Description of Artificial Sequence: Synthetic polynucleotide"
atggctgccgatggttattttccagattggctcgaggacaaccttagtgaaggaattcgcgagtggtgggctttgaaacctggagcccctcaacccaaggcaaatcaacaacatcaagacaacgctcgaggtcttgtgcttccgggttacaaataccttggacccggcaacggactcgacaagggggagccggtcaacgcagcagacgcggcggccctcgagcacgacaaggcctacgaccagcagctcaaggccggagacaacccgtacctcaagtacaaccacgccgacgccgagttccaggagcggctcaaagaagatacgtcttttgggggcaacctcgggcgagcagtcttccaggccaaaaagaggcttcttgaacctcttggtctggttgaggaagcggctaagacggctcctggaaagaagaggcctgtagagcagtctcctcaggaaccggactcctccgcgggtattggcaaatcgggtgcacagcccgctaaaaagagactcaatttcggtcagactggcgacacagagtcagtcccagaccctcaaccaatcggagaatctcccgcagccccctcaggtgtgggatctcttacaatggcttcaggtggtggcgcaccagtggcagacaataacgaaggtgccgatggagtgggtagttcctcgggaaattggcattgcgattcccaatggctgggggacagagtcatcaccaccagcacccgaacctgggccctgcccacctacaacaatcacctctacaagcaaatctccaacagcacatctggaggatcttcaaatgacaacgcctacttcggctacagcaccccctgggggtattttgacttcaacagattccactgccacttctcaccacgtgactggcagcgactcatcaacaacaactggggattccggcctaagcgactcaacttcaagctcttcaacattcaggtcaaagaggttacggacaacaatggagtcaagaccatcgccaataaccttaccagcacggtccaggtcttcacggactcagactatcagctcccgtacgtgctcgggtcggctcacgagggctgcctcccgccgttcccagcggacgttttcatgattcctcagtacgggtatctgacgcttaatgatggaagccaggccgtgggtcgttcgtccttttactgcctggaatatctcccgtcgcaaatgctaagaacgggtaacaacttccagttcagctacgagtttgagaacgtacctttccatagcagctacgctcacagccaaagcctggaccgactaatgaatccactcatcgaccaatacttgcactatctctcaaagactattaacggttctggacagaatcaacaaacgctaaaattcagtgtggccggacccagcaacatggctgtccagggaagaaactacatacctggacccagctaccgacaacaacgtgtctcaaccactgtgactcaaaacaacaacagcgaatttgcttggcctggagcttcttcttgggctctcaatggacgtaatagcttgatgaatcctggacctgctgtggccagccacaaagaaggagaggaccgtttctttcctttgtctggatctttaatttttggcaaacaaggaactggaagagacaacgtggatgcggacaaagtcatgataaccaacgaagaagaaattaaaactactaacccggtagcaacggagtcctatggacaagtggccacaaaccaccagagtgcccaagcacaggcgcagaccggctgggttcaaaaccaaggaatacttccgggtatggtttggcaggacagagatgtgtacctgcaaggacccatttgggccaaaattcctcacacggacggcaactttcacccttctccgctgatgggagggtttggaatgaagcacccgcctcctcagatcctcatcaaaaacacacctgtacctgcggatcctccaacggccttcaacaaggacaagctgaactctttcatcacccagtattctactggccaagtcagcgtggagatcgagtgggagctgcagaaggaaaacagcaagcgctggaacccggagatccagtacacttccaactattacaagtctaataatgttgaatttgctgttaatactgaaggtgtatatagtgaaccccgccccattggcaccagatacctgactcgtaatctg

SEQ ID NO: 613 - DNA, 2208 bp, Artificial Sequence
  source: /note="Description of Artificial Sequence: Synthetic polynucleotide"
atggctgccgatggttatcttccagattggctcgaggacaaccttagtgaaggaattcgcgagtggtgggctttgaaacctggagcccctcaacccaaggcaaatcaacaacatcaagacaacgctcgaggtcttgtgcttccgggttacaaataccttggacccggcaacggactcgacaagggggagccggtcaacgcagcagacgcggcggccctcgagcacgacaaggcctacgaccagcagctcaaggccggagacaacccgtacctcaagtacaaccacgccgacgccgagttccaggagcggctcaaagaagatacgtcttttgggggcaacctcgggcgagcagtcttccaggccaaaaagaggcttcttgaacctcttggtccggttgaggaagcggctaagacggctcctggaaagaagaggcctgtagagcagtctcctcaggaaccggactcctccgcgggtattggcaaatcgggtgcacagcccgctaaaaagagactcaatttcggtcagactggcgacacagagtcagtcccagaccctcaaccaatcggagaacctcccgcagccccctcaggtgtgggatctcttacaatggcttcaggtggtggcgcaccagtggcagacaataacgaaggtgccgatggagtgggtagttcctcgggaaattggcattgcgattcccaatggctgggggacagagtcatcaccaccagcacccgaacctgggccctgcccacctacaacaatcacctctacaagcaaatctccaacagcacatctggaggatcttcaaatgacaacgcctacttcggctacagcaccccctgggggtattttgacttcaacagattccactgccacttctcaccacgtgactggcagcgactcatcaacaacaactggggattccggcctaagcgactcaacttcaagctcttcaacattcaggtcaaagaggttacggacaacaatggagtcaagaccatcgccaataaccttaccagcacggtccaggtcttcacggactcagactatcagctcccgtacgtgctcgggtcggctcacgagggctgcctcccgccgttcccagcggacgttttcatgattcctcagtacgggtatctgacgcttaatgatggaagccaggccgtgggtcgttcgtccttttactgcctggaatatttcccgtcgcaaatgctaagaacgggtaacaacttccagttcagctacgagtttgagaacgtacctttccatagcagctacgctcacagccaaagcctggaccgactaatgaatccactcatcgaccaatacttgtactatctctcaaagactattaacggttctggacagaatcaacaaacgctaaaattcagtgtggccggacccagcaacatggctgtccagggaagaaactacatacctggacccagctaccgacaacaacgtgtctcaaccactgtgactcaaaacaacaacagcgaatttgcttggcctggagcttcttcttgggctctcaatggacgtaatagcttgatgaatcctggacctgctatggccagccacaaagaaggagaggaccgtttctttcctttgtctggatctttaatttttggcaaacaaggaactggaagagacaacgtggatgcggacaaagtcatgataaccaacgaagaagaaattaaaactactaacccggtagcaacggagtcctatggacaagcggccacaaaccaccagagtgcccaagcacaggcgcagaccggctgggttcaaaaccaaggaatacttccgggtatggtttggcaggacagagatgtgtacctgcaaggacccatttgggccaaaattcctcacacggacggcaactttcacccttctccgctgatgggagggtttggaatgaagcacccgcctcctcagatcctcatcaaaaacacacctgtacctgcggatcctccaacggccttcaacaaggacaagctgaactctttcatcacccagtattctactggccaagtcagcgtggagatcgagtgggagctgcagaaggaaaacagcaagcgctggaacccggagatccagtacacttccaactattacaagtctaataatgttgaatttgctgttaatactgaaggtgtatatagtgaaccccgccccattggcaccagatacctgactcgtaatctg

SEQ ID NO: 614 - DNA, 2208 bp, Artificial Sequence
  source: /note="Description of Artificial Sequence: Synthetic polynucleotide"
atggctgccgatggttatcttccagattggctcgaggacaaccttagtgaaggaattcgcgagtggtgggctttgaaacctggagcccctcaacccaaggcaaatcaacaacatcaagacaacgctcggggtcttgtgcttccgggttacaaataccttggacccggcaacggactcgacaagggggagccggtcaacgcagcagacgcggcggccctcgagcacgacaaggcctacgaccagcagctcaaggccggagacaacccgtacctcaagtacaaccacgccgacgccgagttccaggagcggctcaaagaagatacgtcttttgggggcaacctcgggcgagcagtcttccaggccaaaaagaggcttcttgaacctcttggtccggttgaggaagcggctaagacggctcctggaaagaagaggcctgtagagcagtctcctcaggaaccggactcctccgcgggtattggcaaatcgggtgcacagcccgctaaaaagagactcaatttcggtcagactggcgacacagagtcagtcccagaccctcaaccaatcggagaacctcccgcagccccctcaggtgtgggatctcttacaatggcttcaggtggtggcgcaccagtggcagacaataacgaaggtgccgatggagtgggtagttcctcgggaaattggcattgcgattcccaatggctgggggacagagtcatcaccaccagcacccgaacctgggccctgcccacctacaacaatcacctctacaagcaaatctccaacagcacatctggaggatcttcaaatgacaacgcctacttcggctacagcaccccctgggggtattttgacttcaacagattccactgccacttctcaccacgtgactggcggcgactcatcaacaacaactggggattccggcctaagcgactcaacttcaagctcttcaacattcaggtcaaagaggttacggacaacaatggagtcaagaccatcgccaataaccttaccagcacggtccaggtcttcacggactcagactatcagctcccgtacgtgctcgggtcggctcacgagggctgcctcccgccgttcccagcggacgttttcatgattcctcagtacgggtatctgacgcttaatgatggaagccaggccgtgggtcgttcgtccttttactgcctggaatatttcccgtcgcaaatgctaagaacgggtaacaacttccagttcagctacgagtttgagaacgtacctttccatagcagctacgctcacagccaaagcctggaccgactaatgaatccactcatcgaccaatacttgtactatctctcaaagactattaacggttctggacagaatcaacaaacgctaaaattcagtgtggccggacccagcaacatggctgtccagggaagaaactacatacctggacccagctaccgacaacaacgtgtctcaaccactgtgactcaaaacaacaacagcgaatttgcttggcctggagcttcttcttgggctctcaatggacgtaatagcttgatgaatcctggacctgctatggccagccacaaagaaggagaggaccgtttctttcctttgtctggatctttaatttttggcaaacaaggaactggaagagacaacgtggatgcggacaaagtcatgataaccaacgaagaagaaattaaaactactaacccggtagcaacggagtcctatggacaagtggccacaaaccaccagagtgcccaagcacaggcgcagaccggctgggttcaaaaccaaggaatacttccgggtatggtttggcaggacagagatgtgtacctgcaaggacccatttgggccaaaattcctcacacggacggcaactttcacccttctccgctgatgggagggtttggaatgaagcacccgcctcctcagatcctcatcaaaaacacacctgtacctgcggatcctccaacggccttcaacaaggacaagctgaactctttcatcacccagtattctactggccaagtcagcgtggagatcgagtgggagctgcagaaggaaaacagcaagcgctggaacccggagatccagtacacttccaactattacaagtctaataatgttgaatttgctgttaatactgaaggtgtatatagtgaaccccgccccattggcaccagatacctgactcgtaatctg

SEQ ID NO: 615 - DNA, 2208 bp, Artificial Sequence
  source: /note="Description of Artificial Sequence: Synthetic polynucleotide"
atggctgccgatggttatcttccagattggctcgaggacaaccttagtgaaggaattcgcgagtggtgggctttgaaacctggagcccctcaacccaaggcaaatcaacaacatcaagacaacgctcgaggtcttgtgcttccgggttacaaataccttggacccggcaacggactcgacaagggggagccggtcaacgcagcagacgcggcggccctcgagcacgacaaggcctacgaccagcagctcaaggccggagacaacctgtacctcaagtacaaccacgccgacgccgagttccaggagcggctcaaagaagatacgtcttttgggggcaacctcgggcgagcagtcttccaggccaaaaagaggcttcttgaacctcttggtctggttgaggaagcggctaagacggctcctggaaagaagaggcctgtagagcagtctcctcaggaaccggactcctccgcgggtattggcaaatcgggtgcacagcccgctaaaaagagactcaatttcggtcagactggcgacacagagtcagtcccagaccctcaaccaatcggagaacctcccgcagccccctcaggtgtgggatctcttacaatggcttcaggtggtggcgcaccagtggcagacaataacgaaggtgccgatggagtgggtagttcctcgggaaattggcattgcgattcccaatggctgggggacagagtcatcaccaccagcacccgaacctgggccctgcccacctacaacaatcacctctacaagcaaatctccaacagcacatctggaggatcttcaaatgacaacgcctacttcggctacagcaccccctgggggtattttgacttcaacagattccactgccacttctcaccacgtgactggcagcgactcatcaacaacaactggggattccggcctaagcgactcaacttcaagctcttcaacattcaggtcaaagaggttacggacaacaatggagtcaagaccatcgccaataaccttaccagcacggtccaggtcttcacggactcagactatcagctcccgtacgtgctcgggtcggctcacgagggctgcctcccgccgttcccagcggacgttttcatgattcctcagtacgggtatctgacgcttaatgatggaagccaggccgtgggtcgttcgtccttttactgcctggaatatttcccgtcgcaaatgctaagaacgggtaacaacttccagttcagctacgagtttgagaacgtacctttccatagcagctacgctcacagccaaagcctggaccgactaatgaatccactcatcgaccaatacttgcactatctctcaaagactattaacggttctggacagaatcaacaaacgctaaaattcagtgtggccggacccagcaacatggctgtccagggaagaaactacatacctggacccagctaccgacaacaacgtgtctcaaccactgtgactcaaaacaacaacagcgaatttgcttggcctggagcttcttcttgggctctcaatggacgtaatagcttgatgaatcctggacctgctatggccagccacaaagaaggagaggaccgtttctttcctttgtctggatctttaatttttggcaaacaaggaactggaagagacaacgtggatgcggacaaagtcatgataaccaacgaagaagaaattaaaactactaacccggtagcaacggagtcctatggacaagtggccacaaaccaccagagtgcccaagcacaggcgcagaccggctgggttcaaaaccaaggaatacttccgggtatggtttggcaggacagagatgtgtacctgcaaggacccatttgggccaaaattcctcacacggacggcaactttcacccttctccgctgatgggagggtttggaatgaagcacccgcctcctcagatcctcatcaaaaacacacctgtacctgcggatcctccaacggccttcaacaaggacaagctgaactctttcatcacccagtattctactggccaagtcagcgtggagatcgagtgggagctgcagaaggaaaacagcaagcgctggaacccggagatccagtacacttccaactattacaagtctaataatgttgaatttgctgttaatactgaaggtgtatatagtgaaccccgccccattggcaccagatacctgactcgtaatctg

SEQ ID NO: 616 - DNA, 2208 bp, Artificial Sequence
  source: /note="Description of Artificial Sequence: Synthetic polynucleotide"
atggctgccgatggttatcttccagattggctcgaggacaaccttagtgaaggaattcgcgagtggtgggctttgaaacctggagcccctcaacccaaggcaaatcaacaacatcaagacaacgctcgaggtcttgtgcttccgggttacaaataccttggacccggcaacggactcgacaagggggagccggtcaacgcagcagacgcggcggccctcgagcacgacaaggcctacgaccagcagctcaaggccggagacaacccgtacctcaagtacaaccacgccgacgccgagttccaggagcggctcaaagaagatacgtcttttgggggcaacctcgggcgagcagtcttccaggccaaaaagaggcttcttgaacctcttggtctggttgaggaagcggctaagacggctcctggaaagaagaggcctgtagagcagtctcctcaagaaccggactcctccgcgggtattggcaaatcgggtgcacagcccgctaaaaagagactcaatttcggtcagactggcgacacagagtcagtcccagaccctcaaccaatcggagaacctcccgcagccccctcaggtgtgggatctcttacaatggcttcaggtggtggcgcaccagtggcagacaataacgaaggtgccgatggagtgggtagttcctcgggaaattggcattgcgattcccaatggctgggggacagagtcatcaccaccagcacccgaacctgggccctgcccacctacaacaatcacctctacaagcaaatctccaacagcacatctggaggatcttcaaatgacaacgcctacttcggctacagcaccccctgggggtattttgacttcaacagattccactgccacttctcaccacgtgactggcagcgactcatcaacaacaactggggattccggcctaagcgactcaacttcaagctcttcaacattcaggtcaaagaggttacggacaacaatggagtcaagaccatcgccaataaccttaccagcacggtccaggtcttcacggactcagactatcagctcccgtacgtgctcgggtcggctcacgagggctgcctcccgccgttcccagcggacgttttcatgattcctcagtacgggtatctgacgcttaatgatggaagccaggccgtgggtcgttcgtccttttactgcctggaatatttcccgtcgcaaatgctaagaacgggtaacaacttccagttcagctacgagtttgagaacgtacctttccatagcagctacgctcacagccaaagcctggaccgactaatgaatccactcatcgaccaatacttgcactatctctcaaagactattaacggttctggacagaatcaacaaacgctaaaattcagtgtggccggacccagcaacatggctgtccagggaagaaactacatacctggacccagctaccgacaacaacgtgtctcaaccactgtgactcaaaacaacaacagcgaatttgcttggcctggagcttcttcttgggctctcaatggacgtaatagcttgatgaatcctggacctgctatggccagccacaaagaaggagaggaccgtttctttcctttgtctggatctttaatttttggcaaacaaggaactggaagagacaacgtggatgcggacaaagtcatgataaccaacgaagaagaaattaaaactactaacccggtagcaacggagtcctatggacaagtggccacaaaccaccagagtgcccaagcacaggcgcagaccggctgggttcaaaaccaaggaatacttccgggtatggtttggcaggacagagatgtgtacctgcaaggacccatttgggccaaaattcctcacacggacggcaactttcacccttctccgctgatgggagggtttggaatgaagcacccgcctcctcagatcctcatcaaaaacacacctgtacctgcggatcctccaacggccttcaacaaggacaagctgaactctttcatcacccagtattctactggccaagtcagcgtggagatcgagtgggagctgcagaaggaaaacagcaagcgctggaacccggagatccagtacacttccaactattacaagtctaataatgttgaatttgctgttaatactgaaggtgtatatagtgaaccccgccccattggcaccagatacctgactcgtaatctg

SEQ ID NO: 617 - DNA, 2208 bp, Artificial Sequence
  source: /note="Description of Artificial Sequence: Synthetic polynucleotide"
  modified_base (1325)..(1325): a, c, t, or g
atggctgccgatggttatcttccagattggctcgaggacaaccttagtgaaggaattcgcgagtggtgggctttgaaacctggagcccctcaacccaaggcaaatcaacaacatcaagacaacgctcgaggtcttgtgcttccgggttacaaataccttggacccggcaacggactcgacaagggggagccggtcaacgcagcagacgcggcggccctcgagcacgacaaggcctacgaccagcagctcaaggccggagacaacccgtacctcaagtacaaccacgccgacgccgagttccaggagcggctcaaagaagatacgtcttttgggggcaacctcgggcgagcagtcttccaggccaaaaagaggcttcttgaacctcttggtctggttgaggaagcggctaagacggctcctggaaagaagaggcctgtagagcagtctcctcaggaaccggactcctccgcgggtattggcaaatcgggtgcacagcccgctaaaaagagactcaatttcggtcagactggcgacacagagtcagtcccagaccctcaaccaatcggagaacctcccgcagccccctcaggtgtgggatctcttacaatggcttcaggtggtggcgcaccagtggcagacaataacgaaggtgccgatggagtgggtagttcctcgggaaattggcattgcgattcccaatggctgggggacagagtcatcaccaccagcacccgaacctgggccctgcccacctacaacaatcacctctacaagcaaatctccaccagcacatctggaggatcttcaaatgacaacgcctacttcggctacagcaccccctgggggtattttgacttcaacagattccactgccacttctcaccacgtgactggcagcgactcatcaacaacaactggggattccggcctaagcgactcaacttcaagctcttcaacattcaggtcaaagaggttacggacaacaatggagtcaagaccatcgccaataaccttaccagcacggtccaggtcttcacggactcagactatcagctcccgtacgtgctcgggtcggctcacgagggctgcctcccgccgttcccagcggacgttttcatgattcctcagtacgggtatctgacgcttaatgatggaagccaggccgtgggtcgttcgtccttttactgcctggaatatttcccgtcgcaaatgctaagaacgggtaacaacttccagttcagctacgagtttgagaacgtacctttccatagcagctacgctcacagccaaagcctggaccgactaatgaatccactcatcgaccnatacttgcactatctctcaaagactattaacggttctggacagaatcaacaaacgctaaaattcagtgtggccggacccagcaacatggctgtccagggaagaaactacatacctggacccagctaccgacaacaacgtgtctcaaccactgtgactcaaaacaacaacagcgaatttgcttggcctggagcttcttcttgggctctcaatggacgtaatagcttgatgaatcctggacctgctatggccagccacaaagaaggagaggaccgtttctttcctttgtctggatctttaatttttggcaaacaaggaactggaagagacaacgtggatgcggacaaagtcatgataaccaacgaagaagaaattaaaactactaacccggtagcaacggagtcctatggacaagtggccacaaaccaccagagtgcccaagcacaggcgcagaccggctgggttcaaaaccaaggaatacttccggatatggtttggcaggacagagatgtgtacctgcaaggacccatttgggccaaaattcctcacacggacggcaactttcacccttctccgctgatgggagggtttggaatgaagcacccgcctcctcagatcctcatcaaaaacacacctgtacctgcggatcctccaacggccttcaacaaggacaagctgaactctttcatcacccagtattctactggccaagtcagcgtggagatcgagtgggagctgcagaaggaaaacagcaagcgctggaacccggagatccagtacacttccaactattacaagtctaataatgttgaatttgctgttaatactgaaggtgtatatagtgaaccccgccccattggcaccagatacctgactcgtaatctg

SEQ ID NO: 618 - DNA, 2208 bp, Artificial Sequence
  source: /note="Description of Artificial Sequence: Synthetic polynucleotide"
atggctgccgatggttatcttccagattggctcgaggacaaccttagtgaaggaattcgcgagtggtgggctttgaaacctggagcccctcaacccaaggcaaatcaacaacatcaagacaacgctcgaggtcttgtgcttccgggttacaaataccttggacccggcaacggactcgacaagggggagccggtcaacgcagcagacgcggcggccctcgagcacgacaaggcctacgaccagcagctcaaggccggagacaacccgtacctcaagtacaaccacgccgacgccgagttccaggagcggctcaaagaagatacgtcttttgggggcaacctcgggcgagcagtcttccaggccaaaaagaggcttcttgaacctcttggtctggttgaggaagcggctaagacggctcctggaaagaagaggcctgtagagcagtctcctcaggaaccggactcctccgcgggtattggcaaatcgggtgcacagcccgctaaaaagagactcaatttcggtcagactggcgacacagagtcagtcccagaccctcaaccaatcggagaacctcccgcagccccctcaggtgtgggatctcttacaatggcttcaggtggtggcgcaccagtggcagacaataacgaaggtgccgatggagtgggtagttcctcgggaaattggcattgcgattcccaatggctgggggacagagtcatcaccaccagcacccgaacctgggccctgcccacctacaacaatcacctctacaagcaaatctccaacagcacatctggaggatcttcaaatgacaacgcctacttcggctacagcaccccctgggggtattttgacttcaacagattccactgccacttctcaccacgtgactggcagcgactcatcaacaacaactggggattccggcctaagcgactcaacttcaagctcttcaacattcaggtcaaagaggttacggacaacaatggagtcaagaccatcgccaataaccttaccagcacggtccaggtcttcacggactcagactatcagctcccgtacgtgctcgggtcggctcacgagggctgcctcccgccgttcccagcggacgttttcatgattcctcagtacgggtatctgacgcttaatgatggaagccaggccgtgggtcgttcgtccttttactgcctggaatatttcccgtcgcaaatgctaagaacgggtaacaacttccagttcagctacgagtttgagaacgtacctttccatagcagctacgctcacagccaaagcctggaccgactaatgaatccactcatcgaccaatacttgcactatctctcaaagactattaacggttctggacagaatcaacaaacgctaaaattcagtgtggccggacccagcaacatggctgtccagggaagaaactacatacctggacccagctaccgacaacaacgtgtctcaaccactgtgactcaaaacaacaacagcgaatttgcttggcctggagcttcttcttgggctctcaatggacgtaatagcttgatgaatcctggacctgctatggccagctacaaagaaggagaggacagtttctttcctttgtctggatctttaatttttggcaaacaaggaactggaagagacaacgtggatgcggacaaagtcatgataaccaacgaagaagaaattaaaactactaacccggtagcaacggagtcctatggacaagtggccacaaaccaccagagtgcccaagcacaggcgcagaccggctgggttcaaaaccaaggaatacttccgggtatggtttggcaggacagagatgtgtacctgcaaggacccatttgggccaaaattcctcacacggacggcaactttcacccttctccgctgatgggagggtttggaatgaagcacccgcctcctcagaccctcatcaaaaacacacctgtacctgcggatcctccaacggccttcaacaaggacaagctgaactctttcatcacccagtattctactggccaagtcagcgtggagatcgagtgggagctgcagaaggaaaacagcaagcgctggaacccggagatccagtacacttccaactattacaagtctaataatgttgaatttgctgttaatactgaaggtgtatatagtgaaccccgccccattggcaccagatacctgactcgtaatctg

SEQ ID NO: 619 - DNA, 2208 bp, Artificial Sequence; identical to SEQ ID NO: 602
  source: /note="Description of Artificial Sequence: Synthetic polynucleotide"

SEQ ID NO: 620 - DNA, 2208 bp, Artificial Sequence
  source: /note="Description of Artificial Sequence: Synthetic polynucleotide"
atggctgccgatggttatcttccagattggctcgaggacaaccttagtgaaggaattcgcgagtggtgggctttgaaacctggagcccctcaacccagggcaaatcaacaacatcaagacaacgctcgaggtcttgtgcttccgggttacaaataccttggacccggcaacggactcgacaagggggagccggtcaacgcagccgacgcggcggccctcgagcacgacaaggcctacgaccagcagctcaaggccggagacaacccgtacctcaagtacaaccacgccgacgccgagttccaggagcggctcaaagaagatacgtcttttgggggcaacctcgggcgagcagtcttccaggccaaaaagaggcttcttgaacctcttggtctggttgaggaagcggctaagacggctcctggaaagaagaggcctgtagagcagtctcctcaggaaccggactcctccgcgggtattggcaaatcgggtgcacagcccgctaaaaagagactcaatttcggtcagactggcgacacagagtcagtcccagaccctcaaccaatcggagaacctcccgcagccccctcaggtgtgggatctcttacaatggcttcaggtggtggcgcaccagtggcagacaataacgaaggtgccgatggagtgggtagttcctcgggaaattggcattgcgattcccaatggctgggggacagagtcatcaccaccagcacccgaacctgggccctgcccacctacaacaatcacctctacaagcaaatctccaacagcacatctggaggatcttcaaatgacaacgcctacttcggctacagcaccccctgggggtattttgacttcaacagattccactgccacttctcaccacgtgactggcagcgactcatcaacaacaactggggattccggcctaagcgactcaacttcaagctcttcaacattcaggtcaaagaggttacggacaacaatggagtcaagaccatcgccaataaccttaccagcacggtccaggtcttcacggactcagactgtcagctcccgtacgtgctcgggtcggctcacgagggctgcctcccgccgttcccagcggacgttttcatgattcctcagtacgggtatctgacgcttaatgatggaagccaggccgtgggtcgttcgtccttttactgcctggaatatttcccgtcgcaaatgctaagaacgggtaacaacttccagttcagctacgagtttgagaacgtacctttccatagcagctacgctcacagccaaagcctggaccgactaacgaatccactcatcgaccaatacttgtactatctctcaaagactattaacggttctggacagaatcaacaaacgctaaaattcagtgtggccggacccagcaacatggctgtccagggaagaaactacatacctggacccagctaccgacaacaacgtgtctcaaccactgtgactcaaaacaacaacagcgaatttgcttggcctggagcttcttcttgggctctcaatggacgtaatagcttgatgaatcctggacctgctatggccagccacaaagaaggagaggaccgtttctttcctttgtctggatctttaatttttggcaaacaaggaactggaagagacaacgtggatgcggacaaagtcatgataaccaacgaagaagaaattaaaactactaacccggtagcaacggagtcccatggacaagtggccacaaaccaccagagtgcccaagcacaggcgcagaccggctgggttcaaaaccaaggaatacttccgggtatggtttggcaggacagagatgtgtacctgcaaggacccatttgggccaaaattcctcacacggacggcaactttcacccttctccgctgatgggagggtttggaatgaagcacccgcctcctcagatcctcatcaaaaacacacctgtacctgcggatcctccaacggccttcaacaaggacaagctgaactctttcatcacccagtattctactggccaagtcagcgtggagatcgagtgggagctgcagaaggaaaacagcaagcgctggaacccggagatccagtacacttccaactattacaagtctaataatgttgaatttgctgttaatactgaaggtgtatatagtgaaccccgccccattggcaccagatacctgactcgtaatctg

SEQ ID NO: 621 - DNA, 2208 bp, Artificial Sequence
  source: /note="Description of Artificial Sequence: Synthetic polynucleotide"
atggctgccgatggttatcttccagattggctcgaggacaaccttagtgaaggaattcgcgagtggtgggctttgaaacctggagcccctcaacccaaggcaaatcaacaacatcaagacaacgctcgaggtcttgtgcttccgggttacaaataccttggacccggcaacggactcgacaagggggagccggtcaacgcagcagacgcggcggccctcgagcacgacaaggcctacgaccagcagctcaaggccggagacaacccgtacctcaagtacaaccacgccgacgccgagttccaggagcggctcaaagaagatacgtcttttgggggcaacctcgggcgagcagtcttccaggccaaaaagaggcttcttgaacctcttggtctggttgaggaagcggctaagacggctcctggaaagaagaggcctgtagagcagtctcctcaggaaccggactcctccgcgggtattggcaaatcgggtgcacagcccgctaagaagagactcaatttcggtcagactggcgacacagagtcagtcccagaccctcaaccaatcggagaacctcccgcagccccctcaggtgtgggatctcttacaatggcttcaggtggtggcgcaccagtggcagacaataacgaaggtgccgatggagtgggtagttcctcgggaaattggcattgcgattcccaatggctgggggacagagtcatcaccaccagcacccgaacctgggccctgcccacctacaacaatcacctctacaagcaaatctccaacagcacatctggaggatcttcaaatgacaacgcctacttcggctacagcaccccctgggggtattttgacttcaacagattccactgccacttctcaccacgtgactggcagcgactcatcaacaacaactggggattccggcctaagcgactcaacttcaagctcttcaacattcaggtcaaagaggttacggacaacaatggagtcaagaccatcgccaataaccttaccagcacggtccaggtcttcacggactcagactatcagctcccgtacgtgctcgggtcggctcacgagggctgcctcccgccgttcccagcggacgttttcatgattcctcagtacgggtatctgacgcttaatgatggaagccaggccgtgggtcgttcgtccttttactgcctggaatatttcccgtcgcaaatgctaagaacgggtaacaacttccagttcagctacgagtttgagaacgtacctttccatagcagctacgctcacagccaaagcctggaccgactaatgaatccacccatcgaccaatacttgtactatctctcaaagactattaacggttctggacagaatcaacaaacgctaaaattcagtgtggccggacccagcaacatggctgtccagggaagaaactacatacctggacccagctaccgacaacaacgtgtctcaaccactgtgactcaaaacaacaacagcgaatttgcttggcctggagcttcttcttgggctctcaatggacgtaatagcttgatgaatcctggacctgctatggccagccacaaagaaggagaggaccgtttctttcctttgtctggatctttaatttttggcaaacaaggaactggaagagacaacgtggatgcggacaaagtcatgataaccaacgaagaagaaattaaaactactaacccggtagcaacggagtcctatggacaagtggccacaaaccaccagagtgcccaagcacaggcgcagaccggctgggttcaaaaccaaggaatacttccgggtatggtttggcaggacagagatgtgtacctgcaaggacccatttgggccaaaattcctcacacggacggcaactttcacccttctccgctgatgggagggtttggaatgaagcacccgcctcctcagatcctcatcaaaaacacacctgtacctgcggatcctccaacggccttcaacaaggacaagctgaactctttcatcacccagtattctactggccaagtcagcgtggagatcgagtgggagctgcagaaggaaaacagcaagcgctggaacccggagatccagtacacttccaactattacaagtctaataatgttgaatttgctgttaatactgaaggtgtatatggtgaaccccgccccattggcaccagatacctgactcgtaatctg

SEQ ID NO: 622 - DNA, 2208 bp, Artificial Sequence
  source: /note="Description of Artificial Sequence: Synthetic polynucleotide"
atggctgccgatggttatcttccagattggctcgaggacaaccttagtgaaggaattcgcgagtggtgggctttgaaacctggagcccctcaacccaaggcaaatcaacaacatcaagacaacgctcgaggtcttgtgcttccgggttacaaataccttggacccggcaacggactcgacaagggggagccggtcaacgcagcagacgcggcggccctcgagcacgacaaggcctacgaccagcagctcaaggccggagacaacccgtacctcaagtacaaccacgccgacgccgagttccaggagcggctcaaagaagatacgtcttttgggggcaacctcgggcgagcagtcttccaggccaaaaagaggcttcttgaacctcttggtctggttgaggaagcggctaagacggctcctggaaagaagaggcctgtagagcagtctcctcaggaaccggactcctccgcgggtattggcaaatcgggtgcacagcccgctaaaaagagactcaatttcggtcagactggcgacacagagtcagtcccagaccctcaaccaatcggagaacctcccgcagccccctcaggtgtgggatctcttacaatggcttcaggtggtggcgcaccagtggcagacaataacgaaggtgccgatggagtgggtagttcctcgggaaattggcattgcgattcccaatggctgggggacagagtcatcaccaccagcacccgaacctgggccctgcccacctacaacaatcacctctacaagcaaatctccaacagcacatctggaggatcttcaaatgacaacgcctacttcggctacagcaccccctgggggtattttgacttcaacagattccactgccacttctcaccacgtgaccggcagcgactcatcaacaacaactggggattccggcctaagcgactcaacttcaagctcttcaacattcaggtcaaagaggttacggacaacaatggagtcaagaccatcgccaataaccttaccagcacggtccaggtcttcacggactcagactatcagctcccgtacgtgctcgggtcggctcacgagggctgcctcccgccgttcccagcggacgttttcatgattcctcagtacgggtatctgacgcttaatgatggaagccaggccgtgggtcgttcgtccttttactgcctggaatatttcccgtcgcaaatgctaagaacgggtaacaacttccagttcagctacgagtttgagaacgtacctttccatagcagctacgctcacagccaaagcctggaccgactaatgaatccactcatcgaccaatacttgtactatctctcaaagactattaacggttctggacagaatcaacaaacgctaaaattcagtgtggccggacccagcaacatggctgtccagggaagaaactacatacctggacccagctaccgacaacaacgtgtctcaaccactgtgactcaaaacaacaacagcgaatttgcttggcctggagcttcttcttgggctctcaatggacgtaatagcttgatgaatcctggacctgctatggccagccacaaagaaggagaggaccgtttctttcctttgtctggatctttaatttttggcaaacaaggaactggaagagacaacgtggatgcggacaaagtcatgataaccaacgaagaagaaattaaaactactaacccggtagcaacggagtcctatggacaagtggccacaaaccaccagagtgcccaagcacaggcgcagaccggctgggttcaaaaccaaggaatacttccgggtatggtttggcaggacagagatgtgtacctgcaaggacccatttgggccaaaattcctcacacggacggcaactttcacccttctccgctgatgggagggtttggaatgaagcacccgcctcctcagatcctcatcaaaaacacacctgtacctgcggatcctccaacggccttcaacaaggacaagctgaactctttcatcacccagtattctactggccaagtcagcgtggagatcgagtgggagctgcagaaggaaaacagcaagcgctggaacccggagatccagtacacttccaactattacaagtctaataatgttgaatttgctgttaatactgaaggtgtatatagtgaaccccgccccattggcaccagatacctgactcgtaatctg

SEQ ID NO: 623 - DNA, 2208 bp, Artificial Sequence
  source: /note="Description of Artificial Sequence: Synthetic polynucleotide"
atggctgccgatggttatcttccagattggctcgaggacaaccttagtgaaggaattcgcgagtggtgggctttgaaacctggagcccctcaacccaaggcaaatcaacaacatcaagacaacgctcgaggtcttgtgcttccgggttacaaataccttggacccggcaacggactcgacaagggggagccggtcaacgcagcagacgcggcagccctcgagcacgacaaggcctacgaccagcagctcaaggccggagacaacccgtacctcaagtacaaccacgccgacgccgagttccaggagcggctcaaagaagatacgtcttttgggggcaacctcgggcgagcagtcttccaggccaaaaagaggcttcttgaacctcttggtctggttgaggaagcggctaagacggctcctggaaagaagaggcctgtagagcagtctcctcaggaaccggactcctccgcgggtattggcaaatcgggtgcacagcccgctaaaaagagactcaatttcggtcagactggcgacacagagtcagtcccagaccctcaaccaatcggagaacctcccgcagccccctcaggtgtgggatctcttacaatggcttcaggtggtggcgcaccagtggcagacaataacgaaggtgccgatggagtgggtagttcctcgggaaattggcattgcaattcccaatggctgggggacagagtcatcaccaccagcacccgaacctgggccctgcccacctacaacaatcacctctacaagcaaatctccaacagcacatctggaggatcttcaaatgacaacgcctacttcggctacagcaccccctgggggtattttgacttcaacagattccactgccacttctcaccacgtgactggcagcgactcatcaacaacaactggggattccggcctaagcgactcaacttcaagctcttcaacattcaggtcaaagaggttacggacaacaatggagtcaagaccatcgccaataaccttaccagcacggtccaggtcttcacggactcagactatcagctcccgtacgtgctcgggtcggctcacgagggctgcctcccgccgttcccagcggacgttttcatgattcctcagtacgggtatctgacgcttaatgatggaagccaggccgtgggtcgttcgtccttttactgcctggaatatttcccgtcgcaaatgctaagaacgggtaacaacttccagttcagctacgagtttgagaacgtacctttccatagcagctacgctcacagccaaagcctggaccgactaatgaatccactcatcgaccaatacttgtactatctctcaaagactattaacggttctggacagaatcaacaaacgctaaaattcagtgtggccggacccggcaacatggctgtccagggaagaaactacatacctggacccagctaccgacaacaacgtgtctcaaccactgtgactcaaaacaacaacagcgaatttgcttggcctggagcttcttcttgggctctcaatggacgtaatagcttgatgaatcctggacctgctatggccagccacaaagaaggagaggaccgtttctttcctttgtctggatctttaatttttggcaaacaaggaactggaagagacaacgtggatgcggacaaagtcatgataaccaacgaagaagaaattaaaactactaacccggtagcaacggagtcctatggacaagtggccacaaaccaccagagtgcccaagcacaggcgcagaccggctgggttcaaaaccaaggaatacttccgggtatggtttggcaggacagagatgtgtacctgcaaggacccatttgggccaaaattcctcacacggacggcaactttcacccttctccgctgatgggagggtttggaatgaagcacccgcctcctcagatcctcatcaagaacacacctgtacctgcggatcctccaacggccttcaacaaggacaagctgaactctttcatcacccagtattctactggccaagtcagcgtggagatcgagtgggagctgcagaaggaaaacagcaagcgctggaacccggagatccagtacacttccaactattacaagtctaataatgttgaatttgctgttaatactgaaggtgtatatagtgaaccccgccccattggcaccagatacctgactcgtaatctg

SEQ ID NO: 624 - DNA, 2208 bp, Artificial Sequence
  source: /note="Description of Artificial Sequence: Synthetic polynucleotide"
atggctgccgatggttatcttccagattggctcgaggacaaccttagtgaaggaattcgcgagtggtgggctttgaaacctggagcccctcaacccaaggcaaatcaacaacatcaagacaacgctcgaggtcttgtgcttccgggttacagataccttggacccggcaacggactcgacaagggggagccggtcaacgcagcagacgcggcggccctcgagcacgacaaggcctacgaccagcagctcaaggccggagacaacccgtacctcaagtacaaccacgccgacgccgagttccaggagcggctcaaagaagatacgtcttttgggggtaacctcgggcgagcagtcttccaggccaaaaagaggcttcttgaacctcttggtctggttgaggaagcggctaagacggctcctggaaagaagaggcctgtagagcagtctcctcaggaaccggactcctccgcgggtatcggcaaatcgggtgcacagcccgctaaaaagagactcaatttcggtcagactggcgacacagagtcagtcccagaccctcaaccaatcggagaacctcccgcagccccctcaggtgtgggatctcttacaatggcttcaggtggtggcgcaccagtggcagacaataacgaaggtgccgatggagtgggtagttcctcgggaaattggcattgcgattcccaatggctgggggacagagtcatcaccaccagcacccgaacctgggccctgcccacctacaacaatcacctctacaagcaaatctccaacagcacatctggaggatcttcaaatgacaacgcctacttcggctacagcaccccctgggggtattttgacttcaacagattccactgccacttctcaccacgtgactggcagcgactcatcaacaacaactggggattccggcctaagcgactcaacttcaagctcttcaacattcaggtcaaagaggttacggacaacaatggagtcaagaccgtcgccaataaccttaccagcacggtccaggtcttcacggactcagactatcagctcccgtacgtgctcgggtcggctcacgagggctgcctcccgccgttcccagcggacgttttcatgattcctcagtacgggtatctgacgcttaatgatggaagccaggccgtgggtcgttcgtccttttactgcctggaatatttcccgtcgcaaatgctaagaacgggtaacaacttccagttcagctacgagtttgagaacgtacctttccatagcagctacgctcacagccaaagcctggaccgactaatgaatccactcatcgaccaatacttgtactatctctcaaagactattaacggttctggacagaatcaacaaacgctaaaattcagtgtggccggacccagcaacatggctgtccagggaagaaactacatacctggacccagctaccgacaacaacgtgtctcaaccactgtgactcaaaacaacaacagcgaatttgcttggcctggagcttcttcttgggctctcaatggacgtaatagcttgatgaatcctggacctgctatggccagccacaaagaaggagaggaccgtttctttcctttgtctggatctttaatttttggcaaacaaggaactggaagagacaacgtggatgcggacaaagtcatgataaccaacgaagaagaaattaaaactactaacccggtagcaacggagtcctatggacaagtggccacaaaccaccagagtgcccaagcacaggcgcagaccggctgggttcaaaaccaaggaatacttccgggtatggtttggcaggacagagatgtgtacctgcaaggacccatttgggccaaaattcctcacacggacggcaactttcacccttctccgctgatgggagggtttggaatgaagcacccgcctcctcagatcctcatcaaaaacacacctgtacctgcggatcctccaacggccttcaacaaggacaagctgaactctttcatcacccagtattctactggccaagtcagcgtggagatcgagtgggagctgcagaaggaaaacagcaagcgctggaacccggagatccagtacacttccaactattacaagtctaataatgttgaatttgctgttaatactgaaggtgtatatagtggaccccgccccattggcaccagatacctgactcgtaatctg

SEQ ID NO: 625 - DNA, 2208 bp, Artificial Sequence
  source: /note="Description of Artificial Sequence: Synthetic polynucleotide"
atggctgccgatggttatcttccagattggctcgaggacaaccttagtgaaggaattcgcgagtggtgggctttgaaacctggagcccctcaacccaaggcaaatcaacaacatcaagacaacgctcgaggtcttgtgcttccgggttacaaataccttggacccggcaacggactcgacaagggggagccggtcaacgcagcagacgcggcggccctcgagcacgacaaggcctacgaccagcagctcaaggccggagacaacccgtacctcaagtacaaccacgccgacgccgagttccaggagcggctcaaagaagatacgtcttttgggggcaacctcgggcgagcagtcttccaggccaaaaagaggcttcttgaacctcttggtctggttgaggaagcggctaagacggctcctggaaagaagaggcctgtagagcagtctcctcaggaaccggactcctccgcgggtattggcaaatcgggtgcacagcccgctaaaaagagactcaatttcggtcagactggcgacacagagtcagtcccagaccctcaaccaatcggagaacctcccgcagccccctcaggtgtgggatctcttacaatggcttcaggtggtggcgcaccagtggcagacaataacgaaggtgccgatggagtgggtagttcctcgggaaattggcattgcgattcccaatggctgggggacagagtcatcaccaccagcacccgaacctgggccctgcccacctacaacaatcacctctacaagcaaatctccaacagcacatctggaggatcttcaaatgacaacgcctacttcggctacagcaccccctgggggtattttgacttcaacagattccactgccacttctcaccacgtgactggcagcgactcatcaacaacaactggggattccggcctaagcgactcaacttcaagctcttcaacattcaggtcaaagaggttacggacaacaatggagtcaagaccatcgccaataaccttaccagcacggtccaggtcttcacggactcagactatcagctcccgtacgtgctcgggtcggctcacgagggctgcctcccgccgttcccagcggacgttttcatgattcctcagtacgggtatctgacgcttaatgatggaagccaggccgtgggtcgttcgtccttttactgcctggaatatttcccgtcgcaaatgctaagaacgggtaacaacttccagttcagctacgagtttgagaacgtacctttccatagcagctacgctcacagccaaagcctggaccgactaatgaatccactcatcgaccaatacttgtactatctctcaaagactattaacggttctggacagaatcaacaaacgctaaaattcagtgtggccggacccagcaacatggctgtccagggaagaaactacatacctggacccagctaccgacaacaacgtgtctcaaccactgtgactcaaaacaacaacagcgaatttgcttggcctggagcttcttcttgggctctcaatggacgtaatagcttgatgaatcctggacctgctatggccagccacaaagaaggagaggaccgtttctttcctttgtctggatctttaatttttggcaaacaaggaactggaagagacaacgtggatgcggacaaagtcatgataaccaacgaagaagaaattaaaactactaacccggtagcaacggagtcctatggacaagtggccacaaaccaccagagtgcccaagcacaggcgcagaccggctgggttcaaaaccaaggaatacttccgggtatggtttggcaggacagagatgtgtacctgcaaggacccatttgggccaaaattcctcacacggacggcaactttcacccttctccgctgatgggagggtttggaatgaagcacccgcctcctcagatcctcatcaaaaacacacctgtacctgcggatcctccaacggccttcaacaaggacaagctgaactctttcatcacccagtattctactggccaagtcagcgtggagatcgagtgggagctgcagaaggaaaacagcaagcgctggaacccggagatccagtacacttccaactattacaagtctaataatgttgaatttgctgttaatactgaaggtgtatatagtgaaccccgccccattggcaccagatacctgactcgtaatctg

SEQ ID NO: 626 - DNA, 2208 bp, Artificial Sequence
  source: /note="Description of Artificial Sequence: Synthetic polynucleotide"
atggctgccgatggttatcttccagattggctcgaggacaaccttagtgaaggaattcgcgagtggtgggctttgaaacctggagcccctcaacccaaggcaaatcaacaacgtcaagacaacgctcgaggtcttgtgcttccgggttacaaataccttggacccggcaacggactcgacaagggggagccggtcaacgcagcagacgcggcggccctcgagcacgacaaggcctacgaccagcagctcaaggccggaggcaacccgtgcctcaagtacaaccacgccgacgccgagttccaggagcggctcaaagaagatacgtcttttgggggcaacctcgggcgagcagtcttccaggccaaaaagaggcttcttgaacctcttggtctggttgaggaagcggctaagacggctcctggaaagaagaggcctgtagagcagtctcctcaggaaccggactcctccgcgggtattggcagatcgggtgcacagcccgctaaaaagagactcaatttcggtcagactggcgacacagagtcagtcccagaccctcaaccaatcggagaacctcccgcagccccctcaggtgtgggatctcttacaatggcttcaggtggtggcgcaccagtggcagacaataacgaaggtgccgatggagtgggtagttcctcgggaaattggcattgcgattcccaatggctgggggacagagtcatcaccaccagcacccgaacctgggccctgcccacctacaacaatcacctctacaagcaaatctccaacagcacatctggaggatcttcaaatgacaacgcctacttcggctacagcaccccctgggggtattttgacttcaacagattccactgccacttctcaccacgtgactggcagcgactcatcaacaacaactggggattccggcctaagcgactcaacttcaagctcttcaacattcaggtcaaagaggttacggacaacaatggagtcaaggccatcgccaataaccttaccagcacggtccaggtcttcacggactcagactatcagctcccgtacgtgctcgggtcggctcacgagggctgcctcccgccgttcccagcggacgttttcatgattcctcagtacgggtatctgacgcttaatgatggaagccaggccgtgggtcgttcgtccttttactgcctggaatatttcccgtcgcaaatgctaagaacgggtaacaacttccagttcagctacgagtttgagaacgtacctttccatagcagctacgctcacagccaaagcctggaccgactaatgaatccactcatcgaccaatacttgtactatctctcaaagactattgacggttctggacagaatcaacaaacgctaaaattcagtgtggccggacccagcaacatggctgtccagggaagaaactacatacctggacccagctaccgacaacaacgtgtctcaaccactgtgactcaaaacaacaacagcgaatttgcttggcctggagcttcttcttgggctctcaatggacgtaatagcttgatggatcctggacctgctatggccagccacaaagaaggagaggaccgtttctttcctttgtctggatctttaatttttggcaaacaaggaactggaagagacaacgtggatgcggacaaagtcatgataaccaacgaagaagaaattaaaactactaacccggtagcaacggagtcctatggacaagtggccacaaaccaccagagtgcccaagcacaggcgcagaccggctgggttcaaaaccaaggaatacttccgggtatggtttggcaggacagagatgtgtacctgcaaggacccatttgggccaaaattcctcacacgggcggcaactttcacccttctccgctgatgggagggtttggaatgaagcacccgcctcctcagatcctcatcaaaaacacacctgtacctgcggatcctccaacggccttcaacaaggacaagctgaactctttcatcacccagtattctactggccaagtcagcgtggagatcgagtgggagctgcagaaggaaaacagcaagcgctggaacccggagatccagtacacttccaactattacaagtctaataatgttgaatttgctgttaatactgaaggtgtatatagtgaaccccgccccattggcaccagatacctgactcgtaatctg

SEQ ID NO: 627 - DNA, 2208 bp, Artificial Sequence
  source: /note="Description of Artificial Sequence: Synthetic polynucleotide"
atggctgccgatggttatcttccagattggctcgaggacaaccttagtgaaggaattcgcgagtggtgggctttgaaacctggagcccctcaacccaaggcaaatcaacaacatcaagacaacgctcgaggtcttgtgcttccgggttacaaataccttggacccggcaacggactcgacaagggggagccggtcaacgcagcagacgcggcggccctcgagcacgacaaggcctacgaccagcagctcaaggccggagacaacccgtacctcaagtacaaccacgccgacgccgagttccaggagcggctcaaagaagatacgtcttttgggggcaacctcgggcgagcagtcttccaggccaaaaagaggcttcttgaacctcttggtctggttgaggaagcggctaagacggctcctggaaagaagaggcctgtagagcagtctcctcaggaaccggactcctccgcgggtattggcaaatcgggtgcacagcccgctaaaaagagactcaatttcggtcagactggcgacacagagtcagtcccagaccctcaaccaatcggagaacctcccgcagccccctcaggtgtgggatctcttacaatggcttcaggtggtggcgcaccagtggcagacaataacgaaggtgccgatggagtgggtagttcctcgggaaattggcattgcgattcccaatggctgggggacagagtcatcaccaccagcacccgaacctgggccctgcccacctacaacaatcacctctacaagcaaatctccaacagcacatctggaggatcttcaaatgacaacgcctacttcggctacagcaccccctgggggtattttgacttcaacagattccactgccacttctcaccacgtgactggcagcgactcatcaacaacaactggggattccggcctaagcgactcaacttcaagctcttcaacattcaggtcaaagaggttacggacaacaatggagtcaagaccatcgccaataaccttaccagcacggtccaggtcttcacggactcagactatcagctcccgtacgtgctcgggtcggctcacgagggctgcctcccgccgttcccagcggacgttttcatgattcctcagtacgggtatctgacgcttaatgatggaagccaggccgtgggtcgttcgtccttttactgcctggaatatttcccgtcgcaaatgctaagaacgggtaacaacttccagttcagctacgagtttgagaacgtacctttccatagcagctacgctcacagccaaagcctggaccgactaatgaatccactcatcgaccaatacttgtactatctctcaaagactattaacggttctggacagaatcaacaaacgctaaaattcagtgtggccggacccagcaacatggctgtccagggaagaaactacatacctggacccagctaccgacaacaacgtgtctcaaccactgtgactcaaaacaacaacagcgaatttgcttggcctggagcttcttcttgggctctcaatggacgtaatagcttgatgaatcctggacctgctatggccagccacaaagaaggagaggaccgtttctttcctttgtctggatctttaatttttggcaaacaaggaactggaagagacaacgtggatgcggacaaagtcatgataaccaacgaagaagaaattaaaactactaacccggtagcaacggagtcctatggacaagtggccacaaaccaccagagtgcccaagcacaggcgcagaccggctgggttcaaaaccaaggaatacttccgggtatggtttggcaggacagagatgtgtacctgcaaggacccatttgggccaaaattcctcacacggacggcaactttcacccttctccgctgatgggagggtttggaatgaagcacccgcctcctcagatcctcatcaaaaacacacctgtacctgcggatcctccaacggccttcaacaaggacaagctgaactctttcatcacccagtattctactggccaagtcagcgtggagatcgagtgggagctgcagaaggaaaacagcaagcgctggaacccggagatccagtacacttccaactattacaagcctaataatgttgaatttgctgttaatactgaaggtgtatatagtgaaccccgccccattggcaccagatacctgactcgtaatctg

SEQ ID NO: 628 - DNA, 2208 bp, Artificial Sequence
  source: /note="Description of Artificial Sequence: Synthetic polynucleotide"
atggctgccgatggttatcttccagattggctcgaggacaaccttagtgaaggaattcgcgagtggtgggctttgaaacctggagcccctcaacccaaggcaaatcaacaacatcaagacaacgctcgaggtcttgtgcttccgggttacaaataccttggacccggcaacggactcgacaagggggagccggtcaacgcagcagacgcggcggccctcgagcacaacaaggcctacgaccagcagctcaaggccggagacaacccgtacctcaagtgcaaccacgccgacgccgagttccaggagcggctcaaagaagatacgtcttttgggggcaacctcgggcgagcagtcttccaggccaaaaagaggcctcttgaacctcttggtctggttgaggaagcggctaagacggctcctggaaagaagaggcctgtagagcagtctcctcaggaaccggactcctccgcgggtattggcaaatcgggtgcacagcccgctaaaaagagactcaatttcggtcagactggcgacacagagtcagtcccagaccctcaaccaatcggagaacctcccgcagccccctcaggtgtgagatctcttacaatggcttcaggtggtggcgcaccagtggcagacaataacgaaggtgccgatggagtgggtagttcctcgggaaattggcattgcgattcccaatggctgggggacagagtcatcaccaccagcacccgaacctgggccctgcccacctacaacaatcacctctacaagcaaatctccaacagcacatctggaggatcttcaaatgacaacgcctacctcggctacagcaccccctgggggtattttgacttcaacagattccactgccacttctcaccacgtgactggcagcgactcatcaacaacaactggggattccggcctaagcgactcaacttcaagctcttcaacattcaggtcaaagaggttacggacaacaatggagtcaagaccatcgccaataaccttaccagcacggtccaggtcttcacggactcagactatcagctcccgtacgtgctcgggtcggctcacgagggctgcctcccgccgttcccagcggacgttttcatgattcctcagtacgggtatctgacgcttaatgatggaagccaggccgtgggtcgttcgtccttttactgcctggaatatttcccgtcgcaaatgctaagaacgggtaacaacttccagttcagctacgagtttgagaacgtacctttccatagcagctacgctcacagccaaagcctggaccgactaatgaatccactcatcgaccaatacttgtactatctctcaaagactattaacggttctggacagaatcaacaaacgctaaaattcagtgtggccggacccagcaacatggctgtccagggaagaaactacatacctggacccagctaccgacaacaacgtgtctcaaccactgtgactcaaaacaacaacagcgaatttgcttggcctggagcttcttcttgggctctcaatggacgtaatagcttgatgaatcctggacctactatggccagccacaaagaaggagaggaccgtttctttcctttgtctggatctttaatttttggcaaacaaggaactggaagagacaacgtggatgcggacaaagtcatgataaccaacgaagaagaaattaaaactactaacccggtagcaacggagtcctatggacaagtggccacaaaccaccagagtgcccaagcacaggcgcagaccggctgggttcaaaaccaaggaatacttccgggtatggtttggcaggacagagatgtgtacctgcaaggacccatttgggccaaaattcctcacacggacggcaactttcacccttctccgctgatgggagggtttggaatgaagcacccgcctcctcagatcctcatcaaaaacacacctgtacctgcggatcctccaacggccttcaacaaggacaagctgaactctttcatcacccagtattctactggccaagtcagcgtggagatcgagtgggagctgcagaaggaaaacagcaagcgctggaacccggagatccagtacacttccaactattacaagtctaataatgttgaatttgctgttaatactgaaggtgtatatagtgaaccccgccccattggcaccagatacctgactcgtaatctg

SEQ ID NO: 629 - DNA, 2208 bp, Artificial Sequence
  source: /note="Description of Artificial Sequence: Synthetic polynucleotide"
atggctgccgatggttatcttccagattggctcgaggacaaccttagtgaaggaattcgcgagtggtgggctttgaaacctggagcccctcaacccaaggcaaatcaacaacatcaagacaacgctcgaggtcttgtgcttccgggttacaaataccttggacccggcaacggactcgacaagggggagccggtcaacgcagcagacgcggcggccctcgtgcacgacaaggcctacgaccagcagctcaaggccggagacaacccgtacctcaagtgcaaccacgccgacgccgagttccaggagcggctcaaagaagatacgtcttttgggggcaacctcgggcgagcagtcttccaggccaaaaagaggcttcttgaacctcttggtctggttgaggaagcggctaagacggctcctggaaagaagaggcctgtagagcagtctcctcaggaaccggactcctccgcgggtattggcaaatcgggtgcacagcccgctaaaaagagactcaatttcggtcagactggcgacacagagtcagtcccagaccctcaaccaatcggagaacctcccgcagccccctcaggtgtgggatctcttacaatggcttcaggtggtggcgcaccagtggcagacaataacgaaggtgccgatggagtgggtagttcctcgggaaattggcattgcgattcccaatggctgggggacagagtcatcaccaccagcacccgaacctgggccctgcccacctacaacaatcacctctacaagcaaatctccaacagcacatctggaggatcttcaaatgacaacgcctacctcggctacagcaccccctgggggtattttgacttcaacagattccactgccacttctcaccacgtgactggcagcgactcatcaacaacaactggggattccggcctaagcgactcaacttcaagctcttcaacattcaggtcaaagaggttacggacaacaatggagtcaagaccatcgccaataaccttaccagcacggtccaggtcttcacggactcagactatcagctcccgtacgtgctcgggtcggctcacgagggctgcctcccgccgttcccagcggacgttttcacgattcctcagtacgggtatctgacgcttaatgatggaagccaggccgtgggtcgttcgtccttttactgcctggaatatttcccgtcgcaaatgctaagaacgggtaacaacttccagttcagctacgagtttgagaacgtacctttccatagcagctacgctcacagccaaagcctggaccgactaatgaatccactcatcgaccaatacttgtactatctctcaaagactattaacggttctggacagaatcaacaaacgctaaaattcagtgtggccggacccagcaacatggctgtccagggaagaaactacatacctggacccagctaccgacaacaacgtgtctcaaccactgtgactcaaaacaacaacagcgaatttgcttggcctggagcttcttcttgggctctcaatggacgtaatagcttgatgaatcctggacctgctatggccagccacaaagaaggagaggaccgtttctttcctttgtctggatctttaatttttggcaaacaaggaactggaagagacaacgtggatgcggacaaagtcatgataaccaacgaagaagaaattaaaactactaacccggtagcaacggagtcctatggacaagtggccacaaaccaccagagtgcccaagcacaggcgcagaccggctgggttcaaaaccaaggaatacttccgggtatggtttggcaggacagagatgtgtacctgcaaggacccatttgggccaaaattcctcacacggacggcaactttcacccttctccgctgatgggagggtttggaatgaagcacccgcctcctcagatcctcatcaaaaacacacctgtacctgcggatcctccaacggccttcaacaaggacaagctgaactctttcatcacccagtattctactggccaagtcagcgtggagatcgagtgggagctgcagaaggaaaacagcaagcgctggaacccggagatccagtacacttccaactattacaagtctaataatgttgaatttgctgttaatactgaaggtgtatatagtgaaccccgccccattgggccccgatacctgactcgtaatttt

SEQ ID NO: 630 - DNA, 2208 bp, Artificial Sequence
  source: /note="Description of Artificial Sequence: Synthetic polynucleotide"
atggctgccgatggttatcttccagattggctcgaggacaaccttagtgaaggaattcgcgagtggtgggctttgaaacctggagcccctcaacccaaggcaaatcaacaacatcaagacaacgctcgaggtcttgtgcttccgggttacaaataccttggacccggcaacggactcgacaagggggagccggtcaacgcagcagacgcggcggccctcgagcacaacaaggcctacgaccagcagctcaaggccggagacaacccgtacctcaagtgcaaccacgccgacgccgagttccaggagcggctcaaagaagatacgtcttttgggggcaacctcgggcgagcagtcttccaggccaaaaagaggcttcttgaacctcttggtctggttgaggaagcggctaagacggctcctggaaagaagaggcctgtagagcagtctcctcaggaaccggactcctccgcgggtattggcaaatcgggtgcacagcccgctaaaaagagactcaatttcggtcagactggcgacacagagtcagtcccagaccctcaaccaatcggagaacctcccgcagccccctcaggtgtgagatctcttacaatggcttcaggtggtggcgcaccagtggcagacaataacgaaggtgccgatggagtgggtagttcctcgggaaattggcattgcgattcccaatggctgggggacagagtcatcaccaccagcacccgaacctgggccctgcccacctacaacaatcacctctacaagcaaatctccaacagcacatctggaggatcttcaaatgacaacgcctacctcggctacagcaccccctgggggtattttgacttcaacagattccactgccacttctcaccacgtgactggcagcgactcatcaacaacaactggggattccggcctaagcgactcaacttcaagctcttcaacattcaggtcaaagaggttacggacaacaatggagtcaagaccatcgccaataaccttaccagcacggtccaggtcttcacggactcagactatcagctcccgtacgtgctcgggtcggctcacgagggctgcctcccgccgttcccagcggacgttttcatgattcctcagtacgggtatctgacgcttaatgatggaagccaggccgtgggtcgttcgtccttttactgcctggaatatttcccgtcgcaaatgctaagaacgggtaacaacttccagttcagctacgagtttgagaacgtacctttccatagcagctacgctcacagccaaagcctggaccgactaatgaatccactcatcgaccaatacttgtactatctctcaaagactattaacggttctggacagaatcaacaaacgctaaaattcagtgtggccggacccagcaacatggctgtccagggaagaaactacatacctggacccagctaccgacaacaacgtgtctcaaccactgtgactcaaaacaacaacagcgaatttgcttggcctggagcttcttcttgggctctcaatggacgtaatagcttgatgaatcctggacctgctatggccagccacaaagaaggagaggaccgtttctttcctttgtctggatctttaatttttggcaaacaaggaactggaagagacaacgtggatgcggacaaagtcatgataaccaacgaagaagaaattaaaactactaacccggtagcaacggagtcctatggacaagtggccacaaaccaccagagtgcccaagcacaggcgcagaccggctgggttcaaaaccaaggaatacttccgggtatggtttggcaggacagagatgtgtacctgcaaggacccatttgggccaaaattcctcacacggacggcaactttcacccttctccgctgatgggagggtttggaatgaagcacccgcctcctcagatcctcatcaaaaacacacctgtacctgcggatcctccaacggccttcaacaaggacaagctgaactctttcatcacccagtattctactggccaagtcagcgtggagatcgagtgggagctgcagaaggaaaacagcaagcgctggaacccggagatccagtacacttccaactattacaagtctaataatgttgaatttgctgttaatactgaaggtgtatatagtgaaccccgccccattggcaccagatacctgactcgtaatctg

SEQ ID NO: 631 - DNA, 2208 bp, Artificial Sequence
  source: /note="Description of Artificial Sequence: Synthetic polynucleotide"
atggctgccgatggttatcttccagattggctcgaggacaaccttagtgaaggaattcgcgagtggtgggctttgaaacctggagcccctcaacccaaggcaaatcaacaacatcaagacaacgctcgaggtcttgtgcttccgggttacaaataccttggacccggcaacggactcgacaagggggagccggtcaacgcagcagacgcggcggccctcgagcacgacaaggcctacgaccagcagctcaaggccggagacaacccgtacctcaagtgcaaccacgccgacgccgagttccaggagcggctcaaagaagatacgtcttttgggggcaacctcgggcgagcagtcttccaggccaaaaagaggcttcttgaacctcttggtctggttgaggaagcggctaagacggctcctggaaagaagaggcctgtagagcagtctcctcaggaaccggactcctccgcgggtattggcaaatcgggtgcacagcccgctaaaaagagactcaatttcggtcagactggcgacacagagtcagtcccagaccctcaaccaatcggagaacctcccgcagccccctcaggtgtgggatctcttacaatggcttcaggcggtggcgcaccagtggcagacaataacgaaggtgccgatggagtgggtagttcctcgggaaattggcattgcgattcccaatggctgggggacagagtcatcaccaccagcacccgaacctgggccctgcccacctacaacaatcacctctacaagcaaatctccaacagcacatctggaggatcttcaaatgacaacgcctacctcggctacagcaccccctgggggtattttgacttcaacagattccactgccacttctcaccacgtgactggcagcgactcatcaacaacaactggggattccggcctaagcgactcaacttcgagctcttcaacattcaggtcaaagaggttacggacaacaatggagtcaagaccatcgccaataaccttaccagcacggtccaggtcttcacggactcagactatcagctcccgtacgtgctcgggtcggctcacgagggctgcctcccgccgttcccagcggacgttttcatgattcctcagtacgggtatctgacgcttaatgatggaagccaggccgtgggtcgttcgtccttttactgcctggaatatttcccgtcgcaaatgctaagaacgggtaacaacttccagtccagctacgagtttgagaacgtacctttccatagcagctacgctcacagccaaagcctggaccgactaatgaatccactcatcgaccaatacttgtactatctctcaaagactattaacggttctggacagaatcaacaaacgctaaaattcagtgtggccggacccagcaacatggctgtccagggaagaaactacatacctggacccagctaccgacaacaacgtgcctcaaccactgtgactcaaaacaacaacagcgaatttgcttggcctggagcttcttcttgggctctcaatggacgtaatagcttgatgaatcctggacctgctatggccagccacaaagaaggggaggaccgtttctttcctttgtctggatctttaatttttggcaaacaaggaactggaagagacaacgtggatgcggacaaagtcatgataaccaacgaagaagaaattaaaactactaacccggtagcaacggagtcctatggacaagtggccacaaaccaccagagtgcccaagcacaggcgcagaccggctgggttcaaaaccaaggaatacttccgggtatggtttggcaggacagagatgtgtacctgcaaggacccatttgggccaaaattcctcacacggacggcaactttcacccttctccgctgatgggagggtttggaatgaagcacccgcctcctcagatcctcatcaaaaacacacctgtacctgcggatcctccaacggccttcaacaaggacaagctgaactctttcatcacccagtattctactggccaagtcagcgtggagatcgagtgggagctgcagaaggaaaacagcaagcgctggaacccggagatccagtacacttccaactattacaagtctaataatgttgaatttgctgttaatactgaaggtgtatatagtgaaccccgccccattggcaccagatacctgactcgtaatctg

SEQ ID NO: 632 - DNA, 2208 bp, Artificial Sequence
  source: /note="Description of Artificial Sequence: Synthetic polynucleotide"
atggctgccgatggttatcttccagattggctcgaggacaaccttagtgaaggaattcgcgagtggtgggctttgaaacctggagcccctcaacccaaggcaaatcaacaacatcaagacaacgctcgaggtcttgtgcttccgggttacaaataccttggacccggcaacggactcgacaagggggagccggtcaacgcagcagacgcggcggccctcgagcacgacaaggcctacgaccagcagctcaaggccggagacaacccgtacctcaagtgcaaccacgccgacgccgagttccaggagcggctcaaagaagatacgtcttttgggggcaacctcgggcgagcagtcttccaggccaaaaagaggcttcttgaacctcttggtctggttgaggaagcggctaagacggctcctggaaagaagaggcctgtagagcagtctcctcaggaaccggactcctccgcgggtattggcaaatcgggtgcacagcccgctaaaaagagactcaatttcggtcagactggcgacacagagtcagtcccagaccctcaaccaatcggagaacctcccgcagcccccccaggtgtgggatctcttacaatggcttcaggtggtggcgcaccagtggcggacaataacgaaggtgccgatggagtgggtagttcctcgggaaattggcattgcgattcccaatggctgggggacagagtcatcaccaccagcacccgaacctgggccctgcccacctacaacaatcacctctacaagcaaatctccaacagcacatctggaggatcttcaaatgacaacgcctacctcggctacagcaccccctgggggtattttgacttcaacagattccactgccacttctcaccacgtgactggcagcgactcatcaacaacaactggggattccggcctaagcgactcaacttcaagctcttcaacattcaggtcaaagaggttacggacaacaatggagtcaagaccatcgccaataaccttaccagcacggtccaggtcttcacggactcagactatcagctcccgtacgtgctcgggtcggctcacgagggctgcctcccgccgttcccagcggacgttttcatgattcctcagtacgggtatctgacgcttaatgatggaagccaggccgtgggtcgttcgtccttttactgcctggaatatttcccgtcgcaaatgctaagaacgggtaacaacttccagttcagctacgagtttgagaacgtacctttccatagcagctacgctcacagccaaagcctggaccgactaatgaatccactcatcgaccaatacttgtactatctctcaaagactattagcggttctggacagaatcaacaaacgctaaaattcagtgtggccggacccagcaacatggctgtccagggaagaaactacatacctggacccagctaccgacaacaacgtgtctcaaccactgtgactcaaaacaacagcagcgaatttgcttggcctggagcttcttcttgggctctcaatggacgtaatagcttgatgaatcctggacctgctatggccagccacaaagaaggagaggaccgtttctttcctttgtctggatctttaatttttggcaaacaaggaactggaagagacaacgtggatgcggacaaagtcatgataaccaacgaagaagaaattaaaactactaacccggtagcaacggagtcctatggacaagtggccacaaaccaccagagtgcccaagcacaggcgcagaccggctgggttcaaaaccaaggaatactttcgggtatggtttggcaggacagagatgtgtacctgcaaggacccatttgggccaaaattcctcacacggacggcaactttcacccttctccgctgatgggagggtttggaatgaagcacccgcctcctcagatcctcatcaaaaacacacctgtacctgcggatcctccaacggccttcaacaaggacaagctgaactctttcatcacccagtattctactggccaagtcagcgtggagatcgagtgggagctgcagaaggaaaacagcaagcgctggaacccggagatccagtacacttccaactattacaagtctaataatgttgaatttgctgttaatactgaaggtgtatatagtgaaccccgccccattggcaccagatacctgactcgtaatctg

SEQ ID NO: 633 - DNA, 2208 bp, Artificial Sequence
  source: /note="Description of Artificial Sequence: Synthetic polynucleotide"
atggctgccgatggttatcttccagattggctcgaggacaaccttagtgaaggaattcgcgagtggtgggctttgaaacctggagcccctcaacccaaggcaaatcaacaacatcaagacaacgctcgaggtcttgtgcttccgggttacaaataccttggacccggcaacggactcgacaagggggagccggtcaacgcagcagacgcggcggccctcgagcacgacaaggcctacgaccagcagctcaaggccggagacaacccgtacctcaagtgcaaccacgccgacgccgagttccaggagcggctcaaagaagatacgtcttttgggggcaacctcgggcgagcagtcttccaggccaaaaagaggcttcttgaacctcttggtctggttgaggaagcggctaagacggctcctggaaagaagaggcctgtagagcagtctcctcaggaaccggactcctccgcgggtattggcaaatcgggtgcacagcccgctaaaaagagactcaatttcggtcagactggcgacacagagtcagtcccagaccctcaaccaatcggagaacctcccgcagccccctcaggtgtgggatctcttacaatggcttcaggtggtggcgcaccagtggcagacaataacgaaggtgccgatggagtgggtagttcctcgggaaattggcattgcgattcccaatggctgggggacagagtcatcaccaccagcacccgaacctgggccctgcccacctacaacaatcacctctacaagcaaatctccaacagcacatctggaggatcttcaaatgacaacgcctacctcggctacagcaccccctgggggtattttgacttcaacagattccactgccacttctcaccacgtgactggcagcgactcatcaacaacaactggggattccggcctaagcgactcaacttcaagctcttcaacattcaggtcaaagaggttacggacaacaatggagtcaagaccatcgccaataaccttaccagcacggtccaggtcttcacggactcagactatcagctcccgtacgtgctcgggtcggctcacgagggctgcctcccgccgttcccagcggacgttttcatgattcctcagtacgggtatctgacgcttaatgatggaagccaggccgtgggtcgttcgtccttttactgcctggaatatttcccgtcgcaaatgctaagaacgggtaacaacttccagttcagctacgagtttgagaacgtacctttccatagcagctacgctcacagccaaagcctggaccgactaatgaatccactcatcgaccaatacttgtactatctctcaaagactattaacggttctggacagaatcaacaaacgctaaaattcagtgtggccggacccagcaacatggctgtccagggaagaaactacatacctggacccagctaccgacaacaacgtgtctcaaccactgtgactcaaaacaacaacagcgaatttgcttggcctggagcttcttcttgggctctcaatggacgtaatagcttgatgaatcctggacctgctatggccagccacaaagaaggagaggaccgtttctttcctttgtctggatctttaatttttggcaaacaaggaactggaagagacaacgtggatgcggacaaagtcatgataaccaacgaagaagaaattaaaactactaacccggtagcaacggagtcctatggacaagtggccacaaaccaccagagtgcccaagcacaggcgcagaccggctgggttcaaaaccaaggaatacttccgggtatggtttggcaggacagagatgtgtacctgcaaggacccatttgggccaaaattcctcacacggacggcaactttcacccttctccgctgatgggagggtttggaatgaagcacccgcctcctcagatcctcatcaaaaacacacctgtacctgcggatcctccaacggccttcaacaaggacaagctgaactctttcatcacccagtattctactggccaagtcagcgtggagatcgagtgggagctgcagaaggaaaacagcaagcgctggaacccggagatccagtacacttccaactattacaagtctaataatgttgaatttgctgttaatactgaaggtgtatatagtgaaccccgccccattggcaccagatacctgactcgtaatctg

SEQ ID NO: 634 - DNA, 2208 bp, Artificial Sequence; identical to SEQ ID NO: 633
  source: /note="Description of Artificial Sequence: Synthetic polynucleotide"

SEQ ID NO: 635 - DNA, 2208 bp, Artificial Sequence
  source: /note="Description of Artificial Sequence: Synthetic polynucleotide"
atggctgccgatggttatcttccagattggctcgaggacaaccttagtgaaggaattcgcgagtggtgggctttgaaacctggagcccctcaacccaaggcaaatcaacaacatcaagacaacgctcgaggtcttgtgcttccgggttacaaataccttggacccggcaacggactcgacaagggggagccggtcaacgcagcagacgcggcggccctcgagcacgacaaggcctacgaccagcagctcaaggccggagacaacccgtacctcaagtgcaaccacgccgacgccgagttccaggagcggctcaaagaagatacgtcttttgggggcaacctcgggcgagcagtcttccaggccaaaaagaggcttcttgaacctcttggtctggttgaggaagcggctaagacggctcctggaaagaagaggcctgtagagcagtctcctcaggaaccggactcctccgcgggtattggcaaatcgggtgcacagcccgctaaaaagagactcaatttcggtcagactggcgacacagagtcagtcccagaccctcaaccaatcggagaacctcccgcagccccctcaggtgtgggatctcttacaatggcttcaggtggtggcgcaccagtggcagacaataacgaaggtgccgatggagtgggtagttcctcgggaaattggcattgcgattcccaatggctgggggacagagtcatcaccaccagcacccgaacctgggccctgcccacctacaacaatcacctctacaagcaaatctccaacagcacatctggaggatcttcaaatgacaacgcctacctcgactacagcaccccctgggggtattttgacttcaacagattccactgccacttctcaccacgtgactggcagcggctcatcaacaacaactggggattccggcctaagcgactcaacttcaagctcttcaacattcaggtcaaagaggttacggacaacaatggagtcaagaccatcgccaataaccttaccagcacggtccaggtcttcacggactcagactatcagctcccgtacgtgctcgggtcggctcacgagggctgcctcccgccgttcccagcggacgttttcatgattcctcagtacgggtatctgacgcttaatgatggaagccaggccgtgggtcgttcgtccttttactgcctggaatatttcccgtcgcaaatgctaagaacgggtaacaacttccagttcagctacgagtttgagaacgtacctttccatagcagctacgctcacagccaaagcctggaccgactaatgaatccactcatcgaccaatacttgtactatctctcaaagactattaacggttctggacagaatcaacaaacgctaaaattcagtgtggccggacccagcaacatggctgtccagggaagaaactacatacctggacccagctaccgacaacaacgtgtctcaaccactgtgactcaaaacaacaacagcgaatttgcttggcctggagcttcttcttgggctctcaatggacgtaatagcttgatgaatcctggacctgctatggccagccacaaagaaggagaggaccgtttctttcctttgtctggatctttaatttttggcaaacaaggaactggaagagacaacgtggatgcggacaaagtcatgataaccaacgaagaagaaattaaaactactaacccggtagcaacggagtcctatggacaagtggccacaaaccaccagagtgcccaagcacaggcgcagaccggctgggttcaaaaccaaggaatacttccgggtatggtttggcagggcagagatgtgtacctgcaaggacccatttgggccaaaattcctcacacggacggcaactttcacccttctccgctgatgggagggtttggaatgaagcacccgcctcctcagatcctcatcaaaaacacacctgtacctgcggatcctccaacggccttcaacaaggacaagctgaactctttcatcacccagtattctactggccaagtcagcgtggagatcgagtgggagctgcagaaggaaaacagcaagcgctggaacccggagatccagtacacttccaactattacaagtctaataatgttgaatttgctgttaatactgaaggtgtatatagtgaaccccgccccattggcaccagatacctgactcgtaatctg

SEQ ID NO: 636 - DNA, 2208 bp, Artificial Sequence; identical to SEQ ID NO: 633
  source: /note="Description of Artificial Sequence: Synthetic polynucleotide"

SEQ ID NO: 637 - DNA, 2208 bp, Artificial Sequence
  source: /note="Description of Artificial Sequence: Synthetic polynucleotide"
atggctgccgatggttatcctccagattggctcgaggacaaccttagtgaaggaattcgcgagtggtgggctttgaaacctggagcccctcaacccaaggcaaatcaacaacatcaagacaacgctcgaggtcttgtgcttccgggttacaaataccttggacccggcaacggactcgacaagggggagccggtcaacgcagcagacgcggcggccctcgagcacgacaaggcctacgaccagcagctcaaggccggggacaacccgcacctcaagtacaaccacgccgacgccgagttccaggagcggctcaaagaagatacgtcttttgggggcaacctcgggcgagcagtcttccaggccaaaaagaggcttcttgaacctcttggtctggttgaggaagcggctaagacggctcctggaaagaagaggcccgtagagcagtctcctcaggaaccggactcctccgcgggtattggcaaatcgggtgcacagcccgctaagaagagactcaatttcggtcagactggcgacactgagtcagtcccagaccctcaaccaatcggagaacctcccgcagccccctcaggtgtgggatctcttacaatggcttcaggtggtggcgcaccagtggcagacaataacgaaggtgccgatggagtgggtagttcctcgggaaattggcattgcgattcccaatggctgggggacagagtcatcaccaccagcacccgaacctgggccctgcccacctacaacaatcacctctacaagcaaatctccaacagcacatctggaggatcttcaaatgacaacgcctacttcggctacagcaccccctgggggtattttgacttcaacagattccactgccacttctcaccacgtgactggcagcgactcatcaacaacaactggggattccggcctaagcgactcaacttcaagctcttcaacattcaggtcaaagaggttacggacaacaatggagtcaagaccatcgccaataaccttaccagcacggtccaggtcttcacggactcagactatcagctcccgtacgtgctcgggtcggctcacgagggctgcctcccgccgttcccagcggacgttttcatgattcctcagtacgggtatctgacgcttaatgatggaagccaggccgtgggtcgttcgtccttttactgcctggaatatttcccgtcgcaaatgctaagaacgggtaacaacttccagttcagctacgagtttgagaacgtacctttccatagcagctacgctcacagccaaagcctggaccgactaatgaatccactcatcgaccaatacttgtactatctctcaaagactattaacggttctggacagaatcaacaaacgctaaaattcagtgtggccggacccagcaacatggctgtccagggaagaaactacatacctggacccagctaccgacaacaacgtgtctcaaccactgtgactcaaaacaacaacagcgaatttgcttggcctggagcttcttcttgggctctcaatggacgtaatagcttgatgaatcctggacctgctatggccagccacaaagaaggagaggaccgtttctttcctttgtctggatctttaatttttggcaaacaaggaactggaagagacaacgtggatgcggacaaagtcatgataaccaacgaagaagaaattaaaactactaacccggtagcaacggagtcctatggacaagtggccacaaaccaccagagtgcccaagcacaggcgcagaccggctgggttcaaaaccaaggaatacttccgggtatggtttggcaggacagagatgtgtacctgcaaggacccatttgggccaaaattcctcacacggacggcaactttcacccttctccgctgatgggagggtttggagtgaagcacccgcctcctcagatcctcatcaaaaacacacctgtacctgcggatcctccaacggccttcaacaaggacaggctgaactctttcatcacccagtattctactggccaagtcagcgtggagatcgagtgggagctgcagaaggaaaacagcaagcgctggaacccggagatccagtacacttccaactattacaagtctaataatgttgaatttgctgttaatactgaaggtgtatatagtgaaccccgccccattggcaccagatacctgactcgtaatctg

SEQ ID NO: 638 - DNA, 2208 bp, Artificial Sequence
  source: /note="Description of Artificial Sequence: Synthetic polynucleotide"
atggctgccgatggttatcttccagattggctcgaggacaaccttagtgaaggaattcgcgagtggtgggctttgaaacctggagcccctcaacccaaggcaaatcaacaacatcaagacaacgctcgaggtcttgtgcttccgggttacaaataccttggacccggcaacggactcgacaagggggagccggtcaacgcagcagacgcggcggccctcgagcacgacaaggcctacgaccagcagctcaaggccggagacaacccgtacctcaagtacaaccacgccgacgccgagttccaggagcggctcaaagaagatacgtcttttgggggcaacctcgggcgagcagtcttccaggccaaaaagaggcttcttgaacctcttggtctggttgaggaagcggctaagacggctcctggaaagaagaggcctgtagagcagtctcctcaggaaccggactcctccgcgggtattggcaaatcgggtgcacagcccgctaaaaagagactcaatttcggtcagactggcgacacagagtcagtcccagaccctcaaccaatcggagaacctcccgcagccccctcaggtgtgggatctcttacaatggcttcaggtggtggcgcaccagtggcggacaataacgaaggtgccgatggagtgggtagttcctcgggaaattggcattgcgattcccaatggctgggggacagagtcatcaccaccagcacccgaacctgggccctgcccacctacaacaatcacctctacaagcaaatctccaacagcacatctggaggatcttcaaatgacaacgcctacttcggctacagcaccccctgggggtattttgacttcaacagattccactgccacttctcaccacgtgactggcagcgactcatcaacaacaactggggattccggcctaagcgactcaacttcaagctcttcaacattcaggtcaaagaggttacggacaacaatggagtcaagaccatcgccaataaccttaccagcacggtccaggtcttcacggactcagactatcagctcccgtacgtgctcgggtcggctcacgagggctgcctcccgccgttcccagcggacgttttcatgattcctcagtacgggtatctgacgcttaatgatggaagccaggccgtgggtcgttcgtccttttactgcctggaatatttcccgtcgcaaatgctaagaacgggtaacaacttccagttcagctacgagtttgagaacgtacctttccatagcagctacgctcacagccaaagcctggaccgactaatgaatccactcatcgaccaatacttgtactatctctcaaagactattaacggttctggacagaatcaacaaacgctaaaattcagtgtggccggacccagcaacatggctgtccagggaagaaactacatacctggacccagctaccgacaacaacgtgtctcaaccactgtgactcaaaacaacaacagcgaatttgcttggcctggagcttcttcttgggctctcaatggacgtaatagtttgatgaatcctggacctgctatggccagccacaaagaaggagaggaccgtttctttcctttgtctggatctttaatttttggcaaacaaggaactggaagagacaacgtggatgcggacaaagtcatgataaccaacgaagaagaaattaaaactactaacccggtagcaacggagtcctatggacaagtggccacaaaccaccagagtgcccaagcacaggcgcagaccggctgggttcaaaaccaaggaatacttccgggtatggtttggcaggacagagatgtgtacctgcaaggacccatttgggccaaaattcctcacacggacggcaactttcacccttctccgctgatgggagggtttggagtgaagcacccgcctcctcagatcctcatcaaaaacacacctgtacctgcggatcctccaacggccttcaacaaggacaagctgaactctttcatcacccagtattctactggccaagtcagcgtggagatcgagtgggagctgcagaaggaaaacagcaagcgctggaacccggagatccagtacacttccaactattacaagtctaataatgttgaatttgctgttaatactgaaggtgtatatagtgaaccccgccccattggcaccagatacctgactcgtaatctg

SEQ ID NO: 639 - DNA, 2208 bp, Artificial Sequence
  source: /note="Description of Artificial Sequence: Synthetic polynucleotide"
atggctgccgatggttatcttccagattggctcgaggacaaccttagtgaaggaattcgcgagtggtgggctttgaaacctggagcccctcaacccaaggcaaatcaacaacatcaagacaacgctcgaggtcttgtgcttccgggttacaaataccttggacccggcaacggactcgacaagggggagccggtcaacgcagcagacgcggcggccctcgagcacgacaaggcctacgaccagcagctcaaggccggagacaacccgtacctcaagtacaaccacgccgacgccgagttccaggagcggctcaaagaagatacgtcttttgggggcaacctcgggcgagcagtcttccaggccaaaaagaggcttcttgaacctcttggtctggttgaggaagcggctaagacggctcctggaaagaagaggcctgtagagcagtctcctcaggaaccggactcctccgcgggtattggcaaatcgggtgcacagcccgctaaaaagagactcaatttcggtcagactggcgacacagagtcagtcccagaccctcaaccaatcggagaacctcccgcagccccctcaggtgtgggatctcttacaatggcttcaggtggtggcgcaccagtggcagacaataacgaaggtgccgatggagtgggtagttcctcgggaaattggcattgcgattcccaatggctgggggacagagtcatcaccaccagcacccgaacctgggccctgcccacttacaacaatcacctctacaagcaaatctccaacagcacatctggaggatcttcaaatgacaacgcctacttcggctacagcaccccctgggggtattttgacttcaacagattccactgccacttctcaccacgtgactggcagcgactcaccaacaacaactggggattccggcctaagcgactcaacttcaagctcttcaacattcaggtcaaagaggttacggacaacaatggagtcaagaccatcgccaataaccttaccagcacggtccaggtcttcacggactcagactatcagctcccgtacgtgctcgggtcggctcacgagggctgcctcccgccgttcccagcggacgttttcatgattcctcagtacgggtatctgacgcttaatgatggaagccaggccgtgggtcgttcgtccttttactgcctggaatatatcccgtcgcaaatgctaagaacgggtaacaacttccagttcagctacgagtttgagaacgtacctttccatagcagctacgctcacagccaaagcctggaccgactaatgaatccactcatcgaccaatacttgtactatctctcaaagactattaacggttctggacagaatcaacaaacgctaaaattcagtgtggccggacccagcaacatggctgtccagggaagaaactacatacctggacccagctaccgacaacaacgtgtctcaaccactgtgactcaaaacaacaacagcgaatttgcttggcctggagcttcttcttgggctctcaatggacgtaatagcttgatgaatcctggacctgctatggccagccacaaagaaggagaggaccgtttctttcctttgtctggatctttaatttttggcaaacaaggaactggaagagacaacgtggatgcggacaaagtcatgataaccaacgaagaagaaattaaaactactaacccggtagcaacggagtcctatggacaagtggccacaaaccaccagagtgcccaagcacaggcgcagaccggctgggttcaaaaccaaggaatacttccgggtatggtttggcaggacagagatgtgtacctgcaaggacccatttgggccaaaattcctcacacggacggcaactttcacccttctccgctgatgggagggtttggagtgaagcacccgcctcctcagatcctcatcaaaaacacacctgtacctgcggatcctccaacggccttcaacaaggacaagctgaactctttcatcacccagtattctactggccaagtcagcgtggagatcgagtgggagctgcagaaggaaaacagcaagcgctggaacccggagatccagtacacttccaactattacaagtctaataatgttgaatttgctgttaatactgaaggtgtatatagtgaaccccgccccattggcaccagatacctgactcgtaatctg

SEQ ID NO: 640 - DNA, 2208 bp, Artificial Sequence
  source: /note="Description of Artificial Sequence: Synthetic polynucleotide"
atggctgccgatggttatcttccagattggctcgaggacaaccttagtgaaggaattcgcgagtggtgggctttgaaacctggagcccctcaacccaaggcaaatcaacaacatcaagacaacgctcgaggtcttgtgcttccgggttacaaataccttggacccggcaacggactcgacaagggggagccggtcaacgcagcagacgcggcggccctcgagcacgacaaggcctacgaccagcagctcaaggccggagacaacccgtacctcaagtacaaccacgccgacgccgagttccaggagcggctcaaagaagatacgtcttttgggggcaacctcgggcgagcagtcttccaggccaaaaagaggcttcttgaacctcttggtctggttgaggaagcggctaagacggctcctggaaagaagaggcctgtagagcagtctcctcaggaaccggactcctccgcgggtattggcaaatcgggtgcacagcccgctaaaaagagactcaatttcggtcagactggcgacacagagtcagtcccagaccctcaaccaatcggagaacctcccgcagccccctcaggtgtgggatctcttacaatggcttcaggtggtggcgcaccagtggcagacaataacgaaggtgccgatggagtgggtagttcctcgggaaattggcattgcgattcccaatggctgggggacagagtcatcaccaccagcacccgaacctgggccctgcccacctacaacaatcacctctacaagcaaatctccaacagcacatctggaggatcttcaaatgacaacgcctacttcggctacagcaccccctgggggtattttgacttcaacagattccactgccacttctcaccacgtgactggcagcgactcatcaacaacaactggggattccggcctaagcgactcaacttcaagctcttcaacattcaggtcaaagaggttacggacaacaatggagtcaagaccatcgccaataaccttaccagcacggtccaggtcttcacggactcagactatcagctcccgtacgtgctcgggtcggctcacgagggctgcctcccgccgttcccagcggacgttttcatgattcctcagtacgggtatctgacgcttaatgatggaagccaggccgtgggtcgttcgtccttttactgcctggaatatttcccgtcgcaaatgctaagaacgggtaacaacttccagtttagctacgagtttgagaacgtacctttccatagcagctacgctcacagccaaagcctggaccgactaatgaatccactcatcgaccaatacttgtactatctctcaaagactattaacggttctggacagaatcaacaaacgctaaaattcagtgtggccggacccagcaacatggctgtccagggaagaaactacatacctggacccagctaccgacaacaacgtgtctcaaccactgtgactcaaaacaacaacagcgaatttgcttggcctggagcttcttcttgggctctcaatggacgtaatagcttgatgaatcctggacctgctatggccagccacaaagaaggagaggaccgtttctttcctttgtctggatctttaatttctggcaaacaaggaactggaagagacaacgtggatgcgaacaaagtcatgataaccaacgaagaagaaattaaaactactaacccggtagcaacggagtcctatggacaagtggccacaaaccaccagagtgcccaagcacaggcgcagaccggctgggttcaaaaccaaggaatacttccgggtatggtttggcaggacagagatgtgtacctgcaaggacccatttgggccaaaattcctcacacggacggcaactttcacccttctccgctgatgggagggtttgaaatgaagcacccgcctcctcagatcctcatcaaaaacacacctgtacctgcggatcctccaacggccttcaacaaggacaagctgaactctttcatcacccagtattctactggccaagtcagcgtggagatcgagtgggagctgcagaaggaaaacagcaagcgctggaacccggagatccagtacacttccaactattacaagtctaataatgttgaatttgctgttaatactgaaggtgtatatagtgaaccccgccccattggcaccagatacctgactcgtaatctg

SEQ ID NO: 641 - DNA, 2208 bp, Artificial Sequence
  source: /note="Description of Artificial Sequence: Synthetic polynucleotide"
atggctgccgatggttatcttccagattggctcgaggacaaccttagtgaaggaattcgcgagtggtgggctttgaaacctggagcccctcaacccaaggcaaatcaacaacatcaagacaacgctcgaggtcttgtgcttccgggttacaaataccttggacccggcaacggactcgacaagggggagccggtcaacgcagcagacgcggcggccctcgagcacgacaaggcctacgaccagcagctcaaggccggagacaacccgtacctcaagtacaaccacgccgacgccgagttccaggagcggctcaaagaagatacgtcttttgggggcaacctcgggcgagcagtcttccaggccaaaaagaggcttcttgaacctcttggtctggttgaggaagcggctaagacggctcctggaaagaagaggcctgtagagcagtctcctcaggaaccggactcctccgcgggtattggcaaatcgggtgcacagcccgctaaaaagagactcaatttcggtcagactggcgacacagagtcagtcccagaccctcaaccaatcggagaacctcccgcagccccctcaggtgtgggatctcttacaatagcttcaggtggtggcgcaccagtggcagacaataacgaaggtgccgatggagtgggtagttcctcgggaaattggcattgcgattcccaatggctgggggacagagtcatcaccaccagcacccgaacctgggccctgcccacctacaacaatcacctctacaagcgaatctccaacagcacatctggaggatcttcaaatgacaacgcctacttcggctacagcaccccctgggggtattttgacttcaacagattccactgccacttctcaccacgtgactggcagcgactcatcaacaacaactggggattccggcctaagcgactcaacttcaagcttttcaacattcgggtcaaagaggttacggacaacaatggagtcaagaccatcaccaataaccttaccagcacggtccaggtcttcacggactcagactatcagctcccgtacgtgcttgggtcggctcacgagggctgcctcccgccgttcccagcggacgttttcatgattcctcagtacgggtatctgacgcttaatgatggaagccaggccgtgggtcgttcgtccttttactgcctggaatatttcccgtcgcaaatgctaagaacgggtaacaacttccagttcagctacgagtttgagaacgtacctttccatagcagctacgctcacagccaaagcctggaccgactaatgaatccactcatcgaccaatacttgtactatctctcaaagactattaacggttctggacagaatcaacaaacgctaaaattcagtgtggccggacccagcaacatggctgtccagggaagaaactacatacctggacccagctaccgacaacaacgtgtctcaaccactgtgactcgaaacaacaacagcgaatttgcttggcctggagcttcttcttgggctctcaatggacgtaatagcttgatgaatcctggacctgctatggccagccacaaagaaggagaggaccgtttctttcctttgtctggatctttaatttttggcaaacaaggaactggaagagacaacgtggatgcggacaaagtcatgataaccaacgaagaagaaattaaaactactaacccggtagcaacggagtcctatggacaagtggccacaaaccaccagagtgcccaagcacaggcgcagaccggctgggttcaaaaccaaggaatacttccgggtatggtttggcaggacagagatgtgtacctgcaaggacccatttgggccaaaattcctcacacggacggcaactttcacccttctccgctgatgggagggtttggagtgaagcacccgcctcctcagatcctcatcaaaaacacacctgtacctgcggatcctccaacggccttcaacaaggacaagctgaactctttcatcacccagtattctactggccaagtcagcgtggagatcgagtgggagctgcagaaggaaaacagcaagcgctggaacccggagatccagtacacttccaactattacaagtctaataatgttgaatttgctgttaatactgaaggtgtatatagtgaaccccgccccattggcaccagatacctgactcgtaatctg

SEQ ID NO: 642 - DNA, 2208 bp, Artificial Sequence
  source: /note="Description of Artificial Sequence: Synthetic polynucleotide"
atggctgccgatggttatcttccagattggctcgaggacaaccttagtgaaggaattcgcgagtggtgggctttgaaacctggagcccctcaacccaaggcaaatcaacaacatcaagacaacgctcgaggtcttgtgcttccgggttacaaataccttggacccggcaacggactcgacaagggggagccggtcaacgcagcagacgcggcggccctcgagcacgacaaggcctacgaccagcagctcaaggccggagacaacccgtacctcaagtacaaccacgccgacgccgagttccaggagcggctcaaagaagatacgtcttttgggggcaacctcgggcgagcagtcttccaggccaaaaagaggcttcttgaacctcttggtctggttgaggaagcggctaagacggctcctggaaagaagaggcctgtagagcagtctcctcaggaaccggactcctccgcgggtattggcaaatcgggcgcacagcccgctaaaaagagactcaatttcggtcagactggcgacacagagccagtcccagaccctcaaccaatcggagaacctcccgcagccccctcaggtgtgggatctcttacaatggcttcaggtggtggcgcaccagtggcagacaataacgaaggtgccgatggagtgggtagttcctcgggaaattggcattgcgattcccaatggctgggggacagagtcatcaccaccagcacccgaacctgggccctgcccacctacaacaatcacctctacaagcaaatctccaacagcacatctggaggatcttcaaatgacaacgcctacttcggctacagcaccccctgggggtattttgacttcaacagattccactgccacttctcaccacgtgactggcagcgactcatcaacaacaactggggattccggcctaagcgactcaacttcaagctcttcaacattcaggtcaaagaggttacggacaacaatggagtcaagaccatcgccaataaccttaccagcacggtccaggtcttcacggactcagactatcagctcccgtacgtgctcgggtcggctcacgagggctgcctcccgccgttcccagcgggcgttttcatgattcctcagtacgggtatctgacgcttaatgatggaagccaggccgtgggtcgttcgtccttttactgcctggaatatttcccgtcgcaaatgctaagaacgggtaacaacttccagttcagctacgagtttgagaacgtacctttccatagcagctacgctcacagccaaagcctggaccgactaatgaatccactcatcgaccaatacttgtactatctctcaaagactattaacggttctggacagaatcaacaaacgctaaaattcagtgtggccggacccagcaacatggctgtccagggaagaaactacatacctggacccagctaccgacaacaacgtgtctcaaccactgcgactcaaaacaacaacagcgaatttgcttggcctggagcttcttcttgggctctcaatggacgtaatagcttgatgaatcctggacctgctatggccagccacaaagaaggagaggaccgtttctttcctttgtctggatctttaatttttggcaaacaaggaactggaagagacaacgtggatgcggacaaagtcatgataaccaacgaagaagaaattaaaactactaacccggtagcaacggagtcctatggacaagtggccacaaaccaccagagtgcccaagcacaggcgcagaccggctgggttcaaaaccaaggaatacttccgggtatggtttggcaggacagagatgtgtacctgcaaggacccatttgggccaaaattcctcacacggacggcaactttcacccttctccgctgatgggagggtttggaatgaagcacccgcctcctcagatcctcatcaaaaacacacctgtacctgcggatcctccaacggccttcaacaaggacaagctgaactctttcatcacccagtattctactggccaagtcagcgtggagatcgagtgggagctgcagaaggaaaacagcaagcgctggaacccggagatccagtacacttccaactattacaagtctaataatgttgaatttgctgttaatactgaaggtgtatatagtgaaccccgccccattggcaccagatacctgactcgtaatctg

SEQ ID NO: 643 - DNA, 2208 bp, Artificial Sequence
  source: /note="Description of Artificial Sequence: Synthetic polynucleotide"
atggctgccgatggttatcttccagattggctcgaggacaaccttagtgaaggaattcgcgagtggtgggctttgaaacctggagcccctcaacccaaggcaaatcaacaacatcaagacaacgctcgaggtcttgtgcttccgggttacaaataccttggacccggcaacggactcgacaagggggagccggtcaacgcagcagacgcggcggccctcgagcacgacaaggcctacgaccagcagctcaaggccggagacaacccgtacctcaagtacaaccacgccgacgccgggttccaggagcggctcaaagaagatacgtcttttgggggcaacctcgggcgagcagtcttccaggccaaaaagaggcttcttgaacctcttggtctggttgaggaagcggctaagacggctcctggaaagaagaggcctgtagagcagtctcctcaggaaccggactcctccgcgggtattggcaaatcgggtgcacagcccgctaaaaagagactcaatttcggtcagactggcgacacagagtcagtcccagtccctcaaccaatcggagaacctcccgcagccccctcaggtgtgggatctcttacaatggcttcaggtggtggcgcaccagtggcagacaataacgaaggtgccgatggagtgggtagttcctcgggaaattggcattgcgattcccaatggctgggggacagagtcatcaccaccagcacccgaacctgggccctgcccacctacaacaatcacctctacaagcaaatctccaacagcacatctggaggatcttcaaatgacaacgcctacttcggctacagcaccccctgggggtattttgacttcaacagattccactgccacttctcaccacgtgactggcagcgactcatcaacaacaactggggattccggcctaagcgactcaacttcaagctcttcaacattcaggtcaaagaggttacggacaacaatggagtcaagaccatcgccaataaccttaccagcacggtccaggtcttcacggactcagactatcagctcccgtacgtgctcgggtcggctcacgagggctgcctcccgccgttcccagcggacgttttcatgattcctcagtacgggtatctgacgcttaatgatggaagccaggccgtgggtcgttcgtccttttactgcctggaatatttcccgtcgcaaatgctaagaacgggtaacaacttccagttcagctacgagtttgagaacgtacctttccatagcagctacgctcacagccaaagcctggaccgactaatgaatccactcatcgaccaatacttgtactatctctcaaagactattaacggttctggacagaatcaacaaacgctaaaattcagtgtggccggacccagcaacatggctgtccagggaagaaactacatacctggacccagctaccgacaacaacgtgtctcaaccactgtgactcaaaacaacaacagcgaatttgcttggcctggagcttcttcttgggctctcaatggacgtaatagcttgatgaatcctggacctgctatggccagccacaaagaaggagaggaccgtttctttcctttgtctggatctttaatttttggcaaacaaggagctggaagagacaacgtggatgcggacaaagtcatgataaccaacgaagaagaaattaaaactactaacccggtagcaacggagtcctatggacaagtggccacaaaccaccagagtgcccaagcacaggcgcagaccggctgggttcaaaaccaaggaatacttccgggtatggtttggcaggacagagatgtgtacctgcaaggacccatttgggccaaaattcctcacacggacggcaactttcacccttctccgctgatgggagggtttggaatgaagcacccgcctcctcagatcctcatcaaaaacacacctgtacctgcggatcctccaacggccttcaacaaggacaagctgaactctttcatcacccagtattctactggccaagtcagcgtggagatcgagtgggagctgcagaaggaaaacagcaagcgctggaacccggagatccagtacacttccaactattacaagtctaataatgttgaatttgctgttaatactgaaggtgtatatagtgaaccccgccccattggcaccagatacctgactcgtaatctg

SEQ ID NO: 644 - DNA, 2208 bp, Artificial Sequence
  source: /note="Description of Artificial Sequence: Synthetic polynucleotide"
  modified_base (377)..(377): a, c, t, or g
atggctgccgatggttatcttccagattggctcgaggacaaccttagtgaaggaattcgcgagaggtgggctttgaaacctggagcccctcaacccaaggcaaatcaacaacatcaagacaacgctcgaggtcttgtgcttccgggttacaaataccttggacccggcaacggactcgacaagggggagccggtcaacgcagcagacgcggcggccctcgagcacgacaaggcctacgaccagcagctcaaggccggagacaacccgtacctcaagtacaaccacgccgacgccgagttccaggagcggctcaaagaagatacgtcttttgggggcaacctcgggcgagcagtcttccaggccaaaaagaggcttcntgaacctcttggtctggttgaggaagcggctaagacggctcctggaaagaagaggcctgtagagcagtctcctcaggaaccggactcctccgcgggtattggcaaatcgggtgcacagcccgctaaaaagagactcaatttcggtcagactggcgacacagagtcagtcccagaccctcaaccaatcggagaacctcccgcagccccctcaggtgtgggatctcttacaatggcttcaggtggtggcgcaccagtggcagacaataacgaaggtgccgatggagtgggtagttcctcggggaattggcattgcgattcccaatggctgggggacagagtcatcaccaccagcacccgaacctgggccctgcccacctacaacaatcacctctacaagcaaatctccaacagcacatctggaggatcttcaaatgacaacgcctacttcggctacagcaccccctgggggtattttgacttcaacagattccactgccacttctcaccacgtgactggcagcgactcatcaacaacaactggggattccggcctaagcgactcaacttcaagctcttcaacattcaggtcaaagaggttacggacaacaatggagtcaagaccatcgccaataaccttaccagcacggtccaggtcttcacggactcagactatcagctcccgtacgtgctcgggtcggctcacgagggctgcctcccgccgttcccagcggacgttttcatgattcctcagtacgggtatctgacgcttaatgatggaagccaggccgtgggtcgttcgtccttttactgcctggaatatttcccgtcgcaaatgctaagaacgggtaacaacttccagttcagctacgagtttgagaacgtacctttccatagcagctacgctcacagccaaagcccggaccgactaatgaatccactcatcgaccaatacttgtactatctctcaaagactattaacggttctggacagaatcaacaaacgctaaaattcagtgtggccggacccagcaacatggctgtccagggaagaaactacatacctggacccagctaccgacaacaacgtgtctcaaccactgtgactcaaaacaacaacagcgaatttgcttggcctggagcttcttcttgggctctcaatggacgtaatagcttgatgaatcctggacctgctatggccagccacaaagaaggagaggaccgtttctttcctttgtctggatctttaatttttggcaaacaaggaactggaagagacaacgtggatgcggacaaagtcatgataaccaacgaagaagaaattaaaactactaacccggtagcaacggagtcctatggacaagtggccacaaaccaccagagtgcccaagcacaggcgcagaccggctgggttcaaaaccaaggaatacttccgggtatggtttggcaggacagagatgtgtacctgcaaggacccatttgggccaaaattcctcacacggacggcaactttcacccttctccgctgatgggagggtttggagtgaagcacccgcctcctcagatcctcatcaaaaacacacctgtacctgcggatcctccaacggccttcaacaaggacaagctgaactctttcatcacccagtattctactggccaagtcagcgtggagatcgagtgggagctgcagaaggaaaacagcaagcgctggaacccggagatccagtacacttccaactattacaagtctaataatgttgaatttgctgttaatactgaaggtgtatatagtgaaccccgccccattggcaccagatacctgactcgtaatctg

SEQ ID NO: 645 - DNA, 2208 bp, Artificial Sequence
  source: /note="Description of Artificial Sequence: Synthetic polynucleotide"
atggctgccgatggttatcttccagattggctcgaggacaaccttagtgaaggaattcgcgagtggtgggctttgaaacctggagcccctcaacccaaggcaaatcaacaacatcaagacaacgctcgaggtcttgtgcttccgggttacaaataccttggacccggcaacggactcgacaagggggagccggtcaacgcagcagacgcggcggccctcgagcacgacaaggcctacgaccagcagctcaaggccggagacaacccgtacctcaagtacaaccacgccgacgccgagttccaggagcggctcaaagaagatacgtcttttgggggcaacctcgggcgagcagtcttccaggccaaaaagaggcttcttgaacctcttggtctggttgaggaagcggctaagacggctcctggaaagaagaggcctgtagagcagtctcctcaggaaccggactcctccgcgggtattggcaaatcgggtgcacagcccgctaaaaagagactcaatttcggtcagactggcgacacagagtcagtcccagaccctcaaccaatcggagaacctcccgcagccccctcaggtgtgggatctcttacaatggcttcaggtggtggcgcaccagtggcagacaataacgaaggtgccgatggagtgggtagttcctcgggaaattggcattgcgattcccaatggctgggggacagagtcatcaccaccagcacccgaacctgggccctgcccacctacaacaatcacctctacaagcaaatctccaacagcacatctggaggatcttcaaatgacaacgcctacctcggctacagcaccccctgggggtattttgacttcaacagattccactgccacttctcaccacgtgactggcagcgactcatcaacaacaactggggattccggcctaagcgactcaacttcaagctcttcaacattcaggtcaaagaggttacggacaacaatggagtcaagaccatcgccaataaccttaccagcacggtccaggtcttcacggactcagactatcagctcccgtacgtgctcgggtcggctcacgagggctgcctcccgccgttcccagcggacgttttcatgattcctcagtacgggtatctgacgcttaatgatggaagccaggccgtgggtcgttcgtccttttactgcctggaatatttcccgtcgcaaatgctaagaacgggtaacaacttccagttcagctacgagtttgagaacgtacctttccatagcagctacgctcacagccaaagcctggaccgactaatgaatccactcatcgaccaatacttgtactatctctcaaagactattaacggttctggacagaatcaacaaacgctaaaattcagtgtggccggacccagcaacatggctgtccagggaagaaactacatacctggacccagctaccgacaacaacgtgtctcaaccactgtgactcaaaacaacaacagcgaatttgcttggcctggagcttcttcttgggctctcaatggacgtaatagcttgatgaatcctggacctgctatggccagccacaaagaaggagaggaccgtttctttcctttgtctggatctttaatttttggcaaacaaggaactggaagagacaacgtggatgcggacaaagtcatgataaccaacgaagaagaaattaaaactactaacccggtagcaacggagtcctatggacaagtggccacaaaccaccagagtgcccaagcacaggcgcagaccggctgggttcaaaaccaaggaatacttccgggtatggtttggcaggacagagatgtgtacctgcaaggacccatttgggccaaaattcctcacacggacggcaactttcacccttctccgctgatgggagggtttggaatgaagcacccgcctcctcagatcctcatcaaaaacacacctgtacctgcggatcctccaacggccttcaacaaggacaagctgaactctttcatcacccagtattctactggccaagtcagcgtggagatcgagtgggagctgcagaaggaaaacagcaagcgctggaacccggagatccagtacacttccaactattacaagtctaataatgttgaatttgctgttaatactgaaggtgtatatagtgaaccccgccccattggcaccagatacctgactcgtaatctg

SEQ ID NO: 646 - DNA, 2208 bp, Artificial Sequence
  source: /note="Description of Artificial Sequence: Synthetic polynucleotide"
atggctgccgatggttatcttccagattggctcgaggacaaccttagtgaaggaattcgcgagtggtgggctttgaaacctggagcccctcaacccaaggcaaatcaacaacatcaagacaacgctcgaggtcttgtgcttccgggttacaaataccttggacccggcaacggactcgacaagggggagccggtcaacgcagcagacgcggcggccctcgagcacgacaaggcctacgaccagcagctcaaggccggagacaacccgtacctcaagtacaaccacgccgacgccgagttccaggagcggctcaaagaagatacgtcttttgggggcaacctcgggcgagcagtcttccaggccaaaaagaggcttcttgaacctcttggtctggttgaggaagcggctaagacggctcctggaaagaagaggcctgtagagcagtctcctcaggaaccggactcctccgcgggtattggcaaatcgggtgcacagcccgctaaaaagagactcaatttcggtcagactggcgacacagagtcagtcccagaccctcaaccaatcggagaacctcccgcagccccctcaggtgtgggatctcttacaatggcttcaggtggtggcgcaccagtggcagacaataacgaaggtgccgatggagtgggtagttcctcgggaaattggcattgcgattcccaatggctgggggacagagtcatcaccaccagcacccgaacctgggccctgcccacctacaacaatcacctctacaagcaaatctccaacagcacatctggaggatcttcaaatgacaacgcctacttcggctacagcaccccctgggggtattttgacttcaacagattccactgccacttctcaccacgtgactggcagcgactcatcaacaacaactggggattccggcctaagcgactcaacttcaagctcttcaacattcaggtcaaagaggttacggacaacaatggagtcaagaccatcgccaataaccttaccagcacggtccaggtcttcacggactcagactatcagctcccgtacgtgctcgggtcggctcacgagggctgcctcccgccgttcccagcggacgttttcatgattcctcagtacgggtatctgacgcttaatgatggaagccaggccgtgggtcgttcgtccttttactgcctggaatatttcccgtcgcaaatgctaagaacgggtaacaacttccagttcagctacgagtttgagaacgtacctttccatagcagctacgctcacagccagagcctggaccgactaatgaatccactcatcgaccaatacttgtactatctctcaaagactattaacggttctggacagaatcaacaaacgctaaaattcagtgtggccggacccagcaacatggctgtccagggaagaaactacatacctggacccagctaccgacaacaacgtgtctcaaccactgtgactcaaaacaacaacagcgaatttgcttggcctggagcttcttcttgggctctcaatggacgtaatagcttgatgaatcctggacctgctatggccagccacaaagaaggagaggaccgtttctttcctttgtctggatctttaatttttggcaaacaaggaactggaagagacaacgtggatgcggacaaagtcatgataaccaacgaagaagaaattaaaactactaacccggtagcaacggagtcctatggacaagtggccacaaaccaccagagtgcccaagcacaggcgcagaccggctgggttcaaaaccaaggaatacttccgggtatggtttggcaggacagagatgtgtacctgcaaggacccatttgggccaaaattcctcacacggacggcaactttcacccttctccgctgatgggagggtttggaatgaagcacccgcctcctcagatcctcatcaaaaacacacctgtacctgcggatcctccaacggccttcaacaaggacaagctggactctttcatcacccagtattctactggccaagtcagcgtggagatcgagtgggagctgcagaaggaaaacagcaagcgctggaacccggtgatccagtacacttccaactattacaagtctaataatgttgaatttgctgttaatactgaaggtgtatatagtgaaccccgccccattggcaccagatacctgactcgtaatctg

SEQ ID NO: 647 - DNA, 2208 bp, Artificial Sequence
  source: /note="Description of Artificial Sequence: Synthetic polynucleotide"
atggctgccgatggttatcttccagattggctcgaggacaacctctctgagggcattcgcgagtggtgggacttgaaacctggagccccgaagcccaaagccaaccagcaaaagcaggacgacggccggggtctggtgcttcctggctacaagtacctcggacccttcaacggactcgacaagggggagcccgtcaacgcggcggacgcagcggccctcgagcacgacaaggcctacgaccagcagctcaaagcgggtgacaatccgtacctgcggtataaccacgccgacgccgagtttcaggagcgtctgcaagaagatacgtcttttgggggcaacctcgggcgagcagtcttccaggccaagaagcgggttctcgaacctctcggtctggttgaggaaggcgctaagacggctcctggaaagaaacgtccggtagagcagtcgccacaagagccagactcctcctcgggcatcggcaagacaggccagcagcccgctaaaaagagactcaattttggtcagactggcgactcagagtcagtccccgatccacaacctctcggagaacctccagcaacccccgctgctgtggggcctactacaatggcttcaggcggtggcgcaccaatggcagacaataacgaaggcgtcgacggagtgggtaatgcctcaggaaattggcattgcgattccacatggctgggcgacagagtcatcaccaccagcacccgcacctgggccttgcccacctacaataaccacctctacaagcaaatctccagtgcttcaacgggggccagcaacgacaaccactacttcggctacagcaccccctgggggtattttgatttcaacagattccactgccacttttcaccacgtgactggcagcgactcatcaacaacaattggggattccggcccaagagactcaacttcaaactcttcaacatccaagtcaaggaggtcacgacgaatgatggcgttacaaccatcgctaataaccttaccagcacggttcaagtcttctcggactcggagtaccagcttccgtacgtcctcggctctgcgcaccagggctgcctccctccgttcccggcggacgtgttcatgattccgcaatacggctacctgacgctcaacaatggcagccaagccgtgggacgttcatccttttactgcctggaatatttcccttctcagatgctgagaacgggcaacaactttaccttcagctacacctttgaggaagtgcctttccacagcagctacgcgcacagccagagcctggaccggctgatgaatcctctcatcgaccaatacctgtattacctgaacagaactcaaaatcagtccggaagtgcccaaaacaaggacttgctgtttagccgtgggtctccagctggcatgtctgttcagcccaaaaactggctacctggaccctgttatcggcagcagcgcgtttctaaaacaaaaacagacaacaacaacagcaattttacctggactggtgcttcaaaatataacctcaatgggcgtgaatccatcatcaaccctggcactgctatggcctcacacaaagacgacgaagacaagttctttcccatgagcggtgtcatgatttttggaaaagagagcgccggagcttcaaacactgcattggacaatgtcatgattacagacgaagaggaaattaaagccactaaccctgtggccaccgaaagatttgggaccgtggcagtcaatttccagagcagcagcacagaccctgcgaccggagatgtgcatgctatgggagcattacctggcatggtgtggcaagatagagacgtgtacctgcagggtcccatttgggccaaaattcctcacacagatggacactttcacccgtctcctcttatgggcggctttggactcaagaacccgcctcctcagatcctcatcaaaaacacgcctgttcctgcgaatcctccggcggagttttcagccacaaagcttgcttcattcatcacccaatactccacaggacaagtgagtgtggaaattgaatgggagctgcagaaagaaaacagcaagcgctggaatcccgaagtgcagtacacatccaattatgcaaaatctgccaacgttgattttactgtggacaacaatggactttatactgagcctcgccccattggcacccgttaccttacccgtcccctg

SEQ ID NO: 648 - DNA, 2208 bp, Artificial Sequence
  source: /note="Description of Artificial Sequence: Synthetic polynucleotide"
atggctgccgatggttatcttccagattggctcgaggacaacctctctgagggcattcgcgagtggtgggacttgaaacctggagccccgaagcccaaagccaaccagcaaaagcaggacgacggccggggtctggtgcttcctggctacaagtacctcggacccttcaacggactcgacaagggggagcccgtcaacgcggcggacgcagcggccctcgagcacgacaaggcctacgaccagcagctcaaagcgggtgacaatccgtacctgcggtataaccacgccgacgccgagtttcaggagcgtctgcaagaagatacgtcttttgggggcaacctcgggcgagcagtcttccaggccaagaagcgggttctcgaacctctcggtctggttgaggaaggcgctaagacggctcctggaaagagacgtccggtagagcagtcgccacaagagccagactcctcctcgggcatcggcaagacaggccagcagcccgctaaaaagagactcaattttggtcagactggcgactcagagtcagtccccgatccacaacctctcggagaacctccagcaacccccgctgctgtgggacctactacaatggcttcaggcggtggcgcaccaatggcagacaataacgaaggcgccgacggagtgggtaatgcctcaggaaattggcattgcgattccacatggctgggcgacagagtcatcaccaccagcacccgcacctgggccttgcccacctacaataaccacctctacaagcaaatctccagtgcttcaacgggggccagcaacgacaaccactacttcggctacagcaccccctgggggtattttgatttcaacagattccactgccacttttcaccacgtgactggcagcgactcatcaacaacaattggggattccggcccaagagactcaacttcaaactcttcaacatccaagtcaaggaggtcacgacgaatgatggcgtcacaaccatcgctaataaccttaccagcacggttcaagtcttctcggactcggagtaccagcttccgtacgtcctcggctctgcgcaccagggctgcctccctccgttcccggcggacgtgttcatgattccgcaatacggctacctgacgctcaacaatggcagccaagccgtgggacgttcatccttttactgcctggaatatttcccttctcagatgctgagaacgggcaacaactttaccttcagctacacctttgaggaagtgcctttccacagcagctacgcgcacagccagagcctggaccggctgatgaatcctctcatcgaccaatacctgtattacctgaacagaactcaaaatcagtccggaagtgcccaaaacaaggacttgctgtttagccgtgggtctccagctggcatgtctgttcagcccaaaaactggctacctggaccctgttatcggcagcagcgcgtttctaaaacaaaaacagacaacaacaacagcaattttacctggactggtgcttcaaaatataacctcaatgggcgtgaatccatcatcaaccctggcactgctatggcctcacacaaagacgacgaagacaagttctttcccatgagcggtgtcatgatttttggaaaagagagcgccggagcttcaaacactgcattggacaatgtcatgattacagacgaagaggaaattaaagccactaaccctgtggccaccgaaagatttgggaccgtggcagtcaatttccagagcagcagcacagaccctgcgaccggagatgtgcatgctatgggagcattacctggcatggtgtggcaagatagagacgtgtacctgcagggtcccatttgggccaaaattcctcacacagatggacactttcacccgtctcctcttatgggcggctttggactcaagaacccgcctcctcagatcctcatcaaaaacacgcctgttcctgcgaatcctccggcggagttttcagctacaaagtttgcttcgttcatcacccaatactccacaggacaagtgagtgtggaaattgaatgggagctgcagaaagaaaacagcaagcgctggaatcccgaagtgcagtacacatccaattatgcaaaatctgccaacgttgattttactgtggacaacaatggactttatactgagcctcgccccattggcacccgttaccttacccgtcccctg

SEQ ID NO: 649 - DNA, 2208 bp, Artificial Sequence
  source: /note="Description of Artificial Sequence: Synthetic polynucleotide"
atggctgccgatggttatcttccagattggctcgaggacaacctctctgagggcattcgcgagtggtgggacttgaaacctggagccccgaagcccaaagccaaccagcaaaagcaggacgacggccggggtctggtgcttcctggctacaagtacctcggacccttcaacggactcgacaagggggagcccgtcaacgcggcggacgcagcggccctcgagcacgacaaggcctacgaccagcagctcaaagcgggtgacaatccgtacccgcggtataaccacgccgacgccgagtttcaggagcgtctgcaagaagatacgtcttttgggggcaacctcgggcgagcagtcttccaggccaagaagcgggttctcgaacctctcggtctggttggggaaggcgctaagacggctcctggaaagaaacgtccggtagagcagtcgccacaagagccagactcctcctcgggcatcggcaagacaggccagcagcccgctaaaaagagactcaattttggtcagactggcgactcagagtcagtccccgatccacaacctctcggagaacctccagcaacccccgctgctgtgggacctactacaatggcttcaggcggtggcgcaccaatggcagacaataacgaaggcgccgacggagtgggtaatgcctcaggaaattggcattgcgattccacatggctgggcgacagagtcatcaccaccagcacccgcacctgggccttgcccacctacaataaccacctctacaagcaaatctccagtgcttcaacgggggccagcaacgacaaccactacttcggctacagcaccccctgggggtattttgatttcaacagattccactgccacttttcaccacgtgactggcagcgactcatcaacaacaattggggattccggcccaagagactcaacttcaaactcttcaacatccaagtcaaggaggtcacgacgaatgatggcgtcacaaccatcgctaataaccttaccagcacggttcaagtcttctcggactcggagtaccagcttccgtacgtcctcggctctgcgcaccagggctgcctccctccgttcccggcggacgtgttcatgattccgcaatacggctacctgacgctcaacaatggcagccaagccgtgggacgttcatccttttactgcctggaatatttcccttctcagatgctgagaacgggcaacaactttaccttcagctacacctttgaggaagtgcctttccacagcagctacgcgcacagccagagcctggaccggctgatgaatcctcccatcgaccaatacctgtattacctgaacagaactcaaaatcagtccggaagtgcccaaaacaaggacttgctgtttagccgtgggtctccagctggcatgtctgttcagcccaaaaactggctacctggaccctgttatcggcagcagcgcgtttctaaaacaaaaacagacaacaacaacagcaattttacctggactggtgcttcaaaatataacctcaatgggcgtgaatccatcatcaaccctggcactgctatggcctcacacaaagacgacgaagacaagttctttcccatgagcggtgtcatgatttttggaaaagagagcgccggagcttcaaacactgcattggacaatgtcatgattacagacgaagaggaaattaaagccactaaccctgtggccaccgaaagatttgggaccgtggcagtcaatttccagagcagcagcacagaccctgcgaccggagatgtgcatgctatgggagcattacctggcatggtgtggcaagatagagacgtgtacctgcagggtcccatttgggccaaaattcctcacacagatggacactttcacccgtctcctcttatgggcggctttggactcaagaacccgcctcctcagatcctcatcaaaaacacgcctgttcctgcgaatcctccggcggagttttcagctacaaagtttgcttcattcatcacccaatactccacaggacaagtgagtgtggaaattgaatgggagctgcagaaagaaaacagcaagcgctggaatcccgaagtgcagtacacatccaattatgcaaaatctgccaacgttgattttactgtggacaacaatggactttatactgagcctcgccccattggcacccgttaccttacccgtcccctg

SEQ ID NO: 650 - DNA, 2208 bp, Artificial Sequence
  source: /note="Description of Artificial Sequence: Synthetic polynucleotide"
atggctgccgatggttatcttccagattggctcgaggacaacctctctgagggcattcgcgagtggtgggacttgaaacctggagccccgaagcccaaagccaaccagcaaaagcaggacgacggccggggtctggtgcttcctggctacaagtacctcggacccttcaacggactcgacaagggggagcccgtcaacgcggcggacgcagcggccctcgagcacgacaaggcctacgaccagcagctcaaagcgggtgacaatccgtacctgcggtataaccacgccgacgccgagtttcaggagcgtctgcaagaagatacgtcttttgggggcaacctcgggcgagcagtcttccaggccaagaagcgggttctcgaacctctcggtctggttgaggaaggcgctaagacggctcctggaaagaaacgtccggtagagcagtcgccacaagagccagactcctcctcgggcatcggcaagacaggccagcagcccgctaaaaagagactcaattttggtcagactggcgactcagagtcagtccccgatccacgacctctcggagaacctccagcaacccccgctgctgtgggacctactacaatggcttcaggcggtggcgcaccaatggcagacaataacgaaggcgccgacggagtgggtaatgcctcaggaaattggcattgcgattccacatggctgggcgacagagtcatcaccaccagcacccgcacctgggccttgcccacctacaataaccacctctacaagcaaatctccagtgcttcaacgggggccagcaacgacaaccactacttcggctacagcaccccctgggggtattttgatttcaacagattccactgccacttttcaccacgcgactggcagcgactcatcaacaacaattggggattccggcccaagagactcaacttcaaactcttcaacatccaagtcaaggaggtcacgacgaatgatggcgtcacaaccatcgctaataaccttaccagcacggttcaagtcttctcggactcggagtaccagcttccgtacgtcctcggctctgcgcaccagggctgcctccctccgttcccggcggacgtgttcatgattccgcaatacggctacctgacgctcaacaatggcagccaagccgtgggacgttcatccttttactgcctggaatatttcccttctcagatgctgagaacgggcaacaactttaccttcagctacacctttgaggaagtgcctttccacagcagctacgcgcacagccagagcctggaccggctgatgaatcctctcatcgaccaatacctgtattacctgaacagaactcaaaatcagtccggaagtgcccaaaacaaggacttgctgtttagccgtgggcctccagctggcatgtctgttcagcccaaaaactggctacctggaccctgttatcggcagcagcgcgtttctaaaacaaaaacagacaacaacaacagcaattttacctggactggtgcttcaaaatataacctcaatgggcgtgaatccatcatcaaccctggcactgctatggcctcacacaaagacgacgaagacaagttctttcccatgagcggtgtcatgatttttggaaaagagagcgccggagcttcaaacactgcattggacaatgtcatgattacggacgaagaggaaattaaagccactaaccctgtggccaccgaaagatttgggaccgtggcagtcaatttccagagcagcagcacagaccctgcgaccggagatgtgcatgctatgggagcattacctggcatggtgtggcaagatagagacgtgtacctgcagggtcccatttgggccaaaattcctcacacagatggacactttcacccgtctcctcttatgggcggctttggactcaagaacccgcctcctcagatcctcatcaaaaacacgcctgttcctgcgaatcctccggcggagttttcagctacaaagtttgcttcattcatcacccaatactccacaggacaagtgagtgtggaaattgaatgggagctgcagaaagaaaacagcaagcgctggaatcccgaagtgcagtacacatccaattatgcaaaatctgccaacgttgattttactgtggacaacaatggactttatactgagcctcgccccattggcacccgttaccttacccgtcccctg

SEQ ID NO: 651 - DNA, 2208 bp, Artificial Sequence
  source: /note="Description of Artificial Sequence: Synthetic polynucleotide"
atggctgccgatggttatcttccagattggctcgaggacaacctctctgagggcattcgcgagtggtgggacttgaaacctggagccccgaagcccaaagccaaccagcaaaagcaggacgacggccggggtctggtgcttcctggctacaagtacctcggacccttcaacggactcgacaagggggagcccgtcaacgcggcggacgcagcggccctcgagcacgacaaggcctacgaccagcagctcaaagcgggtgacaatccgtacctgcggtataaccacgccgacgccgagtttcaggagcgtctgcaagaagatacgtcttttgggggcaacctcgggcgagcagtcttccaggccaagaagcgggttctcgaacctctcggtctggttgaggaaggcgctaagacggctcctggaaagaaacgtccggtagagcagtcgccacaagagccagactcctcctcgggcatcggcaagacaggccagcagcccgctaaaaagagactcaattttggtcagactggcggctcagagtcagtccccgatccacaacctctcggagaacctccagcaacccccgctgctgtgggacctactacaatggcttcaggcggtggcgcaccaatggcagacaataacgaaggcgccgacggagtgggtaatgcctcaggaaattggcattgcgattccacatggctgggcgacagagtcatcaccaccagcacccgcacctgggccttgcccacctacaataaccacctctacaagcaaatctccagtgcttcaacgggggccagcaacgacaaccactacttcggctacagcaccccctgggggtattttgatttcaacagattccactgccacttttcaccacgtgactggcagcgactcatcaacaacaattggggattccggcccaagagactcaacttcaaactcttcaacatccaagtcaaggaggtcacgacgaatgatggcgtcacaaccatcgctaataaccttaccagcacggttcaagtcttctcggactcggagtaccagcttccgtacgtcctcggctctgcgcaccagggctgcctccctccgttcccggcggacgtgttcatgattccgcaatacggctacctgacgctcaacaatggcagccaagccgtgggacgttcatccttttactgcctggaatatttcccttctcagatgctgagaacgggcaacaactttaccttcagctacacctttgaggaagtgcctttccacagcagctacgcgcacagccagagcctggaccggctgatgaatcctcccatcgaccaatacctgtattacctgaacagaactcaaaatcagtccgggagtgcccaaaacaaggacttgctgtttagccgtgggtctccagctggcatgtctgttcagcccaaaaactggctacctggaccctgttatcggcagcagcgcgtttctaaaacaaaaacagacaacaacaacagcaattttacctggactggtgcttcaaaatataacctcaatgggcgtgaatccatcatcaaccctggcactgctatggcctcacacaaagacgacgaagacaagttctttcccatgagcggtgtcatgatttttggaaaagagagcgccggagcttcaaacactgcattggacaatgtcatgattacagacgaagaggaaattaaagccactaaccctgtggccaccgaaagatttgggaccgtggcagtcaatttccagagcagcagcacagaccctgcgaccggagatgtgcatgctatgggagcattacctggcatggtgtggcaagatagagacgtgtacctgcagggtcccatttgggccaaaattcctcacacagatggacactttcacccgtctcctcttatgggcggctttggactcaagaacccgcctcctcagatcctcatcaaaaacacgcctgttcctgcgaatcctccggcggagttttcagctacaaagtttgcttcattcatcacccaatactccacaggacaagtgagtgtggaaattgaatgggagctgcagaaagaaaacagcaagcgctggaatcccgaagtgcagtacacatccaattatgcaaaatctgccaacgttgactttactgtggacaacaatggactttatactgagcctcgccccattggcacccgttaccttacccgtcccctg

SEQ ID NO: 652 - DNA, 2208 bp, Artificial Sequence
  source: /note="Description of Artificial Sequence: Synthetic polynucleotide"
atggctgccgatggttatcttccagattggctcgaggacaacctctctgagggcattcgcgagtggtgggacttgaaacctggagccccgaagcccaaagccaaccagcaaaagcaggacgacggccggggtctggtgcttcctggctacaagtacctcggacccttcaacggactcgacaagggggagcccgtcaacgcggcggacgcagcggccctcgagcacgacaaggcctacgaccagcagctcaaagcgggtgacaatccgtacctgcggtataaccacgccgacgccgagtttcaagagcgtctgcaagaagatacgtcttttgggggcaacctcgggcgagcagtcttccaggccaagaagcgggttctcgaacctctcggtctggttgaggaaggcgctaagacggctcctggaaagaaacgtccggtagagcagtcgccacaagagccagactcctcctcgggcatcggcaagacaggccagcagcccgctaaaaagagactcaattttggtcagactggcgactcagagtcagtccccgatccgcaacctctcggagaacctccagcaacccccgctgctgtgggacctactacaatggcttcaggcggtggcgcaccaatggcagacaataacgaaggcgccgacggagtgggtaatgcctcaggaaattggcattgcgattccacatggctgggcgacagagtcatcaccaccagcacccgcacctgggccttgcccacctacaataaccacctctacaagcaaatctccagtgcttcaacgggggccagcaacgacaaccactacttcggctacagcaccccctgggggtattttgatttcaacagattccactgccacttttcaccacgtgactggcagcgactcatcaacaacaattggggattccggcccaagagactcaacttcaaactcttcaacatccaagtcaaggaggtcacgacgaatgatggcgtcacaaccatcgctaataaccttaccagcacggttcaagtcttctcggactcggagtaccagcttccgtacgtcctcggctctgcgcaccagggctgcctccctccgttcccggcggacgtgttcatgattccgcaatacggctacctgacgctcaacaatggcagccaagccgtgggacgttcatccttttactgcctggaatatttcccttctcagatgctgagaacgggcaacaactttaccttcagctacacctttgaggaagtgcctttccacagcagctacgcgcacagccagagcctggaccggctgatgaatcctctcatcgaccaatacctgtattacctgaacagaactcaaaatcagtccggaagtgcccaaaacaaggacttgctgtttagccgtgggtctccagctggcatgtctgttcagcccaaaaactggctacctggaccctgttatcggcagcagcgcgtttctaaaacaaaaacagacaacaacaacagcaattttacctggactggtgcttcaaaatataacctcaatgggcgtgaatccatcatcaaccctggcactgctgtggcctcacacaaagacgacgaagacaagttctttcccatgagcggtgtcatgatttttggaaaagagagcgccggagcttcaaacactgcattggacaatgtcatgattacagacgaagaggaaattaaagccactaaccctgtggccaccgaaagatttgggaccgtggcagtcaatttccagagcagcagcacagaccctgcgaccggagatgtgcatgctatgggagcattacctggcatggtgtggcaagatagagacgtgtacctgcagggtcccatttgggccaaaattcctcacacagatggacactttcacccgtctcctcttatgggcggctttggactcaagaacccgcctcctcagatcctcatcaaaaacacgcctgttcctgcgaatcctccggcggagttttcagctacaaagtttgcttcattcatcacccaatactccacaggacaagtgagtgtggaaattgaatgggagctgcagaaagaaaacagcaagcgctggaatcccgaagtgcagtacacatccaattatgcaaaatctgccaacgttgattttactgtggacaacaatggactttatactgagcctcgccccattggcacccgttaccttacccgtcccctg

SEQ ID NO: 653 - DNA, 2208 bp, Artificial Sequence
  source: /note="Description of Artificial Sequence: Synthetic polynucleotide"
atggctgccgatggttatcttccagattggctcgaggacaacctctctgagggcattcgcgagtggtgggacttgaaacctggagccccgaagcccaaagccaaccagcaaaagcaggacgacggccggggtctggtgcttcctggctacaagtacctcggacccttcaacggactcgacaagggggagcccgtcaacgcggcggacgcagcggccctcgagcacgacaaggcctacgaccagcagctcaaagcgggtgacaatccgtacctgcggtataaccacgccgacgccgagtttcaggagcgtctgcaagaagatacgtcttttgggggcaacctcgggcgagcagtcttccaggccaagaagcgggttctcgaacctctcggtctggttgaggaaggcgctaagacggctcctggaaagaaacgtccggtagagcagtcgccacaagagccagactcctcctcgggcatcggcaagacaggccagcagcccgctaaaaagagactcaattttggtcagactggcgactcagagtcagtccccgatccacaacctctcggagaacctccagcaacccccgctgctgtgggacctactacaatggcttcaggcggtggcgcaccaatggcagacaataacgaaggcgccgacggagtgggtaatgcctcaggaaattggcattgcgattccacatggctgggcgacagagtcatcaccaccagcacccgcacctgggccttgcccacctacaataaccacctctacaagcaaatctccagtgcttcaacgggggccagcaacgacaaccactacttcggctacagcaccccctgggggtattttgatttcaacagattccactgccacttttcaccacgtgactggcagcaactcatcaacaacaattggggattccggcccaagagactcaacttcaaactcttcaacatccaagtcaaggaggtcacgacgaatgatggcgtcacaaccatcgctaataaccttaccagcacggttcaagtcttctcggactcggagtaccagcttccgtacgtcctcggctctgcgcaccagggctgcctccctccgttcccggcggacgtgttcatgattccgcaatacggctacctgacgctcaacaatggcagccaagccgtgggacgttcatccttttactgcctggaatatttcccttctcagatgctgagaacgggcaacaactttaccttcagctacacctttgaggaagtgcctttccacagcagctacgcgcacagccagagcctggaccggctgatgaatcctctcatcgaccaatacctgtattacctgaacagaactcaaaatcagtccggaagtgcccaaaacaaggacttgctgtttagccgtgggtctccagctggcatgtctgttcagcccaaaaactggctacctggaccctgttatcggcagcagcgcgtttctaaaacaaaaacagacaacaacaacagcaattttacctggactggtgcttcaaaatataacctcaatgggcgtgaatccatcatcaaccctggcactgctatggcctcacacaaagacgacgaagacaagttctttcccatgagcggtgtcatgatttttggaaaagagagcgccggagcttcaaacactgcattggacaatgtcatgattacagacgaagaggaaattaaagccactaaccctgtggccaccgaaagatttgggaccgtggcagtcaatttccagagcaccagcacagaccctgcgaccggagatgtgcatgctatgggagcattacctggcatggtgtggcaagatagagacgtgtacctgcagggtcccatttgggccaaaattcctcacacagatggacactttcacccgtctcctcttatgggcggctttggactcaagaacccgcctcctcagatcctcatcaaaaacacgcctgttcctgcgaatcctccggcggagttttcagctacaaagtttgcttcattcatcacccaatactccacaggacaagtgagtgtggaaattgaatgggagctgcagaaagaaaacagcaagcgctggaatcccgaagtgcagtacacatccaattatgcaaaatctgccgacgttgattttactgtggacaacaatggactttatactgagcctcgccccattggcacccgttaccttacccgtcccctg

SEQ ID NO: 654 - DNA, 2208 bp, Artificial Sequence
  source: /note="Description of Artificial Sequence: Synthetic polynucleotide"
atggctgccgatggttatcttccagattggctcgaggacaacctctctgagggcattcgcgagtggtgggacttgaaacctggagccccgaagcccaaagccaaccagcaaaagcaggacgacggccggggtctggtgcttcctggctacaagtacctcggacccttcaacggactcgacaagggggagcccgtcaacgcggcggacgcagcggccctcgagcacgacaaggcctacgaccagcagctcaaagcgggtgacaatccgtacctgcggtataaccacgccgacgccgagtttcaagagcgtctgcaagaagatacgtcttttgggggcaacctcgggcgagcagtcttccaggccaagaagcgggttctcgaacctctcggtctggttgaggaaggcgctaagacggctcctggaaagaaacgtccggtagagcagtcgccacaagagccagactcctcctcgggcatcggcaagacaggccagcagcccgctaaaaagagactcaattttggtcagactggcgactcagagtcagtccccgatccgcaacctctcggagaacctccagcaacccccgctgctgtgggacctactacaatggcttcaggcggtggcgcaccaatggcagacaataacgaaggcgccgacggagtgggtaatgcctcaggaaattggcattgcgattccacatggctgggcgacagagtcatcaccaccagcacccgcacctgggccttgcccacctacaataaccacctctacaagcaaatctccagtgcttcaacgggggccagcaacgacaaccactacttcggctacagcaccccctgggggtattttgatttcaacagattccactgccacttttcaccacgtgactggcagcgactcatcaacaacaattggggattccggcccaagagactcaacttcaaactcttcaacatccaagtcaaggaggtcacgacgaatgatggcgtcacaaccatcgctaataaccttaccagcacggttcaagtcttctcggactcggagtaccagcctccgtacgtcctcggctctgcgcaccagggctgcctccctccgttcccggcggacgtgttcatgattccgcaatacggccacctgacgctcaacaatggcagccaagccgtgggacgttcatccttttactgcctggaatatttcccttctcagatgctgagaacgggcaacaactttaccttcagctacacctttgaggaagtgcctttccacagcagctacgcgcacagccagagcctggaccggctgacgaatcctctcatcgaccaatacctgtattacctgaacagaactcaaaatcagtccggaagtgcccaaaacaaggacttgctgtttagccgtgggtctccagctggcatgtctgttcagcccaaaaactggctacctggaccctgttatcggcagcagcgcgtttctaaaacaaaaacagacaacaacaacagcaattttacctggactggtgcttcaaaatataacctcaatgggcgtgaatccatcatcaaccctggcactgctatggcctcacacaaagacgacgaagacaagttctttcccatgagcggtgtcatgatttttggaaaagagagcgccggagcttcaaacactgcattggacaatgtcatgattacagacgaagaggaaattaaagccactaaccctgtggccaccgaaagatttgggaccgtggcagtcaatttccagagcagcagcacagaccctgcgaccggagatgtgcatgctatgggagcattacctggcatggtgtggcaagatagagacgtgtacctgcagggtcccatttgggccaaaattcctcacacagatggacactttcacccgtctcctcttatgggcggctttggactcaagaacccgcctcctcagatcctcatcaaaaacacgcctgttcctgcgaatcctccggcggagttttcagctacaaagtttgcttcattcatcacccaatactccacaggacaagtgagtgtggaaattgaatgggagctgcagaaagaaaacagcaagcgctggaatcccgaagtgcagtacacatccaattatgcaaaatctgccaacgttgattttactgtggacaacaatggactttatactgagcctcgccccattggcacccgttaccttacccgtcccctg

SEQ ID NO: 655 - DNA, 2208 bp, Artificial Sequence
  source: /note="Description of Artificial Sequence: Synthetic polynucleotide"
atggctgccgatggttatcttccagattggctcgaggacaacctctctgagggcattcgcgagtggtgggacttgaaacctggagccccgaagcccaaagccaaccagcaagagcaggacgacggccggggtctggtgcttcctggctacaagtacctcggacccttcaacggactcgacaagggggagcccgtcaacgcggcggacgcagcggccctcgagcacgacaaggcctacgaccagcagctcaaagcgggtgacaatccgtacctgcggtataaccacgccgacgccgagtttcaggagcgtctgcaagaagatacgtcttttgggggcaacctcgggcgagcagtcttccaggccaagaagcgggttctcgaacctctcggtctggttgaggaaggcgctaagacggctcctggaaagaaacgtccggtagagcagtcgccacaagagccagactcctcctcgggcatcggcaagacaggccagcagcccgctaaaaagagactcaattttggtcagactggcgactcagagtcagtccccgatccacaacctctcggagaacctccagcaacccccgctgctgtgggacctactacaatggcttcaggcggtggcgcaccaatggcagacaataacgaaggcgccgacggagtgggtaatgcctcaggaaattggcattgcgattccacatggctgggcgacagagtcatcaccaccagcacccgcacctgggccttgcccacctacaataaccacctctacaagcaaatctccagtgcttcaacgggggccagcaacgacaaccactacttcggctacagcaccccctgggggtattttgatttcaacagattccactgccacttttcaccacgtgactggcagcgactcatcaacaacaattggggattccggcccaagagactcaacttcaaactcttcaacatccaagtcaaggaggtcacgacgaatgatggcgtcacaaccatcgctaataaccttaccagcacggttcaagtcttctcggactcggagtaccagcttccgtacgtcctcggctctgcgcaccagggctgcctccctccgttcccggcggacgtgttcatgattccgcaatacggctacctgacgctcaacaatggcagccaagccgtgggacgttcatccttttactgcctggaatatttcccttctcagatgctgagaacgggcaacaactttaccttcagctacacctttgaggaagtgcctttccacagcagctacgcgcacagccagagcctggaccggctgatgaatcctctcatcgaccaatacctgtattacctgaacagaactcaaaatcagtccggaagtgcccaaaacaaggacttgctgtttagccgtgggtctccagctggcatgtctgttcagcccaaaaactggctacctggaccctgttatcggcagcagcgcgtttctaaaacaaaaacagacaacaacaacagcaattttacctggactggtgcttcaaaatataacctcaatgggcgtgaatccatcatcaaccctggcactgctatggcctcacacaaagacgacgaagacaagttctttcccatgagcggtgtcatgatttttggaaaagagagcgccggagcttcaaacactgcattggacaatgtcatgattacagacgaagaggaaattaaagccactaaccctgtggccaccgaaagatttgggaccgtggcagtcaatttccagagcagcagcacagaccctgcgaccggagatgtgcatgctacgggaacattacctggcatggtgtggcaagatagagacgtgtacctgcagggtcccatttgggccaaaattcctcacacagatggacactttcacccgtctcctcttatgggcggctttggactcaagaacccgcctcctcagatcctcatcaaaaccacgcctgttcctgcgaatcctccggcggagttttcagctacaaagtttgcttcattcatcacccagtactccacaggacaagtgagtgtggaaattgaatgggagctgcagaaagaaaacagcaagcgctggaatcccgaagtgcagtacacatccaattatgcaaaatctgccaacgttgattttactgtggacgacaatggactttatactgagcctcgccccattggcacccgttaccttacccgtcccctg

SEQ ID NO: 656 - DNA, 2208 bp, Artificial Sequence
  source: /note="Description of Artificial Sequence: Synthetic polynucleotide"
atggctgccgatggttatcttccagattggctcgaggacaacctctctgagggcattcgcgagtggtgggacttgaaacctggagccccgaagcccaaagccaaccagcaaaagcaggacgacggccggggtctggtgcttcctggctacaagtacctcggacccttcaacggactcgacaagggggagcccgtcaacgcggcggacgcagcggccctcgagcacgacaaggcctacgaccagcagctcaaagcgggtgacaatccgtacctgcggtataaccacgccgacgccgagtttcaggagcgtctgcaagaagatacgtcttttgggggcaacctcgggcgagcagtcttccaggccaagaagcgggttctcgaacctctcggtctggttgaggaaggcgctaagacggctcctggaaagaaacgtccggtagagcagtcgctacaagagccagactcctcctcgggcatcggcaagacaggccagcagcccgctaaaaagagactcaattttggtcagactggcgactcagagtcagtccccgatccacaacctctcggagaacctccagcaacccccgctgctgtgggacctactacaatggcttcaggcggtggcgcaccaatggcagacaataacgaaggcgccgacggagtgggtaatgcctcaggaaattggcattgcgattccacatggctgggcgacagagtcatcaccaccagcacccgcacctgggccttgcccacctacaataaccacctctacaagcaaatctccagtgcttcaacgggggccagcaacgacaaccactacttcggctacagcaccccctgggggtattttgatttcaacagattccactgccacttttcaccacgtgactggcagcgactcatcaacaacaattggggattccggcccaagagactcaacttcaaactcttcaacatccaagtcaaggaggtcacgacgaatgatggcgtcacaaccatcgctaataaccttaccagcacggttcaagtcttctcggactcggagtaccagcttccgtacgtcctcggctctgcgcaccagggctgcctccctccgttcccggcggacgtgttcatgattccgcaatacggctacctgacgctcaacaatggcagccaagccgtgggacgttcatccttttactgcctggaatatttcccttctcagatgctgagaacgggcaacaactttaccttcagctacacctttgaggaagtgcctttccacagcagctacgcgcacagccagagcctggaccggctgatgaatcctctcatcgaccaatacctgtattacctgaacagaactcaaaatcagtccggaagtgcccaaaacaaggacttgctgtttagccgtgggtctccagctggcatgtctgttcagcccaaaaactggctacctggaccctgttatcggcagcagcgcgtttctaaaacaaaaacagacaacgacaacagcaattttacctggactggtgcttcaaaatataacctcaatgggcgtgaatccatcatcaaccctggcactgctatggcctcacacaaagacgacgaagacaagttctttcccatgagcggtgtcatgatttttggaaaagagagcgccggagcttcaaacactgcattggacaatgtcatgattacagacgaagaggaaattaaagccactaaccctgtggccaccgaaagatttgggaccgtggcagtcaatttccagagcagcagcacagaccctgcgaccggagatgtgcatgctatgggagcattacctggcatggtgtggcaagatagagacgtgtacctgcagggtcccatttgggccaaaattcctcacacagatggacactttcacccgtctcctcttatgggcggctttggactcaagaacccgcctcctcagatcctcatcaaaaacacgcctgttcctgcgaatcctccggcggagttttcagctacaaagtttgcttcattcatcacccaatactccacaggacaagtgagtgtggaaattgaatgggagctgcagaaagaaaacagcaagcgctggaatcccgaagtgcagtacacatccaattatgcaaaatctgccaacgttgattttactgtggacaacaatggactttatactgagcctcgccccattggcacccgttaccttacccgtcccctg

SEQ ID NO: 657 - DNA, 2208 bp, Artificial Sequence
  source: /note="Description of Artificial Sequence: Synthetic polynucleotide"
atggctgccgatggttatcttccagattggctcgaggacaacctctctgagggcattcgcgagtggtgggacttgaaacctggagctccgaagcccaaagccaaccagcaaaagcaggacgacggccggggtctggtgcttcctggctacaagtacctcggacccttcaacggactcgacaagggggagcccgtcaacgcggcggacgcagcggccctcgagcacgacaaggcctacgaccagcagctcaaagcgggtgacaatccgtacctgcggtataaccacgccgacgccgagtttcaggagcgtctgcaagaagatacgtcttttgggggcaacctcgggcgagcagtcttccaggccaagaagcgggttctcgaacctctcggtctggttgaggaaggcgctaagacggctcctggaaagaaacgtccggtagagcagtcgccacaagagccagactcctcctcgggcatcggcaagacaggccagcagcccgctaaaaagagactcaattttggtcagactggcgactcagagtcagtccccgatccacaacctctcggagaacctccagcaacccccgctgctgtgggacctactacaatggcttcaggcggtggcgcaccaatggcagacaataacgaaggcgccgacggagtgggtaatgcctcaggaaattggcattgcgattccacatggctgggcgacagagtcatcaccaccagcacccgcacctgggccttgcccacctacaataaccacctctacaagcaaatctccagtgcttcaacgggggccagcaacgacaaccactacttcggctacagcaccccctgggggtattttgatttcaacagattccactgccacttttcaccacgtgactggcagcgactcatcaacaacaattggggattccggcccaagagactcaacttcaaactcttcaacatccaagtcaaggaggtcacgacgaatgatggcgtcacaaccatcgctaataaccttaccagcacggttcaagtcttctcggactcggagtaccagcttccgtacgtcctcggctctgcgcaccagggctgcctccctccgttcccggcggacgtgttcatgattccgcaatacggctacctgacgctcaacaatggcagccaagccgtgggacgttcatccttttactgcctggaatatttcccttctcagatgctgagaacgggcaacaactttaccttcagctacacctttgaggaagcgcctttccacagcagctacgcgcacagccagagcctggaccggctgatgaatcctctcatcgaccaatacctgtattacctgaacagaactcaaaatcagtccggaagtgcccaaaacaaggacttgctgtttagccgtgggtctccagctggcatgtctgttcagcccaaaaactggctacctggaccctgttatcggcagcagcgcgtttctaaaacaaaaacagacaacaacaacagcaattttacctggactggtgcttcaaaatataacctcaatgggcgtgaatccatcatcaaccctggcactgctatggcctcacacaaagacgacgaagacaagttctttcccatgagcggtgtcatgatttttggaaaagagagcgccggagcttcaaacactgcattggacaatgtcatgattacagacgaagaggaaattaaagccactaaccctgtggccaccgaaagatttgggaccgtggcagtcaatttccagagcagcagcacagaccctgcgaccggagatgtgcatgctatgggagcattacctggcatggtgtggcaagatagagacgtgtacctgcagggtcccatttgggccaaaattcctcacacagatggacactttcacccgtctcctcttatgggcggctttggactcaagaacccgcctcctcagatcctcatcaaaaacacgcctgttcctgcgaatcctccggcggagttttcagctacaaagtttgcttcattcatcacccaatactccacaggacaagtgagtgtggaaattgaatgggagctgcagaaagaaaacagcaagcgctggaatcccgaagtgcagtacacatccaattatgcgaaatctgccaacgttgattttactgtggacaacaatggactttatactgagcctcgccccgttggcacccgttaccttacccgtcccctg

SEQ ID NO: 658 - DNA, 2208 bp, Artificial Sequence
  source: /note="Description of Artificial Sequence: Synthetic polynucleotide"
atggctgccgatggttatcttccagattggctcgaggacaacctctctgagggcattcgcgagtggtgggacttgaaacctggagccccgaagcccaaagccaaccagcaaaagcaggacgacggccggggtctggtgcttcctggctacaagtacctcggacccttcaacggactcgacaagggggagcccgtcaacgcggcggacgcagcggccctcgagcacgacaaggcctacgaccagcagctcaaagcgggtgacaatccatacctgcggtataaccacgccgacgccgagtttcaggagcgtctgcaagaaaatacgtcttttgggggcaacctcgggcgagcagtcttccaggccaagaagcgggttctcgaacctctcggtctggttgaggaaggcgctaagacggctcctggaaagaaacgtccggtagagcagtcgccacaagagccagactcctcctcgggcatcggcaagacaggccagcagcccgctaaaaagagactcaattttggtcagactggcgactcagagtcagtccccgatccacaacctctcggagaacctccagcaacccccgctgctgtgggacctactacaatggcttcaggcggtggcgcaccaatggcagacaataacgaaggcgccgacggagtgggtaatgcctcaggaaattggcattgcgattccacatggctgggcgacagagtcatcaccaccagcacccgcacctgggccttgcccacctacaataaccacctctacaagcaaatctccagtgcttcaacgggggccagcaacgacaaccactacttcggctacagcaccccctgggggtattttgatttcaacagattccactgccactttccaccacgtgactggcagcgactcatcaacaacaattggggattccggcccaagagactcaacttcaaactcttcaacatccaagtcaaggaggtcacgtcgaatgatggcgtcacaaccatcgctaataaccttaccagcacggttcaagtcttctcggactcggagtaccagcttccgtacgtcctcggctctgcgcaccagggctgcctccctccgttcccggcggacgtgttcatgattccgcaatacggctacctgacgctcaacaatggcagccaagccgtgggacgttcatccttttactgcctggaatatttcccttctcagatgctgagaacgggcaacaactttaccttcagctacacctttgaggaagtgcctttccacagcagctacgcgcacagccagagcctggaccggctgatgaatcctctcatcgaccaatacctgtattacctgaacagaactcaaaatcagtccggaagtgcccaaaacaaggacttgctgtttagccgtgggtctccagctggcatgtctgttcagcccaaaaactggctacctggtccctgttatcggcagcagcgcgtttctaaaacaaaaacagacaacaacaacagcaattttacctggactggtgcttcaaaatataacctcaatgggcgtgaatccatcatcaaccctggcactgctatggcctcacacaaagacgacgaagacaagttctttcccatgagcggtgtcatgatttttggaaaagagagcgccggagcttcaaacactgcattggacaatgtcatgattacagacgaagaggaaattaaagccactaaccctgtggccaccgaaagatttgggaccgtggcagtcaatttccagagcagcagcacagaccctgcgaccggagatgtgcatgctatgggagcattacctggcatggtgtggcaagatagagacgtgtacctgcagggtcccatttgggccaaaattcctcacacagatggacactttcacccgtctcctcttatgggcggctttggactcaagaacccgcctcctcagatcctcatcaaaaacacgcctgttcctgcgaatcctccggcggagttttcagctacaaagtttgcttcattcatcacccaatactccacaggacaagtgagtgtggaaattgaatgggagctgcagaaagaaaacagcaagcgctggaatcccgaagtgcagtacacatccaattatgcaaaatctgccaacgttgattttactgtggacaacaatggactttatactgagcctcgccccattggcacccgttaccttacccgtcccctg

SEQ ID NO: 659 - DNA, 2208 bp, Artificial Sequence
  source: /note="Description of Artificial Sequence: Synthetic polynucleotide"
atggctgccgatggttatcttccagattggctcgaggacaacctctctgagggcattcgcgagtggtgggacttgaaacctggagccccgaagcccaaagccaaccagcaaaagcaggacgacggccggggtctggtgcttcctggctacaagtacctcggacccttcaacggactcgacaagggggagcccgtcaacgcggcggacgcagcggccctcgagcacgacaaggcctacgaccagcagctcaaagcgggtgacaatccgtacctgcggtataaccacgccgacgccgagtttcaggagcgtctgcaagaagatacgtcttttgggggcaacctcgggcgagcagtcttccaggccaagaagcgggttctcgaacctctcggtctggttgaggaaggcgctaagacggctcctggaaagaaacgtccggtagagcagtcgccacaagagccagactcctcctcgggcatcggcaagacaggccagcagcccgctaaaaagagactcaattttggtcagactggcgactcagagtcagtccccgatccacaacctctcggagaacctccagcaacccccgctgctgtgggacctactacaatggcttcaggcggtggcgcaccaatggcagacaataacgaaggcgccgacggagtgggtaatgcctcaggaaattggcattgcgattccacatggctgggcgacagagtcatcaccaccagcacccgcacctgggccttgcccacctacaataaccacctctacaagcaaatctccagtgcttcaacgggggccagcaacgacaaccactacttcggctacagcaccccctgggggtattttgatttcaacagattccactgccacttttcaccacgtgactggcagcgactcatcaacaacaattggggattccggcccaagagactcaacttcaaactcttcaacatccaagtcaaggaggtcacgacgaatgatggcgtcacaaccatcgctaataaccttaccagcacggttcaagtcttctcggactcggagtaccagcttccgtacgtcctcggctctgcgcaccagggctgcctccctccgttcccggcggacgtgttcatgattccgcaatacggctacctgacgctcaacaatggcagccaagccgtgggacgttcatccttttactgcctggaatatttcccttctcagatgctgagaacgggcaacaactttaccttcagctacacctttgaggaagtgcctttccacagcagctacgcgcacagccagagcctggaccggctgatgaatcctctcatcgaccaatacctgtattacctgaacagaactcaaaatcagtccggaagtgcccaaaacaaggacttgctgtttagccgtgggtctccagctggcacgtctgttcagcccaaaaactggctacctggaccctgttatcggcagcagcgcgtttctaaaacaaaaacagacaacaacaacagcaattttacctggactggtgcttcaaaatataacctcaatgggcgtgaatccatcatcaaccctggcactgctatggcctcacacaaagacgacgaagacaagttctttcccatgagcggtgtcatgatttttggaaaagagagcgccggagcttcaaacactgcattggacaatgtcatgattacagacgaagaggaaattaaagccactaaccctgtggccaccgaaagatttgggaccgtggcagtcaatttccagagcagcagcacagaccctgcgaccggagatgtgcatgctatgggagcattacctggcatggtgtggcaagatagagacgtgtacctgcagggtcccatttgggccaaaattcctcacacagatggacactttcacccgtctcctcttatgggcggctttggactcaagaacccgcctcctcagatcctcatcaaaaacacgcctgttcctgcgaatcctccggcggagttttcagctacaaagtttgcttcattcatcacccaatactccacaggacaagtgagtgtggaaattgaatgggagctgcagaaagaaaacagcaagcgctggaatcccgaagtgcagtacacatccaattatgcaaaatctgccaacgttgattttactgtggacaacaatggactttatactgggcctcgccccattggcacccgttaccttacccgtcccctg

SEQ ID NO: 660 - DNA, 2208 bp, Artificial Sequence
  source: /note="Description of Artificial Sequence: Synthetic polynucleotide"
atggctgccgatggttatcttccagattggctcgaggacaacctctctgagggcattcgcgagtggtgggacttgaaacctggagccccgaagcccaaagccaaccagcaaaagcaggacgacggccggggtctggtgcttcctggctacaagtacctcggacccttcaacggactcgacaagggggagcccgtcaacgcggcggacgcagcggccctcgagcacgacaaggcctacgaccagcagctcaaagcgggtgacaatccgtacctgcggtataaccacgccgacgccgagtttcaggagcgtctgcaagaagatacgtcttttgggggcaacctcgggcgagcagtcttccaggccaagaagcgggttctcgaacctctcggtctggttgaggaaggcgctaagacggctcctggaaagaaacgtccggtagagcagtcgccacaagagccagactcctcctcgggcatcggcaagacaggccagcagcccgctaaaaagagactcaattttggtcagactggcgactcagagtcagtccccgatccacaacctctcggagaacctccagcaacccccgctgctgtgggacctactacaatggcttcaggcggtggcgcaccaatggcagacaataacgaaggcgccgacggagtgggtaatgccccaggaaattggcattgcgactccacatggctgggcgacagagtcatcaccaccagcacccgcacctgggccttgcccacctacaataaccacctctacaagcaaatctccagtgcttcaacgggggccagcaacgacaaccactacttcggctacagcaccccctgggggtattttgatttcaacagattccactgccacttttcaccacgtgactggcagcgactcatcaacaacaattggggattccggcccaagagactcaacttcaaactcttcaacatccaagtcaaggaggtcacgacgaatgatggcgtcacaaccatcgctaataaccttaccagcacggttcaagtcttctcggactcggagtaccagcttccgtacgtcctcggctctgcgcaccagggctgcctccctccgttcccggcggacgtgttcatgattccgcaatacggctacctgacgctcaacaatggcagccaagccgtgggacgttcatccttttactgcctggaatatttcccttctcagatgctgagaacgggcaacaactttaccttcagctacacctttgaggaagtgcctttccacagcagctacgcgcacagccagagcctggaccggctgatgaatcctctcatcgaccaatacctgtattacctgaacagaactcaaaatcagtccggaagtgcccaaaacaaggacttgctgtttagccgtgggtctccagctggcatgtctgttcagcccaaaaactggctacctggaccctgttatcggcagcagcgcgtttctaaaacaaaaacagacaacaacaacagcaattttacctggactggtgcttcaaaatataacctcaatgggcgtgaatccatcatcaaccctggcacagctatggcctcacacaaagacgacgaagacaagttctttcccatgagcggtgtcatgatttttggaaaagagagcgccggagcttcaaacactgcattggacaatgtcatgattacaggcgaagaggaaattaaagccactaaccctgtggccaccgaaagatttgggaccgtggcagtcaatttccagagcagcagcacagaccctgcgaccggagatgtgcatgctatgggagcattacctggcatggtgtggcaagatagagacgtgtacctgcagggtcccatttgggccaaaattcctcacacagatggacactttcacccgtctcctcttatgggcggctttggactcaagaacccgcctcctcagatcctcatcaaaaacacgcctgttcctgcgaatcctccggcggagttttcagctacaaagtttgcttcattcatcacccaatactccacaggacaagtgagtgtggaaattgaatgggagctgcagaaagaaaacagcaagcgctggaatcccgaagtgcagtacacatccaattatgcaaaatctgccaacgttgattttactgtggacaacaatggactttatactgagcctcgccccattggcacccgttaccttacccgtcccctg

SEQ ID NO: 661 - DNA, 2208 bp, Artificial Sequence
  source: /note="Description of Artificial Sequence: Synthetic polynucleotide"
atggctgccgatggttatcttccagattggctcgaggacaacctctctgagggcattcgcgagtggtgggacttgaaacctggagccccgaagcccaaagccaaccagcaaaagcaggacgacggccggggtctggtgcttcctggctacaagtacctcggacccttcaacagactcgacaagggggagcccgtcaacgcggcggacgcagcggccctcgagcacgacaaggcctacgaccagcagctcaaagcgggtgacaatccgtacctgcggtataaccacgccgacgccgagtttcaggagcgtctgcaagaagatacgtcttttgggggcaacctcgggcgagcagtcttccaggccaagaagcgggttctcgaacctctcggtctggttgaggaaggcgctaagacggctcctggaaggaaacgtccggtagagcagtcgccacaagagccagactcctcctcgggcatcggcaagacaggccagcagcccgctaaaaagagactcaattttggtcagactggcgactcagagtcagtccccgatccacaacctctcggagaacctccagcaacccccgctgctgtgggacctactacaatggcttcaggcggtggcgcgccaatggcagacaataacgaaggcgccgacggagtgggtaatgcctcaggaaattggcattgcgattccacatggctgggcgacagagtcatcaccaccagcacccgcacctgggccttgcccacctacaataaccacctctacaagcaaatctccagtgcttcaacgggggccagcaacgacaaccactacttcggctacagcaccccctgggggtattttgatttcaacagattccactgccacttttcaccacgtgactggcagcgactcatcaacaacaattggggattccggcccaagagactcaacttcaaactcttcaacatccaagtcaaggaggtcacgacgaatgatggcgtcacaaccatcgctaataaccttaccagcacggttcaagtcttctcggactcggagtaccagcttccgtacgtcctcggctctgcgcaccagggctgcctccctccgttcccggcggacgtgttcatgattccgcaatacggctacctgacgctcaacaatggcggccaagccgtgggacgttcatccttttactgcctggaatatttcccttctcagatgctgagaacgggcaacaactttaccttcagctacacctttgaggaagtgcctttccacagcagctacgcgcacagccagagcctggaccggctgatgaatcctctcatcgaccaatacctgtattacctgaacagaactcaaaatcagtccggaagtgcccaaaacaaggacttgctgtttagccgtgggtctccagctggcatgtctgttcagcccaaaaactggctacctggaccctgttatcggcagcagcgcgtttctaaaacaaaaacagacaacaacaacagcaattttacctggactggtgcttcaaaatatagcctcaatgggcgtgaatccatcatcaaccctggcactgctatggcctcacacaaagacgacgaagacaagttctttcccatgggcggtgtcatgatttttggaaaagagagcgccggagcttcaaacactgcattggacaatgccatgattacagacgaagaggaaattaaagccactaaccctgtggccaccgaaagatttgggaccgtggcagtcaatttccagagcagcagcacagaccctgcgaccggagatgtgcatgctatgggagcattacctggcatggtgtggcaagatagagacgtgtacctgcagggtcccatttgggccaaaattcctcacacagatggacactttcacccgtctcctcttatgggcggctttggactcaagaacccgcctcctcagatcctcatcaaaaacacgcctgttcctgcgaatcctccggcggagttttcagctacaaagtttgcttcattcatcacccaatactccacaggacaagtgagtgtggaaattgaatgggagctgcagaaagaaaacagcaagcgctggaatcccgaagtgcagtacacatccaattatgcaaaatctgccaacgttgattttactgtggacaacaatggactttatactgagcctcgccccattggcacccgttaccttacccgtcccctg

SEQ ID NO: 662 - DNA, 2208 bp, Artificial Sequence
  source: /note="Description of Artificial Sequence: Synthetic polynucleotide"
atggctgccgatggttatcttccagattggctcgaggacaacctctctgagggcattcgcgagtggtgggacttgaaacctggagccccgaagcccaaagccaaccagcaaaagcaggacgacggccggggtctggtgcttcctggctacaagtacctcggacccttcaacggactcgacaagggggagcccgtcaacgcggcggacgcagcggccctcgagcacgacaaggcctacgaccagcagctcaaagcgggtgacaatccgtacctgcggtataaccacgccgacgccgagtttcaggagcgtctgcaagaagatacgtcttttgggggcaacctcgggcgagcagtcttccaggccaagaagcgggttctcgaacctctcggtctggttgaggaaggcgctaagacggctcctggaaagaaacgtccggtagagcagtcgccacaagagccagactcctcctcgggcatcggcaagacaggccagcagcccgctaaaaagagactcaattttggtcagactggcgactcagagtcagtccccgatccacaacctctcggagaacctccagcaacccccgctgctgtgggacctactacaatggcttcaggcggtggcgcaccaatggcagacaataacgaaggcgccgacggagtgggtaatgcctcaggaaattggcattgcgattccacatggctgggcggcagagtcatcaccaccagcacccgcacctgggccttgcccacctacaataaccacctctacaagcaaatctccagtgcttcaacgggggccagcaacgacaaccactacttcggctacagcaccccctgggggtattttgatttcaacagattccactgccacttttcaccacgtgactggcagcgactcatcaacaacaattggggattccggcccaagagactcaacttcaaactcttcaacatccaagtcaaggaggtcacgacgaatgatggcgtcacaaccatcgctaataaccttaccagcacggttcaagtcttctcggactcggagtaccagcttccgtacgtcctcggctctgcgcaccagggctgcctccctccgttcccggcggacgtgttcatgattccgcaatacggctacctgacgctcaacaatggcagccaagccgtgggacgttcatccttttactgcctggaatatttcccttctcagatgctgagaacgggcaacaactctaccttcagctacacctttgaggaagtgcctttccacagcagctacgcgcacagccagagcctggaccggctgatgaatcctctcatcgaccaatacctgtattacctgaacagaactcaaaatcagtccggaagtgcccaaaacaaggacttgctgtttagccgtgggtctccagctggcatgtctgttcagcccaaaaactggctacctggaccctgttatcggcagcagcgcgtttctaaaacaaaaacagacaacaacaacagcaattttacctggactggtgcttcaaaatataacctcaatgggcgtgaatccatcatcaaccctggcactgctatggcctcacacaaagacgacgaagacaagttctttcccatgagcggtgtcatgatttttggaaaagagagcgccggagcttcaaacactgcattggacaatgtcatgattacagacgaagaggaaattaaagccactaaccctgtggccaccgaaagatttgggaccgtggcagtcaatttccagagcagcagcacagaccctgcgaccggagatgtgcatgctatgggaacattacctggcatggtgtggcaagatagagacgtgtacctgcagggtcccatttgggccaaaattcctcacacagatggacactttcacccgtctcctcttatgggcggctttggactcaagaacccgcctcctcagatcctcatcaaaaacacgcctgttcctgcgaatcctccggcggagttttcagctacaaagtttgcttcattcatcacccaatactccacaggacaagtgagtgtggaaattgaatgggagctgcagaaagaaaacagcaagcgctggaatcccgaagtgcagtacacatccaattatgcaaaatctgccaacgttgattttactgtggacaacaatggactttatactgagcctcgccccattggcacccgttaccttacccgtcccctg

SEQ ID NO: 663 - DNA, 2208 bp, Artificial Sequence
  source: /note="Description of Artificial Sequence: Synthetic polynucleotide"
atggctgccgatggttatctcccagattggctcgaggacaacctctctgagggcattcgcgagtggtgggacttgaaacctggagccccgaagcccaaagccaaccagcaaaagcaggacgacggccggggtctggtgcttcctggctacaagtacctcggacccttcaacggactcgacaagggggagcccgtcagcgcggcggacgcagcggccctcgagcacgacaaggcctacgaccagcagctcaaagcgggtgacaatccgtacctgcggtataaccacgccgacgccgagtttcaggagcgtctgcaagaagatacgtcttttgggggcaacctcgggcgagcagtcttccaggccaagaagcgggttctcgaacctctcggtctggttgaggaaggcgctaagacggctcctggaaagaaacgtccggtagagcagtcgccacaagagccagactcctcctcgggcatcggcaagacaggccagcagcccgctaaagagagactcaattttggtcagactggcgactcagagtcagtccccgatccacaacctctcggagaacctccagcaacccccgctgctgtgggacctactacaatggcttcaggcggtggcgcaccaatggcagacaataacgaaggcgccgacggagtgggtaatgcctcaggaaattggcattgcgattccacatggctgggcgacagagtcatcaccaccagcacccgcacctgggccttgcccacctacaataaccacctctacaagcaaatctccagtgcttcaacgggggccagcaacgacaaccactacttcggctacagcaccccctgggggtattttgatttcaacagattccactgccacttttcaccacgtgactggcagcgactcatcaacaacaattggggattccggcccaagagactcaacttcaaactcttcaacatccaagtcaaggaggtcacgacgaatgatggcgtcacaaccatcgccaataaccttaccagcacggttcaagtcttctcggactcggagtaccagcttccgtacgtcctcggctctgcgcaccagggctgcctccctccgttcccggcggacgtgttcatgattccgcaatacggctacctgacgctcaacaatggcagccaagccgtgggacgttcatccttttactgcctggaatatttcccttctcagatgctgagaacgggcaacaactttaccttcagctacacctttgaggaagtgcctttccacagcagctacgcgcacagccagagcctggaccggctgatgaatcctctcatcgaccaatacctgtattacctgaacagaactcaaaatcagtccggaagtgcccaaaacaaggacttgctgtttagccgtgggtctccagctggcatgtctgttcagcccaaaaactggctacctggaccctgttatcggcagcagcgcgtttctaaaacaaaaacagacaacaacaacagcaattttacctggactggtgcttcaaaatataacctcaatgggcgtgaatccatcatcaaccctggcactgctatggcctcacacaaagacgacgaagacaagttctttcccatgagcggtgtcatgatttttggaaaagagagcgccggagcttcaaacactgcattggacaatgtcatgattacagacgaagaggaaattaaagccactaaccctgtggccaccgaaagatttgggaccgtggcagtcaatttccagagcagcagcacagaccctgcgaccggagatgtgcatgctatgggagcattacctggcatggtgtggcaagatagagacgtgtacctgcagggtcccatttgggccaaaattcctcacacagatggacactttcacccgtctcctcttatgggcggctttggactcaagaacccgcctcctcagatcctcatcaaaaacacgcctgttcctgcgaatcctccggcggagttttcagctacaaagtttgcttcattcatcacccaatactccacaggacaagtgagtgtggaaattgaatgggagctgcagaaagaaaacagcaagcgctggaatcccgaagtgcagtacacatccaattatgcaaaatctgccaacgttgattttactgtggacaacaatggactttatactgagcctcgccccattggcacccgttaccttacccgtcccctg

SEQ ID NO: 664 - DNA, 2208 bp, Artificial Sequence
  source: /note="Description of Artificial Sequence: Synthetic polynucleotide"
atggctgccgatggttatcttccagattggctcgaggacaacctctctgagggcattcgcgagtggtgggacttgaaacctggagccccgaagcccaaagccaaccagcaaaagcaggacgacggccggggtctggtgcttcctggctacaagtacctcggacccttcaacggactcgacaagggggagcccgtcaacgcggcggacgcagcggccctcgagcacgacaaggcctacgaccagcagctcaaagcgggtgacaatccgtacctgcggtataaccacgccgacgccgagtttcaggagcgtctgcaagaagatacgtcttttgggggcaacctcgggcgagcagtcttccaggccaagaagcgggttctcgaacctctcggtctggttgaggaaggcgctaagacggctcctggaaagaaacgtccggtagagcagtcgccacaagagccagactcctcctcgggcatcggcaagacaggccagcagcccgctaaaaagagactcaattttggtcagactggcgactcagagtcagtccccgatccacaacctctcggagaacctccagcaacccccgctgctgtgggacctactacaatggcttcaggcggtggcgcaccaatggcagacaataacgaaggcgccgacggagtgggtaatgcctcaggaaattggcattgcgattccacatggctgggcgacagagtcatcaccaccagcacccgcacctgggccttgcccacctacaataaccacctctacaagcaaatctccagtgcttcaacgggggccagcaacgacaaccactacttcggctacagcaccccctgggggtattttgatttcaacagattccactgccacttttcaccacgtgactggcagcgactcatcaacaacaattggggattccggcccaagagactcaacttcaaactcttcaacatccaagtcaaggaggtcacgacgaatgatggcgtcacaaccatcgctaataaccttaccagcacggttcaagtcttctcggactcggagtaccagcttccgtacgtcctcggctctgcgcaccagggctgcctccctccgttcccggcggacgtgttcatgattccgcaatacggctacctgacgctcaacaatggcagccaagccgtgggacgttcatccttttactgcctggaatatttcccttctcagatgctgagaacgggcaacaactttaccttcagctacacctttgaggaagtgcctttccacagcagctacgcgcacagccagagcctggaccggctgatgaatcctctcatcgaccaatacctgtattacctgaacagaactcaaaatcagtccggaagtgcccaaaacaaggacttgctgtttagccgtgggtctccagctggcatgtctgttcagcccaaaaactggctacctggaccctgttatcggcagcagcgcgtttctaaaacaaaaacagacaacaacaacagcaattttacctggactggtgcttcaaaatataacctcaatgggcgtgaatccatcatcaaccctggcactgctatggcctcacacaaagacgacgaagacaagttctttcccatgagcggtgtcatgatttttggaaaagagagcgccggagcttcaaacactgcattggacaatgtcatgattacagacgaaggggaaattaaagccactaaccctgtggccaccgaaagatttgggaccgtggcagtcaatttccagagcagcagcacagaccctgcgaccggagatgtgcatgctatgggagcattacctggcatggtgtggcaagatagagacgtgtacctgcagggtcccatttgggccaaaattcctcacacagatggacactttcacccgtctcctcttatgggcggctttggactcaagaacccgcctcctcagatcctcatcaaaaacacgcctgttcctgcgaatcctccggcggagttttcagctacaaagtttgcttcattcatcacccaatactccacaggacaagtgagtgtggaaattgaatgggagctgcagaaagaaaacagcaagcgctggaatcccgaagtgcagtacacatccaattatgcaaaatctgccaacgttgattttactgtggacaacaatggactttatactgagcctcgccccattggcacccgttaccttacccgtcccctg

SEQ ID NO: 665 - DNA, 2208 bp, Artificial Sequence
  source: /note="Description of Artificial Sequence: Synthetic polynucleotide"
atggctgccgatggttatcttccagattggctcgaggacaacctctctgagggcattcgcgagtggtgggacttgaaacctggagccccgaaacctaaagccaaccagcaaaagcaggacgacggccggggtctggtgcttcctggctacaagtacctcggacccttcaacggactcgacaagggggagcccgtcaacgcggcggacgcagcggccctcgagcacgacaaggcctacgaccagcagctcaaagcgggtgacaatccgtacctgcggtataaccacgccgacgccgagtttcaggagcgtctgcaagaagatacgtcttttgggggcaacctcgggcgagcagtcttccaggccaagaagcgggttctcgaaccttttggtctggttgaggaaggcgctaagacggctcctggaaagaaacgtccggtagagcagtcgccacaagagccagactcctcctcgggcatcggcaagacaggccagcagcccgctaaaaagagactcaattttggtcagactggcgactcagagtcagtccccgacccacaacctctcggagaacctccagcaacccccgctgctgtgggacctactacaatggcttcaggcggtggcgcaccaatggcagacaataacgaaggcgccgacggagtgggtaatgcctcaggaaattggcattgcgattccacatggctgggcgacagagtcatcaccaccagcacccgcacctgggccttgcccacctacaataaccacctctacaagcaaatctccagtgcttcaacgggggccagcaacgacaaccactacttcggctacagcaccccctgggggtattttgatttcaacagattccactgccacttttcaccacgtgactggcagcgactcatcaacaacaattggggattccggcccaagagactcaacttcaagctcttcaacatccaagtcaaggaggtcacgacgaacgatggcgtcacgaccatcgctaataaccttaccagcacggttcaagtcttctcggattcagagtaccaactgccgtacgtcctcggctctgcgcaccagggctgcctccctccgttcccggcggacgtgtttatgattccgcagtacggctacctaacgctcaacaatggcagccaggccgtgggacgttcatccttttactgcccggaatatttcccttctcagatgctgagaacgggcaacaactttaccttcagctacacctttgaggaagtgcctttccacagcagctacgcgcacagccagagcctggaccggctgatgaatcctctcatcgaccaatacctgtattacctgaacagaactcaaaatcagtccggaagtgcccaaaacaaggacttgctgtttagccgtgggtctccagctggcatgtctgttcagcccaaaaactggctacctggaccctgttatcggcagcagcgcgtttctaaaacaaaaacagacaacaacaacagcaattttacctggactggtgcttcaaaatataacctcaatgggcgtgaatccatcatcaaccctggcactgctatggcctcacacaaagacgacaaagacaagttctttcccatgagcggtgtcatgatttttggaaaagagagcgccggagcttcaaatactgcattggacaatgtcatgatcacagatgaagaggaaattaaagccactaaccctgtggccaccgaaagatttgggaccgtggcagtcaatttccagagcagcaacacagaccccgcgaccggagatgtgcatgttatgggagccttacctggcatggtgtggcaagacagagacgtatacctgcagggtcccatttgggccaaaattcctcacacggatggacactttcacccgtctcctctcatgggcggctttggacttaagcacccgcctcctcaaatcctcatcaaaaacacgcctgttcctgcgaatcctccggcagagttttcggctacaaagtttgcttcattcatcacccagtactccacaggacaagtgagtgtggaaattgaatgggagctgcagaaagaaaacagcaagcgctggaatcccgaagtgcagtacacatccaattatgcaaaatctgccaacgttgatttcactgtggacaacaatggactttatactgagcctcgccccattggcacccgttaccttacccgtcccttg

SEQ ID NO: 666 - DNA, 2208 bp, Artificial Sequence
  source: /note="Description of Artificial Sequence: Synthetic polynucleotide"
atggctgccgatggttatcttccagattggctcgaggacaacctctctgagggcattcgcgagtggtgggacttgaaacctggagccccgaaacctaaagccaaccagcaaaagcaggacgacggccggggtctggtgcttcctggctacaagtacctcggacccttcaacggactcgacaagggggagcccgtcaacgcggcggacgcagcggccctcgagcacgacaaggcctacgaccagcagctcaaagcgggtgacaatccgtacctgcggtataaccacgccgacgccgagtttcaggagcgtctacaagaagatacgtcttttgggggcaacctcgggcgagcagtcttccaggccaagaagcgggttctcgaaccttttggtctggttgaggaaggcgctaagacggctcctggaaagaaacgtccggtagagcagtcgccacaagagccagactcctcctcgggcatcggcaagacaggccagcagcccgctaaaaagagactcaattttggtcagactggcgactcagagtcagtccccgacccacaacctctcggagaacctccagcaacccccgctgctgtgggacctactacaatggcttcaggcggtggcgcaccaatggcagacaataacgaaggcgccgacggagtgggtaatgcctcaggaaattggcattgcgattccacatggctgggcgacagagtcatcaccaccagcacccgcacctgggccttgcccacctacaataaccacctctacaagcaaatctccagtgcttcaacgggggccagcaacgacaaccactacttcggctacagcaccccctgggggtattttgatttcaacagattccactgccacttttcaccacgtgactggcagcgactcatcaacaacaattggggattccggcccaagagactcaacttcaagctcttcaacatccaagtcaaggaggtcacgacgaacgatggcgtcacgaccatcgctaataaccttaccagcacggttcaagtcttctcggattcagagtaccaactgccgtacgtcctcggctctgcgcaccagggctgcctccctccgttcccggcggacgtgttcatgattccgcagtacggctacctaacgctcaacaatggcagccaggccgtgggacgttcatccttttactgcctggaatatttcccttctcagatgctgagaacgggcaacaactttaccttcagctacacctttgaggaagtgcctttccacagcagctacgcgcacagccagagcctggaccggctgatgaatcctctcatcgaccaatacctgtattacctgaacagaactcaaaatcagtccggaagtgcccaaaacaaggacttgctgtttagccgtgggtctccagctggcatgtctgttcagcccaaaaactggctacctggaccctgttatcggcagcagcgcgtttctaaaacaaaaacagacaacaacaacagcaattttacctggactggtgcttcaaaatataacctcaatgggcgtgaatccatcatcaaccctggcactgctatggcctcacacaaagacgacaaagacaagttctttcccatgagcggtgtcatgatttttggaaaagagagcgccggagcttcaaatactgcattggacaatgtcatgatcacagatgaagaggaaattaaagccactaaccctgtggccaccgaaagatttgggaccgtggcagtcaatttccagagcagcgacacagaccccgcgaccggagatgtgcatgttatgggagccttacctggcatggtgtggcaagacagagacgtatacctgcagggtcccatttgggccaaaattcctcacacggatggacactttcacccgtctcctctcatgggcggctttggacttaagcacccgcctcctcaaatcctcatcaaaaacacgcctgttcctgcgaatcctccggcagagttttcggctacaaagtttgcttcattcatcacccagtactccacaggacaagtgagtgtggaaattgaatgggagctgcagaaagaaaacagcaagcgctggaatcccgaagtgcagtacacatccaattatgcaaaatctgccaacgttgatttcactgtggacaacaatggactttatactgagcctcgccccattggcacccgttaccttacccgtcccttg

SEQ ID NO: 667 - DNA, 2208 bp, Artificial Sequence
  source: /note="Description of Artificial Sequence: Synthetic polynucleotide"
atggctgccgatggttatcttccagattggctcgaggacaacctctctgagggcattcgcgagtggtgggacttgaaacctggagccccgaaacctaaagccaaccagcaaaagcagggcgacggccggggtctggtgcttcctggctacaagtacctcggacccttcaacggactcgacaagggggagcccgtcaacgcggcggacgcagcggccctcgagcacgacaaggcctacgaccagcagctcaaagcgggtgacaatccgtacctgcggtataaccacgccgacgccgagtttcaggagcgtctgcaagaagatacgtcttttgggggcaacctcgggcgagcagtcttccaggccaagaagcgggttctcgaaccttttggtctggttgaggaaggcgctaagacggctcctggaaagaaacgtccggtagagcagtcgccacaagagccagactcctcctcgggcatcggcaagacaggccagcagcccgctaaaaagagactcaattttggtcagactggcgactcagagtcagtccccgacccacaacctctcggagaacctccagcaacccccgctgctgtgggacctactacaatggcttcaggcggtggcgcaccaatggcagacaataacgaaggcgccgacggagtgggtaatgcctcaggaaattggcattgcgattccacatggctgggcgacagagtcatcaccaccaacactcgcacctgggccttgcccacctacaataaccacctctacaagcaaatctccagtgcttcaacgggggccagcaacgacaaccactacttcggctacagcaccccctgggggtattttgatttcaacagattccactgccacttttcaccacgtgactggcagcgactcatcaacaacaattggggattccggcccaagagactcaacttcaagctcttcaacatccaagtcaaggaggtcacgacgaacgatggcgtcacgaccatcgctaataaccttaccagcacggttcaagtcttctcggattcagagtaccaactgccgtacgtcctcggctctgcgcaccagggctgcctccctccgttcccggcggacgtgttcatgattccgcagtacggctacctaacgctcaacaatggcagccaggccgtgggacgttcatccttttactgcctggaatatttcccttctcagatgctgagaacgggcaacaactttaccttcagctacacctttgaggaagtgcctttccacagcagttacgggcacagccagagcctggaccggctgatgaatcttctcatcgaccaatacctgtattacctgaacagaactcaaaatcagtccggaagtgcccaaaacaaggacttgctgtttagccgtgggtctccagctggcatgtttgttcagcccaaaaactggctacctggaccctgttatcggcagcagcgcgtttctaaaacaaaaacagacaacaacaacagcaattttacctggactggtgcttcaaaatataacctcaatgggcgtgaatccatcatcaaccctggcactgctatggcctcacacaaagacgacgaagacaagttctttcccatgagcggtgtcatgatttttggaaaagagagcgccggagcttcaaatactgcattggacaatgtcatgatcacagatgaagaggaaattaaagccactaaccctgtggccaccgaaagatttgggaccgtggcagtcaatttccagagcagcagcacagaccccgcgaccggagatgtgcatgttatgggagccttacctggcatggtgtggcaagacagagacgtatacctgcagggtcccatttgggccaaaattcctcacacggatggacactttcacccgtctcctctcatgggcggctttggacttaagcacccgcctcctcaaatcctcatcaaaaacacgcctgttcctgcgaatcctccggcagagttttcggctacaaagtttgcttcattcatcacccagtactccacaggacaagtgagtgtggaaattgaatgggagctgcagaaagaaaacagcaagcgctggaatcccgaagtgcagtacacatccaattatgcaaaatctgccaacgttgatttcactgtggacaacaatggactttatactgagcctcgccccattggcacccgttaccttacccgtcccttg

SEQ ID NO: 668 - DNA, 2208 bp, Artificial Sequence
  source: /note="Description of Artificial Sequence: Synthetic polynucleotide"
atggctgccgatggttatcttccagattggctcgaggacaacctctctgagggcattcgcgagtggtgggacttgaaacctggagccccgaaacctaaagccaaccagcaaaagcaggacgacggccggggtctggtgcttcctggctacaagtacctcggacccttcaacggactcgacaagggggagcccgtcaacgcggcggacgcagcggccctcgagcacgacaaggcctacgaccagcagctcaaagcgggtgacaatccgtacctgcggtataaccacgccgacgccgagtttcaggagcgtctgcaagaagatacgtcttttgggggcaacctcgggcgagcagtcttccaggccaagaagcgggttctcgaaccttttggtctggttgaggaaggcgctaagacggctcctggaaagaaacgtccggtagagcagtcgccacaagagccagactcctcctcgggcatcggcaagacaggccagcagcccgctaaaaagagactcaattttggtcagactggcgactcagagtcagtccccgacccacaacctctcggagaacctccagcaacccccgctgctgtgggacctactacaatggcttcaggcggtggcgcaccaatggcagacaataacgaaggcgccgacggagtgggtaatgcctcaggaaattggcattgcgattccacatggctgggcgacagagtcatcaccaccaacacccgcacctgggccttgcccacctacaataaccacctctacaagcaaatctccagtgcttcaacgggggccagcaacgacaaccactacttcggctacagcaccccctgggggtattttgatttcaacagattccactgccacttttcaccacgtgactggcagcgactcatcaacaacaattggggattccggcccaagagactcaacttcaagctcttcaacatccaagtcaaggaggtcacgacgaacgatggcgtcacgaccatcgctaataaccttaccagcacggttcaagtcttctcggattcagagtaccaactgccgtacgtcctcggctctgcgcaccagggctgcctccctccgttcccggcggacgtgttcatgattccgcagtacggctacctaatgctcaacaatggcagccaggccgtgggacgttcatccttttactgcctggaatatttcccttctcagatgctgagaacgggcaacaactttaccttcagctacacctttgaggaagtgcctttccacagcagctacgcgcacagccagagcctggaccggctgatgaatcctctcatcgaccaatacctgtattacctgaacagaactcaaaatcagtccggaagtgcccaaaacaaggacttgctgtttagccgtgggtctccagctggcatgtctgttcagcccaaaaactggctacctggaccctgttatcggcagcagcgcgtttctaaaacaaaaacagacaacaacaacagcaattttacctggactggtgcttcaaaatataacctcaatgggcgtgaatccatcatcaaccctggcactgctatggcctcacacaaagacgacgaagacaagttctttcccatgagcggtgtcatgatttttggaaaagagagcgccggagcttcaaatactgcattggacaatgtcatgatcacagatgaagaggaaattaaagccactaaccctgcggccaccgaaagatttgggaccgtggcagtcaatttccagagcagcagcacagaccccgcgaccggagatgtgcatgttatgggagccttacctggcatggtgtggcaagacagagacgtatacctgcagggtcccatttgggccaaaattcctcacacggatggacactttcacccgtctcctctcatgggcggctttggacttaagcacccgcctcctcaaatcctcatcaaaaacacgcctgttcctgcgaatcctccggcagagttttcggctacaaagtttgcttcattcatcacccagtactccacaggacaagtgagtgtggaaattgaatgggagctgcagaaagaaaacagcaagcgctggaatcccgaagtgcagtacacatccaattatgcaaaatctgccaacgttgatttcactgtggacaacaatggactttatactgagcctcgccccattggcacccgttaccttacccgtcccttg

SEQ ID NO: 669 - DNA, 2208 bp, Artificial Sequence
  source: /note="Description of Artificial Sequence: Synthetic polynucleotide"
atggctgccgatggttatcttccagattggctcgaggacaacctctctgagggcattcgcgagtggtgggacttgaaacctggagccccgaaacctaaagccaaccagcaaaagcaggacgacggccggggtctggtgcttcctggctacaagtacctcggacccttcaacggactcgacaagggggagcccgtcaacgcggcggacgcagcggccctcgagcacgacaaggcctacgaccagcagctcaaagcgggtgacaatccgtacctgcggtataaccacgccgacgccgagtttcaggagcgtctgcaagaagatacgtcttttgggggcaacctcgggcgagcagtcttccaggccaagaagcgggttctcgaaccttttggtctggttgaggaaggcgctaagacggctcctggaaagaaacgtccggtagagcagtcgccacaagagccagactcctcctcgggcatcggcaagacgggccagcagcccgctaaaaagagactcaattttggtcagactggcgactcagagtcagtccccgacccacaacctctcggagaacctccagcaacccccgctgctgtgggacctactacaatggcttcaggcggtggcgcaccaatggcagacaataacgaaggcgccgacggagtgggtaatgcctcaggaaattggcattgcgattccacatggctgggcgacagagtcatcaccaccagcacccgcacctgggccttgcccacctacaataaccacctctacaagcaaatctccagtgcttcaacgggggccagcaacgacaaccactacttcggctacagcaccccctgggggtattttgatttcaacagattccactgccacttttcaccacgtgactggcagcgactcatcaacaacaattggggattccggcccaagagactcaacttcaagctcttcaacatccaagtcaaggaggtcacgacgaacgatggcgtcacgaccatcgctaataaccttaccagcacggttcaagtcttctcggattcagagtaccaactgccgtacgtcctcggctctgcgcaccagggctgcctccctccgttcccggcggacgtgttcatgattccgcagtacggctacctaacgctcaacaatggcagccaggccgtgggacgttcatccttttactgcctggaatatttcccttctcagatgctgagaacgggcaacaactttaccttcagctacacctttgaggaagtgcctttccacagcagctacgcgcacagccagagcctggaccggctgatgaatcctctcatcgaccaatacctgtattacctgaacagaactcaaaatcagtccggaagtgcccaaaacaaggacttgctgtttagccgtgggtctccagctggcatgtccgttcagcccaaaaactggctacctggaccctgttatcggcagcagcgcgtttctaaaacaaaaacagacaacaacaacagcaattttacctggactggtgcttcaaaatataacctcaatgggcgtgaatccatcatcaaccctggcactgctatggcctcacacaaagacgacgaagacaagttctttcccatgagcggtgtcatgatttttggaaaagagagcgccggagcttcaaatactgcattggacaatgtcatgatcacagatgaagaggaaattaaagccactaaccctgtggccaccgaaagatttgggaccgtggcagtcaatttccagagcagcagcacagaccccgcgaccggagatgtgcatgttatgggagccttacctggcatggtgtggcaagacagagacgtatacctgcagggtcccatttgggccaaaattcctcacacggatggacactttcacccgtctcctctcatgggcggctttggacttaagcacccgcctcctcaaatcctcatcaaaaacacgcctgttcctgcgaatcctccggcagagttttcggctacaaagtttgcttcattcatcacccagtactccacaggacaagtgagtgtggaaattgaatgggagctgcagaaagaaaacagcaagcgctggaatcccgaagtgcagtacacatccaattatgcaaaatctgccaacgttgatttcactgtggacaacaatggactttatactgagcctcgccccattggcacccgttaccttacccgtcccttg

SEQ ID NO: 670 - DNA, 2208 bp, Artificial Sequence
  source: /note="Description of Artificial Sequence: Synthetic polynucleotide"
  modified_base (305)..(305): a, c, t, or g
atggctgccgatggttatcttccagattggctcgaggacaacctctctgagggcattcgcgagtggtgggacttgaaacctggagccccgaaacctaaagccaaccagcaaaagcaggacgacggccggggtctggtgcttcctggctacaagtacctcggacccttcaacggactcgacaagggggagcccgtcaacgcggcggacgcagcggccctcgagcacgacaaggcctacgaccagcagctcaaagcgggtgacaatccgtacctgcggtataaccacgccgacgccgagtttcaggngcgtctgcaagaagatacgtcttttgggggcaacctcgggcgagcagtcttccaggccaagaagcgggttctcgaaccttttggtctggttgaggaaggcgctaagacggctcctggaaagaaacgtccggtagagcagtcgccacaagagccagactcctcctcgggcatcggcaagacaggccagcagcccgctaaaaagagactcaattttggtcagactggcgactcagagtcagtccccgacccacaacctctcggagaacctccagcaacccccgctgctgtgggacctactacaatggcttcaggcggtggcgcaccaatggcagacaataacgaaggcgccgacggagtgggtaatgcctcaggaaattggcattgcgattccacatggctgggcggcagagtcatcaccaccagcacccgcacctgggccttgcccacctacaataaccacctctacaagcaaatctccagtgcttcaacgggggccagcaacgacaaccactacttcggccacagcaccccctgggggtattttgatttcaacagattccactgccacttttcaccacgtgactggcagcgactcatcaacaacaattggggattccggcccaagagactcaacttcaagctcttcaacatccaagtcaaggaggtcacgacgaacgatggcgtcacgaccatcgctaataaccttaccagcacggttcaagtcttctcggattcagagtaccaactgccgtacgtcctcggctctgcgcaccagggctgcctccctccgtccccggcggacgtgttcatgattccgcagtacggctacctaacactcaacaatggcagccaggccgtgggacgttcatccttttactgcctggaatatttcccttctcagatgctgagaacgggcaacaactttaccttcagctacacctttgaggaagtgcctttccacagcagctacgcgcacagccagagcctggaccggctgatgaatcctctcatcgaccaatacctgtattacctgaacagaactcaaaatcagtccggaagtgcccaaaacaaggacttgctgtttagccgtgggtctccagctggcatgtctgttcagcccaaaaactggctacctggaccctgttatcggcagcagcgcgtttctaaaacaaaaacagacaacaacaacagcaattttacctggactggtgcttcaaaatataacctcaatgggcgtgaatccatcatcaaccctggcactgctatggcctcacacaaagacgacaaagacaagttctttcccatgagcggtgtcatgatttttggaaaagagagcgccggagcttcaaatactgcattggacaatgtcatgatcacagatgaagaggaaattaaagccactaaccctgtggccaccgaaagatttgggaccgtggcagtcaatttccagagcagcaacacagaccccgcgaccggagatgtgcatgttatgggagccttacctggcatggtgtggcaagacagagacgtatacctgcagggtcccatttgggccaaaattcctcacacggatggacactttcacccgtctcctctcatgggcggctttggacttaagcacccgcctcctcaaatcctcatcaaaaacacgcctgttcctgcgaatcctccggcagagttttcggctacaaagtttgcttcattcatcacccagtactccacaggacaagtgagtgtggaaattgaatgggagctgcagaaagaaaacagcaagcgctggaatcccgaagtgcagtacacatccaattatgcaaaatctgccaacgttgatttcactgtggacaacaatggactttatactgagcctcgccccattggcacccgttaccttacccgtcccttg

SEQ ID NO: 671 - DNA, 2208 bp, Artificial Sequence
  source: /note="Description of Artificial Sequence: Synthetic polynucleotide"
atggctgccgatggttattttccagattggctcgaggacaacctttctgagggcattcgcgagtggtgggacttgaaacctggagccccgaaacctaaagccaaccagcaaaagcaggacgacggccggggtctggtgcttcctggctacaagtacctcggacccttcaacggactcgacaagggggagcccgtcaacgcggcggacgcagcggccctcgagcacgacaaggcctacgaccagcagctcaaagcgggtgacaatccgtacctgcggtataaccacgccgacgccgagtttcaggagcgtctgcaagaagatacgtcttttgggggcaacctcgggcgagcagtcttccaggccaagaagcgggttctcgaaccttttggtctggttgaggaaggcgctaagacggctcctggaaagaaacgtccggtagagcagtcgccacaagagccagactcctcctcgggcatcggcaggacaggccagcagcccgctaaaaagagactcaattttggtcagactggcgactcagagtcagtccccgacccacaacctctcggagaacctccagcgacccccgctgctgtgggacctactacaatggcttcaggcggtggcgcaccaatggcagacaataacgaaggtgccgacggagtgggtaatgcctcaggaaattggcattgcgattccacatggctgggcgacagagtcatcaccaccagcacccgcacctgggccttgcccacctacaataaccacctctacaagcaaatctccagtgcttcaacgggggccagcaacgacaaccactacttcggctacagcaccccctgggggtattttgatttcaacagattccactgccacttttcaccacgtgactggcagcgactcatcaacaacaattggggattccggcccaagagactcaacttcaagctcttcaacatccaagtcaaggaggtcacgacgaacgatggcgtcacgaccatcgctaataaccttaccagcacggttcaagtcttctcggattcagagtaccaactgccgtacgtcctcggctctgcgcaccagggctgcctccctccgttcccggcggacgtgttcatgattccgcagtacggctacctaacgctcaacaatggcagccaggccgtgggacgttcatccttttactgcctggaatatttcccttctcagatgctgagaacgggcaacaactttaccttcagctacacctttgaggaagtgcctttccacagcagctacgcgcacagccagagcctggaccggctgatgaatcctctcatcgaccaatacctgtattacctgaacagaactcaaaatcagtccggaagtgcccaaaacaaggacttgctgtttagccgtgggtctccagctggcatgtctgttcagcccaaaaactggctacctggaccctgttatcggcagcagcgcgtttctaaaacaaaaacagacaacaacaacagcaattttacctggactggtgcttcaaaatataacctcaatgggcgtgaatccatcatcaaccctggcactgctatggcctcacacaaagacgacgaagacaagttctttcccatgagcggtgtcatgatttttggaaaagagagcgccggagcttcaaatactgcattggacaatgtcatgatcacagatgaagaggaaattaaagccactaaccctgtggccaccgaaagatttgggaccgtggcagtcaatttccagagcagcagcccagaccccgcgaccggagatgtgcatgttatgggagccttacctggcatggtgtggcaagacagagacgtatacctgcagggtcccatttgggccaaaattcctcacacggatggacactttcacccgtctcctctcatgggcggctttggacttaagcacccgcctcctcaaatcctcatcaaaaacacgcctgttcctgcgaatcctccggcagagttttcggctacaaagtttgcttcattcatcacccagtactccacaggacaagtgagtgtggaaattgaatgggagctgcagaaagaaaacagcaagcgctggaatcccgaagtgcagtacacatccaattatgcaaaatctgccaacgttgatttcactgtggacaacaatggactttatagtgagcctcgccccattggcacccgttaccttacccgtcccttg

SEQ ID NO: 672 - DNA, 2208 bp, Artificial Sequence
  source: /note="Description of Artificial Sequence: Synthetic polynucleotide"
atggctgccgatggttatcttccagattggctcgaggacaacctctctgagggcattcgcgagtggtgggacttgaaacctggagccccgaaacctaaagccaaccagcaaaagcaggacgacggccggggtctggtgcttcctggctacaagtacctcggacccttcaacggactcgacaagggggagcccgtcaacgcggcggacgcagcggccctcgagcacgacaaggcctacgaccagcagctcaaagcgggtgacaatccgtacctgcggtataaccacgccgacgccgagtttcaggagcgtctgcaagaagatacgtcttttgggggcaacctcgggcgagcagtcttccaggccaagaagcgggttctcgaaccttttggtctggttgaggaaggcgctaagacggctcctggaaagaaacgtccggtagagcagtcgccacaagagccagactcctcctcgggcatcggcaagacaggccagcagcccgctaaaaagagactcaattttggtcagactggcgactcagagtcagtccccgacccacaacctctcggagaacctccagcaacccccgctgctgtgggacctactacaatggcttcaggcggtggcgcaccaatggcagacaataacgaaggcgccgacggagtgggtaatgcctcaggaaattggcattgcgattccacatggctgggcgacagagtcatcaccaccagcacccgcacctgggccttgcccacctacaataaccacctctacaagcaaacctccagtgcttcaacgggggccagcaacgacaaccactacttcggctacagcaccccctgggggtattttgatttcaacagattccactgccacttttcaccacgtgactggcagcgactcatcaacaacaattggggattccggcccaagagactcaacttcaagctcttcaacatccaagtcaaggaggtcacgacgaacgatggcgtcacgaccatcgctaataaccttaccagcacggttcaagtcttctcggattcagagtaccaactgccgtacgtcctcggctctgcgcaccagggctgcctccctccgttcccggcggacgtgttcatgattccgcagtacggctacctaacgctcaacaatggcagccaggccgtgggacgttcatccttttactgcctggaatatttcccttctcagatgctgagaacgggcaacaactttaccttcagctacacctttgaggaagtgcctttccacagcagctacgcgcacagccagagcctggaccggctgatgaatcctctcatcgaccaatacctgtattacctgaacagaactcaaaatcagtccggaagtgcccaaaacaaggacttgctgtttagccgtgggtctccagctggcatgtctgttcagcccaaaaactggctacctggaccctgttatcggcagcagcgcgtttctaaaacaaaaacagactacaacaacagcaattttacctggactggtgcttcaaaatataacctcaatgggcgtgaatccatcatcaaccctggcactgctatggcctcacacaaagacgacgaagacaagttctttcccatgagcggtgtcatgatttttggaaaagagagcgccggagcttcaaatactgcattggacaatgtcatgatcacagatgaagaggaaattaaagccactaaccctgtggccaccgaaagatttgggaccgtggcagtcaatttccagagcagcagcacagaccccgcgaccggagatgtgcatgttatgggagccttacctggcatggtgtggcaagacagagacgtatacctgcagggtcccatttgggccaaaattcctcacacggatggacactttcacccgtctcctctcatgggcggctttggacttaagcacccgcctcctcaaatcctcatcaaaaacacgcctgttcctgcgaatcctccggcagagttttcggctacaaagtttgcttcattcatcacccagtactccacaggacaagtgagtgtggaaattgaatgggagctgcagaaagaaaacagcaagcgctggaatcccgaagtgcagtacacatccaattatgcaaaatctgccaacgttgatttcactgtggacaacaatggactttatactgagcctcgccccattggcacccgttaccttacccgtcccttg

SEQ ID NO: 673 - DNA, 2208 bp, Artificial Sequence
  source: /note="Description of Artificial Sequence: Synthetic polynucleotide"
atggctgccgatggttatcctccagattggctcgaggacaacctctctgagggcattcgcgagtggtgggacttgaaacctggagtcccgaaacctaaagccaaccagcaaaagcaggacgacggccggggtctggtgcttcctggctacaagtacctcggacccttcaacggactcgacaagggggagcccgtcaacgcggcggacgcagcggccctcgagcacgacaaggcctacgaccagcagctcaaagcgggtgacaatccgtacctgcggtataaccacgccgacgccgagtttcaggagcgtctgcaagaagatacgtcttttgggggcaacctcgggcgagcagtcttccaggccaagaagcgggttctcgaaccttttggtctggttgaggaaggcgctaagacggctcctggaaagaaacgtccggtagagcagtcgccacaagagccagactcctcctcgggcatcggcaagacaggccagcagcccgctaaaaagagactcaattttggtcagactggcgactcagagtcagtccccgacccacaacctctcggagaacctccagcaacccccgctgctgtgggacctactacaatggcttcaggcggtggcgcaccaatggcagacaataacgaaggcgccgacggagtgggtaatgcctcaggaaattggcattgcgattccacatggctgggcgacagagtcatcaccaccagcacccgcacctgggccttgcccacctacaataaccacctctacaagcaaatctccagtgcttcaacgggggccagcaacgacaaccactacttcggctacagcaccccctgggggtattttgatttcaacagattccactgccacttttcaccacgtgactggcagcgactcatcaacaacaattggggattccggcccaagagactcaacttcaagctcttcaacatccaagtcaaggaggtcacgacgaacgatggcgtcacgaccatcgctaataaccttaccagcacggttcaagtcttctcggattcagagtaccaactgccgtacgtcctcggctctgcgcaccagggctgcctccctccgttcccggcggacgtgttcatgattccgcagtacggctacctaacgctcaacaatggcagccaggccgtgggacgttcatccttttactgcctggaatatttcccttctcagatgctgagaacgggcaacaactttaccttcagctacacctttgaggaagtgcctttccacagcagctacgcgcacagccagagcctggaccggctgatgaatcctctcatcgaccaatacctgtattacctgaacagaactcaaaatcagtccggaagtgcccaaaacaaggacttgctgtttagccgtgggtctccagctggcatgtctgttcagcccaaaaactggctacctggaccctgttatcggcagcagcgcgtttctaaaacaaaaacagacaacaacaacagcaattttacctggactggtgcttcaaaatataacctcaatgggcgtgaatccatcatcaaccctggcactgctatggcctcacacaaagacgacgaagacaagttctttcccatgagcggtgtcatgatttttggaaaagagagcgccggagcttcaaatactgcattggacaatgtcatgatcacagatgaagaggaaattaaagccactaaccctgtggccaccgaaagatttgggaccgtggcagtcaatttccagagcagcagcacagaccccgcgaccggagatgtgcatgttatgggagccttacctggcatggtgtggcaagacagagacgtatacctgcagggtcccatttgggccaaaattcctcacacggatggacactttcacccgtctcctctcatgggcggctttggacttaagcacccgcctcctcaaatcctcatcaaaaacacgcctgttcctgcgaatcctccggcagagttttcggctacaaagtttgcttcattcatcacccagtactccacaggacaagtgagtgtggaaattgaatgggagctgcagaaagaaaacagcaagcgctggaatcccgaagtgcagtacacatccaattatgcaaaatctgccaacgttgatttcactgtggacaacaatggactttatactgagcctcgccccattggcacccgttaccttacccgtcccttg

SEQ ID NO: 674 - DNA, 2196 bp, Artificial Sequence
  source: /note="Description of Artificial Sequence: Synthetic polynucleotide"
atggctgccgatggttatcttccagattggctcgaggacaacctctctgagggcattcgcgagtggtgggacttgaaacctggagccccgaaacctaaagccaaccagcaaaagcaggacgacggccggggtctggtgcttcctggctacaagtacctcggacccttcaacggactcgacaagggggagcccgtcaacgcggcggacgcagcggccctcgagcacgacaaggcctacgaccagcagctcaaagcgggtgacaatccgtacctgcggtataaccacgccgacgccgagtttcaggagcgtctgcaagaagatacgtcttttgggggcaacctcgggcgagcagtcttccaggccaagaagcgggttctcgaaccttttggtctggttgaggaaggcgctaagacggctcctggaaagaaacgtccggtagagcagtcgccacaagagccagactcctcctcgggcatcggcaagacaggccagcagcccgctaaaaagagactcaattttggtcagactggcgactcagagtcagtccccgacccacaacctctcggagaacctccagcaacccccgctgctgtgggacctactacaatggcttcaggcggtggcgcaccaatggcagacaataacgaaggcgccgacggagtgggtaatgcctcaggaaattggcattgcgattccacatggctgggcgacagagtcatcaccaccagcacccgcacctgggccttgcccacctacaataaccacctctacaagcaaatctccagtgcttcaacgggggccagcaacgacaaccactacttcggctacagcaccccctgggggtattttgatttcaacagattccactgccacttttcaccacgtgactggcagcgactcatcaacaacaattggggattccggcccaagagactcaacttcaagctcttcaacatccaagtcaaggaggtcacgacgaacgatggcgtcacgaccatcgctaataaccttaccagcacggttcaagccttctcggattcagagtaccaactgccgtacgtcctcggctctgcgcaccagggctgcctccctccgttcccggcggacgtgttcatgattccgcagtacggctacctaacgctcaacaatggcagccaggccgtgggacgttcatccttttactgcctggaatatttcccttctcagatgctgagaacgggcaacaactttaccttcagctacacctttgaggaagtgcctttccacagcagctacgcgcacagccagagcctggaccggctgatgaatcctctcatcgacccatacctgtattacctgaacagaactcaaaatcagtccggaagtgcccaaaacaaggacttgctgtttagccgtgggtctccagctggcatgtctgttcagcccaaaaactggctacctggaccctgttatcggcagcagcgcgtttctaaaacaaaaacagacaacaacaacagcaattttacctggactggtgcttcaaaatataacctcaatgggcgtgaatccatcatcaaccctggcactgctatggcctcacacaaagacgacgaagacaagttctttcccatgagcggtgtcatgatttttggaaaagagagcgccggagcttcaaatactgcattggacaatgtcatgatcacagatgaagaggaaattaaagccactaaccctgtggccaccgaaagatttgggaccgtggcagtcaatttccagagcagcagcacagaccccgcgaccggagatgtgcatgttatgggagccttacctggcatggtgtggcaagacagagacgtatacctgcagggtcccatttgggccaaaattcctcacacggatggacactttcacccgtctcctctcatgggcggctttggacttaagcacccgcctcctcaaatcctcatcaaaaacacgcctgttcctgcgaatcctccggcagagttttcggctacaaagtttgcttcattcatcacccagtactccacaggacaagtgagtgtggaaattgaatgggagctgcagaaagaaaacagcaagcgctggaatcccgaagtgcagtacacatccaattatgcaaaatctgccaacgttgatttcactgtggacaacaatggactttatactgagcctcgccccattggcacccgttacctt

SEQ ID NO: 675 - DNA, 2208 bp, Artificial Sequence
  source: /note="Description of Artificial Sequence: Synthetic polynucleotide"
atggctgccgatggttatcttccagattggctcgaggacaacctctctgagggcattcgcgagtggtgggacttgaaacctggagccccgaaacctaaagccaaccagcaaaagcaggacgacggccggggtctggtgcttcctggctacaagtacctcggacccttcaacggactcgacaagggggagcccgtcaacgcggcggacgcagcggccctcgagcacgacaaggcctacgaccagcagctcaaagcgggtgacaatccgtacctgcggtataaccacgccgacgccgagtttcaggagcgtctgcaagaagatacgtcttttgggggcaacctcgggcgagcagtcttccaggccaagaagcgggttctcgaaccttttggtctggttgaggaaggcgctaagacggctcctggaaagaaacgtccggtagagcagtcgccacaagagccagactcctcctcgggcatcggcaagacaggccagcagcccgctaaaaagagactcaattttggtcagactggcgactcagagtcagtccccgacccacaacctctcggagaacctccagcaacccccgctgctgtgggacctactacaatggcttcaggcggtggcgcaccaatggcagacaataacgaaggcgccgacggagtgggtaatgcctcaggaaattggcattgcgattccacatggctgggcgacagagtcatcaccaccagcacccgcacctgggccttgcccacctacaataaccacctctacaagcaaatctccagtgcttcaacgggggccagcaacgacaaccactacttcggctacagcaccccctgggggtattttgatttcaacagattccactgccacttttcaccacgtgactggcagcgactcatcaacaacaattggggattccggcccaagagactcaacttcaagctcttcaacatccaagtcaaggaggtcacgacgaacgatggcgtcacgaccatcgctaataaccttaccagcacggttcaagtcttctcggattcagagtaccaactgccgtacgtcctcggctctgcgcaccagggctgcctccctccgttcccggcggacgtgttcatgattccgcagtacggctacctaacgctcaacaatggcagccaggccgtgggacgttcatccttttactgcctggaatatttcccttctcagatgctgagaacgggcaacaactttaccttcagctacacctttgaggaagtgcctttccacagcagctacgcgcacagccagagcctggaccggctgatgaatcctctcatcgaccaatacctgtattacctgaacagaactcaaaatcagtccggaagtgcccaaaacaaggacttgctgtttagccgtgggtctccagctggcatgtctgttcagcccaaaaactggctacctggaccctgttatcggcagcagcgcgtttctaaaacaaaaacagacaacaacaacagcaattttacctggactggtgcttcaaaatataacctcaatgggcgtgaatccatcatcaaccctggcactgctatggcctcacacaaagacgacgaagacaagttctttcccatgagcggtgtcatgatttttggaaaagagagcgccggagcttcaaatactgcattggacaatgtcatgatcacagatgaagaggaaattaaagccactaaccctgtggccaccgaaagatttgggaccgtggcagtcaatttccagagcagcagcacagaccccgcgaccggagatgtgcatgttatgggagccttacctggcatggtgtggcaagacagagacgtatacctgcagggtcccatttgggccaaaattcctcacacggatggacactctcacccgtctcctctcatgggcggctttggacttaagcacccgcctcctcaaatcctcatcaaaaacacgcctgttcctgcgaatcctccggcagagttttcggctacaaagtttgcttcattcatcacccagtactccacaggacaagtgagtgtggaaattgaatgggagctgcagaaagaaaacagcaagcgctggaatcccgaagtgcagtacacatccaattatgcaaaatctgccaacgttgatttcactgtggacaacaatggactttatactgagcctcgccccattggcacccgttaccttacccgtcccttg

SEQ ID NO: 676 - DNA, 2208 bp, Artificial Sequence
  source: /note="Description of Artificial Sequence: Synthetic polynucleotide"
atggctgccgatggttatcttccagattggctcgaggacaacctctctgagggcattcgcgagtggtgggacttgaaacctggagccccgaaacctaaagccaaccagcaaaagcaggacgacggccggggtctggtgcttcctggctacaagtacctcggacccttcaacggactcgacaagggggagcccgtcaacgcggcggacgcagcggccctcgagcacgacaaggcctacgaccagcagctcaaagcgggtgacaatccgtacctgcggtataaccacgccgacgccgagtttcaggagcgtctgcaagaagatacgtcttttgggggcaacctcgggcgagcagtcttccaggccaagaagcgggttctcgaaccttttggtctggttgaggaaggcgctaagacggctcctggaaagaaacgtccggtagagcagtcgccacaagagccagactcctcctcgggcatcggcaagacaggccagcagcccgctaaaaagagactcaattttggtcagactggcgactcagagtcagtccccgacccacaacctctcggagaacctccagcaacccccgctgctgtgggacctactacaatggcttcaggcggtggcgcaccaatggcagacaataacgaaggcgccgacggagtgggtaatgcctcaggaaattggcattgcgattccacatggctgggcgacagagtcatcaccaccagcacccgcacctgggccttgcccacctacaataaccacctctacaagcaaatctccagtgcttcaacgggggccagcaacgacaaccactacttcggctacagcaccccctgggggtattttgatttcaacagattccactgccacttttcaccacgtgactggcagcgactcatcaacaacaattggggattccggcccaagagactcaacttcaagctcttcaacatccaagtcaaggaggtcacgacgaacgatggcgtcacgaccatcgctaataaccttaccagcacggttcaagtcttctcggattcagagtaccaactgccgtacgtcctcggctctgcgcaccagggctgcctccctccgttcccggcggacgtgttcatgattccgcagtacggctacctaacgctcaacaatggcagccaggccgtgggacgttcatccttttactgcctggaatatttcccttctcagatgctgagaacgggcaacaactttaccttcagctacacctttgaggaagtgcctttccacagcagctacgcgcacagccagagcctggaccggctgatgaatcctctcatcgacctatacctgtattacctgaacagaactcaaaatcagtccggaagtgcccaaaacaaggacttgctgtttagccgtgggtctccagctggcatgtctgttcagcccaaaaactggctacctggaccctgttatcggcagcagcgcgtttctaaaacaaaaacagacaacaacaacagcaattttacctggactggtgcttcaaaatataacctcaatgggcgtgaatccatcatcaaccctggcactgctatggcctcacacaaagacgacgaagacaagttctttcccatgagcggtgtcatgatttttggaaaagagagcgccggaacttcaaatactgcattggacaatgtcatgatcacagatgaagaggaaattaaagccactaaccctgtggccaccgaaagatttgggaccgtggcagtcaatttccagagcagcagcacagaccccgcgaccggagatgtgcatgttatgggagccttacctggcatggtgtggcaagacagagacgtatacctgcagggtcccatttgggccaaaattcctcacacggatggacactttcacccgtctcctctcatgggcggctttggacttaagcacccgcctcctcaaatcctcatcaaaaacacgcctgttcctgcgaatcctccggcagagttttcggctacaaagtttgcttcattcatcacccagtactccacaggacaagtgagtgtggaaattgaatgggagctgcagaaagaaaacagcaagcgctggaatcccgaagtgcagtacacatccaattatgcaaaatctgccaacgttgatttcactgtggacaacaatggactttatactgagcctcgccccattggcacccgttaccttacccgtcccttg

SEQ ID NO: 677 - DNA, 2208 bp, Artificial Sequence
  source: /note="Description of Artificial Sequence: Synthetic polynucleotide"
atggctgccgatggttatcttccagattggctcgaggacagcctctctgagggcattcgcgagtggtgggacttgaaacctggagccccgaaacctaaagccaaccagcaaaagcaggacgacggccggggtctggtgcttcctggctacaagtacctcggacccttcaacggactcgacaagggggagcccgtcaacgcggcggacgcagcggccctcgagcacgacaaggcctacgaccagcagctcaaagcgggtgacaatccgtacctgcggtataaccacgccgacgccgagtttcaggagcgtctgcaagaagatacgtcttttgggggcaacctcgggcgagcagtcttccaggccaagaagcgggttctcgaaccttttggtctggttgaggaaggcgctaagacggctcctggaaagaaacgtccggtagagcagtcgccacaagagccagactcctcctcgggcatcggcaagacaggccagcagcccgctaaaaagagactcaattttggtcagactggcgactcagagtcagtccccgacccacaacctctcggagaacctccagcaacccccgctgctgtgggacctactacgatggcttcaggcggtggcgcaccaatggcagacaataacgaaggcgccgacggagtgggtaatgcctcaggaaattggcattgcgattccacatggctgggcgacagagtcatcaccaccagcacccgcacctgggccttgcccacctacaataaccacctctacaagcaaatctccagtgcttcaacgggggccagcaacgacaaccactacttcggctacagcaccccctgggggtattttgatttcaacagattccactgccacttttcaccacgtgactggcagcgactcatcaacaacaattggggattccggcccaagagactcaacttcaagctcttcaacatccaagtcaaggaggtcacgacgaacgatggcgtcacgaccatcgctaataaccttaccagcacggttcaagtcttctcggattcagagtaccaactgccgtacgtcctcggctctgcgcaccagggctgcctccctccgttcccggcggacgtgttcatgattccgcagtacggctacctaacgcccaacaatggcagccaggccgtgggacgttcatccttttactgcctggaatatttcccttctcagatgctgagaacgggcaacaactttaccttcagctacacctttgaggaagtgcctttccacagcagctacgcgcacagccagagcctggaccggctgatgaatcctctcatcgaccaataccagtattacctgaacagaactcaaaatcagtccggaagtgcccaaaacaaggacttgctgtttagccgtgggtctccagctggcatgtctgttcagcccaaaaactggctacctggaccctgttatcggcagcagcgcgtttctaaaacaaaaacagacaacaacaacagcaattttacctggactggtgcttcaaaatataacctcaatgggcgtgaatccatcatcaaccctggcactgctatggcctcacacaaagacgacgaagacaagttctttcccatgagcggtgtcatgatttttggaaaagagagcgccggagcttcaaatactgcattggacaatgtcatgatcacagatgaagaggaaattaaagccactaaccctgtggccaccgaaagatttgggaccgtggcagtcaatttccagagcagcagcacagaccccgcgaccggagatgtgcatgttatgggagccttacctggcatggtgtggcaagacagagacgtatacctgcagggtcccatttgggccaaaattcctcacacggatggacactttcacccgtctcctctcatgggcggctttggacttaagcacccgcctcctcaaatcctcatcaaaaacacgcctgttcctgcgaatcctccggcagagttttcggctacaaagtttgcttcattcatcacccagtactccacaggacaagtgagtgtggaaattgaatgggagctgcagaaagaaaacagcaagcgctggaatcccgaagtgcagtacacatccaattatgcaaaatctgccaacgttgatttcactgtggacaacaatggactttatactgagcctcgccccattggcacccgttaccttacccgtcccttg

SEQ ID NO: 678 - DNA, 2208 bp, Artificial Sequence; identical to SEQ ID NO: 669
  source: /note="Description of Artificial Sequence: Synthetic polynucleotide"

SEQ ID NO: 679 - DNA, 2205 bp, Artificial Sequence
  source: /note="Description of Artificial Sequence: Synthetic polynucleotide"
atggctgccgatggttatcttccagattggctcgaggacactctctctgaaggaataagacagtggtggaagctcaaacctggcccaccaccaccaaagcccgcagagcggcataaggacgacagcaggggtcttgtgcttcctgggtacaagtacctcggacccttcaacggactcgacaagggagagccggtcaacgaggcagacgccgcggccctcgagcacgacaaagcctacgaccggcagctcgacagcggagacaacccgtacctcaagtacaaccacgccgacgcggagtttcaggagcgccttaaagaagatacgtcttttgggggcaacctcggacgagcagtcttccaggcgaaaaagagggttcttgaacctctgggcctggttgaggaacctgttaagacggctccgggaaaaaagaggccggtagagcactctcctgtggagccagactcctcctcgggaaccggaaaggcgggccagcagcctgcaagaaaaagattgaattttggtcagactggagacgcagactcagtacctgacccccagcctctcggacagccaccagcagccccctctggtctgggaactaatacgatggctacaggcagtggcgcaccaatggcagacaataacgagggcgccgacggagtgggtaattcctcgggaaattggcattgcgattccacatggatgggcgacagagtcatcaccaccagcacccgaacctgggccctgcccacctacaacaaccacctctacaaacaaatttccagccaatcaggagcctcgaacgacaatcactactttggctacagcaccccttgggggtattttgacttcaacagattccactgccacttttcaccacgtgactggcaaagactcatcaacaacaactggggattccgacccaagagactcaacttcaagctctttaacattcaagtcaaagaggtcacgcagaatgacggtacgacgacgattgccaataaccttaccagcacggttcaggtgtttactgactcggagtaccagctcccgtacgtcctcggctcggcgcatcaaggatgcctcccgccgttcccagcagacgtcttcatggtgccacagtatggatacctcaccctgaacaacgggagtcaggcagtaggacgctcttcattttactgcctggagtactttccttctcagatgctgcgtaccggaaacaactttaccttcagctacacttttgaggacgttcctttccacagcagctacgctcacagccagagtctggaccgtctcatgaatcctctcatcgaccagtacctgtattacttgagcagaacaaacactccaagtggaaccaccacgcagtcaaggcttcagttttctcgggccggagcgagtgacattcgggaccagtctaggaactggcttcctggaccctgttaccgccagcagcgagtatcaaagacatctgcggataacaacaacagtgaatactcgtggactggagctaccaagtaccacctcaatggcagagactctctggtgaatccgggcccggccatggcaagccacaaggacgatgaagaaaagttttttcctcagagcggggttctcatctttgggaagcaaggctcagagaaaacaaatgtggacattgaaaaggtcatgattacagacgaagaggaaatcaggacaaccaatcccgtggctacggagcagtatggttctgtatctaccaacctccagagaggcaacagacaagcagctaccgcagatgtcaacacacaaggcgttcttccaggcatggtctggcaggacagagatgtgtaccttcaggggcccatctgggcaaagattccacacacggacggacattttcacccctctcccctcatgggtggattcggacttaaacaccctcctccacagattctcatcaagaacaccccggtacctgcgaatccttcgaccaccttcagtgcggcaaagtttgcttccttcatcacacagtactccacgggacaggtcagcgtggagatcgagtgggagctgcagaaggaaaacagcaaacgctggaatcccgaaattcagtacacttccaactacaacaagtctgttaatgtggactttactgtggacactaatggcgtgtattcagagcctcgccccattggcaccagatacctgactcgtaatctg

SEQ ID NO: 680 - protein, 736 aa, Artificial Sequence
  source: /note="Description of Artificial Sequence: Synthetic polypeptide"
MAADGYLPDWLEDNLSEGIREWWALKPGAPQPKANQQHQDNARGLVLPDYKYLGPGNGLDKGEPVNAADVAALEHDKAYDQQLKAGDNPYLKYNHADAEFQERLKEDTSFGGNLGRAVFQAKKRLLEPLGLVEEAAKTAPGKKRPVEQSPQEPDSSAGIGKSGAQPAKKRLNFGQTGDTESVPDPQPIGEPPAAPSGVGSLTMASGGGAPVADNNEGADGVGSSSGNWHCDSQWLGDGVITTSTRTWALPTYNNHLYKQISNSTSGGSSNDNAYFGYSTPWGYFDFNRFHCHFSPRDWQRLINNNWGFRPKRLNFKLFNIQVKEVTDNNGVKTIANNLTSTVQVFTDSDYQLPYVLGSAHEGCLPPFPADVFMIPQYGYLTLNDGSQAVGRSSFYCLEYFPSQMLRTGNNFQFSYEFENVPFHSSYAHSQSLDRLMNPLIDQYLHYLPKTINGSGQNQQTLKFSVAGPSNMAVQGRNYIPGPSYRQQRVSTTVTQNNNSEFAWPGASSWALNGRNSLMNPGPAMASYKEGEDSFFPLSGSLIFGKQGTGRDNVDADKVMITNEEEIKTTNPVATESYGQVATNHQSAQAQAQTGWVQNQGILPGMVWQDRDVYLQGPIWAKIPHTDGNFHPSPLMGGFGMKHPPPQTLIKNTPVPADPPTAFNKDKLNSFITQYSTGQVSVEIEWELQKENSKRWNPEIQYTSNYYKSNNVEFAVNTEGVYSEPRPIGTRYLTRNL

SEQ ID NO: 681 - protein, 736 aa, Artificial Sequence
  source: /note="Description of Artificial Sequence: Synthetic polypeptide"
MAADGYLPDWLEDNLSEGIREWWALKPGAPQPKANQQHQDNARGLVLPGYKYLGPGNGLDKGEPVNAADAAALEHDKAYDQQLKAGDNPYLKYNHADAEFQERLKEDTSFGGNLGRAVFQAKRRLLEPLGLVEEAAKTAPGKKRPVEQSPQEPDSSAGIGKSGAQPAKKRLNFGQTGDTESVPDPQPIGEPPAAPSGVGSLTMASGGGAPVADNNEGADGVGSSSGNWHCDSQWLGDRVITTSTRTWALPTYNNHLYKQISNSTSGGSSNDNAYFGYSTPWGYFDFNRFHCHFSPRDWQRLINNNWGFRPKRLNFKLFNIQIKEVTDNNGVKTIANNLTSTVQVFTDLDYQLPYVLGSAHEGCLPPFPADVFMIPQYGYLTLNDGSQAVGRSSFYCLEYFPSQMLRTGNNFQFSYEFENVPFHSSYAHSQSLDRLMNPLIDQYLHYLSKTINGSGQNQQTLKFSVAGPSNMAVQGRNYIPGPSYRQQRVSTTVTQNNNSEFAWPGASSWALNGRNSLMNPGPAMASYKEGEDSFFPLSGSLIFGKQGTGRDNVDADKVMITNEEEIKTTNPVATESYGQVATNHQSAQAQAQTGWVQNQGILPGMVWQDRDVYLQGPIWAKIPHTDGNFHPSPLMGGFGMKHPPPQTLIKNTPVPADPPTAFNKDKLNSFITQYSTGQVSVEIEWELQKENSKRWNPEIQYTSNYYKSNNVEFAVNTEGVYSEPRPIGTRYLTRNL

SEQ ID NO: 682 - protein, 736 aa, Artificial Sequence
  source: /note="Description of Artificial Sequence: Synthetic polypeptide"
MAADGYLPDWLEDNLSEGIREWWALKPGAPQPKANQQHQDNARGLVLPGYKYLGPGNGLDKGEPVSAADAAALEHDKAYDQQLKAGDNPYLKYNHADAEFQERLKEDTSFGGNLGRAVFQAKKRLLEPLGLVEEAAKTAPGKKRPVEQSPQEPDSSAGIGKSGAQPAKKRLNFGQTGDTESVSDPQPIGEPPAAPSGVGSLTMASGGGAPVADNNEGADGVGSSSGNWHCDSQWLGDRVITTSTRTWALPTYNNHLYKQISNSTSGGSSNDNAYFGYSTPWGYFDFNRFHCHFSPRDWQRLINNNWGFRPKRLNFKLFNIQVKEVTDNNGVKTIANNLTSTVQVFTDSDYQLPYVLGSAHEGCLPPSPADVFMIPQYGYLTLNDGSQAVGRSSFYCLEYFPSQMLRTGNNFQFSYEFENVPFHSSYAHSQSLDRLMNPLIDQYLHYLSKTINGSGQNQQTLKFSVAGPSNMAVQGRNYIPGPSYRQQRVSTTVTQNNNSEFAWPGASSWALNGRNSLMNPGPAMASYKEGEDSFFPLSGSLIFGKQGTGRDDVDADKVIITNEEEIKTTNPVATESYGQVATNHQSAQAQAQTGWVQNQGILPGMVWQDRDVYLQGPIWAKIPHTDGNFHPSPLMGGFGMKHPPPQTLIKNTPVPADPPTAFNKDKLNSFITQYSTGQVSVEIEWELQKENSKRWNPEIQYTSNYYKSNNVEFAVNTEGVYSEPRPIGTRYLTRNL

SEQ ID NO: 683 - protein, 736 aa, Artificial Sequence
  source: /note="Description of Artificial Sequence: Synthetic polypeptide"
MAADGYLPDWLEDNLSEGIREWWALKPGAPQPKANQQHQDNARGLVLPGYKYLGPGNGLDKGEPVNAADAAALEHDKAYDQQLKAGDNPYLKYNHAGAEFQERLKEDTSFGGNLGRAVFQAKKRLLEPLGLVEEAAKTAPGKKRPVEQSPQEPDSSAGIGKSGAQPAKKRLNFGQTGDTESVPDPQPIGEPPAAPSGVGSLTMASGGGAPVADNNEGAGGVGSSSGNWHCDSQWLGDRVVTTSTRTWALPTYNNHLYKQISNSTSGGSSNDNAYFGYSTPWGYFDFNRFHCHFSPRDWQRLINNNWGFRPKRLNFKLFNIQVKEVTDNNGVKTIANNLTSTVQVFTDSDYQLPYVLGSAHGGCLPPFPADVFMIPQYGYLTLNDGSQAVGRSSFYCLEYFPSQMLRTGNNFQFSYEFENVPFHSSYAHSQSLDRLMNPLIDQYLHYLSKTINGSGQNQQTLKFSVAGPSNMAVQGRSYIPGPSYRQQRVSTTVTQNNNSEFAWPGASSWALNGRNSLMNPGPAMASYKEGEDSFFPLSGSLIFGKQGTGRDNVDADKVMITNEEEIKTTNPVATESYGQVATNHQSAQAQAQTGWVQNQGILPGMVWQDRDVYLQGPIWAKIPHTDGNFHPSPLMGGFGMKHPPPQTLIKNTPVPADPPTAFNKDKLNSFITQYSTGQVSVEIEWELQKENSKRWNPEIQYTSNYYKSNNVEFAVNTEGVYSEPRPIGTRYLTRNL

SEQ ID NO: 684 - protein, 736 aa, Artificial Sequence
  source: /note="Description of Artificial Sequence: Synthetic polypeptide"
MAADGYLPDWLEDNLSEGIREWWALKPGAPQPKANQQHQDNARGLVLPGYKYLGPGNGLDKGEPVNAADAAALEHDKAYDQQLKAGDNPYLKYNHADAEFQERLKEDTSFGGNLGRAVFQAKKRLLEPLGLVEEAAKTAPGKKRPVEQSPQEPDSSAGIGKSGAQPAKKRLNFGQTGDTESVPDPQPIGEPPAAPSGVGSLTMASGGGAPVADNNEGADGVGSSSGNWHCDSQWLGDRVVTTSTRTWALPTYNNHLYKQISNSTSGGSSNDNAYFGYSTPWGYFDFNRFHCHFSPRDWQRLINNNWGFRPKRLNFKLFNIQVKEVTDNNGVKTIANNLTSTVQVFTDSDYQLPYVLGSAHEGCLPPFPADVFMIPQYGYLTLNDGSQAVGRSSFYCLEYFPSQMLRTGNNFQFSYEFENVPFHSSHAHSQSLDRLMNPLIDQYLHYLSKTINGSGQNQQTLKFSVAGHSNMAVQGRNYIPGPSYRQQRVSTTVTQNNNSEFAWPGASSWALNGRNSLMNPGPAMASYKEGEDSFFPLSGSLIFGKQGTGRDNVDADKVMITNEEEIKTTNPVATESYGQVATNHQSAQAQAQTGWVQNQGILPGMVWQDRDVYLQGPIWAKIPHTDGNFHPSPLMGGFGMKHPPPQTLIKNTPVPADPPTAFNKDKLNSFITQYSTGQVSVEIGWELQKENSKRWNPEIQYTSNYYKSNNVEFAVNTEGVYSEPRPIGTRYLTRNL

SEQ ID NO: 685 - protein, 736 aa, Artificial Sequence
  source: /note="Description of Artificial Sequence: Synthetic polypeptide"
MAADGYLPDWLEDNLSEGIREWWALKPGAPQPKANQQHQDNARGLVLPGYKYLGPGNGLDKGEPVNAADAAALEHDKAYDQQLKAGDNPYLKYNHADAEFQERLKEDTSFGGNLGRAVFQAKKRLLEPLGLVEEAAKTAPGKKRPVEQSPQEPDSSAGIGKSGAQPAKKRLNFGQTGDTESVPDPQPIGEPPAAPSGVGSLTMASGGGAPVADNNEGADGVGSSSGNWHCDSQWLGDRVITTSTRTWALPTYNNRLYKQISNSTSGGSSNDNAYFGYSTPWGYFDFNRFHCHFSPRDWQRLINNNWGFRPKRLNFKPFNIQVKEVTDNNGVKTIANNLTSTVQVFTDSDYQLPYVLGSAHEGCLPPFPADVFMIPQYGYLTLNDGSQAVGRSSFYCLEYFPSQMLRTGNNFQFSYEFENVPFHSSYAHSQSLDRLMNPLIDQYLHYLSKTINGSGQNQQTLKFSVAGPSNMAVQGRNYIPGPSYRQQRVSTTVTQNNNSEFAWPGASSWALNGRNSLMNPGPAMASYKEGEDSFFPLSGSLIFGKQGTGRDNVDADKVMITNEEEIKTTNPVATESYGQVATNHQSAQAQAQTGWVQNQGILPGMVWQDRDVYLQGPIWAKIPHTDGNFHPSPLMGGFGMKHPPPQTLIKNTPVPADPPTAFNKDKLNSFITQYSTGQVSVEIEWELQKENSKRWNPEIQYTSNYYKSNNVEFAVNTEGVYSEPRPIGTRYLTRNL

SEQ ID NO: 686 - protein, 736 aa, Artificial Sequence
  source: /note="Description of Artificial Sequence: Synthetic polypeptide"
MAADGYLPDWLEDNLSEGIREWWALKPGAPQPKANQQHQDNARGLVLPGYKYLGPGNGLDKGEPVNAADAAALEHDKAYDQQLKAGDNPYLKYNHADAEFQERLKEDTSFGGNLGRAVFQAKKRLLEPLGLVEEAAKTAPGKKRPVEQSPQEPDSSAGIGKSGAQPAKKRLNFGQTGDTESVPDPQPIGEPPAAPSGVGSLTMASGGGAPVADNNEGADGVGSSSGNWHCDSQWLGDRVITTSTRTWALPTYNNHLYKQISNSTSGGSSNDNAYFGYSTPWGYFDFNRFHCHFSPRDWQRLINNNWGFRPKRLNFKLFNIQVKEVTDNNGVKTIANNLTSTVQVFTDSDYQLPYVLGSAHEGCLPPFPADVFMIPQYGYLTLNDGSQAVGRSSFYCLEYFPSQMLRTGNNFQFSYEFENVPFHSSYAHSQSLDRLMNPLIDQYLHYLSKTINGSGQNQQTLKFSVAGPSNMAVQGRNYIPGPSYRQQRVSTTVTQNNNSEFAWPGASSWALNGRNSLMNPGPAMASYKEGEDSFFPLSGSLIFGKQGTGRDNVDADKVMITNEEEIKTTNPVATESYGQVATNHQSAQAQAQTGWVQNQGILPGMVWQDRDVYLQGPIWAKIPHTDGNFHPSPLMGGFGMKHPPPQTLIKNTPVPADPPTAFNKDKLNSFITQYSTGQVSVEIEWELQKENSKRWNPEIQYTSNYYKSNNVEFAVNTEGVYSEPRPIGTRYLTRNL

SEQ ID NO: 687 - protein, 736 aa, Artificial Sequence; identical to SEQ ID NO: 686
  source: /note="Description of Artificial Sequence: Synthetic polypeptide"

SEQ ID NO: 688 - protein, 736 aa, Artificial Sequence
  source: /note="Description of Artificial Sequence: Synthetic polypeptide"
MAADGYLPDWLEDNLSEGIREWWDLKPGAPKPKANQQKQDDGRGLVLPGYKYLGPFNGLDKGEPVNAADAAALEHDKAYDQQLKAGDNPYLRYNHADAEFQERLQEDTSFGGNLGRAVFQAKKRVLEPFGLVEEGAKTAPGKKRPVEQSPQEPDSSSGIGKSGQQPAKKRLNFGQTGDSESVPDPQPLGEPPATPAALGPTTMASGGGAPMADNNEGADGVGNASGNWHCDSTWLGDRVITTSTRTWALPTYNNHLYKQISSASTGASNDNHYFGYSTPWGYFDFNRFHCHFSPRDWQRLINNNWGFRPKRLNFKLFNIQVKEVTTNDGVTTIANNLTSTVQVFSDSEYQLPYVLGSAHQGCLPPFPADVFMIPQYGYLTLNNGSKAVGRSSFYCLEYFPSQMLRTGNNFTFSYTFEEVPFHSSYAHSQSLDRLMNPLIDQYLYYLNRTQNQSGSAQNKDLLFSRGSPAGMSVQPKNWLPGPCYRQQRVSKTKTDNNNSNFTWTGASKYNLNGRESIINPGTAMASHKDDEDKFFPMSGVMIFGKESAGASNTALDNVMITDEEEIKATNPVATERFGTVAVNFQSSSTDPATGDVHVMGALPGMVWQDRDVYLQGPIWAKIPHTDGHFHPSPLMGGFGLKHPPPQILIKNTPVPANPPAEFSATKFASFITQYSTGQVSVEIEWELQKENSKRWNPEVQYTSNYAKSANVDFTVDNNGLYTEPRPIGTRYLTRPL

SEQ ID NO: 689 - protein, 736 aa, Artificial Sequence
  source: /note="Description of Artificial Sequence: Synthetic polypeptide"
MAADGYLPDWLEDNLSEGIREWWDLKPGAPKPKANQQKQDDGRGLVLPGYKYLGPFNGLDKGEPVNAADAAALEHDKAYDQQLKAGDNPYLRYNHADAEFQERLQEDTSFGGNLGRAVFQAKKRVLEPLGLVEEGAKTAPGKKRPVEQSPQEPDSSSGIGKTGQQPAKKRLNFGQTGDSESVPDPQPLGEPPATPAAVGPTTMASGGGAPMADNNEGADGVGNASGNWHCDSTWLGDRVITTSTRTWALPTYNNHLYKQISSTSTGASNDNHYFGYSTPWGYFDFNRFHCHFSPRDWQRLINNNWGFRPKRLNFKLFNIQVKEVTTNDGVTTIANNLTSTVQVFSDSEYQLPYVLGSAHQGCLPPFPADVFMIPQYGYLTLNNGSQAVGRSSFYCLEYFPSQMLRTGNNFTFSYTFEEVPFHSSYAHSQSLDRLMNPLIDQYLYYLNRTQNQSGSAQNKDLLFSRGSPAGMSVQPKNWLPGPCYRQQRVSKTKTDNNNSNFTWTGASKYNLNGRESIINPGTAVASHKDDEDKFFPMSGVMIFGKESAGASNTALDNVMITDEEEIKATNPVATERFGTVAVNFQSSSTDPATGDVHAMGALPGMVWQDRDVYLQGPIWAKIPHTDGHFHPSPLMGGFGLKNPPPQILIKNTPVPANPPAEFSATKFASFITQYSTGQVSVEIEWELQKENSKRWNPEVQYTSNYAKSANVDFTVDNNGLYTEPRPIGTRYLTRPL

SEQ ID NO: 690 - protein, 736 aa, Artificial Sequence
  source: /note="Description of Artificial Sequence: Synthetic polypeptide"
MAADGYLPDWLEDNLSEGIREWWALKPGAPQPKANQQHQDNARGLVLPGYKYLGPGNGLDKGEPVNAADAAALEHDKAYDQQLKAGDNPYLKYNHADAEFQERLKEDTSFGGNLGRAVFQAKKRLLEPLGLVEEAAKTAPGKKRPVEQSPQEPDSSAGIGKSGAQPAKKRLNFGQTGDTESVPDPQPIGEPPAAPSGVGSLTMASGGGAPVADNNEGADGVGSSSGNWHCDSQWLGDRVITTSTRTWALPTYNNHLYKQISNSTSGGSSNDNAYFGYSTPWGYFDFNRFHCHFSPRDWQRLINNNWGFRPKRLNFKLFNIQVKEVTDNNGVKTIANNLTSTVQVFTDSDYQLPYVLGSAHEGCLPPFPADVFMIPQYGYLTLNDGSQAVGRSSFYCLEYFPSQMLRTGNNFQFGYEFENVPFHSSYAHSQSLDRLMNPLIDQYLYYLSKTINGSGQNQQTLKFSVAGPSNMAVQGRNYIPGPSYRQQRVSTTVTQNNNSEFAWPGASSWALNGRNSLMNPGPAMASHKEGEDRFFPLSGSLIFGKQGTGRDNVDADKVMITNEEEIKTTNPVATESYGQVATNHQSAQAQAQTGWVQNQGILPGMVWQDRDVYLQGPIWAKIPHTDGNFHPSPLMGGFGMKHPPPQILIKNTPVPADPPTAFNKDKLNSFITQYSTGQVSVEIEWELQKENSKRWDPEIQYTSNYYKSNNVEFAVNTEGVYSEPRPIGTRYLTRNL

SEQ ID NO: 691 - protein, 736 aa, Artificial Sequence
  source: /note="Description of Artificial Sequence: Synthetic polypeptide"
MAADGYLPDWLEDNLSEGIREWWALKPGAPQPKANQQHQDNARGLVLPGYKYLGPGNGLDKGEPVNAADAAALEHDKAYDQQLKAGDNPYLKYNHADAEFQERLKEDTSFGGNLGRAVFQAKKRLLEPLGLVEEAAKTAPGKKRPVEQSPQEPDSSAGIGKSGAQPAKKRLNFGQTGDTESVPDPQPIGEPPAAPSGVGSLTMASGGGAPVADNNEGADGVGSSSGNWHCDSQWLGDRVITTSTRTWALPTYNNHLYKQISNSTSGGSSNDNAYFGYSTPWGYFDFNRFHCRFSPRDWQRLINNNWGFRPKRLNFKLFNIQVKEVTDNNGVKTIANNLTSTVQVFTDSDYQLPYVLGSAHEGCLPPFPADVFMIPQYGYLTLNDGSQAVGRSSFYCLEYFPSQMLRTGNNFQFSYEFENVPFHSSYAHSQSLDRLMNPLIDQYLYYLSKTINGSGQNQQTLKFSVAGPSNMAVQGRNYIPGPSYRQQRVSTTVTQNNNSEFAWPGASSWALNGRNSLMNPGPAMASHKEGEDRFFPLSGSLIFGKQGTGRDNVDADKVMITNEEEIKTTNPVATESYGQVATNHQSAQAQAQTGWVQNQGILPGMVWQDRDVYLQGPIWAKIPHTDGNFHPSPLMGGFGMKHPPPQILIKNAPVPADPPTAFNKDKLNSFITQYSTGQVSVEIEWELQKENSKRWNPEIQYTSNYYKSNNVEFAVNTEGVYSEPRPIGTRYLTRNL

SEQ ID NO: 692 - protein, 736 aa, Artificial Sequence
  source: /note="Description of Artificial Sequence: Synthetic polypeptide"
MAADGYLPDWLEDNLSEGIREWWALKPGAPQPKANQQHQDNARGLVLPGYKYLGPGNGLDKGEPVSAADAAALEHDKAYDQQLKAGDNPYLKYNHADAEFQERLKEDTSFGGNLGRAVFQAKKRLLEPLGLVEEAAKTAPGKKRPVEQSPQEPDSSAGIGKSGAQPAKKRLNFGQTGDTESVPDPQPIGEPPAAPSGVGSLTMASGGGAPVADNNEGADGVGSSSGNWHCDSQWLGDRVITTSTRTWALPTYNNHLYKQISNSTSGGSSNDNAYFGYSTPWGYFDFNRFHCHFSPRDWQRLINNNWGFRPKRLNFKLFNIQVKEVTDNNGVKTIANNLTSTVQVFTDSDYQLPYVLGSAHEGCLPPFPADVFMIPQYGYLTLNDGSQAVGRSSFYCLEYFPSQMLRTGNNFQFSYEFENVPFHSSYAHSQSLDRLMNPLIDQYLYYLSKTINGSGQNQQTLKFSVAGPSNMAVQGRNYIPGPSYRQQRVSTTVTQNNNSEFAWPGASSWALNGRNSLMNPGPAMASHKEGEDRFFPLSGSLIFGKQGTGRDNVDADKVMITNEEEIKTTNPVATESYGQVATNHQSAQAQAQTGWVQNQGILPGMVWQDRDVYLQGPIWAKIPHTDGNFHPSPLMGGFGMKHPPPQILIKNTPVPADPPTAFNKDKLNSFITQYSTGQVSVEIEWELQKENSKRWNPEIQYTSNYYKSNNVEFAVNTEGVYSEPRPIGTRYLTRNL

SEQ ID NO: 693 - protein, 736 aa, Artificial Sequence
  source: /note="Description of Artificial Sequence: Synthetic polypeptide"
MAADGYLPDWLEDNLSEGIREWWALKPGAPQPKANQQHQDNARGLVLPGYKYLGPGNGLDKGEPVNAADAAALEHDKAYDQQLKAGDNPYLKYNHADAEFQERLKEDTSFGGNLGRAVFQAKKRLLEPLGLVEEAAKTAPGKKRPVEQSPQEPDSSAGIGKSGAQPAKKRLNFGQTGDTESVPDPQPIGEPPAAPSGVGSLTMASGGGAPVADNNEGADGVGSSSGNWHCDSQWLGDRVITTSTRTWALPTYNNHLYKQISNSTSGGSSNDNAYFGYSTPWGYFDFNRFHCHFSPRDWQRLINNNWGFRPKRLNFKLFNIQVKEVTDNNGVKTIANNLTSTVQVFTDSDYQLPYVLGSAHEGCLPPFPADVFMIPQYGYLTLNDGSQAVGRSSFYCLEYFPSQMLRTGNNFQFSYEFENVPFHSSYAHSQSLDRLMNPLIDQYLYYLSKTINGSGQNQQTLKFSVAGPSNTAVQGRNYIPGPSYRQQRVSTTVTQNNNSEFAWPGASSWALNGRNSLMNPGPAMASHKEGEDRFFPLSGSLIFGKQGTGRDNVDADKVMITNEEEIKTTNPVATESYGQVATNHQSAQAQAQTGWVQNQGILPGMVWQDRDVYLQGPIWAKIPHTDGNFHPSPLMGGFGMKHPPPQILIKNTPVPADPPTAFNKDKLNSFITQYSTGQVSVEIEWELQKENSKRWNPEIQYTSNYYKSNNVEFAVNTEGVYSEPRPIGTRYLTRNL

SEQ ID NO: 694 - protein, 736 aa, Artificial Sequence
  source: /note="Description of Artificial Sequence: Synthetic polypeptide"
MAADGYLPDWLEDNLSEGIREWWALKPGAPQPKANQQHQDNARGLVLPGYKYLGPGNGLDKGEPVNAADAAALEHDKAYDQQLKAGDNPYLKYNHADAEFQERLKEDTSFGGNLGRAVFQAKKRLLEPLGLVEEAAKTAPGKKRPVEQSPQEPDSSAGIGKSGAQPAKKRLNFGQTGDTESVPDPQPIGEPPAAPSGVGSLTMASGGGAPVADNNEGADGVGSSSGNWHCDSQWLGDRVITTSTRTWALPTYNNHLYKQISNSTSGGSSNDNAYFGYSTPWGYFDFNRFHCHFSPRDWQRLINNNWGFRPKRLNFKLFNIQVKEVTDNNGVKTIANNLTSTVQVFTDSDYQLPYVLGSAHEGCLPPFPADVFMIPQYGYLTLNDGSQAVGRSSFYCLEYFPSQMLRTGSNFQFSYEFENVPFHSSYAHSQSLDRLMNPLIDQYLYYLSKTINGSGQNQQTLKFSVAGPSNMAVQGRNYIPGPSYRQQRVSTTVTQNNNSEFAWPGASSWALNGRNSLMNPGPAMASHKEGEDRFFPLSGSLIFGKQGTGRDNVDADKVMITNEEEIKTTNPAATESYGQVATNHQSAQAQAQTGWVQNQGILPGMVWQDRDVYLQGPIWAKIPHTDGNFHPSPLMGGFGMKHPPPQILIKNTPVPADPPTAFNKDKLNSFITQYSTGQVSVEIEWELQKENSKRWNPEIQHTSNYYKSNNVEFAVNTEGVYSEPRPIGTRYLTRNL

SEQ ID NO: 695 - protein, 736 aa, Artificial Sequence
  source: /note="Description of Artificial Sequence: Synthetic polypeptide"
MAADGYLPDWLEDNLSEGIREWWALKPGAPQPKANQQHQDNARGLVLPGYKYLGPGNGLDKGEPVNAADAAALEHDKAYDQQLKAGDNPYLKYNHADAEFQERLKEDTSFGGNLGRAVFQAKKRLLEPLGLVEEAAKTAPGKKRPVEQSPQEPDSSAGIGKSGAQPAKKRLNFGQTGDTESVPDPQPIGEPPAAPSGVGSLTMASGGGAPVADNNEGADGVGSSSGNWHCDSQWLGDRVITTSTRTWALPTYNNHLYKQISNSTSGGSSNDNAYFGYSTPWGYFDFNRFHCHFSPRDWQRLINNNWGFRPKRLNFRLFNIQVKEVTDNNGVKTIANNLTSTVQVFTDSDYQLPYVLGSAHEGCLPPFPADVFMIPQYGYLTLNDGSQAVGRSSFYCLEYFPSQMLRTGNNFQFSYEFENVPFHSSYAHSQSLDRLMNPLIDQYLYYLSKTINGSGQNQQTLKFSVAGPSNMAVQGRNYIPGPSYRQQRVSTTVTQNNNSEFAWPGASSWALNGRNSLMNPGPAMASHKEGEDRFFPLSGSLIFGKQGTGRDNVDADKVMITNEEEIKTTNPVATESYGQVATNHQSAQAQAQTGWVQSQGILPGMVWQDRDVYLQGPIWAKIPHTDGNFHPSPLMGGFGMKHPPPQILIKNTPVPADPPTAFNKDKLNSFITQYSTGQVSVEIEWELQKENSKRWNPEIQYTSNYYKSNNVEFAVNTEGVYSEPRPIGTRYLTRNL

SEQ ID NO: 696 - protein, 735 aa, Artificial Sequence
  source: /note="Description of Artificial Sequence: Synthetic polypeptide"
MAADGYLPDWLEDNLSEGIREWWALKPGAPQPKANQQHQDNARGLVLPGYKYLGPGNGLDKGEPVNAADAAALEHDKAYDQQLKAGDNPYLKYNHADAEFQERLKEDTSFGGNLGRAVFQAKKRLLEPLGLVEEAAKTAPGKKRPVEQSPQEPDSSAGIGKSGAQPAKKRLNFGQTGDTESVPDPQPIGEPPAAPSGVGSLTMASGGGAPVADNNEGADGVGSSSGNWHCDSQWLGDRVITTSTRTWALPTYNNHLYKQISNSTSGGSSNDNAYFGYSTPWRYFDFNRFHCHFSPRDWQRLINNWGFRPKRLNFKLFNIQVKEVTDNNGVKTIANNLTSTVQAFTDSDYQLPYVLGSAHEGCLPPFPADVFMIPQYGYLTLNDGSQAVGRSSFYCLEYFPSQMLRTGNNFQFSYEFENVPFHSSYAHSQSLDRLMNPLIDQYLYYLSKTINGSGQNQQTLKFSVAGPSNMAVQGRNYIPGPSYRQQRVSTTVTQNNNSEFAWPGASSWALNGRNSLMNPGPAMASHKEGEDRFFPLSGSLIFGKQGTGRDNVDADKVMITNEEEIKTTNPVATESYGQVATNHQSAQAQAQTGWVQNQGILPGMVWQDRDVYLQGPIWAKIPHTDGNFHPSPLMGGFGMKHPPPQILIKNTPVPADPPTAFNKDELNSFITQYSTGQVSVEIEWELQKENSKRWNPEIQYTSNYYKSNNVEFAVNTEGVYSEPRPIGTRYLTRNL

SEQ ID NO: 697 - protein, 735 aa, Artificial Sequence
  source: /note="Description of Artificial Sequence: Synthetic polypeptide"
MAADGYLPDWLEDNLSEGIREWWALKPGAPQPKANQQHQDNARGLVLPGYKYLGPGNGLDKGEPVNAADAAALEHDKAYDQQLKAGDNPYLKYNHADAEFQERLKEDTSFGGNLGRAVFQDKKRLLEPLGLVEEAAKTAPGKKRPVEQSPQEPDSSAGIGKSGAQPAKKRLNFGQTGDTESVPDPQPIGEPPAAPSGVGSLTMASGGGAPVADNNEGADGVGSSSGNWHCDSQWLGDRVITTSTRTWALPTYNNHLYKQISNSTSGGSSNDNAYFGYSTPWGYFDFNRFHCHFSPRDWQRLINNWGFRPKRLNFKLFNIQVKEVTDNNGVKTIANNLTSTVQVFTDSDYQLPYVLGSAHEGCLPPFPADVFMIPQYGYLTLNDGSQAVGRSSFYCLEYFPSQMLRTGNNFQFSYEFENVPFHSSYAHSQSLDRLMNPLIDQYLYYLSKTINGSGQNQQTLKFSVAGPSNMAVQGRNYIPGPSYRQQRVSTTVTQNNNSEFAWPGASSWALNGRNSLMNPGPAMASHKEGEDRFFPLSGSLIFGKQGTGRDNVDADKVMITNEEEIKTTNPVATESYGQVATNHQSAQAQAQTGWVQNQGILPGMVWQDRDVYLQGPIWAKIPHTDGNFHPSPLMGGFGMKHPPPQILIKNTPVPADPPTAFNKDKLNSFITQYSTGQVSVEIEWELQKENSKRWNPEIQYTSNYYKSNNVEFAVNTEGVYSEPRPIGTRYLTRNL

SEQ ID NO: 698 - protein, 736 aa, Artificial Sequence
  source: /note="Description of Artificial Sequence: Synthetic polypeptide"
MAADGYLPDWLEDNLSEGIREWWALKPGAPQPKANQQHQDNARGLVLPGYKYLGPGNGLDKGEPVNAADAAALEHDKAYDQQLKAGDNPYLKYNHADAEFQERLKEDTSFGGNLGRAVFQAKKRLLEPLGLVEEAAKTAPGKKRPVEQSPQEPDSSAGIGKSGAQPAKKRLNFGQTGDTESVPDPQPIGEPPAAPSGVGSLTMASGGGAPVADNNEGADGVGSSSGNWHCDSQWLGDRAITTSTRTWALPTYNNHLYKQISNSTSGGSSNDNAYFGYSTPWGYFDFNRFHCHFSPRDWQRLINNNWGFRPKRLNFKLFNIQVKEVTDNNGVKTIANNLTSTVQVFTDSDYQLPYVLGSAHEGCLPPFPADVFMIPQYGYLTLNDGSQAVGRSSFYCLEYFPSQMLRTGNNFQFSYEFENVPFHSSYAHSQSLDRLMNPLIDQYLYYLSKTINGSGQNQQTLKFSVAGPSNMAVQGRNYIPGPSYRQQRVSTTVTQNNNSEFAWPGASSWALNGRNSLMNPGPAMASHKEGEDRFFPLSGSLIFGKQGTGRDNVDADKVMTTNEEEIKTTNPVATESYGQVATNHQSAQAQAQTGWVQNQGILPGMVWQDRDVYLQGPIWAKIPHTDGNFHPSPLMGGFGMKHPPPQILIKNTPVPADPPTAFNKDKLNSFITQYSTGQVSVEIEWELQKENSKRWNPEIQYTSNYYKSNNVEFAVNTEGVYSEPRPIGTRYLTRNL

SEQ ID NO: 699 - protein, 736 aa, Artificial Sequence
  source: /note="Description of Artificial Sequence: Synthetic polypeptide"
MAADGYLPDWLEDNLSEGIREWWALKPGAPQPKANQQHQDNARGLVLPGYKYLGPGNGLDKGEPVNAADAAALEHDKAYDQQLKAGDNPYLKYNHADAEFQERLKEDTSFGGNLGRAVFQTKKRLLEPLGLVEEAAKTAPGKKRPVEQSPQEPGSSAGIGKSGAQPAKKRLNFGQTGDTESVPDPQPIGEPPAAPSGVGSLTMASGGGAPVADNNEGADGVGSSSGNWHCDSQWLGDRVITTSTRTWALPTYNNHLYKQISNSTSGGSSNDNAYFGYSTPWGYFDFNRFHCHFSPRDWQRLINNNWGFRPKRLNFKLFNIQVKEVTDNNGVKTIANNLTSTVQVFTDSDYQLPYVLGSAHEGCLPPFPADVFMIPQYGYLTLNDGSQAVGRSSFYCLEYFPSQMLRTGNNFQFSYEFENVPFHSSYAHSQSLDRLMNPLIDQYLHYLSKTINGSGQNQQTLKFSVAGPSNMAVQGRNYIPGPSYRQQRVSTTVTQNNNSEFAWPGASSWALNGRNSLMNPGPAMASHKEGEDRFFPLSGSLIFGKQGTGRDNVDADKVMITNEEEIKTTNPVATESYGQVATNHQSAQAQAQTGWVQNQGILPGMVWQDRDVYLQGPIWAKIPHTDGNFHPSPLMGGFGMKHPPPQILIKNTPVPADPPTAFNKDKLNSFITQYSTGQVSVEIEWELQKENSKRWNPEIQYTSNYYKSNNVEFAVNTEGVYSEPRPIGTRYLTRNL

SEQ ID NO: 700 - protein, 736 aa, Artificial Sequence
  source: /note="Description of Artificial Sequence: Synthetic polypeptide"
MAADGYFPDWLEDNLSEGIREWWALKPGAPQPKANQQHQDNARGLVLPGYKYLGPGNGLDKGEPVNAADAAALEHDKAYDQQLKAGDNPYLKYNHADAEFQERLKEDTSFGGNLGRAVFQAKKRLLEPLGLVEEAAKTAPGKKRPVEQSPQEPDSSAGIGKSGAQPAKKRLNFGQTGDTESVPDPQPIGESPAAPSGVGSLTMASGGGAPVADNNEGADGVGSSSGNWHCDSQWLGDRVITTSTRTWALPTYNNHLYKQISNSTSGGSSNDNAYFGYSTPWGYFDFNRFHCHFSPRDWQRLINNNWGFRPKRLNFKLFNIQVKEVTDNNGVKTIANNLTSTVQVFTDSDYQLPYVLGSAHEGCLPPFPADVFMIPQYGYLTLNDGSQAVGRSSFYCLEYLPSQMLRTGNNFQFSYEFENVPFHSSYAHSQSLDRLMNPLIDQYLHYLSKTINGSGQNQQTLKFSVAGPSNMAVQGRNYIPGPSYRQQRVSTTVTQNNNSEFAWPGASSWALNGRNSLMNPGPAVASHKEGEDRFFPLSGSLIFGKQGTGRDNVDADKVMITNEEEIKTTNPVATESYGQVATNHQSAQAQAQTGWVQNQGILPGMVWQDRDVYLQGPIWAKIPHTDGNFHPSPLMGGFGMKHPPPQILIKNTPVPADPPTAFNKDKLNSFITQYSTGQVSVEIEWELQKENSKRWNPEIQYTSNYYKSNNVEFAVNTEGVYSEPRPIGTRYLTRNL

SEQ ID NO: 701 - protein, 736 aa, Artificial Sequence
  source: /note="Description of Artificial Sequence: Synthetic polypeptide"
MAADGYLPDWLEDNLSEGIREWWALKPGAPQPKANQQHQDNARGLVLPGYKYLGPGNGLDKGEPVNAADAAALEHDKAYDQQLKAGDNPYLKYNHADAEFQERLKEDTSFGGNLGRAVFQAKKRLLEPLGPVEEAAKTAPGKKRPVEQSPQEPDSSAGIGKSGAQPAKKRLNFGQTGDTESVPDPQPIGEPPAAPSGVGSLTMASGGGAPVADNNEGADGVGSSSGNWHCDSQWLGDRVITTSTRTWALPTYNNHLYKQISNSTSGGSSNDNAYFGYSTPWGYFDFNRFHCHFSPRDWQRLINNNWGFRPKRLNFKLFNIQVKEVTDNNGVKTIANNLTSTVQVFTDSDYQLPYVLGSAHEGCLPPFPADVFMIPQYGYLTLNDGSQAVGRSSFYCLEYFPSQMLRTGNNFQFSYEFENVPFHSSYAHSQSLDRLMNPLIDQYLYYLSKTINGSGQNQQTLKFSVAGPSNMAVQGRNYIPGPSYRQQRVSTTVTQNNNSEFAWPGASSWALNGRNSLMNPGPAMASHKEGEDRFFPLSGSLIFGKQGTGRDNVDADKVMITNEEEIKTTNPVATESYGQAATNHQSAQAQAQTGWVQNQGILPGMVWQDRDVYLQGPIWAKIPHTDGNFHPSPLMGGFGMKHPPPQILIKNTPVPADPPTAFNKDKLNSFITQYSTGQVSVEIEWELQKENSKRWNPEIQYTSNYYKSNNVEFAVNTEGVYSEPRPIGTRYLTRNL

SEQ ID NO: 702 - protein, 736 aa, Artificial Sequence
  source: /note="Description of Artificial Sequence: Synthetic polypeptide"
MAADGYLPDWLEDNLSEGIREWWALKPGAPQPKANQQHQDNARGLVLPGYKYLGPGNGLDKGEPVNAADAAALEHDKAYDQQLKAGDNPYLKYNHADAEFQERLKEDTSFGGNLGRAVFQAKKRLLEPLGPVEEAAKTAPGKKRPVEQSPQEPDSSAGIGKSGAQPAKKRLNFGQTGDTESVPDPQPIGEPPAAPSGVGSLTMASGGGAPVADNNEGADGVGSSSGNWHCDSQWLGDRVITTSTRTWALPTYNNHLYKQISNSTSGGSSNDNAYFGYSTPWGYFDFNRFHCHFSPRDWRRLINNNWGFRPKRLNFKLFNIQVKEVTDNNGVKTIANNLTSTVQVFTDSDYQLPYVLGSAHEGCLPPFPADVFMIPQYGYLTLNDGSQAVGRSSFYCLEYFPSQMLRTGNNFQFSYEFENVPFHSSYAHSQSLDRLMNPLIDQYLYYLSKTINGSGQNQQTLKFSVAGPSNMAVQGRNYIPGPSYRQQRVSTTVTQNNNSEFAWPGASSWALNGRNSLMNPGPAMASHKEGEDRFFPLSGSLIFGKQGTGRDNVDADKVMITNEEEIKTTNPVATESYGQVATNHQSAQAQAQTGWVQNQGILPGMVWQDRDVYLQGPIWAKIPHTDGNFHPSPLMGGFGMKHPPPQILIKNTPVPADPPTAFNKDKLNSFITQYSTGQVSVEIEWELQKENSKRWNPEIQYTSNYYKSNNVEFAVNTEGVYSEPRPIGTRYLTRNL

SEQ ID NO: 703 - protein, 736 aa, Artificial Sequence
  source: /note="Description of Artificial Sequence: Synthetic polypeptide"
MAADGYLPDWLEDNLSEGIREWWALKPGAPQPKANQQHQDNARGLVLPGYKYLGPGNGLDKGEPVNAADAAALEHDKAYDQQLKAGDNLYLKYNHADAEFQERLKEDTSFGGNLGRAVFQAKKRLLEPLGLVEEAAKTAPGKKRPVEQSPQEPDSSAGIGKSGAQPAKKRLNFGQTGDTESVPDPQPIGEPPAAPSGVGSLTMASGGGAPVADNNEGADGVGSSSGNWHCDSQWLGDRVITTSTRTWALPTYNNHLYKQISNSTSGGSSNDNAYFGYSTPWGYFDFNRFHCHFSPRDWQRLINNNWGFRPKRLNFKLFNIQVKEVTDNNGVKTIANNLTSTVQVFTDSDYQLPYVLGSAHEGCLPPFPADVFMIPQYGYLTLNDGSQAVGRSSFYCLEYFPSQMLRTGNNFQFSYEFENVPFHSSYAHSQSLDRLMNPLIDQYLHYLSKTINGSGQNQQTLKFSVAGPSNMAVQGRNYIPGPSYRQQRVSTTVTQNNNSEFAWPGASSWALNGRNSLMNPGPAMASHKEGEDRFFPLSGSLIFGKQGTGRDNVDADKVMITNEEEIKTTNPVATESYGQVATNHQSAQAQAQTGWVQNQGILPGMVWQDRDVYLQGPIWAKIPHTDGNFHPSPLMGGFGMKHPPPQILIKNTPVPADPPTAFNKDKLNSFITQYSTGQVSVEIEWELQKENSKRWNPEIQYTSNYYKSNNVEFAVNTEGVYSEPRPIGTRYLTRNL

SEQ ID NO: 704 - protein, 736 aa, Artificial Sequence
  source: /note="Description of Artificial Sequence: Synthetic polypeptide"
MAADGYLPDWLEDNLSEGIREWWALKPGAPQPKANQQHQDNARGLVLPGYKYLGPGNGLDKGEPVNAADAAALEHDKAYDQQLKAGDNPYLKYNHADAEFQERLKEDTSFGGNLGRAVFQAKKRLLEPLGLVEEAAKTAPGKKRPVEQSPQEPDSSAGIGKSGAQPAKKRLNFGQTGDTESVPDPQPIGEPPAAPSGVGSLTMASGGGAPVADNNEGADGVGSSSGNWHCDSQWLGDRVITTSTRTWALPTYNNHLYKQISNSTSGGSSNDNAYFGYSTPWGYFDFNRFHCHFSPRDWQRLINNNWGFRPKRLNFKLFNIQVKEVTDNNGVKTIANNLTSTVQVFTDSDYQLPYVLGSAHEGCLPPFPADVFMIPQYGYLTLNDGSQAVGRSSFYCLEYFPSQMLRTGNNFQFSYEFENVPFHSSYAHSQSLDRLMNPLIDQYLHYLSKTINGSGQNQQTLKFSVAGPSNMAVQGRNYIPGPSYRQQRVSTTVTQNNNSEFAWPGASSWALNGRNSLMNPGPAMASHKEGEDRFFPLSGSLIFGKQGTGRDNVDADKVMITNEEEIKTTNPVATESYGQVATNHQSAQAQAQTGWVQNQGILPGMVWQDRDVYLQGPIWAKIPHTDGNFHPSPLMGGFGMKHPPPQILIKNTPVPADPPTAFNKDKLNSFITQYSTGQVSVEIEWELQKENSKRWNPEIQYTSNYYKSNNVEFAVNTEGVYSEPRPIGTRYLTRNL

SEQ ID NO: 705 - protein, 736 aa, Artificial Sequence
  source: /note="Description of Artificial Sequence: Synthetic polypeptide"
  MOD_RES (442)..(442): Any amino acid
MAADGYLPDWLEDNLSEGIREWWALKPGAPQPKANQQHQDNARGLVLPGYKYLGPGNGLDKGEPVNAADAAALEHDKAYDQQLKAGDNPYLKYNHADAEFQERLKEDTSFGGNLGRAVFQAKKRLLEPLGLVEEAAKTAPGKKRPVEQSPQEPDSSAGIGKSGAQPAKKRLNFGQTGDTESVPDPQPIGEPPAAPSGVGSLTMASGGGAPVADNNEGADGVGSSSGNWHCDSQWLGDRVITTSTRTWALPTYNNHLYKQISTSTSGGSSNDNAYFGYSTPWGYFDFNRFHCHFSPRDWQRLINNNWGFRPKRLNFKLFNIQVKEVTDNNGVKTIANNLTSTVQVFTDSDYQLPYVLGSAHEGCLPPFPADVFMIPQYGYLTLNDGSQAVGRSSFYCLEYFPSQMLRTGNNFQFSYEFENVPFHSSYAHSQSLDRLMNPLIDXYLHYLSKTINGSGQNQQTLKFSVAGPSNMAVQGRNYIPGPSYRQQRVSTTVTQNNNSEFAWPGASSWALNGRNSLMNPGPAMASHKEGEDRFFPLSGSLIFGKQGTGRDNVDADKVMITNEEEIKTTNPVATESYGQVATNHQSAQAQAQTGWVQNQGILPDMVWQDRDVYLQGPIWAKIPHTDGNFHPSPLMGGFGMKHPPPQILIKNTPVPADPPTAFNKDKLNSFITQYSTGQVSVEIEWELQKENSKRWNPEIQYTSNYYKSNNVEFAVNTEGVYSEPRPIGTRYLTRNL

SEQ ID NO: 706 - protein, 736 aa, Artificial Sequence; identical to SEQ ID NO: 686
  source: /note="Description of Artificial Sequence: Synthetic polypeptide"

SEQ ID NO: 707 - protein, 736 aa, Artificial Sequence; identical to SEQ ID NO: 690
  source: /note="Description of Artificial Sequence: Synthetic polypeptide"

SEQ ID NO: 708 - protein, 736 aa, Artificial Sequence
  source: /note="Description of Artificial Sequence: Synthetic polypeptide"
MAADGYLPDWLEDNLSEGIREWWALKPGAPQPRANQQHQDNARGLVLPGYKYLGPGNGLDKGEPVNAADAAALEHDKAYDQQLKAGDNPYLKYNHADAEFQERLKEDTSFGGNLGRAVFQAKKRLLEPLGLVEEAAKTAPGKKRPVEQSPQEPDSSAGIGKSGAQPAKKRLNFGQTGDTESVPDPQPIGEPPAAPSGVGSLTMASGGGAPVADNNEGADGVGSSSGNWHCDSQWLGDRVITTSTRTWALPTYNNHLYKQISNSTSGGSSNDNAYFGYSTPWGYFDFNRFHCHFSPRDWQRLINNNWGFRPKRLNFKLFNIQVKEVTDNNGVKTIANNLTSTVQVFTDSDCQLPYVLGSAHEGCLPPFPADVFMIPQYGYLTLNDGSQAVGRSSFYCLEYFPSQMLRTGNNFQFSYEFENVPFHSSYAHSQSLDRLTNPLIDQYLYYLSKTINGSGQNQQTLKFSVAGPSNMAVQGRNYIPGPSYRQQRVSTTVTQNNNSEFAWPGASSWALNGRNSLMNPGPAMASHKEGEDRFFPLSGSLIFGKQGTGRDNVDADKVMITNEEEIKTTNPVATESHGQVATNHQSAQAQAQTGWVQNQGILPGMVWQDRDVYLQGPIWAKIPHTDGNFHPSPLMGGFGMKHPPPQILIKNTPVPADPPTAFNKDKLNSFITQYSTGQVSVEIEWELQKENSKRWNPEIQYTSNYYKSNNVEFAVNTEGVYSEPRPIGTRYLTRNL

SEQ ID NO: 709 - protein, 736 aa, Artificial Sequence
  source: /note="Description of Artificial Sequence: Synthetic polypeptide"
MAADGYLPDWLEDNLSEGIREWWALKPGAPQPKANQQHQDNARGLVLPGYKYLGPGNGLDKGEPVNAADAAALEHDKAYDQQLKAGDNPYLKYNHADAEFQERLKEDTSFGGNLGRAVFQAKKRLLEPLGLVEEAAKTAPGKKRPVEQSPQEPDSSAGIGKSGAQPAKKRLNFGQTGDTESVPDPQPIGEPPAAPSGVGSLTMASGGGAPVADNNEGADGVGSSSGNWHCDSQWLGDRVITTSTRTWALPTYNNHLYKQISNSTSGGSSNDNAYFGYSTPWGYFDFNRFHCHFSPRDWQRLINNNWGFRPKRLNFKLFNIQVKEVTDNNGVKTIANNLTSTVQVFTDSDYQLPYVLGSAHEGCLPPFPADVFMIPQYGYLTLNDGSQAVGRSSFYCLEYFPSQMLRTGNNFQFSYEFENVPFHSSYAHSQSLDRLMNPPIDQYLYYLSKTINGSGQNQQTLKFSVAGPSNMAVQGRNYIPGPSYRQQRVSTTVTQNNNSEFAWPGASSWALNGRNSLMNPGPAMASHKEGEDRFFPLSGSLIFGKQGTGRDNVDADKVMITNEEEIKTTNPVATESYGQVATNHQSAQAQAQTGWVQNQGILPGMVWQDRDVYLQGPIWAKIPHTDGNFHPSPLMGGFGMKHPPPQILIKNTPVPADPPTAFNKDKLNSFITQYSTGQVSVEIEWELQKENSKRWNPEIQYTSNYYKSNNVEFAVNTEGVYGEPRPIGTRYLTRNL

SEQ ID NO: 710 - protein, 736 aa, Artificial Sequence
  source: /note="Description of Artificial Sequence: Synthetic polypeptide"
MAADGYLPDWLEDNLSEGIREWWALKPGAPQPKANQQHQDNARGLVLPGYKYLGPGNGLDKGEPVNAADAAALEHDKAYDQQLKAGDNPYLKYNHADAEFQERLKEDTSFGGNLGRAVFQAKKRLLEPLGLVEEAAKTAPGKKRPVEQSPQEPDSSAGIGKSGAQPAKKRLNFGQTGDTESVPDPQPIGEPPAAPSGVGSLTMASGGGAPVADNNEGADGVGSSSGNWHCDSQWLGDRVITTSTRTWALPTYNNHLYKQISNSTSGGSSNDNAYFGYSTPWGYFDFNRFHCHFSPRDRQRLINNNWGFRPKRLNFKLFNIQVKEVTDNNGVKTIANNLTSTVQVFTDSDYQLPYVLGSAHEGCLPPFPADVFMIPQYGYLTLNDGSQAVGRSSFYCLEYFPSQMLRTGNNFQFSYEFENVPFHSSYAHSQSLDRLMNPLIDQYLYYLSKTINGSGQNQQTLKFSVAGPSNMAVQGRNYIPGPSYRQQRVSTTVTQNNNSEFAWPGASSWALNGRNSLMNPGPAMASHKEGEDRFFPLSGSLIFGKQGTGRDNVDADKVMITNEEEIKTTNPVATESYGQVATNHQSAQAQAQTGWVQNQGILPGMVWQDRDVYLQGPIWAKIPHTDGNFHPSPLMGGFGMKHPPPQILIKNTPVPADPPTAFNKDKLNSFITQYSTGQVSVEIEWELQKENSKRWNPEIQYTSNYYKSNNVEFAVNTEGVYSEPRPIGTRYLTRNL

SEQ ID NO: 711 - protein, 736 aa, Artificial Sequence
  source: /note="Description of Artificial Sequence: Synthetic polypeptide"
MAADGYLPDWLEDNLSEGIREWWALKPGAPQPKANQQHQDNARGLVLPGYKYLGPGNGLDKGEPVNAADAAALEHDKAYDQQLKAGDNPYLKYNHADAEFQERLKEDTSFGGNLGRAVFQAKKRLLEPLGLVEEAAKTAPGKKRPVEQSPQEPDSSAGIGKSGAQPAKKRLNFGQTGDTESVPDPQPIGEPPAAPSGVGSLTMASGGGAPVADNNEGADGVGSSSGNWHCNSQWLGDRVITTSTRTWALPTYNNHLYKQISNSTSGGSSNDNAYFGYSTPWGYFDFNRFHCHFSPRDWQRLINNNWGFRPKRLNFKLFNIQVKEVTDNNGVKTIANNLTSTVQVFTDSDYQLPYVLGSAHEGCLPPFPADVFMIPQYGYLTLNDGSQAVGRSSFYCLEYFPSQMLRTGNNFQFSYEFENVPFHSSYAHSQSLDRLMNPLIDQYLYYLSKTINGSGQNQQTLKFSVAGPGNMAVQGRNYIPGPSYRQQRVSTTVTQNNNSEFAWPGASSWALNGRNSLMNPGPAMASHKEGEDRFFPLSGSLIFGKQGTGRDNVDADKVMITNEEEIKTTNPVATESYGQVATNHQSAQAQAQTGWVQNQGILPGMVWQDRDVYLQGPIWAKIPHTDGNFHPSPLMGGFGMKHPPPQILIKNTPVPADPPTAFNKDKLNSFITQYSTGQVSVEIEWELQKENSKRWNPEIQYTSNYYKSNNVEFAVNTEGVYSEPRPIGTRYLTRNL

SEQ ID NO: 712 - protein, 736 aa, Artificial Sequence
  source: /note="Description of Artificial Sequence: Synthetic polypeptide"
MAADGYLPDWLEDNLSEGIREWWALKPGAPQPKANQQHQDNARGLVLPGYRYLGPGNGLDKGEPVNAADAAALEHDKAYDQQLKAGDNPYLKYNHADAEFQERLKEDTSFGGNLGRAVFQAKKRLLEPLGLVEEAAKTAPGKKRPVEQSPQEPDSSAGIGKSGAQPAKKRLNFGQTGDTESVPDPQPIGEPPAAPSGVGSLTMASGGGAPVADNNEGADGVGSSSGNWHCDSQWLGDRVITTSTRTWALPTYNNHLYKQISNSTSGGSSNDNAYFGYSTPWGYFDFNRFHCHFSPRDWQRLINNNWGFRPKRLNFKLFNIQVKEVTDNNGVKTVANNLTSTVQVFTDSDYQLPYVLGSAHEGCLPPFPADVFMIPQYGYLTLNDGSQAVGRSSFYCLEYFPSQMLRTGNNFQFSYEFENVPFHSSYAHSQSLDRLMNPLIDQYLYYLSKTINGSGQNQQTLKFSVAGPSNMAVQGRNYIPGPSYRQQRVSTTVTQNNNSEFAWPGASSWALNGRNSLMNPGPAMASHKEGEDRFFPLSGSLIFGKQGTGRDNVDADKVMITNEEEIKTTNPVATESYGQVATNHQSAQAQAQTGWVQNQGILPGMVWQDRDVYLQGPIWAKIPHTDGNFHPSPLMGGFGMKHPPPQILIKNTPVPADPPTAFNKDKLNSFITQYSTGQVSVEIEWELQKENSKRWNPEIQYTSNYYKSNNVEFAVNTEGVYSGPRPIGTRYLTRNL

SEQ ID NO: 713 - protein, 736 aa, Artificial Sequence; identical to SEQ ID NO: 123
  source: /note="Description of Artificial Sequence: Synthetic polypeptide"

SEQ ID NO: 714 - protein, 736 aa, Artificial Sequence
  source: /note="Description of Artificial Sequence: Synthetic polypeptide"
MAADGYLPDWLEDNLSEGIREWWALKPGAPQPKANQQRQDNARGLVLPGYKYLGPGNGLDKGEPVNAADAAALEHDKAYDQQLKAGGNPCLKYNHADAEFQERLKEDTSFGGNLGRAVFQAKKRLLEPLGLVEEAAKTAPGKKRPVEQSPQEPDSSAGIGRSGAQPAKKRLNFGQTGDTESVPDPQPIGEPPAAPSGVGSLTMASGGGAPVADNNEGADGVGSSSGNWHCDSQWLGDRVITTSTRTWALPTYNNHLYKQISNSTSGGSSNDNAYFGYSTPWGYFDFNRFHCHFSPRDWQRLINNNWGFRPKRLNFKLFNIQVKEVTDNNGVKAIANNLTSTVQVFTDSDYQLPYVLGSAHEGCLPPFPADVFMIPQYGYLTLNDGSQAVGRSSFYCLEYFPSQMLRTGNNFQFSYEFENVPFHSSYAHSQSLDRLMNPLIDQYLYYLSKTIDGSGQNQQTLKFSVAGPSNMAVQGRNYIPGPSYRQQRVSTTVTQNNNSEFAWPGASSWALNGRNSLMDPGPAMASHKEGEDRFFPLSGSLIFGKQGTGRDNVDADKVMITNEEEIKTTNPVATESYGQVATNHQSAQAQAQTGWVQNQGILPGMVWQDRDVYLQGPIWAKIPHTGGNFHPSPLMGGFGMKHPPPQILIKNTPVPADPPTAFNKDKLNSFITQYSTGQVSVEIEWELQKENSKRWNPEIQYTSNYYKSNNVEFAVNTEGVYSEPRPIGTRYLTRNL

SEQ ID NO: 715 - protein, 736 aa, Artificial Sequence
  source: /note="Description of Artificial Sequence: Synthetic polypeptide"
MAADGYLPDWLEDNLSEGIREWWALKPGAPQPKANQQHQDNARGLVLPGYKYLGPGNGLDKGEPVNAADAAALEHDKAYDQQLKAGDNPYLKYNHADAEFQERLKEDTSFGGNLGRAVFQAKKRLLEPLGLVEEAAKTAPGKKRPVEQSPQEPDSSAGIGKSGAQPAKKRLNFGQTGDTESVPDPQPIGEPPAAPSGVGSLTMASGGGAPVADNNEGADGVGSSSGNWHCDSQWLGDRVITTSTRTWALPTYNNHLYKQISNSTSGGSSNDNAYFGYSTPWGYFDFNRFHCHFSPRDWQRLINNNWGFRPKRLNFKLFNIQVKEVTDNNGVKTIANNLTSTVQVFTDSDYQLPYVLGSAHEGCLPPFPADVFMIPQYGYLTLNDGSQAVGRSSFYCLEYFPSQMLRTGNNFQFSYEFENVPFHSSYAHSQSLDRLMNPLIDQYLYYLSKTINGSGQNQQTLKFSVAGPSNMAVQGRNYIPGPSYRQQRVSTTVTQNNNSEFAWPGASSWALNGRNSLMNPGPAMASHKEGEDRFFPLSGSLIFGKQGTGRDNVDADKVMITNEEEIKTTNPVATESYGQVATNHQSAQAQAQTGWVQNQGILPGMVWQDRDVYLQGPIWAKIPHTDGNFHPSPLMGGFGMKHPPPQILIKNTPVPADPPTAFNKDKLNSFITQYSTGQVSVEIEWELQKENSKRWNPEIQYTSNYYKPNNVEFAVNTEGVYSEPRPIGTRYLTRNL

SEQ ID NO: 716 - protein, 736 aa, Artificial Sequence
  source: /note="Description of Artificial Sequence: Synthetic polypeptide"
MAADGYLPDWLEDNLSEGIREWWALKPGAPQPKANQQHQDNARGLVLPGYKYLGPGNGLDKGEPVNAADAAALEHNKAYDQQLKAGDNPYLKCNHADAEFQERLKEDTSFGGNLGRAVFQAKKRPLEPLGLVEEAAKTAPGKKRPVEQSPQEPDSSAGIGKSGAQPAKKRLNFGQTGDTESVPDPQPIGEPPAAPSGVRSLTMASGGGAPVADNNEGADGVGSSSGNWHCDSQWLGDRVITTSTRTWALPTYNNHLYKQISNSTSGGSSNDNAYLGYSTPWGYFDFNRFHCHFSPRDWQRLINNNWGFRPKRLNFKLFNIQVKEVTDNNGVKTIANNLTSTVQVFTDSDYQLPYVLGSAHEGCLPPFPADVFMIPQYGYLTLNDGSQAVGRSSFYCLEYFPSQMLRTGNNFQFSYEFENVPFHSSYAHSQSLDRLMNPLIDQYLYYLSKTINGSGQNQQTLKFSVAGPSNMAVQGRNYIPGPSYRQQRVSTTVTQNNNSEFAWPGASSWALNGRNSLMNPGPTMASHKEGEDRFFPLSGSLIFGKQGTGRDNVDADKVMITNEEEIKTTNPVATESYGQVATNHQSAQAQAQTGWVQNQGILPGMVWQDRDVYLQGPIWAKIPHTDGNFHPSPLMGGFGMKHPPPQILIKNTPVPADPPTAFNKDKLNSFITQYSTGQVSVEIEWELQKENSKRWNPEIQYTSNYYKSNNVEFAVNTEGVYSEPRPIGTRYLTRNL

SEQ ID NO: 717 - protein, 736 aa, Artificial Sequence
  source: /note="Description of Artificial Sequence: Synthetic polypeptide"
MAADGYLPDWLEDNLSEGIREWWALKPGAPQPKANQQHQDNARGLVLPGYKYLGPGNGLDKGEPVNAADAAALVHDKAYDQQLKAGDNPYLKCNHADAEFQERLKEDTSFGGNLGRAVFQAKKRLLEPLGLVEEAAKTAPGKKRPVEQSPQEPDSSAGIGKSGAQPAKKRLNFGQTGDTESVPDPQPIGEPPAAPSGVGSLTMASGGGAPVADNNEGADGVGSSSGNWHCDSQWLGDRVITTSTRTWALPTYNNHLYKQISNSTSGGSSNDNAYLGYSTPWGYFDFNRFHCHFSPRDWQRLINNNWGFRPKRLNFKLFNIQVKEVTDNNGVKTIANNLTSTVQVFTDSDYQLPYVLGSAHEGCLPPFPADVFTIPQYGYLTLNDGSQAVGRSSFYCLEYFPSQMLRTGNNFQFSYEFENVPFHSSYAHSQSLDRLMNPLIDQYLYYLSKTINGSGQNQQTLKFSVAGPSNMAVQGRNYIPGPSYRQQRVSTTVTQNNNSEFAWPGASSWALNGRNSLMNPGPAMASHKEGEDRFFPLSGSLIFGKQGTGRDNVDADKVMITNEEEIKTTNPVATESYGQVATNHQSAQAQAQTGWVQNQGILPGMVWQDRDVYLQGPIWAKIPHTDGNFHPSPLMGGFGMKHPPPQILIKNTPVPADPPTAFNKDKLNSFITQYSTGQVSVEIEWELQKENSKRWNPEIQYTSNYYKSNNVEFAVNTEGVYSEPRPIGPRYLTRNF

SEQ ID NO: 718 - protein, 736 aa, Artificial Sequence
  source: /note="Description of Artificial Sequence: Synthetic polypeptide"
MAADGYLPDWLEDNLSEGIREWWALKPGAPQPKANQQHQDNARGLVLPGYKYLGPGNGLDKGEPVNAADAAALEHNKAYDQQLKAGDNPYLKCNHADAEFQERLKEDTSFGGNLGRAVFQAKKRLLEPLGLVEEAAKTAPGKKRPVEQSPQEPDSSAGIGKSGAQPAKKRLNFGQTGDTESVPDPQPIGEPPAAPSGVRSLTMASGGGAPVADNNEGADGVGSSSGNWHCDSQWLGDRVITTSTRTWALPTYNNHLYKQISNSTSGGSSNDNAYLGYSTPWGYFDFNRFHCHFSPRDWQRLINNNWGFRPKRLNFKLFNIQVKEVTDNNGVKTIANNLTSTVQVFTDSDYQLPYVLGSAHEGCLPPFPADVFMIPQYGYLTLNDGSQAVGRSSFYCLEYFPSQMLRTGNNFQFSYEFENVPFHSSYAHSQSLDRLMNPLIDQYLYYLSKTINGSGQNQQTLKFSVAGPSNMAVQGRNYIPGPSYRQQRVSTTVTQNNNSEFAWPGASSWALNGRNSLMNPGPAMASHKEGEDRFFPLSGSLIFGKQGTGRDNVDADKVMITNEEEIKTTNPVATESYGQVATNHQSAQAQAQTGWVQNQGILPGMVWQDRDVYLQGPIWAKIPHTDGNFHPSPLMGGFGMKHPPPQILIKNTPVPADPPTAFNKDKLNSFITQYSTGQVSVEIEWELQKENSKRWNPEIQYTSNYYKSNNVEFAVNTEGVYSEPRPIGTRYLTRNL

SEQ ID NO: 719 - protein, 736 aa, Artificial Sequence
  source: /note="Description of Artificial Sequence: Synthetic polypeptide"
MAADGYLPDWLEDNLSEGIREWWALKPGAPQPKANQQHQDNARGLVLPGYKYLGPGNGLDKGEPVNAADAAALEHDKAYDQQLKAGDNPYLKCNHADAEFQERLKEDTSFGGNLGRAVFQAKKRLLEPLGLVEEAAKTAPGKKRPVEQSPQEPDSSAGIGKSGAQPAKKRLNFGQTGDTESVPDPQPIGEPPAAPSGVGSLTMASGGGAPVADNNEGADGVGSSSGNWHCDSQWLGDRVITTSTRTWALPTYNNHLYKQISNSTSGGSSNDNAYLGYSTPWGYFDFNRFHCHFSPRDWQRLINNNWGFRPKRLNFELFNIQVKEVTDNNGVKTIANNLTSTVQVFTDSDYQLPYVLGSAHEGCLPPFPADVFMIPQYGYLTLNDGSQAVGRSSFYCLEYFPSQMLRTGNNFQSSYEFENVPFHSSYAHSQSLDRLMNPLIDQYLYYLSKTINGSGQNQQTLKFSVAGPSNMAVQGRNYIPGPSYRQQRASTTVTQNNNSEFAWPGASSWALNGRNSLMNPGPAMASHKEGEDRFFPLSGSLIFGKQGTGRDNVDADKVMITNEEEIKTTNPVATESYGQVATNHQSAQAQAQTGWVQNQGILPGMVWQDRDVYLQGPIWAKIPHTDGNFHPSPLMGGFGMKHPPPQILIKNTPVPADPPTAFNKDKLNSFITQYSTGQVSVEIEWELQKENSKRWNPEIQYTSNYYKSNNVEFAVNTEGVYSEPRPIGTRYLTRNL

SEQ ID NO: 720 - protein, 736 aa, Artificial Sequence
  source: /note="Description of Artificial Sequence: Synthetic polypeptide"
MAADGYLPDWLEDNLSEGIREWWALKPGAPQPKANQQHQDNARGLVLPGYKYLGPGNGLDKGEPVNAADAAALEHDKAYDQQLKAGDNPYLKCNHADAEFQERLKEDTSFGGNLGRAVFQAKKRLLEPLGLVEEAAKTAPGKKRPVEQSPQEPDSSAGIGKSGAQPAKKRLNFGQTGDTESVPDPQPIGEPPAAPPGVGSLTMASGGGAPVADNNEGADGVGSSSGNWHCDSQWLGDRVITTSTRTWALPTYNNHLYKQISNSTSGGSSNDNAYLGYSTPWGYFDFNRFHCHFSPRDWQRLINNNWGFRPKRLNFKLFNIQVKEVTDNNGVKTIANNLTSTVQVFTDSDYQLPYVLGSAHEGCLPPFPADVFMIPQYGYLTLNDGSQAVGRSSFYCLEYFPSQMLRTGNNFQFSYEFENVPFHSSYAHSQSLDRLMNPLIDQYLYYLSKTISGSGQNQQTLKFSVAGPSNMAVQGRNYIPGPSYRQQRVSTTVTQNNSSEFAWPGASSWALNGRNSLMNPGPAMASHKEGEDRFFPLSGSLIFGKQGTGRDNVDADKVMITNEEEIKTTNPVATESYGQVATNHQSAQAQAQTGWVQNQGILSGMVWQDRDVYLQGPIWAKIPHTDGNFHPSPLMGGFGMKHPPPQILIKNTPVPADPPTAFNKDKLNSFITQYSTGQVSVEIEWELQKENSKRWNPEIQYTSNYYKSNNVEFAVNTEGVYSEPRPIGTRYLTRNL

SEQ ID NO: 721 - protein, 736 aa, Artificial Sequence
  source: /note="Description of Artificial Sequence: Synthetic polypeptide"
MAADGYLPDWLEDNLSEGIREWWALKPGAPQPKANQQHQDNARGLVLPGYKYLGPGNGLDKGEPVNAADAAALEHDKAYDQQLKAGDNPYLKCNHADAEFQERLKEDTSFGGNLGRAVFQAKKRLLEPLGLVEEAAKTAPGKKRPVEQSPQEPDSSAGIGKSGAQPAKKRLNFGQTGDTESVPDPQPIGEPPAAPSGVGSLTMASGGGAPVADNNEGADGVGSSSGNWHCDSQWLGDRVITTSTRTWALPTYNNHLYKQISNSTSGGSSNDNAYLGYSTPWGYFDFNRFHCHFSPRDWQRLINNNWGFRPKRLNFKLFNIQVKEVTDNNGVKTIANNLTSTVQVFTDSDYQLPYVLGSAHEGCLPPFPADVFMIPQYGYLTLNDGSQAVGRSSFYCLEYFPSQMLRTGNNFQFSYEFENVPFHSSYAHSQSLDRLMNPLIDQYLYYLSKTINGSGQNQQTLKFSVAGPSNMAVQGRNYIPGPSYRQQRVSTTVTQNNNSEFAWPGASSWALNGRNSLMNPGPAMASHKEGEDRFFPLSGSLIFGKQGTGRDNVDADKVMITNEEEIKTTNPVATESYGQVATNHQSAQAQAQTGWVQNQGILPGMVWQDRDVYLQGPIWAKIPHTDGNFHPSPLMGGFGMKHPPPQILIKNTPVPADPPTAFNKDKLNSFITQYSTGQVSVEIEWELQKENSKRWNPEIQYTSNYYKSNNVEFAVNTEGVYSEPRPIGTRYLTRNL

SEQ ID NO: 722 - protein, 736 aa, Artificial Sequence; identical to SEQ ID NO: 721
  source: /note="Description of Artificial Sequence: Synthetic polypeptide"

SEQ ID NO: 723 - protein, 736 aa, Artificial Sequence
  source: /note="Description of Artificial Sequence: Synthetic polypeptide"
MAADGYLPDWLEDNLSEGIREWWALKPGAPQPKANQQHQDNARGLVLPGYKYLGPGNGLDKGEPVNAADAAALEHDKAYDQQLKAGDNPYLKCNHADAEFQERLKEDTSFGGNLGRAVFQAKKRLLEPLGLVEEAAKTAPGKKRPVEQSPQEPDSSAGIGKSGAQPAKKRLNFGQTGDTESVPDPQPIGEPPAAPSGVGSLTMASGGGAPVADNNEGADGVGSSSGNWHCDSQWLGDRVITTSTRTWALPTYNNHLYKQISNSTSGGSSNDNAYLDYSTPWGYFDFNRFHCHFSPRDWQRLINNNWGFRPKRLNFKLFNIQVKEVTDNNGVKTIANNLTSTVQVFTDSDYQLPYVLGSAHEGCLPPFPADVFMIPQYGYLTLNDGSQAVGRSSFYCLEYFPSQMLRTGNNFQFSYEFENVPFHSSYAHSQSLDRLMNPLIDQYLYYLSKTINGSGQNQQTLKFSVAGPSNMAVQGRNYIPGPSYRQQRVSTTVTQNNNSEFAWPGASSWALNGRNSLMNPGPAMASHKEGEDRFFPLSGSLIFGKQGTGRDNVDADKVMITNEEEIKTTNPVATESYGQVATNHQSAQAQAQTGWVQNQGILPGMVWQGRDVYLQGPIWAKIPHTDGNFHPSPLMGGFGMKHPPPQILIKNTPVPADPPTAFNKDKLNSFITQYSTGQVSVEIEWELQKENSKRWNPEIQYTSNYYKSNNVEFAVNTEGVYSEPRPIGTRYLTRNL

SEQ ID NO: 724 - protein, 736 aa, Artificial Sequence; identical to SEQ ID NO: 721
  source: /note="Description of Artificial Sequence: Synthetic polypeptide"

SEQ ID NO: 725 - protein, 736 aa, Artificial Sequence
  source: /note="Description of Artificial Sequence: Synthetic polypeptide"
MAADGYPPDWLEDNLSEGIREWWALKPGAPQPKANQQHQDNARGLVLPGYKYLGPGNGLDKGEPVNAADAAALEHDKAYDQQLKAGDNPHLKYNHADAEFQERLKEDTSFGGNLGRAVFQAKKRLLEPLGLVEEAAKTAPGKKRPVEQSPQEPDSSAGIGKSGAQPAKKRLNFGQTGDTESVPDPQPIGEPPAAPSGVGSLTMASGGGAPVADNNEGADGVGSSSGNWHCDSQWLGDRVITTSTRTWALPTYNNHLYKQISNSTSGGSSNDNAYFGYSTPWGYFDFNRFHCHFSPRDWQRLINNNWGFRPKRLNFKLFNIQVKEVTDNNGVKTIANNLTSTVQVFTDSDYQLPYVLGSAHEGCLPPFPADVFMIPQYGYLTLNDGSQAVGRSSFYCLEYFPSQMLRTGNNFQFSYEFENVPFHSSYAHSQSLDRLMNPLIDQYLYYLSKTINGSGQNQQTLKFSVAGPSNMAVQGRNYIPGPSYRQQRVSTTVTQNNNSEFAWPGASSWALNGRNSLMNPGPAMASHKEGEDRFFPLSGSLIFGKQGTGRDNVDADKVMITNEEEIKTTNPVATESYGQVATNHQSAQAQAQTGWVQNQGILPGMVWQDRDVYLQGPIWAKIPHTDGNFHPSPLMGGFGVKHPPPQILIKNTPVPADPPTAFNKDRLNSFITQYSTGQVSVEIEWELQKENSKRWNPEIQYTSNYYKSNNVEFAVNTEGVYSEPRPIGTRYLTRNL

SEQ ID NO: 726 - protein, 736 aa, Artificial Sequence
  source: /note="Description of Artificial Sequence: Synthetic polypeptide"
MAADGYLPDWLEDNLSEGIREWWALKPGAPQPKANQQHQDNARGLVLPGYKYLGPGNGLDKGEPVNAADAAALEHDKAYDQQLKAGDNPYLKYNHADAEFQERLKEDTSFGGNLGRAVFQAKKRLLEPLGLVEEAAKTAPGKKRPVEQSPQEPDSSAGIGKSGAQPAKKRLNFGQTGDTESVPDPQPIGEPPAAPSGVGSLTMASGGGAPVADNNEGADGVGSSSGNWHCDSQWLGDRVITTSTRTWALPTYNNHLYKQISNSTSGGSSNDNAYFGYSTPWGYFDFNRFHCHFSPRDWQRLINNNWGFRPKRLNFKLFNIQVKEVTDNNGVKTIANNLTSTVQVFTDSDYQLPYVLGSAHEGCLPPFPADVFMIPQYGYLTLNDGSQAVGRSSFYCLEYFPSQMLRTGNNFQFSYEFENVPFHSSYAHSQSLDRLMNPLIDQYLYYLSKTINGSGQNQQTLKFSVAGPSNMAVQGRNYIPGPSYRQQRVSTTVTQNNNSEFAWPGASSWALNGRNSLMNPGPAMASHKEGEDRFFPLSGSLIFGKQGTGRDNVDADKVMITNEEEIKTTNPVATESYGQVATNHQSAQAQAQTGWVQNQGILPGMVWQDRDVYLQGPIWAKIPHTDGNFHPSPLMGGFGVKHPPPQILIKNTPVPADPPTAFNKDKLNSFITQYSTGQVSVEIEWELQKENSKRWNPEIQYTSNYYKSNNVEFAVNTEGVYSEPRPIGTRYLTRNL

SEQ ID NO: 727 - protein, 736 aa, Artificial Sequence
  source: /note="Description of Artificial Sequence: Synthetic polypeptide"
MAADGYLPDWLEDNLSEGIREWWALKPGAPQPKANQQHQDNARGLVLPGYKYLGPGNGLDKGEPVNAADAAALEHDKAYDQQLKAGDNPYLKYNHADAEFQERLKEDTSFGGNLGRAVFQAKKRLLEPLGLVEEAAKTAPGKKRPVEQSPQEPDSSAGIGKSGAQPAKKRLNFGQTGDTESVPDPQPIGEPPAAPSGVGSLTMASGGGAPVADNNEGADGVGSSSGNWHCDSQWLGDRVITTSTRTWALPTYNNHLYKQISNSTSGGSSNDNAYFGYSTPWGYFDFNRFHCHFSPRDWQRLTNNNWGFRPKRLNFKLFNIQVKEVTDNNGVKTIANNLTSTVQVFTDSDYQLPYVLGSAHEGCLPPFPADVFMIPQYGYLTLNDGSQAVGRSSFYCLEYIPSQMLRTGNNFQFSYEFENVPFHSSYAHSQSLDRLMNPLIDQYLYYLSKTINGSGQNQQTLKFSVAGPSNMAVQGRNYIPGPSYRQQRVSTTVTQNNNSEFAWPGASSWALNGRNSLMNPGPAMASHKEGEDRFFPLSGSLIFGKQGTGRDNVDADKVMITNEEEIKTTNPVATESYGQVATNHQSAQAQAQTGWVQNQGILPGMVWQDRDVYLQGPIWAKIPHTDGNFHPSPLMGGFGVKHPPPQILIKNTPVPADPPTAFNKDKLNSFITQYSTGQVSVEIEWELQKENSKRWNPEIQYTSNYYKSNNVEFAVNTEGVYSEPRPIGTRYLTRNL

SEQ ID NO: 728 - protein, 736 aa, Artificial Sequence
  source: /note="Description of Artificial Sequence: Synthetic polypeptide"
MAADGYLPDWLEDNLSEGIREWWALKPGAPQPKANQQHQDNARGLVLPGYKYLGPGNGLDKGEPVNAADAAALEHDKAYDQQLKAGDNPYLKYNHADAEFQERLKEDTSFGGNLGRAVFQAKKRLLEPLGLVEEAAKTAPGKKRPVEQSPQEPDSSAGIGKSGAQPAKKRLNFGQTGDTESVPDPQPIGEPPAAPSGVGSLTMASGGGAPVADNNEGADGVGSSSGNWHCDSQWLGDRVITTSTRTWALPTYNNHLYKQISNSTSGGSSNDNAYFGYSTPWGYFDFNRFHCHFSPRDWQRLINNNWGFRPKRLNFKLFNIQVKEVTDNNGVKTIANNLTSTVQVFTDSDYQLPYVLGSAHEGCLPPFPADVFMIPQYGYLTLNDGSQAVGRSSFYCLEYFPSQMLRTGNNFQFSYEFENVPFHSSYAHSQSLDRLMNPLIDQYLYYLSKTINGSGQNQQTLKFSVAGPSNMAVQGRNYIPGPSYRQQRVSTTVTQNNNSEFAWPGASSWALNGRNSLMNPGPAMASHKEGEDRFFPLSGSLISGKQGTGRDNVDANKVMITNEEEIKTTNPVATESYGQVATNHQSAQAQAQTGWVQNQGILPGMVWQDRDVYLQGPIWAKIPHTDGNFHPSPLMGGFEMKHPPPQILIKNTPVPADPPTAFNKDKLNSFITQYSTGQVSVEIEWELQKENSKRWNPEIQYTSNYYKSNNVEFAVNTEGVYSEPRPIGTRYLTRNL

SEQ ID NO: 729 - protein, 736 aa, Artificial Sequence
  source: /note="Description of Artificial Sequence: Synthetic polypeptide"
MAADGYLPDWLEDNLSEGIREWWALKPGAPQPKANQQHQDNARGLVLPGYKYLGPGNGLDKGEPVNAADAAALEHDKAYDQQLKAGDNPYLKYNHADAEFQERLKEDTSFGGNLGRAVFQAKKRLLEPLGLVEEAAKTAPGKKRPVEQSPQEPDSSAGIGKSGAQPAKKRLNFGQTGDTESVPDPQPIGEPPAAPSGVGSLTIASGGGAPVADNNEGADGVGSSSGNWHCDSQWLGDRVITTSTRTWALPTYNNHLYKRISNSTSGGSSNDNAYFGYSTPWGYFDFNRFHCHFSPRDWQRLINNNWGFRPKRLNFKLFNIRVKEVTDNNGVKTITNNLTSTVQVFTDSDYQLPYVLGSAHEGCLPPFPADVFMIPQYGYLTLNDGSQAVGRSSFYCLEYFPSQMLRTGNNFQFSYEFENVPFHSSYAHSQSLDRLMNPLIDQYLYYLSKTINGSGQNQQTLKFSVAGPSNMAVQGRNYIPGPSYRQQRVSTTVTRNNNSEFAWPGASSWALNGRNSLMNPGPAMASHKEGEDRFFPLSGSLIFGKQGTGRDNVDADKVMITNEEEIKTTNPVATESYGQVATNHQSAQAQAQTGWVQNQGILPGMVWQDRDVYLQGPIWAKIPHTDGNFHPSPLMGGFGVKHPPPQILIKNTPVPADPPTAFNKDKLNSFITQYSTGQVSVEIEWELQKENSKRWNPEIQYTSNYYKSNNVEFAVNTEGVYSEPRPIGTRYLTRNL

SEQ ID NO: 730 - protein, 736 aa, Artificial Sequence
  source: /note="Description of Artificial Sequence: Synthetic polypeptide"
MAADGYLPDWLEDNLSEGIREWWALKPGAPQPKANQQHQDNARGLVLPGYKYLGPGNGLDKGEPVNAADAAALEHDKAYDQQLKAGDNPYLKYNHADAEFQERLKEDTSFGGNLGRAVFQAKKRLLEPLGLVEEAAKTAPGKKRPVEQSPQEPDSSAGIGKSGAQPAKKRLNFGQTGDTEPVPDPQPIGEPPAAPSGVGSLTMASGGGAPVADNNEGADGVGSSSGNWHCDSQWLGDRVITTSTRTWALPTYNNHLYKQISNSTSGGSSNDNAYFGYSTPWGYFDFNRFHCHFSPRDWQRLINNNWGFRPKRLNFKLFNIQVKEVTDNNGVKTIANNLTSTVQVFTDSDYQLPYVLGSAHEGCLPPFPAGVFMIPQYGYLTLNDGSQAVGRSSFYCLEYFPSQMLRTGNNFQFSYEFENVPFHSSYAHSQSLDRLMNPLIDQYLYYLSKTINGSGQNQQTLKFSVAGPSNMAVQGRNYIPGPSYRQQRVSTTATQNNNSEFAWPGASSWALNGRNSLMNPGPAMASHKEGEDRFFPLSGSLIFGKQGTGRDNVDADKVMITNEEEIKTTNPVATESYGQVATNHQSAQAQAQTGWVQNQGILPGMVWQDRDVYLQGPIWAKIPHTDGNFHPSPLMGGFGMKHPPPQILIKNTPVPADPPTAFNKDKLNSFITQYSTGQVSVEIEWELQKENSKRWNPEIQYTSNYYKSNNVEFAVNTEGVYSEPRPIGTRYLTRNL

SEQ ID NO: 731 - protein, 736 aa, Artificial Sequence
  source: /note="Description of Artificial Sequence: Synthetic polypeptide"
MAADGYLPDWLEDNLSEGIREWWALKPGAPQPKANQQHQDNARGLVLPGYKYLGPGNGLDKGEPVNAADAAALEHDKAYDQQLKAGDNPYLKYNHADAGFQERLKEDTSFGGNLGRAVFQAKKRLLEPLGLVEEAAKTAPGKKRPVEQSPQEPDSSAGIGKSGAQPAKKRLNFGQTGDTESVPVPQPIGEPPAAPSGVGSLTMASGGGAPVADNNEGADGVGSSSGNWHCDSQWLGDRVITTSTRTWALPTYNNHLYKQISNSTSGGSSNDNAYFGYSTPWGYFDFNRFHCHFSPRDWQRLINNNWGFRPKRLNFKLFNIQVKEVTDNNGVKTIANNLTSTVQVFTDSDYQLPYVLGSAHEGCLPPFPADVFMIPQYGYLTLNDGSQAVGRSSFYCLEYFPSQMLRTGNNFQFSYEFENVPFHSSYAHSQSLDRLMNPLIDQYLYYLSKTINGSGQNQQTLKFSVAGPSNMAVQGRNYIPGPSYRQQRVSTTVTQNNNSEFAWPGASSWALNGRNSLMNPGPAMASHKEGEDRFFPLSGSLIFGKQGAGRDNVDADKVMITNEEEIKTTNPVATESYGQVATNHQSAQAQAQTGWVQNQGILPGMVWQDRDVYLQGPIWAKIPHTDGNFHPSPLMGGFGMKHPPPQILIKNTPVPADPPTAFNKDKLNSFITQYSTGQVSVEIEWELQKENSKRWNPEIQYTSNYYKSNNVEFAVNTEGVYSEPRPIGTRYLTRNL

SEQ ID NO: 732 - protein, 736 aa, Artificial Sequence
  source: /note="Description of Artificial Sequence: Synthetic polypeptide"
  MOD_RES (126)..(126): Any amino acid
MAADGYLPDWLEDNLSEGIRERWALKPGAPQPKANQQHQDNARGLVLPGYKYLGPGNGLDKGEPVNAADAAALEHDKAYDQQLKAGDNPYLKYNHADAEFQERLKEDTSFGGNLGRAVFQAKKRLXEPLGLVEEAAKTAPGKKRPVEQSPQEPDSSAGIGKSGAQPAKKRLNFGQTGDTESVPDPQPIGEPPAAPSGVGSLTMASGGGAPVADNNEGADGVGSSSGNWHCDSQWLGDRVITTSTRTWALPTYNNHLYKQISNSTSGGSSNDNAYFGYSTPWGYFDFNRFHCHFSPRDWQRLINNNWGFRPKRLNFKLFNIQVKEVTDNNGVKTIANNLTSTVQVFTDSDYQLPYVLGSAHEGCLPPFPADVFMIPQYGYLTLNDGSQAVGRSSFYCLEYFPSQMLRTGNNFQFSYEFENVPFHSSYAHSQSPDRLMNPLIDQYLYYLSKTINGSGQNQQTLKFSVAGPSNMAVQGRNYIPGPSYRQQRVSTTVTQNNNSEFAWPGASSWALNGRNSLMNPGPAMASHKEGEDRFFPLSGSLIFGKQGTGRDNVDADKVMITNEEEIKTTNPVATESYGQVATNHQSAQAQAQTGWVQNQGILPGMVWQDRDVYLQGPIWAKIPHTDGNFHPSPLMGGFGVKHPPPQILIKNTPVPADPPTAFNKDKLNSFITQYSTGQVSVEIEWELQKENSKRWNPEIQYTSNYYKSNNVEFAVNTEGVYSEPRPIGTRYLTRNL

SEQ ID NO: 733 - protein, 736 aa, Artificial Sequence
  source: /note="Description of Artificial Sequence: Synthetic polypeptide"
MAADGYLPDWLEDNLSEGIREWWALKPGAPQPKANQQHQDNARGLVLPGYKYLGPGNGLDKGEPVNAADAAALEHDKAYDQQLKAGDNPYLKYNHADAEFQERLKEDTSFGGNLGRAVFQAKKRLLEPLGLVEEAAKTAPGKKRPVEQSPQEPDSSAGIGKSGAQPAKKRLNFGQTGDTESVPDPQPIGEPPAAPSGVGSLTMASGGGAPVADNNEGADGVGSSSGNWHCDSQWLGDRVITTSTRTWALPTYNNHLYKQISNSTSGGSSNDNAYLGYSTPWGYFDFNRFHCHFSPRDWQRLINNNWGFRPKRLNFKLFNIQVKEVTDNNGVKTIANNLTSTVQVFTDSDYQLPYVLGSAHEGCLPPFPADVFMIPQYGYLTLNDGSQAVGRSSFYCLEYFPSQMLRTGNNFQFSYEFENVPFHSSYAHSQSLDRLMNPLIDQYLYYLSKTINGSGQNQQTLKFSVAGPSNMAVQGRNYIPGPSYRQQRVSTTVTQNNNSEFAWPGASSWALNGRNSLMNPGPAMASHKEGEDRFFPLSGSLIFGKQGTGRDNVDADKVMITNEEEIKTTNPVATESYGQVATNHQSAQAQAQTGWVQNQGILPGMVWQDRDVYLQGPIWAKIPHTDGNFHPSPLMGGFGMKHPPPQILIKNTPVPADPPTAFNKDKLNSFITQYSTGQVSVEIEWELQKENSKRWNPEIQYTSNYYKSNNVEFAVNTEGVYSEPRPIGTRYLTRNL

SEQ ID NO: 734 - protein, 736 aa, Artificial Sequence
  source: /note="Description of Artificial Sequence: Synthetic polypeptide"
MAADGYLPDWLEDNLSEGIREWWALKPGAPQPKANQQHQDNARGLVLPGYKYLGPGNGLDKGEPVNAADAAALEHDKAYDQQLKAGDNPYLKYNHADAEFQERLKEDTSFGGNLGRAVFQAKKRLLEPLGLVEEAAKTAPGKKRPVEQSPQEPDSSAGIGKSGAQPAKKRLNFGQTGDTESVPDPQPIGEPPAAPSGVGSLTMASGGGAPVADNNEGADGVGSSSGNWHCDSQWLGDRVITTSTRTWALPTYNNHLYKQISNSTSGGSSNDNAYFGYSTPWGYFDFNRFHCHFSPRDWQRLINNNWGFRPKRLNFKLFNIQVKEVTDNNGVKTIANNLTSTVQVFTDSDYQLPYVLGSAHEGCLPPFPADVFMIPQYGYLTLNDGSQAVGRSSFYCLEYFPSQMLRTGNNFQFSYEFENVPFHSSYAHSQSLDRLMNPLIDQYLYYLSKTINGSGQNQQTLKFSVAGPSNMAVQGRNYIPGPSYRQQRVSTTVTQNNNSEFAWPGASSWALNGRNSLMNPGPAMASHKEGEDRFFPLSGSLIFGKQGTGRDNVDADKVMITNEEEIKTTNPVATESYGQVATNHQSAQAQAQTGWVQNQGILPGMVWQDRDVYLQGPIWAKIPHTDGNFHPSPLMGGFGMKHPPPQILIKNTPVPADPPTAFNKDKLDSFITQYSTGQVSVEIEWELQKENSKRWNPVIQYTSNYYKSNNVEFAVNTEGVYSEPRPIGTRYLTRNL

SEQ ID NO: 735 - protein, 736 aa, Artificial Sequence
  source: /note="Description of Artificial Sequence: Synthetic polypeptide"
MAADGYLPDWLEDNLSEGIREWWDLKPGAPKPKANQQKQDDGRGLVLPGYKYLGPFNGLDKGEPVNAADAAALEHDKAYDQQLKAGDNPYLRYNHADAEFQERLQEDTSFGGNLGRAVFQAKKRVLEPLGLVEEGAKTAPGKKRPVEQSPQEPDSSSGIGKTGQQPAKKRLNFGQTGDSESVPDPQPLGEPPATPAAVGPTTMASGGGAPMADNNEGVDGVGNASGNWHCDSTWLGDRVITTSTRTWALPTYNNHLYKQISSASTGASNDNHYFGYSTPWGYFDFNRFHCHFSPRDWQRLINNNWGFRPKRLNFKLFNIQVKEVTTNDGVTTIANNLTSTVQVFSDSEYQLPYVLGSAHQGCLPPFPADVFMIPQYGYLTLNNGSQAVGRSSFYCLEYFPSQMLRTGNNFTFSYTFEEVPFHSSYAHSQSLDRLMNPLIDQYLYYLNRTQNQSGSAQNKDLLFSRGSPAGMSVQPKNWLPGPCYRQQRVSKTKTDNNNSNFTWTGASKYNLNGRESIINPGTAMASHKDDEDKFFPMSGVMIFGKESAGASNTALDNVMITDEEEIKATNPVATERFGTVAVNFQSSSTDPATGDVHAMGALPGMVWQDRDVYLQGPIWAKIPHTDGHFHPSPLMGGFGLKNPPPQILIKNTPVPANPPAEFSATKLASFITQYSTGQVSVEIEWELQKENSKRWNPEVQYTSNYAKSANVDFTVDNNGLYTEPRPIGTRYLTRPL

SEQ ID NO: 736 - protein, 736 aa, Artificial Sequence
  source: /note="Description of Artificial Sequence: Synthetic polypeptide"
MAADGYLPDWLEDNLSEGIREWWDLKPGAPKPKANQQKQDDGRGLVLPGYKYLGPFNGLDKGEPVNAADAAALEHDKAYDQQLKAGDNPYLRYNHADAEFQERLQEDTSFGGNLGRAVFQAKKRVLEPLGLVEEGAKTAPGKRRPVEQSPQEPDSSSGIGKTGQQPAKKRLNFGQTGDSESVPDPQPLGEPPATPAAVGPTTMASGGGAPMADNNEGADGVGNASGNWHCDSTWLGDRVITTSTRTWALPTYNNHLYKQISSASTGASNDNHYFGYSTPWGYFDFNRFHCHFSPRDWQRLINNNWGFRPKRLNFKLFNIQVKEVTTNDGVTTIANNLTSTVQVFSDSEYQLPYVLGSAHQGCLPPFPADVFMIPQYGYLTLNNGSQAVGRSSFYCLEYFPSQMLRTGNNFTFSYTFEEVPFHSSYAHSQSLDRLMNPLIDQYLYYLNRTQNQSGSAQNKDLLFSRGSPAGMSVQPKNWLPGPCYRQQRVSKTKTDNNNSNFTWTGASKYNLNGRESIINPGTAMASHKDDEDKFFPMSGVMIFGKESAGASNTALDNVMITDEEEIKATNPVATERFGTVAVNFQSSSTDPATGDVHAMGALPGMVWQDRDVYLQGPIWAKIPHTDGHFHPSPLMGGFGLKNPPPQILIKNTPVPANPPAEFSATKFASFITQYSTGQVSVEIEWELQKENSKRWNPEVQYTSNYAKSANVDFTVDNNGLYTEPRPIGTRYLTRPL

SEQ ID NO: 737 - protein, 736 aa, Artificial Sequence
  source: /note="Description of Artificial Sequence: Synthetic polypeptide"
MAADGYLPDWLEDNLSEGIREWWDLKPGAPKPKANQQKQDDGRGLVLPGYKYLGPFNGLDKGEPVNAADAAALEHDKAYDQQLKAGDNPYPRYNHADAEFQERLQEDTSFGGNLGRAVFQAKKRVLEPLGLVGEGAKTAPGKKRPVEQSPQEPDSSSGIGKTGQQPAKKRLNFGQTGDSESVPDPQPLGEPPATPAAVGPTTMASGGGAPMADNNEGADGVGNASGNWHCDSTWLGDRVITTSTRTWALPTYNNHLYKQISSASTGASNDNHYFGYSTPWGYFDFNRFHCHFSPRDWQRLINNNWGFRPKRLNFKLFNIQVKEVTTNDGVTTIANNLTSTVQVFSDSEYQLPYVLGSAHQGCLPPFPADVFMIPQYGYLTLNNGSQAVGRSSFYCLEYFPSQMLRTGNNFTFSYTFEEVPFHSSYAHSQSLDRLMNPPIDQYLYYLNRTQNQSGSAQNKDLLFSRGSPAGMSVQPKNWLPGPCYRQQRVSKTKTDNNNSNFTWTGASKYNLNGRESIINPGTAMASHKDDEDKFFPMSGVMIFGKESAGASNTALDNVMITDEEEIKATNPVATERFGTVAVNFQSSSTDPATGDVHAMGALPGMVWQDRDVYLQGPIWAKIPHTDGHFHPSPLMGGFGLKNPPPQILIKNTPVPANPPAEFSATKFASFITQYSTGQVSVEIEWELQKENSKRWNPEVQYTSNYAKSANVDFTVDNNGLYTEPRPIGTRYLTRPL

SEQ ID NO: 738 - protein, 736 aa, Artificial Sequence
  source: /note="Description of Artificial Sequence: Synthetic polypeptide"
MAADGYLPDWLEDNLSEGIREWWDLKPGAPKPKANQQKQDDGRGLVLPGYKYLGPFNGLDKGEPVNAADAAALEHDKAYDQQLKAGDNPYLRYNHADAEFQERLQEDTSFGGNLGRAVFQAKKRVLEPLGLVEEGAKTAPGKKRPVEQSPQEPDSSSGIGKTGQQPAKKRLNFGQTGDSESVPDPRPLGEPPATPAAVGPTTMASGGGAPMADNNEGADGVGNASGNWHCDSTWLGDRVITTSTRTWALPTYNNHLYKQISSASTGASNDNHYFGYSTPWGYFDFNRFHCHFSPRDWQRLINNNWGFRPKRLNFKLFNIQVKEVTTNDGVTTIANNLTSTVQVFSDSEYQLPYVLGSAHQGCLPPFPADVFMIPQYGYLTLNNGSQAVGRSSFYCLEYFPSQMLRTGNNFTFSYTFEEVPFHSSYAHSQSLDRLMNPLIDQYLYYLNRTQNQSGSAQNKDLLFSRGPPAGMSVQPKNWLPGPCYRQQRVSKTKTDNNNSNFTWTGASKYNLNGRESIINPGTAMASHKDDEDKFFPMSGVMIFGKESAGASNTALDNVMITDEEEIKATNPVATERFGTVAVNFQSSSTDPATGDVHAMGALPGMVWQDRDVYLQGPIWAKIPHTDGHFHPSPLMGGFGLKNPPPQILIKNTPVPANPPAEFSATKFASFITQYSTGQVSVEIEWELQKENSKRWNPEVQYTSNYAKSANVDFTVDNNGLYTEPRPIGTRYLTRPL

SEQ ID NO: 739 - protein, 736 aa, Artificial Sequence
  source: /note="Description of Artificial Sequence: Synthetic polypeptide"
MAADGYLPDWLEDNLSEGIREWWDLKPGAPKPKANQQKQDDGRGLVLPGYKYLGPFNGLDKGEPVNAADAAALEHDKAYDQQLKAGDNPYLRYNHADAEFQERLQEDTSFGGNLGRAVFQAKKRVLEPLGLVEEGAKTAPGKKRPVEQSPQEPDSSSGIGKTGQQPAKKRLNFGQTGGSESVPDPQPLGEPPATPAAVGPTTMASGGGAPMADNNEGADGVGNASGNWHCDSTWLGDRVITTSTRTWALPTYNNHLYKQISSASTGASNDNHYFGYSTPWGYFDFNRFHCHFSPRDWQRLINNNWGFRPKRLNFKLFNIQVKEVTTNDGVTTIANNLTSTVQVFSDSEYQLPYVLGSAHQGCLPPFPADVFMIPQYGYLTLNNGSQAVGRSSFYCLEYFPSQMLRTGNNFTFSYTFEEVPFHSSYAHSQSLDRLMNPPIDQYLYYLNRTQNQSGSAQNKDLLFSRGSPAGMSVQPKNWLPGPCYRQQRVSKTKTDNNNSNFTWTGASKYNLNGRESIINPGTAMASHKDDEDKFFPMSGVMIFGKESAGASNTALDNVMITDEEEIKATNPVATERFGTVAVNFQSSSTDPATGDVHAMGALPGMVWQDRDVYLQGPIWAKIPHTDGHFHPSPLMGGFGLKNPPPQILIKNTPVPANPPAEFSATKFASFITQYSTGQVSVEIEWELQKENSKRWNPEVQYTSNYAKSANVDFTVDNNGLYTEPRPIGTRYLTRPL

SEQ ID NO: 740 - protein, 736 aa, Artificial Sequence
  source: /note="Description of Artificial Sequence: Synthetic polypeptide"
MAADGYLPDWLEDNLSEGIREWWDLKPGAPKPKANQQKQDDGRGLVLPGYKYLGPFNGLDKGEPVNAADAAALEHDKAYDQQLKAGDNPYLRYNHADAEFQERLQEDTSFGGNLGRAVFQAKKRVLEPLGLVEEGAKTAPGKKRPVEQSPQEPDSSSGIGKTGQQPAKKRLNFGQTGDSESVPDPQPLGEPPATPAAVGPTTMASGGGAPMADNNEGADGVGNASGNWHCDSTWLGDRVITTSTRTWALPTYNNHLYKQISSASTGASNDNHYFGYSTPWGYFDFNRFHCHFSPRDWQRLINNNWGFRPKRLNFKLFNIQVKEVTTNDGVTTIANNLTSTVQVFSDSEYQLPYVLGSAHQGCLPPFPADVFMIPQYGYLTLNNGSQAVGRSSFYCLEYFPSQMLRTGNNFTFSYTFEEVPFHSSYAHSQSLDRLMNPLIDQYLYYLNRTQNQSGSAQNKDLLFSRGSPAGMSVQPKNWLPGPCYRQQRVSKTKTDNNNSNFTWTGASKYNLNGRESIINPGTAVASHKDDEDKFFPMSGVMIFGKESAGASNTALDNVMITDEEEIKATNPVATERFGTVAVNFQSSSTDPATGDVHAMGALPGMVWQDRDVYLQGPIWAKIPHTDGHFHPSPLMGGFGLKNPPPQILIKNTPVPANPPAEFSATKFASFITQYSTGQVSVEIEWELQKENSKRWNPEVQYTSNYAKSANVDFTVDNNGLYTEPRPIGTRYLTRPL

SEQ ID NO: 741 - protein, 736 aa, Artificial Sequence
  source: /note="Description of Artificial Sequence: Synthetic polypeptide"
MAADGYLPDWLEDNLSEGIREWWDLKPGAPKPKANQQKQDDGRGLVLPGYKYLGPFNGLDKGEPVNAADAAALEHDKAYDQQLKAGDNPYLRYNHADAEFQERLQEDTSFGGNLGRAVFQAKKRVLEPLGLVEEGAKTAPGKKRPVEQSPQEPDSSSGIGKTGQQPAKKRLNFGQTGDSESVPDPQPLGEPPATPAAVGPTTMASGGGAPMADNNEGADGVGNASGNWHCDSTWLGDRVITTSTRTWALPTYNNHLYKQISSASTGASNDNHYFGYSTPWGYFDFNRFHCHFSPRDWQQLINNNWGFRPKRLNFKLFNIQVKEVTTNDGVTTIANNLTSTVQVFSDSEYQLPYVLGSAHQGCLPPFPADVFMIPQYGYLTLNNGSQAVGRSSFYCLEYFPSQMLRTGNNFTFSYTFEEVPFHSSYAHSQSLDRLMNPLIDQYLYYLNRTQNQSGSAQNKDLLFSRGSPAGMSVQPKNWLPGPCYRQQRVSKTKTDNNNSNFTWTGASKYNLNGRESIINPGTAMASHKDDEDKFFPMSGVMIFGKESAGASNTALDNVMITDEEEIKATNPVATERFGTVAVNFQSTSTDPATGDVHAMGALPGMVWQDRDVYLQGPIWAKIPHTDGHFHPSPLMGGFGLKNPPPQILIKNTPVPANPPAEFSATKFASFITQYSTGQVSVEIEWELQKENSKRWNPEVQYTSNYAKSADVDFTVDNNGLYTEPRPIGTRYLTRPL

SEQ ID NO: 742 - protein, 736 aa, Artificial Sequence
  source: /note="Description of Artificial Sequence: Synthetic polypeptide"
MAADGYLPDWLEDNLSEGIREWWDLKPGAPKPKANQQKQDDGRGLVLPGYKYLGPFNGLDKGEPVNAADAAALEHDKAYDQQLKAGDNPYLRYNHADAEFQERLQEDTSFGGNLGRAVFQAKKRVLEPLGLVEEGAKTAPGKKRPVEQSPQEPDSSSGIGKTGQQPAKKRLNFGQTGDSESVPDPQPLGEPPATPAAVGPTTMASGGGAPMADNNEGADGVGNASGNWHCDSTWLGDRVITTSTRTWALPTYNNHLYKQISSASTGASNDNHYFGYSTPWGYFDFNRFHCHFSPRDWQRLINNNWGFRPKRLNFKLFNIQVKEVTTNDGVTTIANNLTSTVQVFSDSEYQPPYVLGSAHQGCLPPFPADVFMIPQYGHLTLNNGSQAVGRSSFYCLEYFPSQMLRTGNNFTFSYTFEEVPFHSSYAHSQSLDRLTNPLIDQYLYYLNRTQNQSGSAQNKDLLFSRGSPAGMSVQPKNWLPGPCYRQQRVSKTKTDNNNSNFTWTGASKYNLNGRESIINPGTAMASHKDDEDKFFPMSGVMIFGKESAGASNTALDNVMITDEEEIKATNPVATERFGTVAVNFQSSSTDPATGDVHAMGALPGMVWQDRDVYLQGPIWAKIPHTDGHFHPSPLMGGFGLKNPPPQILIKNTPVPANPPAEFSATKFASFITQYSTGQVSVEIEWELQKENSKRWNPEVQYTSNYAKSANVDFTVDNNGLYTEPRPIGTRYLTRPL

SEQ ID NO: 743 - protein, 736 aa, Artificial Sequence
  source: /note="Description of Artificial Sequence: Synthetic polypeptide"
MAADGYLPDWLEDNLSEGIREWWDLKPGAPKPKANQQEQDDGRGLVLPGYKYLGPFNGLDKGEPVNAADAAALEHDKAYDQQLKAGDNPYLRYNHADAEFQERLQEDTSFGGNLGRAVFQAKKRVLEPLGLVEEGAKTAPGKKRPVEQSPQEPDSSSGIGKTGQQPAKKRLNFGQTGDSESVPDPQPLGEPPATPAAVGPTTMASGGGAPMADNNEGADGVGNASGNWHCDSTWLGDRVITTSTRTWALPTYNNHLYKQISSASTGASNDNHYFGYSTPWGYFDFNRFHCHFSPRDWQRLINNNWGFRPKRLNFKLFNIQVKEVTTNDGVTTIANNLTSTVQVFSDSEYQLPYVLGSAHQGCLPPFPADVFMIPQYGYLTLNNGSQAVGRSSFYCLEYFPSQMLRTGNNFTFSYTFEEVPFHSSYAHSQSLDRLMNPLIDQYLYYLNRTQNQSGSAQNKDLLFSRGSPAGMSVQPKNWLPGPCYRQQRVSKTKTDNNNSNFTWTGASKYNLNGRESIINPGTAMASHKDDEDKFFPMSGVMIFGKESAGASNTALDNVMITDEEEIKATNPVATERFGTVAVNFQSSSTDPATGDVHATGTLPGMVWQDRDVYLQGPIWAKIPHTDGHFHPSPLMGGFGLKNPPPQILIKTTPVPANPPAEFSATKFASFITQYSTGQVSVEIEWELQKENSKRWNPEVQYTSNYAKSANVDFTVDDNGLYTEPRPIGTRYLTRPL

SEQ ID NO: 744 - protein, 736 aa, Artificial Sequence
  source: /note="Description of Artificial Sequence: Synthetic polypeptide"
MAADGYLPDWLEDNLSEGIREWWDLKPGAPKPKANQQKQDDGRGLVLPGYKYLGPFNGLDKGEPVNAADAAALEHDKAYDQQLKAGDNPYLRYNHADAEFQERLQEDTSFGGNLGRAVFQAKKRVLEPLGLVEEGAKTAPGKKRPVEQSLQEPDSSSGIGKTGQQPAKKRLNFGQTGDSESVPDPQPLGEPPATPAAVGPTTMASGGGAPMADNNEGADGVGNASGNWHCDSTWLGDRVITTSTRTWALPTYNNHLYKQISSASTGASNDNHYFGYSTPWGYFDFNRFHCHFSPRDWQRLINNNWGFRPKRLNFKLFNIQVKEVTTNDGVTTIANNLTSTVQVFSDSEYQLPYVLGSAHQGCLPPFPADVFMIPQYGYLTLNNGSQAVGRSSFYCLEYFPSQMLRTGNNFTFSYTFEEVPFHSSYAHSQSLDRLMNPLIDQYLYYLNRTQNQSGSAQNKDLLFSRGSPAGMSVQPKNWLPGPCYRQQRVSKTKTDNDNSNFTWTGASKYNLNGRESIINPGTAMASHKDDEDKFFPMSGVMIFGKESAGASNTALDNVMITDEEEIKATNPVATERFGTVAVNFQSSSTDPATGDVHAMGALPGMVWQDRDVYLQGPIWAKIPHTDGHFHPSPLMGGFGLKNPPPQILIKNTPVPANPPAEFSATKFASFITQYSTGQVSVEIEWELQKENSKRWNPEVQYTSNYAKSANVDFTVDNNGLYTEPRPIGTRYLTRPL

SEQ ID NO: 745 - protein, 736 aa, Artificial Sequence
  source: /note="Description of Artificial Sequence: Synthetic polypeptide"
MAADGYLPDWLEDNLSEGIREWWDLKPGAPKPKANQQKQDDGRGLVLPGYKYLGPFNGLDKGEPVNAADAAALEHDKAYDQQLKAGDNPYLRYNHADAEFQERLQEDTSFGGNLGRAVFQAKKRVLEPLGLVEEGAKTAPGKKRPVEQSPQEPDSSSGIGKTGQQPAKKRLNFGQTGDSESVPDPQPLGEPPATPAAVGPTTMASGGGAPMADNNEGADGVGNASGNWHCDSTWLGDRVITTSTRTWALPTYNNHLYKQISSASTGASNDNHYFGYSTPWGYFDFNRFHCHFSPRDWQRLINNNWGFRPKRLNFKLFNIQVKEVTTNDGVTTIANNLTSTVQVFSDSEYQLPYVLGSAHQGCLPPFPADVFMIPQYGYLTLNNGSQAVGRSSFYCLEYFPSQMLRTGNNFTFSYTFEEAPFHSSYAHSQSLDRLMNPLIDQYLYYLNRTQNQSGSAQNKDLLFSRGSPAGMSVQPKNWLPGPCYRQQRVSKTKTDNNNSNFTWTGASKYNLNGRESIINPGTAMASHKDDEDKFFPMSGVMIFGKESAGASNTALDNVMITDEEEIKATNPVATERFGTVAVNFQSSSTDPATGDVHAMGALPGMVWQDRDVYLQGPIWAKIPHTDGHFHPSPLMGGFGLKNPPPQILIKNTPVPANPPAEFSATKFASFITQYSTGQVSVEIEWELQKENSKRWNPEVQYTSNYAKSANVDFTVDNNGLYTEPRPVGTRYLTRPL

SEQ ID NO: 746 - protein, 736 aa, Artificial Sequence
  source: /note="Description of Artificial Sequence: Synthetic polypeptide"
MAADGYLPDWLEDNLSEGIREWWDLKPGAPKPKANQQKQDDGRGLVLPGYKYLGPFNGLDKGEPVNAADAAALEHDKAYDQQLKAGDNPYLRYNHADAEFQERLQENTSFGGNLGRAVFQAKKRVLEPLGLVEEGAKTAPGKKRPVEQSPQEPDSSSGIGKTGQQPAKKRLNFGQTGDSESVPDPQPLGEPPATPAAVGPTTMASGGGAPMADNNEGADGVGNASGNWHCDSTWLGDRVITTSTRTWALPTYNNHLYKQISSASTGASNDNHYFGYSTPWGYFDFNRFHCHFPPRDWQRLINNNWGFRPKRLNFKLFNIQVKEVTSNDGVTTIANNLTSTVQVFSDSEYQLPYVLGSAHQGCLPPFPADVFMIPQYGYLTLNNGSQAVGRSSFYCLEYFPSQMLRTGNNFTFSYTFEEVPFHSSYAHSQSLDRLMNPLIDQYLYYLNRTQNQSGSAQNKDLLFSRGSPAGMSVQPKNWLPGPCYRQQRVSKTKTDNNNSNFTWTGASKYNLNGRESIINPGTAMASHKDDEDKFFPMSGVMIFGKESAGASNTALDNVMITDEEEIKATNPVATERFGTVAVNFQSSSTDPATGDVHAMGALPGMVWQDRDVYLQGPIWAKIPHTDGHFHPSPLMGGFGLKNPPPQILIKNTPVPANPPAEFSATKFASFITQYSTGQVSVEIEWELQKENSKRWNPEVQYTSNYAKSANVDFTVDNNGLYTEPRPIGTRYLTRPL

SEQ ID NO: 747 - protein, 736 aa, Artificial Sequence
  source: /note="Description of Artificial Sequence: Synthetic polypeptide"
MAADGYLPDWLEDNLSEGIREWWDLKPGAPKPKANQQKQDDGRGLVLPGYKYLGPFNGLDKGEPVNAADAAALEHDKAYDQQLKAGDNPYLRYNHADAEFQERLQEDTSFGGNLGRAVFQAKKRVLEPLGLVEEGAKTAPGKKRPVEQSPQEPDSSSGIGKTGQQPAKKRLNFGQTGDSESVPDPQPLGEPPATPAAVGPTTMASGGGAPMADNNEGADGVGNASGNWHCDSTWLGDRVITTSTRTWALPTYNNHLYKQISSASTGASNDNHYFGYSTPWGYFDFNRFHCHFSPRDWQRLINNNWGFRPKRLNFKLFNIQVKEVTTNDGVTTIANNLTSTVQVFSDSEYQLPYVLGSAHQGCLPPFPADVFMIPQYGYLTLNNGSQAVGRSSFYCLEYFPSQMLRTGNNFTFSYTFEEVPFHSSYAHSQSLDRLMNPLIDQYLYYLNRTQNQSGSAQNKDLLFSRGSPAGTSVQPKNWLPGPCYRQQRVSKTKTDNNNSNFTWTGASKYNLNGRESIINPGTAMASHKDDEDKFFPMSGVMIFGKESAGASNTALDNVMITDEEEIKATNPVATERFGTVAVNFQSSSTDPATGDVHAMGALPGMVWQDRDVYLQGPIWAKIPHTDGHFHPSPLMGGFGLKNPPPQILIKNTPVPANPPAEFSATKFASFITQYSTGQVSVEIEWELQKENSKRWNPEVQYTSNYAKSANVDFTVDNNGLYTGPRPIGTRYLTRPL

SEQ ID NO: 748 - protein, 736 aa, Artificial Sequence
  source: /note="Description of Artificial Sequence: Synthetic polypeptide"
MAADGYLPDWLEDNLSEGIREWWDLKPGAPKPKANQQKQDDGRGLVLPGYKYLGPFNGLDKGEPVNAADAAALEHDKAYDQQLKAGDNPYLRYNHADAEFQERLQEDTSFGGNLGRAVFQAKKRVLEPLGLVEEGAKTAPGKKRPVEQSPQEPDSSSGIGKTGQQPAKKRLNFGQTGDSESVPDPQPLGEPPATPAAVGPTTMASGGGAPMADNNEGADGVGNAPGNWHCDSTWLGDRVITTSTRTWALPTYNNHLYKQISSASTGASNDNHYFGYSTPWGYFDFNRFHCHFSPRDWQRLINNNWGFRPKRLNFKLFNIQVKEVTTNDGVTTIANNLTSTVQVFSDSEYQLPYVLGSAHQGCLPPFPADVFMIPQYGYLTLNNGSQAVGRSSFYCLEYFPSQMLRTGNNFTFSYTFEEVPFHSSYAHSQSLDRLMNPLIDQYLYYLNRTQNQSGSAQNKDLLFSRGSPAGMSVQPKNWLPGPCYRQQRVSKTKTDNNNSNFTWTGASKYNLNGRESIINPGTAMASHKDDEDKFFPMSGVMIFGKESAGASNTALDNVMITGEEEIKATNPVATERFGTVAVNFQSSSTDPATGDVHAMGALPGMVWQDRDVYLQGPIWAKIPHTDGHFHPSPLMGGFGLKNPPPQILIKNTPVPANPPAEFSATKFASFITQYSTGQVSVEIEWELQKENSKRWNPEVQYTSNYAKSANVDFTVDNNGLYTEPRPIGTRYLTRPL

SEQ ID NO: 749 - protein, 736 aa, Artificial Sequence
  source: /note="Description of Artificial Sequence: Synthetic polypeptide"
MAADGYLPDWLEDNLSEGIREWWDLKPGAPKPKANQQKQDDGRGLVLPGYKYLGPFNRLDKGEPVNAADAAALEHDKAYDQQLKAGDNPYLRYNHADAEFQERLQEDTSFGGNLGRAVFQAKKRVLEPLGLVEEGAKTAPGRKRPVEQSPQEPDSSSGIGKTGQQPAKKRLNFGQTGDSESVPDPQPLGEPPATPAAVGPTTMASGGGAPMADNNEGADGVGNASGNWHCDSTWLGDRVITTSTRTWALPTYNNHLYKQISSASTGASNDNHYFGYSTPWGYFDFNRFHCHFSPRDWQRLINNNWGFRPKRLNFKLFNIQVKEVTTNDGVTTIANNLTSTVQVFSDSEYQLPYVLGSAHQGCLPPFPADVFMIPQYGYLTLNNGGQAVGRSSFYCLEYFPSQMLRTGNNFTFSYTFEEVPFHSSYAHSQSLDRLMNPLIDQYLYYLNRTQNQSGSAQNKDLLFSRGSPAGMSVQPKNWLPGPCYRQQRVSKTKTDNNNSNFTWTGASKYSLNGRESIINPGTAMASHKDDEDKFFPMGGVMIFGKESAGASNTALDNAMITDEEEIKATNPVATERFGTVAVNFQSSSTDPATGDVHAMGALPGMVWQDRDVYLQGPIWAKIPHTDGHFHPSPLMGGFGLKNPPPQILIKNTPVPANPPAEFSATKFASFITQYSTGQVSVEIEWELQKENSKRWNPEVQYTSNYAKSANVDFTVDNNGLYTEPRPIGTRYLTRPL

SEQ ID NO: 750 - protein, 736 aa, Artificial Sequence
  source: /note="Description of Artificial Sequence: Synthetic polypeptide"
MAADGYLPDWLEDNLSEGIREWWDLKPGAPKPKANQQKQDDGRGLVLPGYKYLGPFNGLDKGEPVNAADAAALEHDKAYDQQLKAGDNPYLRYNHADAEFQERLQEDTSFGGNLGRAVFQAKKRVLEPLGLVEEGAKTAPGKKRPVEQSPQEPDSSSGIGKTGQQPAKKRLNFGQTGDSESVPDPQPLGEPPATPAAVGPTTMASGGGAPMADNNEGADGVGNASGNWHCDSTWLGGRVITTSTRTWALPTYNNHLYKQISSASTGASNDNHYFGYSTPWGYFDFNRFHCHFSPRDWQRLINNNWGFRPKRLNFKLFNIQVKEVTTNDGVTTIANNLTSTVQVFSDSEYQLPYVLGSAHQGCLPPFPADVFMIPQYGYLTLNNGSQAVGRSSFYCLEYFPSQMLRTGNNSTFSYTFEEVPFHSSYAHSQSLDRLMNPLIDQYLYYLNRTQNQSGSAQNKDLLFSRGSPAGMSVQPKNWLPGPCYRQQRVSKTKTDNNNSNFTWTGASKYNLNGRESIINPGTAMASHKDDEDKFFPMSGVMIFGKESAGASNTALDNVMITDEEEIKATNPVATERFGTVAVNFQSSSTDPATGDVHAMGTLPGMVWQDRDVYLQGPIWAKIPHTDGHFHPSPLMGGFGLKNPPPQILIKNTPVPANPPAEFSATKFASFITQYSTGQVSVEIEWELQKENSKRWNPEVQYTSNYAKSANVDFTVDNNGLYTEPRPIGTRYLTRPL

SEQ ID NO: 751 - protein, 736 aa, Artificial Sequence
  source: /note="Description of Artificial Sequence: Synthetic polypeptide"
MAADGYLPDWLEDNLSEGIREWWDLKPGAPKPKANQQKQDDGRGLVLPGYKYLGPFNGLDKGEPVSAADAAALEHDKAYDQQLKAGDNPYLRYNHADAEFQERLQEDTSFGGNLGRAVFQAKKRVLEPLGLVEEGAKTAPGKKRPVEQSPQEPDSSSGIGKTGQQPAKERLNFGQTGDSESVPDPQPLGEPPATPAAVGPTTMASGGGAPMADNNEGADGVGNASGNWHCDSTWLGDRVITTSTRTWALPTYNNHLYKQISSASTGASNDNHYFGYSTPWGYFDFNRFHCHFSPRDWQRLINNNWGFRPKRLNFKLFNIQVKEVTTNDGVTTIANNLTSTVQVFSDSEYQLPYVLGSAHQGCLPPFPADVFMIPQYGYLTLNNGSQAVGRSSFYCLEYFPSQMLRTGNNFTFSYTFEEVPFHSSYAHSQSLDRLMNPLIDQYLYYLNRTQNQSGSAQNKDLLFSRGSPAGMSVQPKNWLPGPCYRQQRVSKTKTDNNNSNFTWTGASKYNLNGRESIINPGTAMASHKDDEDKFFPMSGVMIFGKESAGASNTALDNVMITDEEEIKATNPVATERFGTVAVNFQSSSTDPATGDVHAMGALPGMVWQDRDVYLQGPIWAKIPHTDGHFHPSPLMGGFGLKNPPPQILIKNTPVPANPPAEFSATKFASFITQYSTGQVSVEIEWELQKENSKRWNPEVQYTSNYAKSANVDFTVDNNGLYTEPRPIGTRYLTRPL

SEQ ID NO: 752 - protein, 736 aa, Artificial Sequence
  source: /note="Description of Artificial Sequence: Synthetic polypeptide"
MAADGYLPDWLEDNLSEGIREWWDLKPGAPKPKANQQKQDDGRGLVLPGYKYLGPFNGLDKGEPVNAADAAALEHDKAYDQQLKAGDNPYLRYNHADAEFQERLQEDTSFGGNLGRAVFQAKKRVLEPLGLVEEGAKTAPGKKRPVEQSPQEPDSSSGIGKTGQQPAKKRLNFGQTGDSESVPDPQPLGEPPATPAAVGPTTMASGGGAPMADNNEGADGVGNASGNWHCDSTWLGDRVITTSTRTWALPTYNNHLYKQISSASTGASNDNHYFGYSTPWGYFDFNRFHCHFSPRDWQRLINNNWGFRPKRLNFKLFNIQVKEVTTNDGVTTIANNLTSTVQVFSDSEYQLPYVLGSAHQGCLPPFPADVFMIPQYGYLTLNNGSQAVGRSSFYCLEYFPSQMLRTGNNFTFSYTFEEVPFHSSYAHSQSLDRLMNPLIDQYLYYLNRTQNQSGSAQNKDLLFSRGSPAGMSVQPKNWLPGPCYRQQRVSKTKTDNNNSNFTWTGASKYNLNGRESIINPGTAMASHKDDEDKFFPMSGVMIFGKESAGASNTALDNVMITDEGEIKATNPVATERFGTVAVNFQSSSTDPATGDVHAMGALPGMVWQDRDVYLQGPIWAKIPHTDGHFHPSPLMGGFGLKNPPPQILIKNTPVPANPPAEFSATKFASFITQYSTGQVSVEIEWELQKENSKRWNPEVQYTSNYAKSANVDFTVDNNGLYTEPRPIGTRYLTRPL

SEQ ID NO: 753 - protein, 736 aa, Artificial Sequence
  source: /note="Description of Artificial Sequence: Synthetic polypeptide"
MAADGYLPDWLEDNLSEGIREWWDLKPGAPKPKANQQKQDDGRGLVLPGYKYLGPFNGLDKGEPVNAADAAALEHDKAYDQQLKAGDNPYLRYNHADAEFQERLQEDTSFGGNLGRAVFQAKKRVLEPFGLVEEGAKTAPGKKRPVEQSPQEPDSSSGIGKTGQQPAKKRLNFGQTGDSESVPDPQPLGEPPATPAAVGPTTMASGGGAPMADNNEGADGVGNASGNWHCDSTWLGDRVITTSTRTWALPTYNNHLYKQISSASTGASNDNHYFGYSTPWGYFDFNRFHCHFSPRDWQRLINNNWGFRPKRLNFKLFNIQVKEVTTNDGVTTIANNLTSTVQVFSDSEYQLPYVLGSAHQGCLPPFPADVFMIPQYGYLTLNNGSQAVGRSSFYCPEYFPSQMLRTGNNFTFSYTFEEVPFHSSYAHSQSLDRLMNPLIDQYLYYLNRTQNQSGSAQNKDLLFSRGSPAGMSVQPKNWLPGPCYRQQRVSKTKTDNNNSNFTWTGASKYNLNGRESIINPGTAMASHKDDKDKFFPMSGVMIFGKESAGASNTALDNVMITDEEEIKATNPVATERFGTVAVNFQSSNTDPATGDVHVMGALPGMVWQDRDVYLQGPIWAKIPHTDGHFHPSPLMGGFGLKHPPPQILIKNTPVPANPPAEFSATKFASFITQYSTGQVSVEIEWELQKENSKRWNPEVQYTSNYAKSANVDFTVDNNGLYTEPRPIGTRYLTRPL

SEQ ID NO: 754 - protein, 736 aa, Artificial Sequence
  source: /note="Description of Artificial Sequence: Synthetic polypeptide"
MAADGYLPDWLEDNLSEGIREWWDLKPGAPKPKANQQKQDDGRGLVLPGYKYLGPFNGLDKGEPVNAADAAALEHDKAYDQQLKAGDNPYLRYNHADAEFQERLQEDTSFGGNLGRAVFQAKKRVLEPFGLVEEGAKTAPGKKRPVEQSPQEPDSSSGIGKTGQQPAKKRLNFGQTGDSESVPDPQPLGEPPATPAAVGPTTMASGGGAPMADNNEGADGVGNASGNWHCDSTWLGDRVITTSTRTWALPTYNNHLYKQISSASTGASNDNHYFGYSTPWGYFDFNRFHCHFSPRDWQRLINNNWGFRPKRLNFKLFNIQVKEVTTNDGVTTIANNLTSTVQVFSDSEYQLPYVLGSAHQGCLPPFPADVFMIPQYGYLTLNNGSQAVGRSSFYCLEYFPSQMLRTGNNFTFSYTFEEVPFHSSYAHSQSLDRLMNPLIDQYLYYLNRTQNQSGSAQNKDLLFSRGSPAGMSVQPKNWLPGPCYRQQRVSKTKTDNNNSNFTWTGASKYNLNGRESIINPGTAMASHKDDKDKFFPMSGVMIFGKESAGASNTALDNVMITDEEEIKATNPVATERFGTVAVNFQSSDTDPATGDVHVMGALPGMVWQDRDVYLQGPIWAKIPHTDGHFHPSPLMGGFGLKHPPPQILIKNTPVPANPPAEFSATKFASFITQYSTGQVSVEIEWELQKENSKRWNPEVQYTSNYAKSANVDFTVDNNGLYTEPRPIGTRYLTRPL

SEQ ID NO: 755 - protein, 736 aa, Artificial Sequence
  source: /note="Description of Artificial Sequence: Synthetic polypeptide"
MAADGYLPDWLEDNLSEGIREWWDLKPGAPKPKANQQKQGDGRGLVLPGYKYLGPFNGLDKGEPVNAADAAALEHDKAYDQQLKAGDNPYLRYNHADAEFQERLQEDTSFGGNLGRAVFQAKKRVLEPFGLVEEGAKTAPGKKRPVEQSPQEPDSSSGIGKTGQQPAKKRLNFGQTGDSESVPDPQPLGEPPATPAAVGPTTMASGGGAPMADNNEGADGVGNASGNWHCDSTWLGDRVITTNTRTWALPTYNNHLYKQISSASTGASNDNHYFGYSTPWGYFDFNRFHCHFSPRDWQRLINNNWGFRPKRLNFKLFNIQVKEVTTNDGVTTIANNLTSTVQVFSDSEYQLPYVLGSAHQGCLPPFPADVFMIPQYGYLTLNNGSQAVGRSSFYCLEYFPSQMLRTGNNFTFSYTFEEVPFHSSYGHSQSLDRLMNLLIDQYLYYLNRTQNQSGSAQNKDLLFSRGSPAGMFVQPKNWLPGPCYRQQRVSKTKTDNNNSNFTWTGASKYNLNGRESIINPGTAMASHKDDEDKFFPMSGVMIFGKESAGASNTALDNVMITDEEEIKATNPVATERFGTVAVNFQSSSTDPATGDVHVMGALPGMVWQDRDVYLQGPIWAKIPHTDGHFHPSPLMGGFGLKHPPPQILIKNTPVPANPPAEFSATKFASFITQYSTGQVSVEIEWELQKENSKRWNPEVQYTSNYAKSANVDFTVDNNGLYTEPRPIGTRYLTRPL

SEQ ID NO: 756 - protein, 736 aa, Artificial Sequence
  source: /note="Description of Artificial Sequence: Synthetic polypeptide"
MAADGYLPDWLEDNLSEGIREWWDLKPGAPKPKANQQKQDDGRGLVLPGYKYLGPFNGLDKGEPVNAADAAALEHDKAYDQQLKAGDNPYLRYNHADAEFQERLQEDTSFGGNLGRAVFQAKKRVLEPFGLVEEGAKTAPGKKRPVEQSPQEPDSSSGIGKTGQQPAKKRLNFGQTGDSESVPDPQPLGEPPATPAAVGPTTMASGGGAPMADNNEGADGVGNASGNWHCDSTWLGDRVITTNTRTWALPTYNNHLYKQISSASTGASNDNHYFGYSTPWGYFDFNRFHCHFSPRDWQRLINNNWGFRPKRLNFKLFNIQVKEVTTNDGVTTIANNLTSTVQVFSDSEYQLPYVLGSAHQGCLPPFPADVFMIPQYGYLMLNNGSQAVGRSSFYCLEYFPSQMLRTGNNFTFSYTFEEVPFHSSYAHSQSLDRLMNPLIDQYLYYLNRTQNQSGSAQNKDLLFSRGSPAGMSVQPKNWLPGPCYRQQRVSKTKTDNNNSNFTWTGASKYNLNGRESIINPGTAMASHKDDEDKFFPMSGVMIFGKESAGASNTALDNVMITDEEEIKATNPAATERFGTVAVNFQSSSTDPATGDVHVMGALPGMVWQDRDVYLQGPIWAKIPHTDGHFHPSPLMGGFGLKHPPPQILIKNTPVPANPPAEFSATKFASFITQYSTGQVSVEIEWELQKENSKRWNPEVQYTSNYAKSANVDFTVDNNGLYTEPRPIGTRYLTRPL

SEQ ID NO: 757 - protein, 736 aa, Artificial Sequence
  source: /note="Description of Artificial Sequence: Synthetic polypeptide"
MAADGYLPDWLEDNLSEGIREWWDLKPGAPKPKANQQKQDDGRGLVLPGYKYLGPFNGLDKGEPVNAADAAALEHDKAYDQQLKAGDNPYLRYNHADAEFQERLQEDTSFGGNLGRAVFQAKKRVLEPFGLVEEGAKTAPGKKRPVEQSPQEPDSSSGIGKTGQQPAKKRLNFGQTGDSESVPDPQPLGEPPATPAAVGPTTMASGGGAPMADNNEGADGVGNASGNWHCDSTWLGDRVITTSTRTWALPTYNNHLYKQISSASTGASNDNHYFGYSTPWGYFDFNRFHCHFSPRDWQRLINNNWGFRPKRLNFKLFNIQVKEVTTNDGVTTIANNLTSTVQVFSDSEYQLPYVLGSAHQGCLPPFPADVFMIPQYGYLTLNNGSQAVGRSSFYCLEYFPSQMLRTGNNFTFSYTFEEVPFHSSYAHSQSLDRLMNPLIDQYLYYLNRTQNQSGSAQNKDLLFSRGSPAGMSVQPKNWLPGPCYRQQRVSKTKTDNNNSNFTWTGASKYNLNGRESIINPGTAMASHKDDEDKFFPMSGVMIFGKESAGASNTALDNVMITDEEEIKATNPVATERFGTVAVNFQSSSTDPATGDVHVMGALPGMVWQDRDVYLQGPIWAKIPHTDGHFHPSPLMGGFGLKHPPPQILIKNTPVPANPPAEFSATKFASFITQYSTGQVSVEIEWELQKENSKRWNPEVQYTSNYAKSANVDFTVDNNGLYTEPRPIGTRYLTRPL

SEQ ID NO: 758 - protein, 736 aa, Artificial Sequence
  source: /note="Description of Artificial Sequence: Synthetic polypeptide"
  MOD_RES (102)..(102): Any amino acid
MAADGYLPDWLEDNLSEGIREWWDLKPGAPKPKANQQKQDDGRGLVLPGYKYLGPFNGLDKGEPVNAADAAALEHDKAYDQQLKAGDNPYLRYNHADAEFQXRLQEDTSFGGNLGRAVFQAKKRVLEPFGLVEEGAKTAPGKKRPVEQSPQEPDSSSGIGKTGQQPAKKRLNFGQTGDSESVPDPQPLGEPPATPAAVGPTTMASGGGAPMADNNEGADGVGNASGNWHCDSTWLGGRVITTSTRTWALPTYNNHLYKQISSASTGASNDNHYFGHSTPWGYFDFNRFHCHFSPRDWQRLINNNWGFRPKRLNFKLFNIQVKEVTTNDGVTTIANNLTSTVQVFSDSEYQLPYVLGSAHQGCLPPSPADVFMIPQYGYLTLNNGSQAVGRSSFYCLEYFPSQMLRTGNNFTFSYTFEEVPFHSSYAHSQSLDRLMNPLIDQYLYYLNRTQNQSGSAQNKDLLFSRGSPAGMSVQPKNWLPGPCYRQQRVSKTKTDNNNSNFTWTGASKYNLNGRESIINPGTAMASHKDDKDKFFPMSGVMIFGKESAGASNTALDNVMITDEEEIKATNPVATERFGTVAVNFQSSNTDPATGDVHVMGALPGMVWQDRDVYLQGPIWAKIPHTDGHFHPSPLMGGFGLKHPPPQILIKNTPVPANPPAEFSATKFASFITQYSTGQVSVEIEWELQKENSKRWNPEVQYTSNYAKSANVDFTVDNNGLYTEPRPIGTRYLTRPL

SEQ ID NO: 759 - protein, 736 aa, Artificial Sequence
  source: /note="Description of Artificial Sequence: Synthetic polypeptide"
MAADGYFPDWLEDNLSEGIREWWDLKPGAPKPKANQQKQDDGRGLVLPGYKYLGPFNGLDKGEPVNAADAAALEHDKAYDQQLKAGDNPYLRYNHADAEFQERLQEDTSFGGNLGRAVFQAKKRVLEPFGLVEEGAKTAPGKKRPVEQSPQEPDSSSGIGRTGQQPAKKRLNFGQTGDSESVPDPQPLGEPPATPAAVGPTTMASGGGAPMADNNEGADGVGNASGNWHCDSTWLGDRVITTSTRTWALPTYNNHLYKQISSASTGASNDNHYFGYSTPWGYFDFNRFHCHFSPRDWQRLINNNWGFRPKRLNFKLFNIQVKEVTTNDGVTTIANNLTSTVQVFSDSEYQLPYVLGSAHQGCLPPFPADVFMIPQYGYLTLNNGSQAVGRSSFYCLEYFPSQMLRTGNNFTFSYTFEEVPFHSSYAHSQSLDRLMNPLIDQYLYYLNRTQNQSGSAQNKDLLFSRGSPAGMSVQPKNWLPGPCYRQQRVSKTKTDNNNSNFTWTGASKYNLNGRESIINPGTAMASHKDDEDKFFPMSGVMIFGKESAGASNTALDNVMITDEEEIKATNPVATERFGTVAVNFQSSSPDPATGDVHVMGALPGMVWQDRDVYLQGPIWAKIPHTDGHFHPSPLMGGFGLKHPPPQILIKNTPVPANPPAEFSATKFASFITQYSTGQVSVEIEWELQKENSKRWNPEVQYTSNYAKSANVDFTVDNNGLYSEPRPIGTRYLTRPL

SEQ ID NO: 760 - protein, 736 aa, Artificial Sequence
  source: /note="Description of Artificial Sequence: Synthetic polypeptide"
MAADGYLPDWLEDNLSEGIREWWDLKPGAPKPKANQQKQDDGRGLVLPGYKYLGPFNGLDKGEPVNAADAAALEHDKAYDQQLKAGDNPYLRYNHADAEFQERLQEDTSFGGNLGRAVFQAKKRVLEPFGLVEEGAKTAPGKKRPVEQSPQEPDSSSGIGKTGQQPAKKRLNFGQTGDSESVPDPQPLGEPPATPAAVGPTTMASGGGAPMADNNEGADGVGNASGNWHCDSTWLGDRVITTSTRTWALPTYNNHLYKQTSSASTGASNDNHYFGYSTPWGYFDFNRFHCHFSPRDWQRLINNNWGFRPKRLNFKLFNIQVKEVTTNDGVTTIANNLTSTVQVFSDSEYQLPYVLGSAHQGCLPPFPADVFMIPQYGYLTLNNGSQAVGRSSFYCLEYFPSQMLRTGNNFTFSYTFEEVPFHSSYAHSQSLDRLMNPLIDQYLYYLNRTQNQSGSAQNKDLLFSRGSPAGMSVQPKNWLPGPCYRQQRVSKTKTDYNNSNFTWTGASKYNLNGRESIINPGTAMASHKDDEDKFFPMSGVMIFGKESAGASNTALDNVMITDEEEIKATNPVATERFGTVAVNFQSSSTDPATGDVHVMGALPGMVWQDRDVYLQGPIWAKIPHTDGHFHPSPLMGGFGLKHPPPQILIKNTPVPANPPAEFSATKFASFITQYSTGQVSVEIEWELQKENSKRWNPEVQYTSNYAKSANVDFTVDNNGLYTEPRPIGTRYLTRPL

SEQ ID NO: 761 - protein, 736 aa, Artificial Sequence
  source: /note="Description of Artificial Sequence: Synthetic polypeptide"
MAADGYPPDWLEDNLSEGIREWWDLKPGVPKPKANQQKQDDGRGLVLPGYKYLGPFNGLDKGEPVNAADAAALEHDKAYDQQLKAGDNPYLRYNHADAEFQERLQEDTSFGGNLGRAVFQAKKRVLEPFGLVEEGAKTAPGKKRPVEQSPQEPDSSSGIGKTGQQPAKKRLNFGQTGDSESVPDPQPLGEPPATPAAVGPTTMASGGGAPMADNNEGADGVGNASGNWHCDSTWLGDRVITTSTRTWALPTYNNHLYKQISSASTGASNDNHYFGYSTPWGYFDFNRFHCHFSPRDWQRLINNNWGFRPKRLNFKLFNIQVKEVTTNDGVTTIANNLTSTVQVFSDSEYQLPYVLGSAHQGCLPPFPADVFMIPQYGYLTLNNGSQAVGRSSFYCLEYFPSQMLRTGNNFTFSYTFEEVPFHSSYAHSQSLDRLMNPLIDQYLYYLNRTQNQSGSAQNKDLLFSRGSPAGMSVQPKNWLPGPCYRQQRVSKTKTDNNNSNFTWTGASKYNLNGRESIINPGTAMASHKDDEDKFFPMSGVMIFGKESAGASNTALDNVMITDEEEIKATNPVATERFGTVAVNFQSSSTDPATGDVHVMGALPGMVWQDRDVYLQGPIWAKIPHTDGHFHPSPLMGGFGLKHPPPQILIKNTPVPANPPAEFSATKFASFITQYSTGQVSVEIEWELQKENSKRWNPEVQYTSNYAKSANVDFTVDNNGLYTEPRPIGTRYLTRPL

SEQ ID NO: 762 - protein, 732 aa, Artificial Sequence
  source: /note="Description of Artificial Sequence: Synthetic polypeptide"
MAADGYLPDWLEDNLSEGIREWWDLKPGAPKPKANQQKQDDGRGLVLPGYKYLGPFNGLDKGEPVNAADAAALEHDKAYDQQLKAGDNPYLRYNHADAEFQERLQEDTSFGGNLGRAVFQAKKRVLEPFGLVEEGAKTAPGKKRPVEQSPQEPDSSSGIGKTGQQPAKKRLNFGQTGDSESVPDPQPLGEPPATPAAVGPTTMASGGGAPMADNNEGADGVGNASGNWHCDSTWLGDRVITTSTRTWALPTYNNHLYKQISSASTGASNDNHYFGYSTPWGYFDFNRFHCHFSPRDWQRLINNNWGFRPKRLNFKLFNIQVKEVTTNDGVTTIANNLTSTVQAFSDSEYQLPYVLGSAHQGCLPPFPADVFMIPQYGYLTLNNGSQAVGRSSFYCLEYFPSQMLRTGNNFTFSYTFEEVPFHSSYAHSQSLDRLMNPLIDPYLYYLNRTQNQSGSAQNKDLLFSRGSPAGMSVQPKNWLPGPCYRQQRVSKTKTDNNNSNFTWTGASKYNLNGRESIINPGTAMASHKDDEDKFFPMSGVMIFGKESAGASNTALDNVMITDEEEIKATNPVATERFGTVAVNFQSSSTDPATGDVHVMGALPGMVWQDRDVYLQGPIWAKIPHTDGHFHPSPLMGGFGLKHPPPQILIKNTPVPANPPAEFSATKFASFITQYSTGQVSVEIEWELQKENSKRWNPEVQYTSNYAKSANVDFTVDNNGLYTEPRPIGTRYL

SEQ ID NO: 763 - protein, 736 aa, Artificial Sequence
  source: /note="Description of Artificial Sequence: Synthetic polypeptide"
MAADGYLPDWLEDNLSEGIREWWDLKPGAPKPKANQQKQDDGRGLVLPGYKYLGPFNGLDKGEPVNAADAAALEHDKAYDQQLKAGDNPYLRYNHADAEFQERLQEDTSFGGNLGRAVFQAKKRVLEPFGLVEEGAKTAPGKKRPVEQSPQEPDSSSGIGKTGQQPAKKRLNFGQTGDSESVPDPQPLGEPPATPAAVGPTTMASGGGAPMADNNEGADGVGNASGNWHCDSTWLGDRVITTSTRTWALPTYNNHLYKQISSASTGASNDNHYFGYSTPWGYFDFNRFHCHFSPRDWQRLINNNWGFRPKRLNFKLFNIQVKEVTTNDGVTTIANNLTSTVQVFSDSEYQLPYVLGSAHQGCLPPFPADVFMIPQYGYLTLNNGSQAVGRSSFYCLEYFPSQMLRTGNNFTFSYTFEEVPFHSSYAHSQSLDRLMNPLIDQYLYYLNRTQNQSGSAQNKDLLFSRGSPAGMSVQPKNWLPGPCYRQQRVSKTKTDNNNSNFTWTGASKYNLNGRESIINPGTAMASHKDDEDKFFPMSGVMIFGKESAGASNTALDNVMITDEEEIKATNPVATERFGTVAVNFQSSSTDPATGDVHVMGALPGMVWQDRDVYLQGPIWAKIPHTDGHSHPSPLMGGFGLKHPPPQILIKNTPVPANPPAEFSATKFASFITQYSTGQVSVEIEWELQKENSKRWNPEVQYTSNYAKSANVDFTVDNNGLYTEPRPIGTRYLTRPL

SEQ ID NO: 764 - protein, 736 aa, Artificial Sequence
  source: /note="Description of Artificial Sequence: Synthetic polypeptide"
MAADGYLPDWLEDNLSEGIREWWDLKPGAPKPKANQQKQDDGRGLVLPGYKYLGPFNGLDKGEPVNAADAAALEHDKAYDQQLKAGDNPYLRYNHADAEFQERLQEDTSFGGNLGRAVFQAKKRVLEPFGLVEEGAKTAPGKKRPVEQSPQEPDSSSGIGKTGQQPAKKRLNFGQTGDSESVPDPQPLGEPPATPAAVGPTTMASGGGAPMADNNEGADGVGNASGNWHCDSTWLGDRVITTSTRTWALPTYNNHLYKQISSASTGASNDNHYFGYSTPWGYFDFNRFHCHFSPRDWQRLINNNWGFRPKRLNFKLFNIQVKEVTTNDGVTTIANNLTSTVQVFSDSEYQLPYVLGSAHQGCLPPFPADVFMIPQYGYLTLNNGSQAVGRSSFYCLEYFPSQMLRTGNNFTFSYTFEEVPFHSSYAHSQSLDRLMNPLIDLYLYYLNRTQNQSGSAQNKDLLFSRGSPAGMSVQPKNWLPGPCYRQQRVSKTKTDNNNSNFTWTGASKYNLNGRESIINPGTAMASHKDDEDKFFPMSGVMIFGKESAGTSNTALDNVMITDEEEIKATNPVATERFGTVAVNFQSSSTDPATGDVHVMGALPGMVWQDRDVYLQGPIWAKIPHTDGHFHPSPLMGGFGLKHPPPQILIKNTPVPANPPAEFSATKFASFITQYSTGQVSVEIEWELQKENSKRWNPEVQYTSNYAKSANVDFTVDNNGLYTEPRPIGTRYLTRPL

SEQ ID NO: 765 - protein, 736 aa, Artificial Sequence
  source: /note="Description of Artificial Sequence: Synthetic polypeptide"
MAADGYLPDWLEDSLSEGIREWWDLKPGAPKPKANQQKQDDGRGLVLPGYKYLGPFNGLDKGEPVNAADAAALEHDKAYDQQLKAGDNPYLRYNHADAEFQERLQEDTSFGGNLGRAVFQAKKRVLEPFGLVEEGAKTAPGKKRPVEQSPQEPDSSSGIGKTGQQPAKKRLNFGQTGDSESVPDPQPLGEPPATPAAVGPTTMASGGGAPMADNNEGADGVGNASGNWHCDSTWLGDRVITTSTRTWALPTYNNHLYKQISSASTGASNDNHYFGYSTPWGYFDFNRFHCHFSPRDWQRLINNNWGFRPKRLNFKLFNIQVKEVTTNDGVTTIANNLTSTVQVFSDSEYQLPYVLGSAHQGCLPPFPADVFMIPQYGYLTPNNGSQAVGRSSFYCLEYFPSQMLRTGNNFTFSYTFEEVPFHSSYAHSQSLDRLMNPLIDQYQYYLNRTQNQSGSAQNKDLLFSRGSPAGMSVQPKNWLPGPCYRQQRVSKTKTDNNNSNFTWTGASKYNLNGRESIINPGTAMASHKDDEDKFFPMSGVMIFGKESAGASNTALDNVMITDEEEIKATNPVATERFGTVAVNFQSSSTDPATGDVHVMGALPGMVWQDRDVYLQGPIWAKIPHTDGHFHPSPLMGGFGLKHPPPQILIKNTPVPANPPAEFSATKFASFITQYSTGQVSVEIEWELQKENSKRWNPEVQYTSNYAKSANVDFTVDNNGLYTEPRPIGTRYLTRPL

SEQ ID NO: 766 - protein, 736 aa, Artificial Sequence; identical to SEQ ID NO: 757
  source: /note="Description of Artificial Sequence: Synthetic polypeptide"

SEQ ID NO: 767 - protein, 735 aa, Artificial Sequence
  source: /note="Description of Artificial Sequence: Synthetic polypeptide"
MAADGYLPDWLEDTLSEGIRQWWKLKPGPPPPKPAERHKDDSRGLVLPGYKYLGPFNGLDKGEPVNEADAAALEHDKAYDRQLDSGDNPYLKYNHADAEFQERLKEDTSFGGNLGRAVFQAKKRVLEPLGLVEEPVKTAPGKKRPVEHSPVEPDSSSGTGKAGQQPARKRLNFGQTGDADSVPDPQPLGQPPAAPSGLGTNTMATGSGAPMADNNEGADGVGNSSGNWHCDSTWMGDRVITTSTRTWALPTYNNHLYKQISSQSGASNDNHYFGYSTPWGYFDFNRFHCHFSPRDWQRLINNNWGFRPKRLNFKLFNIQVKEVTQNDGTTTIANNLTSTVQVFTDSEYQLPYVLGSAHQGCLPPFPADVFMVPQYGYLTLNNGSQAVGRSSFYCLEYFPSQMLRTGNNFTFSYTFEDVPFHSSYAHSQSLDRLMNPLIDQYLYYLSRTNTPSGTTTQSRLQFSRAGASDIRDQSRNWLPGPCYRQQRVSKTSADNNNSEYSWTGATKYHLNGRDSLVNPGPAMASHKDDEEKFFPQSGVLIFGKQGSEKTNVDIEKVMITDEEEIRTTNPVATEQYGSVSTNLQRGNRQAATADVNTQGVLPGMVWQDRDVYLQGPIWAKIPHTDGHFHPSPLMGGFGLKHPPPQILIKNTPVPANPSTTFSAAKFASFITQYSTGQVSVEIEWELQKENSKRWNPEIQYTSNYNKSVNVDFTVDTNGVYSEPRPIGTRYLTRNL

SEQ ID NO: 768 - DNA, 2211 bp, Artificial Sequence
  source: /note="Description of Artificial Sequence: Synthetic polynucleotide"
atggctgctgacggttatcttccagattggctcgaggacaacctttctgaaggcattcgtgagtggtgggctctgaaacctggagtccctcaacccaaagcgaaccaacaacaccaggacaaccgtcggggtcttgtgcttccgggttacaaatacctcggacccggtaacggactcgacaaaggagagccggtcaacgaggcggacgcggcagccctcgaacacgacaaagcttacgaccagcagctcaaggccggtgacaacccgtacctcaagtacaaccacgccgacgccgagtttcaggagcgtcttcaagaagatacgtcttttgggggcaaccttggcagagcagtcttccaggccaaaaagaggatccttgagcctcttggtctggttgaggaagcagctaaaacggctcctggaaagaagaggcctgtagatcagtctcctcaggaaccggactcatcatctggtgttggcaaatcgggcaaacagcctgccagaaaaagactaaatttcggtcagactggcgactcagagtcagtcccagaccctcaacctctcggagaaccaccagcagcccccacaagtttgggatctaatacaatggcttcaggcggtggcgcaccaatggcagacaataacgagggtgccgatggagtgggtaattcctcaggaaattggcattgcgattcccaatggctgggcgacagagtcatcaccaccagcaccagaacctgggccctgcccacttacaacaaccatctctacaagcaaatctccagccaatcaggagcttcaaacgacaaccactactttggctacagcaccccttgggggtattttgactttaacagattccactgccacttctcaccacgtgactggcagcgactcattaacaacaactggggattccggcccaagaaactcagcttcaagctcttcaacatccaagttaaagaggtcacgcagaacgatggcacgacgactattgccaataaccttaccagcacggttcaagtgtttacggactcggagtatcagctcccgtacgtgctcgggtcggcgcaccaaggctgcctcccgccgtttccagcggacgtcttcatggtccctcagtatggatacctcaccctgaacaacggaagtcaagcggtgggacgctcatccttttactgcccggagtacttcccttcgcagatgctaaggactggaaataacttccaattcagctataccttcgaggatgtaccttttcacagcagctacgctcacagccagagtttggatcgcttgatgaatcctcttattgatcagtatctgtactacctgaacagaacgcaaggaacaacctctggaacaaccaaccaatcacggctgctttttagccaggctgggcctcagtctatgtctttgcaggccagaaattggctacctgggccctgctaccggcaacagagactttcaaagactgctaacgacaacaacaacagtaactttccttggacagcggccagcaaatatcatctcaatggccgcgactcgctggtgaatccaggaccagctatggccagtcacaaggacgatgaagaaaaatttttccctatgcacggcaatctaatatttggcaaagaagggacaacggcaagtaacgcagaattagataatgtaatgattacggatgaagaagagattcgtaccaccaatcctgtggcaacagagcagtatggaactgtggcaaataacttgcagagctcaaatacagctcccacgactagaactgtcaatgatcagggggccttacctggcatggtgtggcaagatcgtgacgtgtaccttcaaggacctatctgggcaaagattcctcacacggatggacactttcatccttctcctctgatgggaggctttggactgaaacatccgcctcctcaaatcatgatcaaaaatactccggtaccggcaaatcctccgacgactttcagcccggccaagtttgcttcatttatcactcagtactccactggacaggtcagcgtggaaattgagtgggagctacagaaagaaaacagcaaacgttggaatccagagattcagtacacttccaactacaacaagtctgttaatgtggactttactgtagacactaatggtgtttatagtgaacctcaccctattggaacccggtatctcacacgaaacttgtaa

SEQ ID NO: 769 - DNA, 2211 bp, Artificial Sequence
  source: /note="Description of Artificial Sequence: Synthetic polynucleotide"
atggctgctgatggttatcttccagattggctcgaggacaacctttctgaaggcattcgtgagtggtgggctctgaaacctggagtccctcaacccaaagcgaaccaacaacaccaggacaaccgtcggggtcttgtgcttccgggttacaaatacctcggacccggtaacggactcgacaaaggagagccggtcaacgaggcggacgcggcagccctcgaacacgacaaagcttacgaccagcagctcaaggccggtgacaacccgtacctcaagtacaaccacgccgacgccgagtttcaggagcgtcttcaagaagatacgtcttttgggggcaaccttggcagagcagtcttccaggccaaaaagaggatccttgagcctcttggtctggttgaggaagcagctaaaacggctcctggaaagaagaggcctgtagatcagtctcctcaggaaccggactcatcatctggtgttggcaaatcgggcaaacagcctgccagaaaaagactaaatttcggtcagactggcgactcagagtcagtcccagaccctcaacctctcggagaaccaccagcagcccccacaagtttgggatctaatacaatggcttcaggcggtggcgcaccaatggcagacaataacgagggtgccgatggagtgggtaattcctcaggaaattggcattgcgattcccaatggctgggcgacagagtcatcaccaccagcaccagaacctgggccctgcccacttacaacaaccatctctacaagcaaatctccagccaatcaggagcttcaaacgacaaccactactttggctacagcaccccttgggggtattttgactttaacagattccactgccacttctcaccacgtgactggcagcgactcattaacaacaactggggattccggcccaagaaactcagcttcaagctcttcaacatccaagttaaagaggtcacgcagaacgatggcacgacgactgttgccaataaccttaccagcacggttcaagtgtttacggactcggagtatcaactcccgtacgtgctcgggtcggcgcaccaaggctgtctcccgccgtttccagcggacgtcttcatggtccctcagtatggatacctcaccctgaacaacggaagtcaagcggtgggacgctcatccttttactgcctggagtacttcccttcgcagatgctaaggactggaaataacttccaattcagctataccttcgaggatgtaccttttcacagcagctacgctcacagccagagtttggatcgcttgatgaatcctcttattgatcagtatctgtactacctgaacagaacgcaaggaacaacctctggaacaaccaaccaatcacggctgctttttagccaggctgggcctcagtctatgtctttgcaggccagaaattggctacctgggccctgctaccggcaacagagactttcaaagactgctaacgacaacaacaacagtaactttccttggacagcggccagcaaatatcatctcaatggccgcgactcgctggtgaatccaggaccagctatggccagtcacaaggacgatgaagaaaaatttttccctatgcacggcaatctaatatttggcaaagaagggacaacggcaagtaacgcagaattagataatgtaatgattacggatgaagaagagattcgtaccaccaatcctgtggcaacagagcagtatggaactgtggcaaataacttgcagagctcaaatacagctcccacgactagaactgtcaatgatcagggggccttacctggcatggtgtggcaagatcgtgacgtgtaccttcaaggacctatctgggcaaagattcctcacacggatggacactttcatccttctcctctgatgggaggctttggactgaaacatccgcctcctcaaatcatgatcaaaaatactccggtaccggcaaatcctccgacgactttcagcccggccaagtttgcttcatttatcactcagtactccactggacaggtcagcgtggaaattgagtgggagctacagaaagaaaacagcaaacgttggaatccagagattcagtacacttccaactacaacaagtctgttaatgtggactttactgtagacactaatggtgtttatagtgaacctcgccctattggaacccggtatctcacacgaaacttgtaa

SEQ ID NO: 770 - DNA, 2211 bp, Artificial Sequence
  source: /note="Description of Artificial Sequence: Synthetic polynucleotide"
atggctgctgacggttatcttccagattggctcgaggacaacctttctgaaggcattcgtgagtggtgggctctgaaacctggagtccctcaacccaaagcgaaccaacaacaccaggacaaccgtcggggtcttgtgcttccgggttacaaatacctcggacccggtaacggactcgacaaaggagagccggtcaacgaggcggacgcggcagccctcgaacacgacaaagcttacgaccagcagctcaaggccggtgacaacccgtacctcaagtacaaccacgccgacgccgagtttcaggagcgtcttcaagaagatacgtcttttgggggcaaccttggcagagcagtcttccaggccaaaaagaggatccttgagcctcttggtctggttgaggaagcagctaaaacggctcctggaaagaagaggcctgtagatcagtctcctcaggaaccggactcatcatctggtgttggcaaatcgggcaaacagcctgccagaaaaagactaaatttcggtcagactggcgactcagagtcagtcccagaccctcaacctctcggagaaccaccagcagcccccacaagtttgggatctaatacaatggcttcaggcggtggcgcaccaatggcagacaataacgagggtgccgatggagtgggtaattcctcaggaaattggcattgcgattcccaatggctgggcgacagagtcatcaccaccagcaccagaacctgggccctgcccacttacaacaaccatctctacaagcaaatctccggccaatcaggagcttcaaacgacaaccactactttggctacagcaccccttgggggtattttgactttaacagattccactgccacttctcaccacgtgactggcagcgactcattaacaacaactggggattccggcccaagaaactcagcttcaagctcttcaacatccaagttaaagaggtcacgcagaacgatggcacgacgactattgccaataaccttaccagcacggttcaagtgtttacggactcggagtatcagctcccgtacgtgctcgggtcggcgcaccaaggctgtctcccgccgtttccagcggacgtcttcatggtccctcagtatggatacctcaccctgaacaacggaagtcaagcggtgggacgctcatccttttactgcctggagtacttcccttcgcagatgctaaggactggaaataacttccaattcagctataccttcgaggatgtaccttttcacagcagctacgctcacagccagagtttggatcgcttgatgaatcctcttattgatcagtatctgtactacctgaacagaacgcaaggaacaacctctggaacaaccaaccaatcacggctgctttttagccaggctgggcctcagtctatgtctttgcaggccagaaattggctacctgggccctgctaccggcaacagagactttcaaagactgctaacggcaacaacaacagtaactttccttggacagcggccagcaaatatcatctcaatggccgcgactcgctggtgaatccaggaccagctatggccagtcacaaggacgatgaagaaaaatttttccctatgcacggcaatctaatatttggcaaagaagggacaacggcaagtaacgcagaattagataatgtaatgattacggatgaagaagagattcgtaccaccaatcctgtggcaacagagcagtgtggaactgtggcaaataacttgcagagctcaaatacagctcccacgactagaactgtcaatgatcagggggccttacctggcatggtgtggcaagatcgtgacgtgtaccttcaaggacctatctgggcaaagattcctcacacggatggacactttcatccttctcctctgatgggaggctttggactgaaacatccgcctcctcaaatcatgatcaaaaatactccggtaccggcaaatcctccgacgactttcagcccggccaagtttgcttcatttatcactcagtactccactggacaggtcagcgtggaaattgagtgggagctacagaaagaaaacagcaaacgttggaatccagagattcagtacacttccaactacaacaagtctgttaatgtggactttactgtagacactaatggtgtttatagtgaacctcgccctattggaacccggtatctcacacgaaacttgtaa

SEQ ID NO: 771 - DNA, 2212 bp, Artificial Sequence
  source: /note="Description of Artificial Sequence: Synthetic polynucleotide"
  modified_base (1283)..(1283): a, c, t, or g
atggctgctgacggttatcttccagattggctcgaggacaacctttctgaaggcattcgtgagtggtgggctctgaaacctggagtccctcaacccaaagcgaaccaacaacaccaggacaaccgtcggggtcttgtgcttccgggttacaaatacctcggaccgggtaacggactcgacaaaggagagccggtcaacgaggcggacgcggcagccctcgaacacgacaaagcttacgaccagcagctcaaggccggtgacaacccgtacctcaagtacaaccacgccgacgccgagtttcaggagcgtcttcaagaagatacgtcttttgggggcaaccttggcagagcagtcttccaggccaaaaagaggatccttgagcctcttggtctggttgagggagcagctaaaacggctcctggaaagaagaggcctgtagatcagtctcctcaggaaccggactcatcatctggtgttggcaaatcgggcaaacagcctgccagaaaaagactaaatttcggtcagactggcgactcagagtcagtcccagaccctcaacctctcggagaaccaccagcagcccccacaagtttgggatctaatacaatggcttcaggcggtggcgcaccaatggcagacaataacgagggtgccgatggagtgggtaattcctcaggaaattggcattgcgattcccaatggctgggcgacagagtcatcaccaccagcaccagaacctgggccctgcccacttacaacagccatctctacaagcaaatctccagccaatcaggagcttcaaacgacaaccactactttggctacagcaccccttgggggtattttgactttaacagattccactgccacttctcaccacgtgactggcagcgactcattaacaacaactggggattccggcccaagaaactcagcttcaagctcttcaacatccaagttaaagaggtcacgcagaacgatggcacgacgactattgccaataaccttaccagcacggtccaagtgtttacggactcggagtatcagctcccgtacgtgctcgggtcggcgcaccaaggctgtctcccgccgtttccagcggacgccttcatggtccctcagtatggatacctcaccctgaacaacggaagtcaagcggtgggacgctcatccttttactgcctggagtacttcccttcgcagatgctaaggactggaaataacttccaattcagctataccttcgaggatgtaccttttcacggcagctacgctcacagccngagtttggatcgcttgatgaatcctcttattgatcagtatctgtactacctgaacagaacgcaaggaacaacctctggaacaaccaaccaatcacggctgctttttagccaggctgggcctcagtctatgtctttgcaggccagaaattggctacctgggccctgctaccggcaacagagacttttcaaagactgctaacgacaacaacaacagtaactttccttggacagcggccagcaaatatcatctcaatggccgcgactcgctggtgaatccaggaccagctatggccagtcacaaggacgatgaagaaaaatttttccctatgcacggcaatctaatatttggcaaagaagggacaacggcaagtaacgcagaattagataatgtaatgattacggatgaagaagagattcgtaccaccaatcctgtggcaacagagcagtatggaactgtggcaaataacttgcagagctcaaatacagctcccacgactagaactgtcaatgatcagggggccttacctggcatggtgtggcaagatcgtgacgtgtaccttcaaggacctatctgggcaaagattcctcacacggatggacactttcatccttctcctctgatgggaggctttggactgaaacatccgcctcctcaaatcatgatcaaaaatactccggtaccggcaaatcctccgacgactttcagcccggccaagtttgcttcatttatcactcagtactccactggacaggtcagcgtggaaattgagtgggagctacagaaagaaaacagcaaacgttggaatccagagattcagtacacttccaactacaacaagtctgttaatgtggactttactgtagacactaatggtgtttatagtgaacctcgccctattggaacccggtatctcacacgaaactcgtaa

SEQ ID NO: 772 - DNA, 2212 bp, Artificial Sequence
  source: /note="Description of Artificial Sequence: Synthetic polynucleotide"
atggctgctgacggttatcttccagattggctcgaggacaacctttctgaaggcattcgtgagtggtgggctctgaaacctggagtccctcaacccaaagcgaaccaacaacaccaggacaaccgtcggggtcttgtgcttccgggttacaaatacctcggacccggtaacggactcgacaaaggagagccggtcaacgaggcggacgcggcagccctcgaacacgacaaagcttacgaccagcagctcaaggccggtgacaacccgtacctcaagtacaaccacgccgacgccgagtttcaggagcgtcttcaagaagatacgtcttttgggggcaaccttggcagagcagtcttccaggccaaaaagaggatccttgagcctcttggtctggttgagggagcagctaaaacggctcctggaaagaagaggcctgtagatcagtctcctcaggaaccggactcatcatctggtgttggcaaatcgggcaaacagcttgccagaaaaagactaaatttcggtcagactggcgactcagagtcagtcccagaccctcaacctctcggagaaccaccagcagcccccacaagtttgggatctaatacaatggcttcaggcggtggcgcaccaatggcagacaataacgagggtgccgatggagtgggtaattcctcaggaaattggcattgcgattcccaatggctgggcgacagagtcatcaccaccagcaccagaacctgggccctgcccacttacaacagccatctctacaagcaaatctccggccaatcaggagcttcaaacgacaaccactactttggctacagcaccccctgggggtattttgactttaacagattccactgccacttctcaccacgtgactggcagcgactcattaacaacaactggggattccggcccaagaaactcagcttcaagctcttcaacatccaagttaaagaggtcacgcagaacgatggcacgacgactattgccaataaccttaccagcacggttcaagtgtttacggactcggagtatcagctcccgtacgtgctcgggtcggcgcaccaaggctgtctcccgccgtttccagcggacgtcttcatggtccctcagtatggatacctcaccctgaacaacggaagtcaagcggtgggacgctcatccttttactgcctggagtacttcccttcgcagatgctaaggactggaaataacttccaattcagctataccttcgaggatgtaccttttcacagcagctacgctcacagccagagtttggatcgcttgatgaatcctcttattgatcagtatctgtactacctgaacagaacgcaaggaacaacctctggaacaaccaaccaatcacggctgctttttagccaggctgggcctcagtctatgtctttgcaggccagaaattggctacctgggccctgctaccggcaacagagactttcaaagactgctaacgacaacaacaacagtaactttccttggacagcggccagcaaatatcatctcaatggccgcgactcgctggtgaatcccaggaccagctatggccagtcacaaggacgatgaagaaaaatttttccctatgcacggcaatctaatatttggcaaagaagggacaacggcaagtaacgcagaattagataatgtaatgattacggatgaagaagagattcgtaccaccaatcctgtggcaacagagcagtatggaactgtggcaaataacttgcagagctcaaatacagctcccacgactagaactgtcaatgatcagggggccttacctggcatggtgtggcaagatcgtgacgtgtaccttcaaggacctatctgggcaaagattcctcacacggatggacactttcatccttctcctctgatgggaggctttggactgaaacatccgcctcctcaaatcatgatcaaaaatactccggtaccggcaaatcctccgacgactttcagcccggccaagtttgcttcatttatcactcagtactccactggacaggtcagcgtggaaattgagtgggagctacagaaagaaaacagcaaacgttggaatccagagattcagtacacttccaactacaacaagtctgttaatgtggactttactgtagacactaatggtgtttatagtgaacctcgccctattggaacccggtatctcacacgaaacttgtaa

SEQ ID NO: 773 - DNA, 2212 bp, Artificial Sequence
  source: /note="Description of Artificial Sequence: Synthetic polynucleotide"
atggctgctgacggttatcttccagattggctcgaggacaacctttctgaaggcattcgtgagtggtgggctctgaaacctggagtccctcaacccaaagcgaaccaacaacaccaggacgaccgtcggggtcttgtgcttccgggttacaaatacctcggacccggtaacggactcgacaaaggagagccggtcaacgaggcggacgcggcagccctcgaacacgacaaagcttacgaccagcagctcaaggccggtgacaacccgtgcctcaagtacaaccacgccgacgccgagtttcaggagcgtcttcaagaagatacgtcttttgggggcaaccttggcagagcagtcttccaggccaaaaagaggatccttgagcctcttggtctggttgaggaagcagctaaaacggctcctggaaagaagaggcctgtagatcagtctcctcaggaaccggactcatcatctggtgttggcaaatcgggcaaacagcctgccagaaaaagactaaatttcggtcagactggcgactcagagtcagtcccagaccctcaacctctcggagaaccaccagcagcccccacaagtttgggatctaatacaatggcttcaggcggtagcgcaccaatggcagacaataacgagggtgccgatggagtgggtaattcctcaggaaattggcattgcgattcccaatggctgggcgacagagtcatcaccaccagcaccagaacctgggccctgcccacttacaacaaccatctctacaagcaaatctccagccaatcaggagcttcaaacgacaaccactactttggctacagcaccccttgggggtattttgactttaacagattccactgccacttctcaccacgtgactggcagcgactcattaacaacaactggggattccggcccaagaaactcagcttcaagctcttcaacatccaagttaaagaggtcacgcagaacgatggcacgacgactattgccaataaccttaccagcacggttcaagtgtttacggactcggagtatcagctcccgtacgtgctcgggtcggcgcaccaaggctgtctcccgccgtttccagcggacgtcttcatggtccctcagtatggatacctcaccctgaacaacggaagtcaagcggtgggacgctcatccttttactgcctggagtacttcccttcgcagatgctaaggactggaaataacttccaattcagctataccttcgaggatgtaccttttcacagcagctacgctcacagccagagtttggatcgcttgatggatcctcttattgatcagtatctgtactacctgaacagaacgcaaggaacaacctctggaacaaccaaccaatcacggctgctttttagccaggctgggcctcagtctatgtctttgcaggccagaaattggctacctgggccctgctaccggcaacagagactttcaaagactgctaacgacaacaacaacagtaactttccttggacagcggccagcaaatatcatctcaatggccgcgactcgctggtgaatccaggaccagctatggccagtcacaaaggacgatgaagaaaaatttttccctatgcacggcaatctaatatttggcaaagaagggacaacggcaagtaacgcagaattagataatgtaatgattacggatgaagaagagattcgtaccaccaatcctgtggcaacagagcagtatggaactgtggcaaataacttgcagagctcaaatacagctcccacgactagaactgtcaatgatcagggggccttacctggcatggtgtggcaagatcgtgacgtgtaccttcaaggacctatctgggcaaagattcctcacacggatggacactttcatccttctcctctgatgggaggctttggactgaaacatccgcctcctcaaatcatgatcaaaaatactccggtaccggcaaatcctccgacgactttcagcccggccaagtttgcttcatttatcactcagtactccactggacaggtcagcgtggaaattgagtgggagctacagaaagaaaacagcaaacgttggaatccagagattcagtacacttccaactacaacaagtctgttaatgtggactttactgtagacactaatggtgtttatagtgaacctcgccctattggaacccggtatctcacacgaaacctgtaa

SEQ ID NO: 774 - DNA, 2211 bp, Artificial Sequence
  source: /note="Description of Artificial Sequence: Synthetic polynucleotide"
atggctgctgacggttatcttccagattggctcgaggacaacctttctgaaggcattcgtgagtggtgggctctgaaacctggagtccctcaacccaaagcgaaccaacaacaccaggacgaccgtcggggtcttgtgcttccgggttacaaatacctcggacccggtaacggactcgacaaaggagagccggtcaacgaggcggacgcggcagccctcgaacacgacaaagcttacgaccagcagctcaaggccggtgacaacccgtacctcaagtacaaccacgccgacgccgagtttcaggagcgtcttcaagaagatacgtcttttgggggcaaccttggcagagcagtcttccaggccaaaaagaggatccttgagcctcttggtctggttgaggaagcagctaaaacggctcctggaaagaagaggcctgtagatcagtctcctcaggaaccggactcatcatctggtgttggcaaatcgggcaaacagcctgccagaaaaagactaaatttcggtcagactggcgactcagagtcagtcccagaccctcaacctctcggagaaccaccagcagcccccacaagtttgggatctaatacaatggcttcaggcggtggcgcaccaatggcagacaataacgagggtgccgatggagtgggtaattcctcaggaaattggcattgcgattcccaatggctgggcaacagagtcatcaccaccagcaccagaacctgggccctgcccacttacaacaaccatctctacaagcaaatctccagccaatcaggagcttcaaacgacaaccactactttggctacagcaccccttgggggtattttgactttaacagattccactgccacttctcaccacgtgactggcagcgactcattaacaacaactggggattccggcccaagaaactcagcttcaagctcttcaacatccaagttaaagaggtcacgcagaacgatggcacgacgactattgccaataaccttaccagcacggttcaagtgtttacggactcggagtatcagctcccgtacgtgctcgggtcggcgcaccaaggctgtctcccgccgtttccagcggacgtcttcatggtccctcagtatggatacctcaccctgaacaacggaagtcaagcggtgggacgctcatccttttactgcctggagtacttcccttcgcagatgctaaggactggaaataacttccaattcagctataccttcgaggatgtaccttttcacagcagctacgctcacagccagagtttggatcgcttgatgaatcctcttattgatcagtatctgtactacctgaacagaacgcaaggaacaacctctggaacaaccaaccaatcacggctgctttttagccaggctgggcctcagtctatgtctttgcaggccagaaattggctacctgggccctgctaccggcaacagagactttcaaagactgctaacgacaacaacaacagtaactttccttggacagcggccagcaaatatcatctcaatggccgcgactcgctggtgaatccaggaccagctatggccagtcacaaggacgatgaagaaaaatttttccctatgcacggcaatctaatatttggcaaagaagggacaacggcaagtaacgcagaattagataatgtaatgattacggatgaagaagagattcgtaccaccaatcctgtggcaacagagcagtatggaactgtggcaaataacttgcagagctcaaatacagctcccacgactagaactgtcaatgatcagggggccttacctggcatggtgtggcaagatcgtgacgtgtaccttcaaggacctatctgggcaaagattcctcacacggatggacactttcatccttctcctctgatgggaggctttggactgaaacatccgcctcctcaaatcatgatcaaaaatactccggtaccggcaaatcctccgacgactttcagcccggccaagtttgcttcatttatcactcagtactccactggacaggtcagcgtggaaattgagtgggagctacagaaagaaaacagcaaacgttggaatccagagattcagtacacttccaactacaacaagtctgttaatgtggactttactgtagacactaatggtgtttatagtgaacctcgccctattggaacccggtatctcacacgaaacttgtaa

SEQ ID NO: 775 - DNA, 2211 bp, Artificial Sequence
  source: /note="Description of Artificial Sequence: Synthetic polynucleotide"
atggctgctgacggttatcttccagattggctcgaggacaacctttctgaaggcattcgtgagtggtgggctctgaaacctggagtccctcaacccaaagcgaaccaacaacaccaggacgaccgtcggggtcttgtgcttccgggttacaaatacctcggacccggtaacggactcgacaaaggagagccggtcaacgaggcggacgcggcagccctcgaacacgacaaagcttacgaccagcagctcaaggccggtgacaacccgtacctcaagtacaaccacgccgacgccgagtttcaggagcgtcttcaagaagatacgtcttttgggggcaaccttggcagagcagtcttccaggccaaaaagaggatccttgagcctcttggtctggttgaggaagcagctaaaacggctcctggaaagaagaggcctgtagatcagtctcctcaggaaccggactcatcatctggtgttggcaaatcgggcaaacagcctgccagaaaaagactaaatttcggtcagactggcgactcagagtcagtcccagaccctcaacctctcggagaaccaccagcagcccccacaagtttgggatctaatacaatggcttcaggcggtggcgcaccaatggcggacaataacgagggtgccgatggagtgggtaattcctcaggaaattggcattgcgattcccaatggctgggcgacagagtcatcaccaccagcaccagaacctgggccctgcccacttacaacaaccatctctacaagcaaatctccagccaatcaggagcttcaaacgacaaccactactttggctacagcaccccttgggggtattttgactttaacagattccactgccacttctcaccacgtgactggcagcgactcattaacaacaactggggattccggcccaagaaactcagcttcaagctcttcaacatccaagttaaagaggtcacgcagaacgatggcacgacgactattgccaataaccttaccagcacggttcaagtgtttacggactcggagtatcagctcccgtacgtgctcgggtcggcgcaccaaggctgtctcccgccgtttccagcggacgtcttcatggtccctcagtatggatacctcaccctgaacaacggaagtcaagcggtgggacgctcatccttttactgcctggagtacttcccttcgcagatgctaaggactggaaataacttccaattcagctataccttcgaggatgtaccttttcacagcagctacgctcacagccagagtttggatcgcttgatgaatcctcttattgatcagtatctgtactacctgaacagaacgcaaggaacaacctctggaacaaccaaccaatcacggctgctttttagccaggctgggcctcagtctatgtctttgcaggccagaaattggctacctgggccctgctaccggcaacagagactttcaaagactgctaacgacaacaacaacagtaactttccttggacagcggccagcaaatatcatctcaatggccgcgactcgctggtgaatccaggaccagctatggccagtcacaaggacgatgaagaaaaatttttccctatgcacggcaatctaatatttggcaaagaagggacaacggcaagtaacgcagaattagataatgtaatgattacggatgaagaagagattcgtaccaccaatcctgtggcaacagtgcagtatggaactgtggcaaataacttgcagagctcaaatacagctcccacgactagaactgtcaatgatcagggggccttacctggcatggtgtggcaagatcgtgacgtgtaccttcaaggacctatctgggcaaagattcctcacacggatggacactttcatccttctcctctgatgggaggctttggactgaaacatccgcctcctcaaatcatgatcaaaaatactccggtaccggcaaatcctccgacgactttcagcccggccaagtttgcttcatttatcactcagtactccactggacaggtcagcgtggaaattgagtgggagctacagaaagaaaacagcaaacgttggaatccagagattcagtacacttccaactacaacaagtctgttaatgtggactttactgtagacactaatggtgtttatagtgaacctcgccctattggaacccggtatctcacacgaaacttgtaa

SEQ ID NO: 776 - DNA, 2211 bp, Artificial Sequence
  source: /note="Description of Artificial Sequence: Synthetic polynucleotide"
atggctgctgacggttatcttccagattggctcgaggacaacctttctgaaggcattcgtgagtggtgggctctgaaacctggagtccctcaacccaaagcgaaccaacaacaccaggacaaccgtcggggtcttgtgcttccgggttacaaatacctcggacccggtaacggactcgacaaaggagagccggtcaacgaggcggacgcggcagccctcgaacacgacaaagcttacgaccagcagctcaaggccggtgacaacccgtacctcaagtacaaccacgccgacgccgagtttcaggagcgtcttcaagaagatacgtcttttgggggcaaccttggcagagcagtcttccaggccaaaaaggggatccttgagcctcttggtctggttgaggaagcagctaaaacggctcctggaaagaagaggcctgtagatcagtctcctcaggaaccggactcatcatctggtgttggcaaatcgggcaaacagcctgccagaaaaagactaaatttcggtcagactggcgactcagagtcagtcccagaccctcaacctctcggagaaccaccagcagcccccacaagtttgggatctaatacaatggcttcaggcggtggcgcaccaatggcagacaataacgagggtgccgatggagtgggtaattcctcaggaaattggcattgcgattcccaatggctgggcgacagagtcatcaccaccagcaccagaacctgggccctgcccacttacaacaaccatctctacaagcaaatctccagccaatcaggagcttcaaacgacaaccactactttggctacagcaccccttgggggtattttgactttaacagattccactgccacttctcaccacgtgactggcagcgactcattaacaacaactggggattccggcccaagaaactcagcttcaagctcttcaacatccaagttaaagaggtcacgcagaacgatggcacgacgactattgccaataaccttaccagcacggttcaagtgtttacggactcggagtatcagctcccgtacgtgttcgggtcggcgcaccaaggctgtctcccgccgtttccagcggacgtcttcatggtccctcagtatggatacctcaccctgaacaacggaagtcaagcggtgggacgctcatccttttactgcctggagtacttcccttcgcagatgctaaggactggaaataacttccaattcagctataccttcgaggatgtaccttttcacagcagctacgctcacagccagagttcggatcgcttgatgaatcctcttattgatcagtatctgtactacctgaacagaacgcaaggaacaacctctggaacaaccaaccaatcacggctgctttttagccaggctgggcctcagtctatgtctttgcaggccagaaattggctacctgggccctgctaccggcaacagagactttcaaagactgctaacgacaacaacaacagtaactttccttgaacagcggccagcaaatatcatctcaatggccgcgactcgctggtgaatccaggaccagctatggccagtcacaaggacgatgaagaaaaatttttccctatgcacggcaatctaatatttggcaaagaagggacaacggcaagtaacgcagaattagataatgtaatgattacggatgaagaagagattcgtaccaccaatcctgtggcaacagagcagtatggaactgtggcaaataacttgcagagctcaaatacagctcccacgactagaactgtcaatgatcagggggccttacctggcatggtgtggcaagatcgtgacgtgtaccttcaaggacctatctgggcaaagattcctcacacggatggacactttcatccttctcctctgatgggaggctttggactgaaacatccgcctcctcaaatcatgatcaaaaatactccggtaccggcaaatcctccgacgactttcagcccggccaagtttgcttcatttatcactcagtactccactggacaggtcagcgtggaaattgagtgggagctacagaaagaaaacagcaaacgttggaatccagagattcagtacacttccaactacaacaagtctgttaatgtggactttactgtagacactaatggtgtttatagtgaacctcgccctattggaacccggtatctcacacgaaacttgtaa

SEQ ID NO: 777 - DNA, 2211 bp, Artificial Sequence
  source: /note="Description of Artificial Sequence: Synthetic polynucleotide"
atggctgctgacggttatcttccagattggctcgaggacaacctttctgaaggcattcgtgagtggtgggctctgaaacctggagtccctcaacccaaagcgaaccaacaacaccaggacaaccgtcggggtcttgtgcttccgggttacaaatacctcggacccggtaacggactcgacgaaggagagccggtcaacgaggcggacgcggcagccctcgaacacgacaaagcttacgaccagcagctcaaggccggtgacaacccgtacctcaagtacaaccacgccgacgccgagtttcaggagcgtcttcaagaagatacgtcttttgggggcaaccttggcagagcagtcttccaggccaaaaagaggatccttgagcctcttggtctggttgagggagcagctaaaacggctcctggaaagaagaggcctgtagatcagtctcctcaggaaccggactcatcatctggtgttggcaaatcgggcaaacagcctgccagaaaaagactaaatttcggtcagactggcgactcagagtcagtcccagaccctcaacctctcggagaaccaccagcagcccccacaagtttgggatctaatacaatggcttcaggcggtggcgcaccaatggcagacaataacgagggtgccgatggagtgggtaattcctcaggaaattggcattgcgattcccaatggctgggcgacagagtcatcaccaccagcaccagaacctgggccctgcccacttacaacagccacctctacaagcaaatctccagccaatcaggagcttcaaacgacaaccactactttggctacagcaccccttgggggtattttgactttaacagattccactgccacttctcaccacgtgactggcagcgactcattaacaacaactggggattccggcccaagaaactcagcttcaagctcttcaacatccaagttaaagaggtcacgcagaacgatggcacgacgactattgccaataaccttaccagcacggttcaagtgtttacggactcggagtatcagctcccgtacgtgctcgggtcggcgcaccaaggctgtctcccgccgtttccagcggacgtcttcatggtccctcagtatggatacctcaccctgaacaacggaagtcaagcggtgggacgctcatccttttactgcctggagtacttcccttcgcagatgctaaggactggaaataacttccaattcagctataccttcgaggatgtaccttttcacagcagctacgctcacagccagagtttggatcgcttgatgaatcctcttattgatcagtatctgtactacctgaacagaacgcaaggaacaacctctggaacaaccaaccaatcacggctgctttttagccaggctgggcctcagtctatgtctttgcaggccagaaattggctacctgggccctgctaccggcaacagagactttcaaagactgctaacgacaacaacaacagtaactttccttggacagcggccagcaaatatcatctcaatggccgcgactcgctggtgaatccaggaccagctatggccagtcacaaggacgatgaagaaaaatttttccctatgcacggcaatctaatatttggcaaagaagggacaacggcaagtaacgcagaattagataatgtaatgattacggatgaagaagagattcgtaccaccaatcctgtggcaacagagcagtatggaactgtggcaaataacttgcagagctcaaatacagctcccacgactagaactgtcaatgatcagggggccttacctggcatggtgtggcaagatcgtgacgtgtaccttcaaggacctatctgggcaaagattcctcacacggatggacactttcatccttctcctctgatgggaggctttggactgaaacatccgcctcctcaaatcatgatcaaaaatactccggtaccggcaaatcctccgacgactttcagcccggccaagtttgcttcatttatcactcagtactccactggacaggtcagcgtggaaattgagtgggagctacagaaagaaaacagcaaacgttggaatccagagattcagtacacttccaactacaacaagtctgttaatgtggactttactgtagacactaatggtgtttatagtgaacctcgccctattggaacccggtatctcacacgaaacttgtaa

SEQ ID NO: 778 - DNA, 2211 bp, Artificial Sequence
  source: /note="Description of Artificial Sequence: Synthetic polynucleotide"
atggctgctgacggttatcttccagattggctcgaggacaacctttctgaaggcattcgtgagtggtgggctctgaaacctggagtccctcaacccaaagcgaaccaacaacaccaggacaaccgtcggggtcttgtgcttccgggttacaaatacctcggacccggtaacggactcgacaaaggagagccggtcaacgaggcggacgcggcagccctcgaacacgacaaagcttacgaccagcagctcaaggccggtgacaacccgtacctcaagtacaaccacgccgacgccgagtttcaggagcgtcttcaagaagatacgtcttttgggggcaaccttggcagagcagtcttccaggccaaaaagaggatccttgagcctcttggtctggttgagggagcagctaaaacggctcctggaaagaagaggcctgtagatcagtctcctcaggaaccggactcatcatctggtgttggcaaatcgggcaaacagcctgccagaaaaagactaaatttcggtcagactggcgactcagagtcagtcccagaccctcaacctctcggagaaccaccagcagcccccacaagtttgggatctaatacaatggcttcaggcggtggcgcaccaatggcagacaataacgagggtgccgatggagtgggtaattcctcaggaaattggcattgcgattcccaatggctgggcgacagagtcatcaccaccagcaccagaacctgggccctgcccacttacaacagccatctctacaagcaaatctccagccaatcaggagcttcaaacgacaaccactactttggctacagcaccccttggggtattttgactttaacagattccactgccacttctcaccacgtgactggcagcgactcattaacaacaactggggattccggcccaagaaactcagcttcaagctcttcaacatccaagttaaagaggtcacgcagaacgatggcacgacgactattgccaataaccttaccagcacggttcaagtgtttacggactcggagtatcagctcccgtacgtgctcgggtcggcgcaccaaggctgtctcccgccgtttccagcggacgccttcatggtccctcagtatggatacctcaccctgaacaacggaagtcaagcggtgggacgctcatccttttactgcctggagtacttcccttcgcagatgctaaggactggaaataacttccaattcagctataccctcgaggatgtaccttttcacagcagctacgctcacagccagagtttggatcgcttgatgaatcctcttattgatcagtatctgtactacctgaacagaacgcaaggaacaacctctggaacaaccaaccaatcacggctgctttttagccaggctgggcctcagtctatgtctttgcaggccagaaattggctacctgggccctgctaccggcaacagagactttcaaagactgctaacgacaacaacaacagtaactttccttggacagcggccagcaaatatcatctcaatggccgcgactcgctggtgaatccaggaccagctatggccagtcacaaaggacgatgaagaaaaatttttccctatgcacggcaatctaatatttggcaaagaagggacaacggcaagtaacgcagaattagatagtgtaatgattacggatgaagaagagattcgtaccaccaatcctgtggcaacagagcagtatggaactgtggcaaataacttgcagagctcaaatacagctcccacgactagaactgtcaatgatcagggggccttacctggcatggtgtggcaagatcgtgacgtgtaccttcaaggacctatctgggcaaagattcctcacacggatggacactttcatccttctcctctgatgggaggctttggactgaaacatccgcctcctcaaatcatgatcaaaaatactccggtaccggcaaatcctccgacgactttcagcccggccaagtttgcttcatttatcactcagtactccactggacaggtcagcgtggaaattgagtgggagctacagaaagaaaacagcaaacgttggaatccagagattcagtacacttccaactacaacaagtctgttaatgtggactttactgtagacactaatggtgtttatagtgaacctcgccctattggaacccggtatctcacacgaaacttgtaa

SEQ ID NO: 779 - DNA, 2205 bp, Artificial Sequence
  source: /note="Description of Artificial Sequence: Synthetic polynucleotide"
atgactgacggttaccttccagattggctagaggacaacctctctgagggcgttcgagagtggtgggcgctgcaacctggagcccctaaacccaaggcaaatcaacaacatcaggacaacgctcggggtcttgtgcttccgggttacaaatacctcggacccggcaacggactcgacaagggggaacccgtcaacgcagcggacgcggcagccctcgagcacgacaaggcctacgaccagcagctcaaggccggtgacaacccctacctcaagtacaaccacgccgacgcggagttccagcagcggcttcagggcgacacatcgtttgggggcaacctcggcagagcagtcttccaggccaaaaagagggttcttgaacctcttggtctggttgagcaagcgggtgagacggctcctggaaagaagagaccgttgattgaatccccccagcagcccgactcctccacgggtatcggcaaaaaaggcaagcagccggctaaaaagaagctcgttttcgaagacgaaactggagcaggcgacggaccccctgagggatcaacttccggagccatgtctgatgacagtgagatgcgtgcagcaactggcggagctgcagtcgagggcggacaaggtgccgatggagtgggtaatgcctcgggtgattggcattgcgattccacctggtctgagggccacgtcacgaccaccagcaccagaacctgggtcttgcccacctacaacaaccacctctacaagcgactcggagagagcctgcagtccaacacctacaacggattctccaccccctggggatactttgacttcaaccgcttccactgccacttctcaccacgtgactggcagcgactcatcaacaacaactggggcatgcgacccaaagccatgcgggtcaaaatcttcaacatccaggtcaaggaggtcacgacgtcgaacggcgagacaacggtggctaataaccttaccagcacggttcagatctttgcggactcgtcgtacgaactgccgtacgtgatggatgcgggtcaagagggcagcctgcctccttttcccaacgacgtctttatggtgccccagtacggctactgtggactggtgaccggcaacacttcgcagcaacagactgacagaaatgccttctactgcctggagtactttccttcgcagatgctgcggactggcaacaactttgaaattacgtacagttttgagaaggtgcctttccactcgatgtacgcgcacagccagagcctggaccggctgatgaaccctctcatcgaccagtacctgtggggactgcaatcgaccaccaccggaaccaccctgaatgccgggactgccaccaccaactttaccaagctgcggcctaccaacctttccaactttaaaaagaactggctgcccgggccttcaatcaagcagcagggcttctcaaagactgccaatcaaaactacaagatccctgccaccgggtcagacagtctcatcaaatacgagacgcacagcactctggacggaagatggagtgccctgacccccggacctccaatggccacggctggacctgcggacagcaagttcagcaacagccagctcatctttgcggggcctaaacagaacggcaacacggccaccgtacccgggactctgatcttcacctctgaggaggagctggcagccaccaacgctaccgatacggacatgtggggcaacctacctggcggtgaccagagcaacagcaacctgccgaccgtggacagactgacagccttgggagccgtgcctggaatggtctggcaaaacagagacatttactaccagggtcccatttgggccaagattcctcataccgatggacactttcacccctcaccgctgattggtgggtttgggctgaaacacccgcctcctcaaatttttatcaagaacaccccggtacctgcgaatcctgcgacgaccttcagctctactccggtaaactccttcattactcagtacagcactggccaggtgtcggtgcagattgactgggagatccagaaggagcggtccaaacgctggaaccccgaggtccagtttacctccaactacggacagcaaaactctctgttgtgggctcccgatgcggctgggaaatacactgagcctagggctatcggtacccgctacctcacccaccacctgtaa

SEQ ID NO: 780 - DNA, 2205 bp, Artificial Sequence
  source: /note="Description of Artificial Sequence: Synthetic polynucleotide"
atgactgacggttaccttccagattggctagaggacaacctctctgaaggcgttcgagagtggtgggcgctgcaacctggagcccctaaacccaaggcaaatcaacaacatcaggacaacgctcggggtcttgtgcttccgggttacaaatacctcggacccggcaacggactcgacaagggggaacccgtcaacgcagcggacgcggcagccctcgagcacgacaaggcctacgaccagcagctcaaggccggtgacaacccctacctcaagtacaaccacgccgacgcggagttccagcagcggcttcagggcgacacatcgtttgggggcaacctcggcagagcagtcttccaggccaaaaagagggttcttgaacctcttggtctggttgagcaagcgggtgagacggctcctggaaagaagagaccgttgattgaatccccccagcagcccgactcctccacgggtatcggcaaaaaaggcaagcagccggctaaaaagaagctcgttttcgaagacgaaactggagcaggcgacggaccccctgagggatcaacttccggagccatgtctgatgacagtgagatgcgtgcagcagctggcggagctgcagtcgagggcggacaaggtgccgatggagtgggtaatgcctcgggtgattggcattgcgattccacctggtctgagggccacgtcacgaccaccagcaccagaacctgggtcttgcccacctacaacaaccacctctacaagcgactcggagagagcctgcagtccaacacctacaacggattctccaccccctggggatactttgacttcaaccgcttccactgccacttcttaccacgtgactggcagcgactcatcaacaacaactggggcgtgcgacccaaagccatgcgggtcaaaatcttcaacatccaggtcaaggaggtcacgacgtcgaacggcgagacaacggtggctaataaccttaccagcacggttcagatctttgcggactcgtcgtacgaactgccgtacgtgatggatgcgggtcaagagggcagcctgcctccttttcccaacgacgtctttatggtgccccagtacggctactgtggactggtgaccggcgacacttcgcagcaacagactgacagaaatgccttctactgcctggagtactttccttcgcagatgctgcggactggcaacaactttgaaattacgtacagttttgagaaggtgcctttccactcgatgtacgcgcacagccagagcctggaccggctgatgaaccctctcatcgaccagtacctgtggggactgcaatcgaccaccaccggaaccaccctgaatgccgggactgccaccaccaactttaccaagctgcggcctaccaacttttccaactttaaaaagaactggctgcccgggccttcaatcaagcagcagggcttctcaaagactgccaatcaaaactacaagatccctgccaccgggtcagacagtctcatcaaatacgagacgcacagcactctggacggaagatggagtgccctgacccccggacctccaatggccacggctggacctgcggacagcaagttcagcaacagccagctcatctttgcggggcctaaacagaacggcaacacggccaccgtacccgggactctgatcttcacctctgaggaggagctggcagccaccaacgccaccgatacggacatgtggggcaacctacctggcggtgaccagagcaacagcaacctgccgaccgtggacagactgacagccttgggagccgtgcctggaatggtctggcaaaacagagacatttactaccagggtcccatttgggccaagattcctcataccgatggacactttcacccctcaccgctgattggtgggtttgggctgaaacacccgcctcctcaaatttttatcaagaacaccccggtacctgcgaatcctgcgacgaccttcagctctactccggtaaactccttcattactcagtacagcactggccaggtgtcggtgcagattgactgggagatccagaaggagcggtccaaacgctggaaccccgaggtccagtttacctccaactacggacagcaaaactctctgttgtgggctcccgatgcggctgggaaatacactgagcctagggctatcggtacccgctacctcacccaccacctgtaa

SEQ ID NO: 781 - DNA, 2205 bp, Artificial Sequence
  source: /note="Description of Artificial Sequence: Synthetic polynucleotide"
atgactgacggttaccttccagattggctagaggacaacctctctgaaggcgttcgagagtggtgggcgctgcaacctggagcccctaaacccaaggcaaatcaacaacatcaggacaacgctcggggtcttgtgcttccgggttacaaatacctcggacccggcaacggactcgacgagggggaacccgtcaacgcagcggacgcggcagccctcgagcacgacaaggcctacgaccagcagctcaaggccggtgacaacccctacctcaagtacaaccacgccgacgcggagttccagcagcggcttcagggcgacacatcgtttgggggcaacctcggcagagcagtcttccaggccaaaaagagggttcttgaacctcttggtctggttgagcaagcgggtgagacggctcctggaaagaagagaccgttgattgaatccccccagcagcccgactcctccacgggtatcggcaaaaaaggcaagcagccggctaaaaagaagctcgttttcgaagacgaaactggagcaggcgacggaccccctgagggatcaacttccggagccatgtctgatgacagtgagatgcgtgcagcagctggcggagctgcagtcgagggcggacaaggtgccgatggagtgggtaatgcctcgggtgattggcattgcgattccacctggtctgagggccacgtcacgaccaccagcaccagaacctgggtcttgcccacctacaacaaccacctctacaagcgactcggagagagcctgcagtccaacacctacaacggattctccaccccctggggatactttgacttcaaccgcttccactgccacttctcaccacgtgactggcagcgactcatcaacaacaactggggcatgcgacccaaagccatgcgggtcaaaatcttcaacatccaggtcaaggaggtcacgacgtcgaacggcgagacaacggtggctaataaccttaccagcacggttcagatctttgcggactcgtcgtacgaactgccgtacgtgatggatgcgggtcaagagggcagcctgcctccttttcccaacgacgtctttatggtgccccagtacggctactgtggactggtgaccggcaacacttcgcagcaacagactgacagaaatgccttctactgcctggagtactttccttcgcagatgctgcggactggcaacaactttgaaattacgtacagttttgagaaggtgcctttccactcgatgtacgcgcacagccagagcctggaccggctgatgaaccctctcatcgaccagtacctgtggggactgcaatcgaccaccaccggaaccaccctgaatgccgggactgccaccaccaactttaccaagctgcggcctaccaacttttccaactttaaaaagaactggctgcccgggccttcaatcaagcagcagggcttctcaaagactgccaatcaaaactacaagatccctgccaccgggtcagacagtctcatcaaatacgagacgcacagcactctggacggaagatggagtgccctgacccccggacctccaatggccacggctggacctgcggacagcaagttcagcaacagccagctcatctttgcggggcctaaacagaacggcaacacggccaccgtacccgggactctgatcttcacctctgaggaggagctggcagccaccaacgctaccgatacggacatgtggggcaacctacctggcggtgaccagagcaacagcaacctgccgaccgtggacagactgacagccttgggagccgtgcctggaatggtctggcaaaacagagacatttactaccagggtcccatttgggccaagattcctcataccgatggacactttcacccctcaccgctgattggtgggtttgggctgaaacacccgcctcctcaaatttttatcaagaacaccccggtacctgcgaatcctgcgacgaccttcagctctactccggtaaactccttcattactcagtacagcactggccaggtgtcggtgcagattgactgggagatccagaaggagcggtccaaacgctggaaccccgaggtccagtttacctccaactacggacagcaaaactctctgttgtgggctcccgatgcggctgggaaatacactgagcctagggctatcggtacccgctacctcacccaccacctgtaa

SEQ ID NO: 782 - DNA, 2205 bp, Artificial Sequence
  source: /note="Description of Artificial Sequence: Synthetic polynucleotide"
atgactgacggttaccttccagattggctagaggacaacctctctgaaggcgttcgagagtggtgggcgctgcaacctggagcccctaaacccaaggcaaatcaacaacatcaggacaacgctcggggtcttgtgcttccgggttacaaatacctcggacccggcaacggactcgacaagggggaacccgtcaacgcagcggacgcggcagccctcgagcacgacaaggcctacgaccagcagctcaaggccggtgacaacccctacctcaagtacaaccacgccgacgcggagttccagcagcggcttcagggcgacacatcgtttgggggcaacctcggcagagcagtcttccaggccaaaaagagggttcttgaacctcttggtctggttgagcaagcgggtgagacggctcctggaaagaagagaccgttgattgaatccccccagcagcccgactcctccacgggtatcggcaaaaaaggcaagcagccggctaaaaagaagctcgttttcgaagacggaactggagcaggcgacggaccccctgagggatcaacttccggagccatgtctgatgacagtgagatgcgtgcagcagctggcggagctgcagtcgagggcggacaaggtgccgatggagtgggtaatgcctcgggtgattggcattgcgattccacctggtctgagggccacgtcacgaccaccagcaccagaacctgggtcttgcccacctacaacaaccacctctacaagcgactcggagagagcctgcagtccaacacctacaacggattccccaccccctggggatactttgacttcaaccgcttccactgccacttctcaccacgtgactggcagcgactcatcaacaacaactggggcatgcgacccaaagccatgcgggtcaaaatcttcaacatccaggtcaaggaggtcacgacgtcgaacggcgagacaacggcggctaataaccttaccagcacggttcagatctttgcggactcgtcgtacgaactgccgtacgtgatggatgcgggtcaagagggcagcctgcctccttttcccaacgacgtctttatggtgccccagtacggctactgtggactggtgaccggcaacacttcgcagcaacagactgacagaaatgccttctactgcctggagtactttccttcgcagatgctgcggactggcaacaactttgaaattacgtacagttttgagaaggtgcctttccactcgatgtacgcgcacagccagagcctggaccggctgatgaaccctctcatcgaccagtacctgtggggactgcaatcgaccaccaccggaaccaccctgaatgccgggactgccaccaccaactttaccaagctgcggcctaccaacttttccaactttaaaaagaactggctgcccgggccttcaatcaagcagcagggcttctcaaagactgccaatcaaaactacaagatccctgccaccgggtcagacagtctcatcaaatacgagacgcacagcactctggacggaagatggagtgccctgacccccggacctccaatggccacggctggacctgcggacagcaagttcagcaacagccagctcatctttgcggggcctaaacagaacggcaacacggccaccgtacccgggactctgatcttcacctctgaggaggagctggcagccaccaacgccaccgatacggacatgtggggcaacctacctggcggtgaccagagcaacagcaacctgccgaccgtggacagactgacagccttgggagccgtgcctggaatggtctggcaaaacagagacatttactaccagggtcccatttgggccaagattcctcataccgatggacactttcacccctcaccgctgattggtgggtttgggctgaaacacccgcctcctcaaatttttatcaagaacaccccggtacctgcgaatcctgcgacgaccttcagctctactccggtaaactccttcattactcagtacagcactggccaggtgtcggtgcagattgactgggagatccagaaggagcggtccaaacgctggaaccccgaggtccagtttacctccaactacggacagcaaaactctctgttgtgggctcccgatgcggctgggaaatacactgagcctagggctatcggtacccgctacctcacccaccacctgtaa

SEQ ID NO: 783 - DNA, 2205 bp, Artificial Sequence
  source: /note="Description of Artificial Sequence: Synthetic polynucleotide"
atgactgacggttaccttccagattggctagaggacaacctctctgaaggcgttcgagagtggtgggcgctgcaacctggagcccctaaacccaaggcaaatcaacaacatcaggacaacgctcggggtcttgtgcttccgggttacaaatacctcggacccggcaacggactcgacaagggggaacccgtcaacgcagcggacgcggcagccctcgagcacgacaaggcctacgaccagcagctcaaggccggtgacaacccctacctcaagtacaaccacgccgacgcggagttccagcagcggcttcagggcgacacatcgtttgggggcaacctcggcagagcagtcttccaggccaaaaagagggttcttgaacctcttggtctggttgagcaagcgggtgagacggctcctggaaagaagagaccgttgattgaatccccccagcagcccgactcctccacgggtatcggcaaaaaaggcaagcagccggctaaaaagaagctcgttttcgaagacgaaactggagcaggcgacggaccccctgagggatcaacttccggagccatgtctgatgacagtgagatgcgtgcagcagctggcggagctgcagtcgagggcggacaaggtgccgatggagtgggtaatgcctcgggtgattggcattgcgattccacctggtctgagggccacgtcacgaccaccagcaccagaacctgggtcttgcccacctacaacaaccacctctacaagcgactcggagagagcctgcagtccaacacctacaacggattctccaccccctggggatactttgacttcaaccgcttccactgccacttctcaccacgtgactggcagcgactcatcaacaacaactggggcatgcgacccaaagccatgcgggtcaaaatcttcaacatccaggtcaaggaggtcacgacgtcgaacggcgagacaacggtggctaataaccttaccagcacggttcagatctttgcggactcgtcgtacgaactgccgtacgtgatggatgcgggtcaagagggcagcctgcctccttttcccaacgacgtctttatggtgccccagtacggctaccgtggactggtgaccggcaacacttcgcagcaacagactgacagaaatgccttctactgcctggagtactttccttcgcagatgctgcggactggcaacaactttgaaattacgtacagttttgagaaggtgcctttccactcgatgtacgcgcacagccagagcctggaccggctgatgaaccctctcatcgaccagtacctgtggggactgcaatcgaccaccaccggaaccaccctgaatgccgggactgccaccaccaactttaccaagctgcggcctaccaacttttccaactttaaaaagaactggctgcccgggccttcaatcaagcagcagggcttctcaaagactgccaatcaaaactacaagatccctgccaccgggtcagacagtctcatcaaatacgagacgcacagcactctggacggaagatggagtgccctgacccccggacctccaatggccacggctggacctgcggacagcaagttcagcaacagccagctcatctttgcggggcctaaacagaacggcaacacggccaccgtacccgggactctgatcttcacctctgaggaggagctggcagccaccaacgccaccgatacggacatgtggggcaacctacctggcggtgaccagagcaacagcaacctgccgaccgtggacagactgacagccttgggagccgtgcctggaatggtctggcaaaacagagacatttactaccagggtcccatttgggccaagattcctcataccgatggacactttcacccctcaccgctgattggtgggtttgggctgaaacacccgcctcctcaaatttttatcaagaacaccccggtacctgcgaatcctgcgacgaccttcagctctactccggtaaactccttcattactcagtacagcactggccaggtgtcggtgcagattgactgggagatccagaaggagcggtccaaacgctggaaccccgaggtccagtttacctccaactacggacagcaaaactctctgttgtgggctcccgatgcggctgggaaatacactgagcctagggctatcggtacccgctacctcacccaccacctgtaa

SEQ ID NO: 784 - DNA, 2205 bp, Artificial Sequence
  source: /note="Description of Artificial Sequence: Synthetic polynucleotide"
atgactgacggttaccttccagattggctagaggacaacctctctgaaggcgttcgagagtggtgggcgctgcaacctggagcccctaaacccaaggcaaatcaacaacatcaggacaacgctcggggtcttgtgcttcagggttacaaatacctcggacccggcaacggactcgacaagggggaacccgtcaacgcagcggacgcggcagccctcgagcacgacaaggcctacgaccagcagctcaaggccggtgacaacccctacctcaagtacaaccacgccgacgcggagttccagcagcggcttcagggcgacacatcgtttgggggcaacctcggcagagcagtcttccaggccaaaaagagggttcttgaaccccttggtctggttgagcaagcgggtgagacggctcctggaaagaagagaccgttgattgaatccccccagcagcccgactcctccacgggtatcggcaaaaaaggcaagcagccggctaaaaagaagctcgttttcgaagacgaaactggagcaggcgacggaccccctgagggatcaacttccggagccatgtctgatgacagtgagatgcgtgcagcagctggcggagctgcagtcgagggcggacaaggtgccgatggagtgggtaatgcctcgggtgattggcattgcgattccacccggtctgagggccacgtcacgaccaccagcaccagaacctgggtcttgcccacctacaacaaccacctctacaagcgactcggagagagcctgcagtccaacacctacaacggattctccaccccctggggatactttgacttcaaccgcttccactgccacttctcaccacgtgactggcagcgactcatcaacaataactggggcatgcgacccaaagccatgcgggtcaaaatcttcaacatccaggtcaaggaggtcacgacgtcgaacggcgagacaacggtggctaataaccttaccagcacggttcagatctttgcggactcgtcgtacgaactgccgtacgtgatggatgcgggtcaagagggcagcctgcctccttttcccaacgacgtctttatggtgccccagtacggctactgtggactggtgaccggcaacacttcgcagcaacagactgacagaaatgccttctactgcctggagtactttccttcgcagatgctgcggactggcaacaactttgaaattacgtacagttttgagaaggtgcctttccactcgatgtacgcgcacagccagagcctggaccggctgatgaaccctctcatcgaccagtacctgtggggactgcaatcgaccaccaccggaaccaccctgaatgccgggactgccaccaccaactttaccaagctgcggcctaccaacttttccaactttaaaaagaactggctgcccgggccttcaatcaagcagcagggcttctcaaagactgccaatcaaaactacaagatccctgccaccgggtcagacagtctcatcaaatacgagacgcacagcactctggacggaagatggagtgcccggacccccggacctccaatggccacggctggacctgcggacagcaagttcagcaacagccagctcatctttgcggggcctaaacagaacggcaacacggccaccgtacccgggactctgatcttcacctctgaggaggagctggcagccaccaacgccaccgatacggacatgtggggcaacctacctggcggtgaccagagcaacagcaacctgccgaccgtggacagactgacagccttgggagccgtgcctggaatggtctggcaaaacagagacatttactaccagggtcccatttgggccaagattcctcataccgatggacactttcacccctcaccgctgattggtgggtttgggctgaaacacccgcctcctcaaatttttatcaagaacaccccggtacctgcgaatcctgcgacgaccttcagctctactccggtaaactccttcattactcagtacagcactggccaggtgtcggtgcagattgactgggagatccagaaggagcggtccaaacgctggaaccccgaggtccagtttacctccaactacggacagcaaaactctctgttgtgggctcccgatgcggctgggaaatacactgagcctagggctatcggtacccgctacctcacccaccacctgtaa

SEQ ID NO: 785 - DNA, 2175 bp, Artificial Sequence
  source: /note="Description of Artificial Sequence: Synthetic polynucleotide"
atgtcttttgttgatcaccctccagattggttggaagaagttggtgaaggtcttcgcgagtttttgggccttgaagcgggcccaccgaaaccaaaacccaatcagcagcatcaagatcaagcccgtggtcttgtgctgcctggttataactatctcggacccggaaacggtctcgatcgaggagagcctgtcaacagggcagacgaggtcgcgcgagagcacgacatctcgtacaacgagcagcttgaggcgggagacaacccctacctcaagtacaaccacgcggacgccgagtttcaggagaggctcgccgacgacacatccttcgggggaaacctcggaaaggcagtctttcaggccaagaaaagggttctcgaaccttttggcctggttgaagagggtgctaagacggcccctaccggaaagcggatagacgaccactttccaaaaagaaagaaggcccggaccgaagaggactccaagccttccacctcgtcagacgccgaagctggacccagcggatcccagcagctgcaaatcccagcccaaccagcctcaagtttgggagctgatacaatgtctgcgggaggtggcggcccattgggcgacaataaccaaggtgccgatggagtgggcaatgcctcgggagattggcattgcgattccacgtggatgggggacagagtcgtcaccaagtccacccgaacctgggtgctgcccagctacaacaaccaccagtaccgagagatcaaaagcggctccgtcgacggaagcaacgccaacgcctactttggatacagcaccccctgggggtactttgactttaaccgcttccacagccactggagcccccgagactggcaaagactcatcaacaactactggggcttcagaccccggtccctcagagtcaaaatcttcaacattcaagtcaaagaggtcacggtgcaggactccaccaccaccatcgccaacaacctcacctccaccgtccaagtgtttacggacgacgactaccagctgccctacgtcgtcggcaacgggaccgagggatgcctgccggccttccctccgcaggtctttacgctgccgcagtacggttacgcgacgctgaaccgcgacaacacagaaaatcccaccgagaggagcagcttcttctgcctagagtactttcccagcaagatgctgagaacgggcaacaactttgagtttacctacaactttgaggaggtgcccttccactccagcttcgctcccagtcagaacctcttcaagctggccaacccgctggtggaccagtacttgtaccgcttcgtgagcacaaataacactggcggagtccagttcaacaagaacctggccgggagatacgccaacacctacaaaaactggttcccggggcccatgggccgaacccagggctggaacctgggctccggggtcaaccgcgccagtgtcagcgccttcgccacgaccaataggatggagctcgagggcgcgagttaccaggtgcccccgcagccgaacggcatgaccaacaacctccagggcagcaacacctatgccctggagaacactatgatcttcaacagccagccggcgaacccgggcaccaccgccacgtacctcgagggcaacatgctcatcaccagcgagagcgagacgcagccggtgaaccgcgtggcgtacaacgtcggcgggcagatggccaccaacaaccagagctccaccactgcccccgcgaccggcacgtacaacctccaggaaatcgtgcccggcagcgtgtggatggagagggacgtgtacctccaaggacccatctgggccaagatcccagagacggaggcgcactttcacccctctccggccatgggcggattcggactcaaacacccaccgcccatgatgctcatcaagaacacgcctgtgcccggaaatatcaccagcttctcggacgtgcccgtcagcagcttcatcacccagtacagcaccgggcaggtcaccgtggagatggagtgggagctcaagaaggaaaactccaagaggtggaacccagagatccagtacacaaacaactacaacgacccccagtttgtggactttgccccggacagcaccggggaatacagaaccaccagacctatcggaacccgataccttacccgacccctttaa

SEQ ID NO: 786 - DNA, 2175 bp, Artificial Sequence
  source: /note="Description of Artificial Sequence: Synthetic polynucleotide"
atgtcttttgttgatcaccctccagattggttggaagaagttggtgaaggtcttcgcgagtttttgggccttgaagcgggcccaccgaaaccaaaacccaatcagcagcatcaagatcaagcccgtggtcttgtgctgcctggttataactatctcggacccggaaacggtctcgatcgaggagagcctgtcaacagggcagacgaggtcgcgcgagagcacgacatctcgtacaacgagcagcttgaggcgggagacaacccctacctcaagtacaaccacgcggacgccgagtttcaggagaagctcgccgacgacacatcctccgggggaaacctcggaaaggcagtctttcaggccaagaaaagggttctcgaaccttttggcctggttgaagagggtgctaagacggcccctaccggaaagcggatagacgaccactttccaaaaagaaagaaggcccggaccgaagaggactccaagccttccacctcgtcagacgccgaagctggacccagcggatcccagcagctgcaaatcccagcccaaccagcctcaagtttgggagctgatacaatgtctgcgggaggtggcggcccattgggcgacaataaccaaggtgccgatggagtgggcaatgcctcgggagattggcattgcgattccacgtggatgggggacagagtcgtcaccaagtccacccgaacctgggtgctgcccagctacaacaaccaccagtaccgagagatcaaaagcggctccgtcgacggaagcaacgccaacgcctactttggatacagcaccccctgggggtactttgactttaaccgcttccacagccactggagcccccgagactggcaaagactcatcaacaactactggggcttcagaccccggtccctcagagtcaaaatcttcaacattcaagtcaaagaggtcacggtgcaggactccaccaccaccatcgccaacaacctcacctccaccgtccaagtgtttacggacgacgactaccagctgccctacgtcgtcggcaacgggaccgagggatgcctgccggccttccctccgcaggtctttacgctgccgcagtacggttacgcgacgctgaaccgcgacaacacagaaaatcccaccgagaggagcagcttcttctgcctagagtactttcccagcaagatgctgagaacgggcaacaactttgagtttacctacaactttgaggaggtgcccttccactccagcttcgctcccagtcagaacctcttcaagctggccaacccgctagtggaccagtacttgtaccgcttcgtgagcacaaataacactggcggagtccagttcaacaagaacctggccgggagatacgccaacacctacaaaaactggttcccggggcccatgggccgaacccagggctggaacctgggctccggggtcaaccgcgccagtgtcagcgccttcgccacgaccaataggatggagctcgagggcgcgagttaccaggtgcccccgcagccgaacggcatgaccaacaacctccagggcagcaacacctatgccctggagaacactatgatcttcaacagccagccggcgaacccgggcaccaccgccacgtacctcgagggcaacatgctcatcaccagcgagagcgagacgcagccggtgaaccgcgtggcgtacaacgtcggcgggcagatggccaccaacaaccagagctccaccactgcccccgcgaccggcacgtacaacctccaggaaatcgtgcccggcagcgtgtggatggagagggacgtgtacctccaaggacccatctgggccaagatcccagagacgggggcgcactttcacccctctccggccatgggcggattcggactcaaacacccaccgcccatgatgctcatcaagaacacgcctgtgcccggaaatatcaccagcttctcggacgtgcccgtcagcagcttcatcacccagtacagcaccgggcaggtcaccgtggagatggagtgggagctcaagaaggaaaactccaagaggtggaacccagagatccagtacacaaacaactacaacgacccccagtttgtggactttgccccggacagcaccggggaatacagaaccaccagacctatcggaacccgataccttacccgacccctttaa

SEQ ID NO: 787 - DNA, 2175 bp, Artificial Sequence
  source: /note="Description of Artificial Sequence: Synthetic polynucleotide"
atgtcttttgttgatcaccctccagattggttggaagaagttggtgaaggtcttcgcgagtttttgggccttgaagcgggcccaccgaaaccaaaacccaatcagcagcatcaagatcaagcccgtggtcttgtgctgcctggttataactatctcggacccggaaacggtctcgatcgaggagagcctgtcaacagggcagacgaggtcgcgcgagagcacgacatctcgtacaacgagcagcttgaggcgggagacaacccctacctcaagtacaaccacgcggacgccgagtttcaggagaagctcgccgacgacacatccttcgggggaaacctcggaaaggcagtctttcaggccaagaaaagggttctcgaaccttttggcctggttgaagagggtgctaagacggcccctaccggaaagcggatagacgaccactttccaaaaagaaagaaggcccggaccgaagaggactccaagccttccacctcgtcagacgccgaagctggacccagcggatcccagcagctgcaaatcccagcccaaccagcctcaagtttgggagctgatacaatgtctgcgggaggtggcggcccattgggcgacaataaccaaggtgccgatggagtgggcaatgcctcgggagattggcattgcgattccacgtggatgggggacagagtcgtcaccaagtccacccgaacctgggtgctgcccagctacaacaaccaccagtaccgagagatcaaaagcggctccgtcgacggaagcaacgccaacgcctactttggatacagcaccccctgggggtactttgactttaaccgcttccacagccactggagcccccgagactggcaaagactcatcaacaactactggggcttcagaccccggtccctcagagtcaaaatcttcaacattcaagtcaaagaggtcacggtgcaggactccaccaccaccatcgccaacaacctcacctccaccgtccaagtgtttacggacgacgactaccagctgccctacgtcgtcggcaacgggaccgagggatgcctgccggccttccctccgcaggtctttacgctgccgcagtacggttacgcgacactgaaccgcgacaacacagaaaatcccaccgagaggagcagcttcttctgcctagagtactttcccagcaagatgctgagaacgggcaacaactttgagtttacctacaactttgaggaggtgcccttccactccagcttcgctcccagtcagaacctcttcaagctggccaacccgctggtggaccagtacttgtaccgcttcgtgagcacaaataacactggcggagtccagttcaacaagaacctggccgggagatacgccaacacctacaaaaactggttcccggggcccatgggccgaacccagggctggaacctgggctccggggtcaaccgcgccagtgtcagcgccttcgccacgaccaataggatggagctcgagggcgcgagttaccaggtgcccccgcagccgaacggcatgaccaacaacctccagggcagcaacacctatgccctggagaacactatgatcttcaacagccagccggcgaacccgggcaccaccgccacgtacctcgagggcaacatgctcatcaccagcgagagcgagacgcagccggtgaaccgcgtggcgtacaacgtcggcgggcagatggccaccaacaaccagagctccaccactgcccccgcgaccggcacgtacaacctccaggaaatcgtgcccggcagcgtgtggatggagagggacgtgtacctccaaggacccatctgggccaagatcccagagacgggggcgcactttcacccctctccggccatgggcggattcggactcaaacacccaccgcccatgatgctcatcaagagcacgcctgtgcccggaaatatcaccagcttctcggacgtgcccgtcagcagcttcatcacccagtacagcaccgggcaggtcaccgtggagatggagtgggagctcaagaaggaaaactccaagaggtggaacccagagatccagtacacaaacaactacaacgacccccagtttgtggactttgccccggacagcaccggggaatacagaaccaccagacctatcggaacccgataccttacccgacccctttaa

SEQ ID NO: 788 - DNA, 2175 bp, Artificial Sequence
  source: /note="Description of Artificial Sequence: Synthetic polynucleotide"
atgtcttttgttgatcaccctccagattggttggaagaagttggtgaaggtcttcgcgagtttttgggccctgaagcgggcccaccgaaaccaaaacccaatcagcagcatcaagatcaagcccgtggtcttgtgctgcctggttataactatctcggacccggaaacggtctcgatcgaggagagcctgtcaacagggcagacgaggtcgcgcgagagcacgacatctcgtacaacgagcagcttgaggcgggagacaacccctacctcaagtacaaccacgcggacgccgagtttcaggagaagctcgccgacgacacatccttcgggggaaacctcggaaaggcagtctttcaggccaagaaaagggttctcgaaccttttggcctggttgaagagggtgctaagacggcccctaccggaaagcggatagacgaccactttccaaaaagaaagaaggtccggaccgaagaggactccaagccttccacctcgtcagacgccgaagctggacccagcggatcccagcagctgcaaatcccagcccaaccagcctcaagtttgggagctgatacaatgtctgcgggaggtggcggcccattgggcgacaataaccaaggtgccgatggagtgggcaatgcctcgggagattggcattgcgattccacgtggatgggggacagagtcgtcaccaagtccacccgaacctgggtgccgcccagctacaacaaccaccagtaccgagagatcaaaagcggctccgtcgacggaagcaacgccaacgcctactttggatacagcaccccctgggggtactttgactttaaccgcttccacagccactggagcccccgagactggcaaagactcatcaacaactactggggcttcagaccccggtccctcagagtcaaaatcttcaacattcaagtcaaagaggtcacggtgcaggactccaccaccaccatcgccaacaacctcacctccaccgtccaagtgtttacggacgacgactaccagctgccctacgtcgtcggcaacgggaccgagggatgcctgccggccttccctccgcaggtctttacgctgccgcagtacggttacgcgacgctgaaccgcgacaacacagaaaatcccaccgagaggagcagcttcttctgcctagagtactttcccagcaagatgctgagaacgggcaacaactttgagtttacctacaactttgaggaggtgcccttccactccagcttcgctcccagtcagaacctcttcaagctggccaacccgctggtggaccagtacttgtaccgcttcgtgagcacaaataacactggcggagtccagttcaacaagaacctggccgggagatacgccaacacctacaaaaactggttcccggggcccatgggccgaacccagggctggaacctgggctccggggtcaaccgcgccagtgtcagcgccttcgccacgaccaataggatggagctcgagggcgcgagttaccaggtgcccccgcagccgaacggcatgaccaacaacctccagggcagcaacacctatgccctggagaacactatgatcttcaacagccagccggcgaacccgggcaccaccgccacgtacctcgagggcaacatgctcatcaccagcgagagcgagacgcagccggtgaaccgcgtggcgtgcaacgtcggcgggcagatggccaccaacaaccagagctccaccactgcccccgcgaccggcacgtacaacctccaggaaatcgtgcccggcagcgtgtggatggagagggacgtgtacctccaaggacccatctgggccaagatcccagagacgggggcgcactttcacccctctccggccatgggcggattcggactcaaacacccaccgcccatgatgctcatcaagaacacgcctgtgcccggaaatatcaccagcttctcggacgtgcccgtcagcagcttcatcacccagtacagcaccgggcaggtcaccgtggagatggagtgggagctcaagaaggaaaactccaagaggtggaacccagagatccagtacacaaacaactacaacgacccccagtttgtggactttgccccggacagcaccggggaatacagaaccaccagacctattggaacccgataccttacccgacccctttaa

SEQ ID NO: 789 - DNA, 2175 bp, Artificial Sequence
  source: /note="Description of Artificial Sequence: Synthetic polynucleotide"
atgtcttttgttgatcaccctccagattggttggaagaagttggtgaaggtcttcgcgagtttttgggccttgaagcgggcccaccgaaaccaaaacccaatcagcagcatcaagatcaagcccgtggtcttgtgctgcctggttataactatctcggacccggaaacggtctcgatcgaggagagcctgtcaacagggcagacgaggtcgcgcgagagcacgacatctcgtacaacgagcagcttgaggcgggagacaacccctacctcaagtacaaccacgcggacgccgagtttcaggagaagctcgccgacgacacatccttcgggggaaacctcggaaaggcagtctttcaggccaagaaaagggttctcgaaccttttggcctggttgaagagggtgctaagacggcccctaccggaaagcggatagacgaccactttccaaaaagaaagaaggcccggaccgaagaggactccaagccttccacctcgtcagacgccgaagctggacccagcggatcccagcagctgcaaatcccagcccaaccagcctcaagtttgggagctgatacaatgtctgcgggaggtggcggcccattgggcgacaataaccaaggtgccgatggagtgggcaatgcctcgggagattggcattgcgattccacgtggatgggggacagagtcgtcaccaagtccacccgaacctgggtgctgcccagctacaacaaccaccagtaccgagagatcaaaagcggctccgtcgacggaagcaacgccaacgcctactttggatacagcaccccctgggggtactttgactttaaccgcttccacagccactggagcccccgagactggcaaagactcatcaacaactactggggcttcagaccccggtccctcagagtcaaaatcttcaacattcaagtcaaagaggtcacggtgcaggactccaccaccaccatcgccaacaacctcacctccaccgtccaagtgtttacggacgacgactaccagctgccctacgtcgtcggcaacgggaccgagggatgcctgccggccttccctccgcaggtctttacgctgccgcagtacggttacgcgacgctgaaccgcgacaacaccgaaaatcccaccgagaggagcagcttcttctgcctagagtactttcccagcaagatgctgagaacgggcaacaactttgagtttacctacaactttgaggaggtgcccttccactccagcttcgctcccagtcagaacctcttcaagctggccaacccgctggtggaccagtacttgtaccgcttcgtgagcacaaataacactggcggagtccagttcaacaagaacctggccgggagatacgccaacacctacaaaaactggttcccggggcccatgggccgaacccagggctggaacctgggctccggggtcaaccgcgccagtgtcagcgccttcgccacgaccaataggatggagctcgagggcgcgagttaccaggtgcccccgcagccgaacggcatgaccaacaacctccagggcagcaacacctatgccctggagaacactatgatcttcaacagccagccggcgaacccgggcaccaccgccacgtacctcgagggcaacatgctcatcaccagcgagagcgagacgcagccggtgaaccgcgtggcgtacaacgtcggcgggcagatggccaccaacaaccagagctccaccactgcccccgcgaccggcgcgtacaacctccaggaaatcgtgcccggcagcgtgtggatggagagggacgtgtacctccaaggacccatctgggccaagatcccagagacgggggcgcactttcacccctctccggccatgggcggattcggactcaaacacccaccgcccatgatgctcatcaagaacacgcctgtgcccggaaatatcaccagcttctcggacgtgcccgtcagcagcttcatcacccagtacagcaccgggcaggtcaccgtggagatggagtgggagctcaagaaggaaaactccaagaggtggaacccagagatccagtacacaaacaactacaacgacccccagtttgtggactttgccccggacagcaccggggaatacagaaccaccagacctatcggaacccgataccttacccgacccctttaa

SEQ ID NO: 790 - DNA, 2175 bp, Artificial Sequence
  source: /note="Description of Artificial Sequence: Synthetic polynucleotide"
atgtcttttgttgatcaccctccagattggttggaagaagttggtgaaggtcttcgcgagtttttgggccttgaagcgggcccaccgaaaccaaaacccaatcagcagcatcaagatcaagcccgtggtcttgtgctgcctggttataactatctcggacccggaaacggtctcgatcgaggagagcctgtcaacagggcagacggggtcgcgcgagagcacgacatctcgtacaacgagcagcttgaggcgggagacaacccctacctcaagtacaaccacgcggacgccgagtttcaggagaagctcgccgacgacacatccttcgggggaaacctcggaaaggcagtctttcaggccaagaaaagggttctcgaaccttttggcctggttgaagagggtgctaagacggcccctaccggaaagcggatagacgaccactttccaaaaagaaagaaggcccggaccgaagaggactccaagccttccacctcgtcagacgccgaagctggacccagcggatcccagcagctgcaaatcccagcccaaccagcctcaagtttgggagctgatacaatgtctgcgggaggtggcggcccattgggcgacaataaccaaggtgccgatggagtgggcaatgcctcgggagattggcattgcgattccacgtggatgggggacagagtcgtcaccaagtccacccgaacctgggtgctgcccagctacaacaaccaccagtaccgagagatcaaaagcggctccgtcgacggaagcaacgccaacgcctactttggatacagcaccccctgggggtactttgactttaaccgcttccacagccactggagcccccgagactggcaaagactcatcaacaactactggggcttcagaccccggtccctcagagtcaaaatcttcaacattcaagtcaaagaggtcacggtgcaggactccaccaccaccatcgccaacaacctcacctccaccgtccaagcgtttacggacgacgactaccagctgccctacgtcgtcggcaacgggaccgagggatgcctgccggccttccctccgcaggtctttacgctgccgcagtacggttacgcgacgctgaaccgcgacaacacagaaaatcccaccgagaggagcagcttcttctgcctagagtactttcccagcaagatgctgagaacgggcaacaactttgagtttacctacaactttgaggaggtgcccttccactccagcttcgctcccagtcagaacctcttcaagctggccaacccgctggtggaccagtacttgtaccgcttcgtgagcacaaataacactggcggagtccagttcaacaagaacctggccgggagatacgccaacacctacaaaaactggttcccggggcccatgggccgaacccagggctggaacctgggctccggggtcaaccgcgccagtgtcagcgccttcgccacgaccaataggatggagctcgagggcgcgagttaccaggtgcccccgcagccgaacggcatgaccaacaacctccagggcagcaacacctatgccctggagaacactatgatcttcaacagccagccggcgaacccgggcaccaccgccacgtacctcgagggcaacatgctcatcaccagcgagagcgagacgcagccggtgaaccgcgtggcgtacaacgtcggcgggcagatggccaccaacaaccagagctccaccactgcccccgcgaccggcacgtacaacctccaggaaatcgtgcccggcagcgtgtggatggagagggacgtgtacctccaaggacccatctgggccaagatcccagagacgggggcgcactttcacccctctccggccatgggcggattcggactcaaacacccaccgcccatgatgctcatcaagaacacgcctgtgcccggaaatatcaccagcttctcggacgtgcccgtcagcagcttcatcacccagtacagcaccgggcaggtcaccgtggagatggagtgggagctcaagaaggaaaactccaagaggtggaacccagagatccagtacacaaacaactacaacgacccccagtttgtggactttgccccggacagcaccggggaatacagaaccaccagacctatcggaacccgataccttacccgacccctttaa

SEQ ID NO: 791 - DNA, 2175 bp, Artificial Sequence
  source: /note="Description of Artificial Sequence: Synthetic polynucleotide"
atgtcttttgttgatcaccctccagattggttggaagaagttggtgaaggtcttcgcgagtttttgggccttgaagcgggcccaccgaaaccaaaacccaatcagcagcatcaagatcaagcccgtggtcttgtgctgcctggttataactatctcggacccggaaacggtctcgatcgaggagagcctgtcaacagggcagacgaggtcgcgcgagagcacgacatctcgtacaacgagcagcttgaggcgggagacaacccctacctcaagtacaaccacgcggacgccgagtttcaggagaagctcgccgacgacacatccttcgggggaaacctcggaaaggcagtctttcaggccaagaaaagggttctcgaaccttttggcctggttgaagagggtgctaagacggcccctaccggaaagcggatagacgaccactttccaaaaagaaagaaggcccggaccgaagaggactccaagccttccacctcgtcagacgccgaagctggacccagcggatcccagcagctgcaaatcccagcccaaccagcctcaagtttgggagctgatacaatgtctgcgggaggtggcggcccattgggcgacaataaccaaggtgccgatggagtgggcaatgcctcgggagattggcattgcgattccacgtggatgggggacagagtcgtcaccaagtccacccgaacctgggtgctgcccagctacaacaaccaccagtaccgagagatcaaaagcggctccgtcgacggaagcaacgccaacgcctactttggatacagcaccccctgggggtactttgactttaaccgcttccacagccactggagcccccgagactggcaaagactcatcaacaactactggggcttcagaccccggtccctcagagtcaaaatcttcaacattcaagtcaaagaggtcacggtgcaggactccaccaccaccatcgccaacaacctcacctccaccgtccaagtgtttacggacgacgactaccagctgccctacgtcgtcggcaacgggaccgagggatgcctgccggccttccctccgcaggtctttacgctgccgcagtacggttacgcgacgctgaaccgcgacaacacagaaaatcccaccgagaggagcagcttcttctgcctagagtactttcccagcaagatgctgagaacgggcaacaactttgagtttacctacaactttgaggaggtgcccttccactccagcttcgctcccagtcagaacctcttcaagctggccaacccgctggtggaccagtacttgtaccgcttcgtgagcacaaataacactggcggagtccagttcaacaagaacctggccgggagatacgccaacacctacaaaaactggttcccggggcccatgggccgaacccagggctggaacctgggctccggggtcaaccgcgccagtgtcagcgccttcgccacgaccaataggatggagctcgagggcgcgagttactaggtgcccccgcagccgaacggcatgaccaacaacctccagggcagcaacacctatgccctggagaacactatgatcttcaacagccagccggcgaacccgggcaccaccgccacgtacctcgagggcaacatgctcatcaccagcgagagcgagacgcagccggtgaaccgcgtggcgtacaacgtcggcgggcagatggccaccaacaaccagagctccaccactgcccccgcgaccggcacgtacaacctccaggaaatcgtgcccggcagcgtgtggatggagggggacgtgtacctccaaggacccatctgggccaagatcccagagacgggggcgcactttcacccctctccggccatgggcggattcggactcaagcacccaccgcccatgatgctcatcaagaacacgcctgtgcccggaaatatcaccagcttctcggacgtgcccgtcagcagcttcatcacccagtacagcaccgggcaggtcaccgtggagatggagtgggagctcaagaaggaaaactccaagaggtggaacccagagatccagtacacaaacaactacaacgacccccagtttgtggactttgccccggacagcaccggggaatacagaaccaccagacctatcggaacccgataccttacccgacccctttaa

SEQ ID NO: 792 - DNA, 2175 bp, Artificial Sequence
  source: /note="Description of Artificial Sequence: Synthetic polynucleotide"
atgtcttttgttgatcaccctccagattggttggaagaagttggtgaaggtcttcgcgagtttttgggccttgaagcgggcccaccgaaaccaaaacccaatcagcagcatcaagatcaagcccgtggtcttgtgctgcctggttataactatctcggacccggaaacggtctcgatcgaggagagcctgtcaacagggcagacgaggtcgcgcgagagcacgacatctcgtacaacgagcagcttgaggcgggagacaacccctacctcaagtacaaccacgcggacgccgagtttcaggagaagctcgccgacgacacatccttcgggggaaacctcggaaaggcagtctttcaggccaagaaaagggttctcgaaccttttggcctggttgaagagggtgctaagacggcccctaccggaaagcggatagacgaccactttccaaaaagaaagaaggtccggaccgaagaggactccaagccttccacctcgtcagacgccgaagctggacccagcggatcccagcagctgcaaatcccagcccaaccagcctcaagtttgggagctgatacaatgtctgcgggaggtggcggcccattgggcgacaataaccaaggtgccgatggagtgggcaatgcctcgggagattggcattgcgattccacgtggatgggggacagagtcgtcaccaagtccacccgaacctgggtgctgcccagctacaacaaccaccagtaccgagagatcaaaagcggctccgtcgacggaagcaacgccaacgcctactttggatacagcaccccctgggggtactttgactttaaccgcttccacagccactggagcccccgagactggcaaagactcatcaacaactactggggcttcagaccccggtccctcagagtcaaaatcttcaacattcaagtcaaagaggtcacggtgcaggactccaccaccaccatcgccaacaacctcacctccaccgtccaagtgtttacggacgacgactaccagctgccctacgtcgtcggcaacgggaccgagggatgcctgccggccttccctccgcaggtctttacgctgccgcagtacggttacgcgacgctgaaccgcgacaacacagaaaatcccaccgagaggagcagcttcttctgcctagagtactttcccagcaagatgctgagaacgggcaacaactttgagtttacctacaactttgaggaggtgcccttccactccagcttcgctcccagtcagaacctcttcaagctggccaacccgctggtggaccagtacttgtaccgcttcgtgagcacaaataacactggcggagtccagttcaacaagaacctggccgggagatacgccaacacctacaaaaactggttcccggggcccatgggccgaacccagggctggaacctgggctccggggtcaaccgcgccagtgtcagcgccttcgccacgaccaataggatggagctcgagggcgcgagttaccaggtgcccccgcagccgaacggcatgaccaacaacctccagggcagcaacacctatgccctggagaacactatgatcttcaacagccagccggcgaacccgggcaccaccgccacgtacctcgagggcaacatgctcatcaccagcgagagcgagacgcagccggtgaaccgcgtggcgtacaacgtcggcgggcagatggccaccaacaaccagagctccaccactgcccccgcgaccggcacgtacaacctccaggaaatcgtgcccggcagcgtgtggatggagagggacgtgtacctccaaggacccatctgggccaagatcccagagacgggggcgcactttcacccctctccggccatgggcggattcggactcaaacacccaccgcccatgatgctcatcaagaacacgcctgtgcccggaaatatcaccagcttctcggacgtgcccgtcagcagcttcatcacccagtacagcaccgggcaggtcaccgtggagatggagtgggagctcaagaaggaaaactccgagaggtggaacccagagatccagtacacaaacaactacaacgacccccagtttgtggactttgccccggacagcaccggggaatacagaaccaccagacctattggaacccgataccttacccgacccctttaa

SEQ ID NO: 793 - DNA, 2175 bp, Artificial Sequence
  source: /note="Description of Artificial Sequence: Synthetic polynucleotide"
atgtcttttgttgatcaccctccagattggttggaagaagttggtgaaggtcttcgcgagtttttgggccttgaagcgggcccaccgaaaccaaaacccaatcagcagcatcaagatcaagcccgtggtcttgtgctgcctggttataactatctcggacccggaaacggtctcgatcgaggagagcctgtcaacagggcagacgaggtcgcgcgagagcacgacatctcgtacagcgagcagcttgaggcgggagacaacccctacctcaagtacaaccacgcggacgccgagtttcaggagaagctcgccgacgacacatccttcgggggaaacctcggaaaggcagtctttcaggccaagaaaagggttctcgaaccttttggcctggttgaagagggtgctaagacggcccctaccggaaagcggatagacgaccactttccaaaaagaaagaaggcccggaccgaagaggactccaagccttccacctcgtcagacgccgaagctggacccagcggatcccagcagctgcaaatcccagcccaaccagcctcaagtttgggagctgatacaatgtctgcgggaggtggcggcccattgggcgacaataaccaaggtgccgatggagtgggcaatgcctcgggagattggcattgcgattccacgtggatgggggacagagtcgtcaccaagtccacccgaacctgggtgctgcccagctacaacaaccaccagtaccgagagatcaaaagcggctccgtcgacggaagcaacgccaacgcctactttggatacagcaccccctgggggtactttgactttaaccgcttccacagccactggagcccccgagactggcaaagactcatcaacaactactggggcttcagaccccggtccctcagagtcaaaatcttcaacattcaagtcaaagaggtcacggtgcaggactccaccaccaccatcgccaacaacctcacctccaccgtccaagtgtttacggacgacgactaccagctgccctacgtcgtcggcaacgggaccgagggatgcctgccggccttccctccgcaggtctttacgctgccgcagtacggttacgcgacgctgaaccgcgacaacacagaaaatcccaccgagaggagcagcttcttctgcctagagtactttcccagcaagatgctgagaacgggcaacaactttgagtttacctacaactttgaggaggtgcccttccactccagcttcgctcccagtcagaacctcttcaagctggccaacccgctggtggaccagtacttgtaccgcttcgtgagcacaaataacactggcggagtccagttcaacaagaacctggccgggagatacgccaacacctacaaaaactggttcccggggcccatgggccgaacccagggctggaacctgggctccggggtcaaccgcgccagtgtcagcgccttcgccacgaccaataggatggagctcgagggcgcgagttaccaggtgcccccgcagccgaacggcatgaccaacaacctccagggcagcaacacctatgccctggagaacactatgatcttcaacagccagccggcgaacccgggcaccaccgccacgtacctcgagggcaacatgctcatcaccagcgagagcgagacgcagccggtgaaccgcgtggcgtacaacgtcggcgggcagatggccaccaacaaccagagctccaccactgcccccgcgaccggcacgtacaacctccaggaaatcgtgcccggcagcgtgtggatggagagggacgtgtacctccaaggacccatctgggccaagatcccagagacgggggcgcactttcacccctctccggccatgggcggattcggactcaaacacccaccgcccatgatgctcatcaagaacacgcctgtgcccggaaatatcaccagcttctcggacgtgcccgtcagcagcttcatcacccagtacagcaccgggcaggtcaccgtggagatggagtgggagctcaagaaggaaaactccaagaggtggaacccagagatccagtacacaaacaactacaacgacccccagtttgtggactttgccccggacagcaccggggaatacagaaccgccagacctatcggaacccgataccttacccgacccctttaa

SEQ ID NO: 794 - DNA, 2175 bp, Artificial Sequence
  source: /note="Description of Artificial Sequence: Synthetic polynucleotide"
atgtcttttgttgatcaccctccagattggttggaagaagttggtgaaggtcttcgcgagtttttgggccctgaagcgggcccaccgaaaccaaaacccaatcagcagcatcaagatcaagcccgtggtcttgtgctgcctggttataactatctcggacccggaaacggtctcgatcgaggagagcctgtcaacagggcagacgaggtcgcgcgagagcacgacatctcgtacaacgagcagcttgaggcgggagacaacccctacctcaagtacaaccacgcggacgccgagtttcaggagaagctcgccgacgacacatccttcgggggaaacctcggaaaggcagtctttcaggccaagaaaagggttctcgaaccttttggcctggttgaagagggtgctaagacggcccctaccggaaagcggatagacgaccactttccaaaaagaaagaaggcccggaccgaagaggactccaagccttccacctcgtcagacgccgaagctggacccagcggatcccagcagctgcaaatcccagcccaaccagcctcaagtttgggagctgatacaatgtctgcgggaggtggcggcccattgggcgacaataaccaaggtgccgatggagtgggcaatgcctcgggagattggcattgcgattccacgtggatgggggacagagtcgtcaccaagtccacccgaacctgggtgctgcccagctacaacaaccaccagtaccgagagatcaaaagcggctccgtcgacggaagcaacgccaacgcctactttggatacagcaccccctgggggtactttgactttaaccgcttccacagccactggagcccccgagactggcaaagactcatcaacaactactggggcttcagaccccggtccctcagagtcaaaatcttcaacattcaagtcaaagaggtcacggtgcaggactccaccaccaccatcgccaacaacctcacctccaccgtccaagtgtttacggacgacgactaccagctgccctacgtcgtcggcaacgggaccgagggatgcctgccggccttccctccgcaggtctttacgctgccgcagtacggttacgcgacgctgaaccgcgacaacacagaaaatcccaccgagaggagcagcttcttctgcctagagtactttcccagcaagatgctgagaacgggcaacaactttgagtttacctacaactttgaggaggtgcccttccactccagcttcgctcccagtcagaacctcttcaagctggccaacccgctggtggaccagtacttgtaccgcttcgtgagcacaaataacactggcggagtccagttcaacaagaacctggccgggagatacgccaacacctacaaaaactggttcccggggcccatgggccgaacccagggctggaacctgggctccggggtcaaccgcgccagtgtcagcgccttcgccacgaccaataggatggagctcgagggcgcgagttaccaggtgcccccgcagccgaacggcatgaccaacaacctccagggcagcaacacctatgccctggagaacactatgatcttcaacagccagccggcgaacccgggcaccaccgccacgtacctcgagggcaacatgctcatcaccagcgagagcgagacgcagccggtgaaccgcgtggcgtacaacgtcggcgggcagatgaccaccaacaaccagagctccaccactgcccccgcgaccggcacgtacaacctccaggaaatcgtgcccggcagcgtgtggatggagagggacgtgtacccccaaggacccatctgggccaagatcccagagacgggggcgcactttcacccctctccggccatgggcggattcggactcaaacacccaccgcccatgatgctcatcaagaacacgcctgtgcccggaaatatcaccagcttctcggacgtgcccgtcagcagcttcatcacccagtacagcaccgggcaggtcaccgtggagatggagtgggagctcaagaaggaaaactccaagaggtggaacccagagatccagtacacaaacaactacaacgacccccagtttgtggactttgccccggacagcaccggggaatacaggaccaccagacctatcggaacccgataccttacccgacccctttaa

SEQ ID NO: 795 - DNA, 2175 bp, Artificial Sequence
  source: /note="Description of Artificial Sequence: Synthetic polynucleotide"
atgtcttttgttgatcaccctccagattggttggaagaagttggtgaaggtcttcgcgagtttttgggccttgaagcgggcccaccgaaaccaaaacccaatcagcagcatcaagatcaagcccgtggtcttgtgctgcctggttataactatctcggacccggaaacggtctcgatcgaggagagcctgtcaacagggcagacgaggtcgcgcgagagcacgacatctcgtacaacgagcagcttgaggcgggagacaacccctacctcaagtacaaccacgcggacgccgagtttcaggagaagctcgccgacgacacatccttcgggggaaacctcggaaaggcagtctttcaggccaagaaaagggttctcgaaccttttggcctggttgaagagggtgctaagacggcccctaccggaaagcggatagacgaccactttccaaaaagaaagaaggcccggaccgaagaggactccaagccttccacctcgtcagacgccgaagctggacccagcggatcccagcagctgcaaatcccagcccaaccagcctcaagtttgggagctgatacaatgtctgcgggaggtggcggcccattgggcgacaataaccaaggtgccgatggagtgggcaatgcctcgggagattggcattgcgattccacgtggatgggggacagagtcgtcaccaagtccacccgaacctgggtgctgcccagctacaacaaccaccagtaccgagagatcaaaagcggctccgtcgacggaagcaacgccaacgcctactttggatacagcaccccctgggggtactttgactttaaccgcttccacagccactggagcccccgagactggcaaagactcatcaacaactactggggcttcagaccccggtccctcagagtcaaaatcttcaacattcaagtcaaagaggtcacggtgcaggactccaccaccaccatcgccaacaacctcacctccaccgtccaagtgtttacggacgacgactaccagctgccctacgtcgtcggcaacgggaccgagggatgcctgccggccttccctccgcaggtctttacgctgccgcagtacggttacgcgacgctgaaccgcgacaacacagaaaatcccaccgagaggagcagcttcctctgcctagagtactttcccagcaagatgctgagaacgggcaacaactttgagtttacctacaactttgaggaggtgcccttccactccagcttcgctcccagtcagaacctcttcaagctggccaacccgctggtggaccagtacttgtaccgcttcgtgagcacaaataacactggcggagtccagttcaacaagaacctggccgggagatacgccaacacctacaaaaactggttcccggggcccatgggccgaacccagggctggaacctgggctccggggtcaaccgcgccagtgtcagcgccttcgccacgaccaataggatggagctcgagggcgcgagttaccaggtgcccccgcagccgaacggcatgaccaacaacctccagggcagcaacacctatgccctggagaacactatgatcttcaacagccagccggcgaacccgggcaccaccgccacgtacctcgagggcaacatgctcatcaccagcgagagcgagacgcagccggtgaaccgcgtggcgtacaacgtcggcgggcagatggccaccaacaaccagagctccaccactgcccccgcgaccggcacgtacaacctccaggaaatcgtgcccggcagcgtgtggatgaagagggacgtgtacctccaaggacccatctgggccaagatcccagagacgggggcgcactttcacccctctccggccatgggcggattcggactcaaacacccaccgcccatgatgctcatcaagaacacgcctgtgcccggaaatatcaccagcttctcggacgtgcccgtcagcagcttcatcacccagtacagcaccgggcaggtcaccgtggagatggagtgggagctcaagaaggaaaactccaagaggtggaacccagagatccagtacacaaacaactacaacgacccccagtttgtggactttgccccggacagcaccggggaatacagaaccaccagacctatcggaacccgataccttacccgacccctttaa

SEQ ID NO: 796 - DNA, 2175 bp, Artificial Sequence
  source: /note="Description of Artificial Sequence: Synthetic polynucleotide"
atgtcttttgttgatcaccctccagattggttggaagaagttggtgaaggtcttcgcgagtttttgggccttgaggcgggcccaccgaaaccaaaacccaatcagcagcatcaagatcaagcccgtggtcttgtgctgcctggttataactatctcggacccggaaacggtctcgatcgaggagagcctgtcaacagggcagacgaggtcgcgcgagagcacgacatctcgtacaacgagcagcttgaggcgggagacaacccctacctcaagtacaaccacgcggacgccgagtttcaggagaagctcgccgacgacacatccttcgggggaaacctcggaaaggcagtctttcaggccaagaaaagggttctcgaaccttttggcctggttgaagagggtgctaagacggcccctaccggaaagcggatagacgaccactttccaaaaagaaagaaggcccggaccgaagaggactccaagccttccaccccgtcagacgccgaagctggacccagcggatcccagcagctgcaaatcccagcccaaccagcctcaagtttgggagctgatacaatgtctgcgggaggtggcggcccattgggcgacaataaccaaggtgccgatggagtgggcaatgcctcgggagattggcattgcgattccacgtggatgggggacagagtcgtcaccaagtccacccgaacctgggtgctgcccagctacaacaaccaccagtaccgagagatcaaaagcggctccgtcgacggaagcaacgccaacgcctactttggatacagcaccccctgggggtactttgactttaaccgcttccacagccactggagcccccgagactggcaaagactcatcaacaactactggggcttcagaccccggtccctcagagtcaaaatcttcaacattcaagtcaaagaggtcacggtgcaggactccaccaccaccatcgccaacaacctcacctccaccgtccaagtgtttacggacgacgactaccagctgccctacgtcgtcggcaacgggaccgagggatgcctgccggccttccctccgcaggtctttacgctgccgcagtacggttacgcgacgctgaaccgcgacaacacagaaaatcccaccgagaggagcagcttcttctgcctagagtactttcccagcaagatgctgagaacgggcaacaactttgagtttacctacaactttgaggaggtgcccttccactccagcttcgctcccagtcagaacctcttcaagctggccaacccgctggtggaccagtacttgtaccgcttcgtgagcacaaataacactggcggagtccagttcaacaagaacctggccgggagatacgccaacacctacaaaaactggttcccggggcccatgggccgaacccagggctggaacctgggctccggggtcaaccgcgccagtgtcagcgccttcgccacgaccaataggatggagctcgagggcgcgagttaccaggtgcccccgcagccgaacggcatgaccaacaacctccagggcagcaacacctatgccctggagaacactatgatcttcaacagccagccggcgaacccgggcaccaccgccacgtacctcgagggcaacatgctcatcaccagcgagagcgagacgcagccggtgaaccgcgtggcgtacaacgtcggcgggcagatggccaccaacaaccagagctccaccactgcccccgcgaccggcacgtacaacctccaggaaatcgtgcccggcagcgtgtggatggagagggacgtgtacctccaaggacccatctgggccaagatcccagagacgggggcgcactttcacccctctccggccatgggcggattcggactcaaacacccaccgcccatgatgctcatcaagaacacgcctgtgcccggaaatatcaccagcttctcggacgtgcccgtcagcagcttcatcacccagtacagcaccgggcaggtcaccgtggagatggagtgggagctcaagaaggaaaactccaagaggtggaacccagagatccagtacacaaacaactacaacgacccccagtttgtggactttgccccggacagcaccggggaatacagaaccaccagacctatcggaacccgataccttacccgacccctttaa

SEQ ID NO: 797 - DNA, 2175 bp, Artificial Sequence
  source: /note="Description of Artificial Sequence: Synthetic polynucleotide"
atgtcttttgttgatcaccctccagattggttggaagaagttggtgaaggtcttcgcgagtttttgggccttgaagcgggcccaccgaaaccaaaacccaatcagcagcatcaagatcaagcccgtggtcttgtgctgcctggttataactatctcggacccggaaacggtctcgatcgaggagagcctgtcaacagggcagacgaggtcgcgcgagagcacgacatctcgtacaacgagcagcttgaggcgggagacaacccctacctcaagtacaaccacgcggacgccgagtttcaggagaagctcgccgacgacacatccttcgggggaaacctcggaaaggcagtctttcaggccaagaaaagggttctcgaaccttttggcctggttgaagagggtgctaagacggcccctaccggaaagcggatagacgaccactttccaaaaagaaagaaggcccggaccgaagaggactccaagccttccacctcgtcagacgccgaagctggacccagcggatcccagcagctgcaaatcccagcccaaccagcctcaagtttgggagctgatacaatgtctgcgggaggtggcggcccattgggcgacaataaccaaggtgccgatggagtgggcaatgcctcgggagattggcattgcgattccacgtggatgggggacagagtcgtcaccaagtccacccgaacctgggtgctgcccagctacaacaaccaccagtaccgagagatcaaaagcggctccgtcgacggaagcaacgccaacgcctactttggatacagcaccccctgggggtactttgactttaaccgcttccacagccactggagcccccgagactggcaaagactcatcaacaactactggggcttcagaccccggtccctcagagtcaaaatcttcaacattcaagtcaaagaggtcacggtgcaggactccaccaccaccatcgccaacaacctcacctccaccgtccaagtgtttacggacgacgactaccagctgccctacgtcgtcggcaacgggaccgagggatgcctgccggccttccctccgcaggtctttacgctgccgcagtacggttacgcgacgctgaaccgcgacaacacagaaaatcccaccgagaggagcagcttcttctgcctagagtactttcccagcaagatgctgagaacgggcaacaactttgagtttacctacaactttgaggaggtgcccttccactccagcttcgctcccagtcagaacctcttcaagctggccaacccgctggtggaccagtacttgtaccgcttcgtgagcacaaataacactggcggagtccagttcaacaagaacctggccgggagatacgccaacacccacaaaaactggttcccggggcccatgggccgaacccagggctggaacctgggctccggggtcaaccgcgccagtgtcagcgccttcgccacgaccaataggatggagctcgagggcgcgagttaccaggtgcccccgcagtcgaacggcatgaccaacaacctccggggcagcaacacctatgccctggagaacactatgatcttcaacagccagccggcgaacccgggcaccaccgccacgtacctcgagggcaacatgctcatcaccagcgagagcgagacgcagccggtgaaccgcgtggcgtacaacgtcggcgggcagatggccaccaacaaccagagctccaccactgcccccgcgaccggcacgtacaacctccaggaaatcgtgcccggcagcgtgtggatggagagggacgtgtacctccaaggacccatctgggccaagatcccagagacgggggcgcactttcacccctctccggccatgggcggattcggactcaaacacccaccgcccatgatgctcatcaagaacacgcctgtgcccggaaatatcaccagcttctcggacgtgcccgtcagcagcttcatcacccagtacagcaccgggcaggtcaccgtggagatggagtgggagctcaagaaggaaaactccaagaggtggaacccagagatccagtacacaaacaactacaacgacccccagtttgtggactttgccccggacagcaccggggaatacagaaccaccagacctatcggaacccgataccttacccgacccctttaa

SEQ ID NO: 798 - DNA, 2175 bp, Artificial Sequence
  source: /note="Description of Artificial Sequence: Synthetic polynucleotide"
atgtcttttgttgatcaccctccagattggttggaagaagttggtgaaggtcttcgcgagtttttgggccttgaagcgggcccaccgaaaccaaaacccaatcagcagcatcaagatcaagcccgtggtcttgtgctgcctggttataactatctcggacccggaaacggtctcgatcgaggagagcctgtcaacagggcagacgaggtcgcgcgagagcacgacatctcgtacaacgagcagcttgaggcgggagacaacccctacctcaagtacaaccacgcggacgccgagtttcaggagaagctcgccgacgacacatccttcgggggaaacctcggaaaggcagtctttcaggccaagaaaagggttctcgaaccttttggcctggttgaagagggtgctaagacggcccctaccggaaagcggatagacgaccactttccaaaaagaaagaaggcccggaccgaagaggactccaagccttccacctcgtcagacgccgaagctggacccagcggatcccagcagctgcaaatcccagcccaaccagcctcaagtttgggagctgatacaatgtctgcgggaggtggcggcccattgggcgacaataaccaaggtgccgatggagtgggcaatgcctcgggagattggcattgcgattccacgtggatgggggacagagtcgtcaccaagtccacccgaacctgggtgctgcccagctacaacaaccaccagtaccgagagatcaaaagcggctccgtcgacggaagcaacgccaacgcctactttggatacagcaccccctgggggtactttgactttaaccgcttccacagccactggagcccccgagactggcaaagactcatcaacaactactggggcttcagaccccggtccctcagagtcaaaatcttcaacattcaagtcaaagaggtcacggtgcaggactccaccaccaccatcgccaacaacctcacctccaccgtccaagtgtttacggacgacgactaccagctgccctacgtcgtcggcaacgggaccgagggatgcctgccggccttccctccgcaggtctttacgctgccgcagtacggttacgcgacgctgaaccgcgacaacacagaaaatcccaccgagaggagcagcttcttctgcctagagtactttcccagcaagatgctgagaacgggcaacaactttgagtttacctacaactttgaggaggtgcccttccactccagcttcgctcccagtcagaacctcttcaagctggccaacccgctggtggaccagtacttgtaccgcttcgtgagcacaaataacactggcggagtccagttcaacaagaacctggccgggagatacgccaacacctacaaaaactggttcccggggcccatgggccgaacccagggctggaacctgggctccggggtcaaccgcgccagtgtcagcgccttcgccacgaccaataggatggagctcgagggcgcgagttaccaggtgcccccgcagccgaacggcatgaccaacaacctccagggcagcaacacctatgccctggagaacactatgatcttcaacagccagccggcgaacccgggcaccaccgccacgtacctcgagggcaacatgctcatcaccagcgagagcgagacgcagccggtgaaccgcgtggcgtacagcgtcggcgggcagatggccaccaacaaccagagctccaccactgcccccacgaccggcacgtacaacctccaggaaatcgtgcccggcagcgtgtggatggagagggacgtgtacctccaaggacccatctgggccaagatcccagagacgggggcgcactttcacccctctccggccatgggcggattcagactcaaacacccaccgcccatgatgctcatcaagaacacgcctgtgcccggaaatatcaccagcttctcggacgtgcccgtcagcagcttcatcacccagtacagcaccgggcaggtcaccgtggagatggagtgggagctcaagaaggaaaactccaagaggtggaacccagagatccagtacacaaacaactacaacgacccccagtttgtggactttgccccggacagcaccggggaatacagaaccaccagacctatcggaacccgataccttacccgacccctttaa

SEQ ID NO: 799 - DNA, 2175 bp, Artificial Sequence
  source: /note="Description of Artificial Sequence: Synthetic polynucleotide"
atgtcttttgttgatcaccctccagattggttggaagaagttggtgaaggtcttcgcgagtttttgggccttgaagcgggcccaccgaaaccaaaacccaatcagcagcatcaagatcaagcccgtggtcttgtgctgcctggttataactatctcggacccggaaacggtctcgatcgaggagagcctgtcaacagggcagacgaggtcgcgcgagagcacgacatctcgtacaacgagcagcttgaggcgggagacaacccctacctcaagtacaaccacgcggacgccgagtttcaggagaagctcgccgacgacacatccttcgggggaaacctcggaaaggcagtctttcaggccaagaaaagggttctcgaaccttttggcctggttgaagagggtgctaagacggcccctaccggaaagcggatagacgaccactttccaaaaagaaagaaggcccggaccgaagaggactccaagccttccacctcgtcagacgccgaagctggacccagcggatcccagcagctgcaaatcccagcccaaccagcctcaagtttgggagctgatacaatgtctgcgggaggtggcggcccattgggcgacaataaccaaggtgccgatggagtgggcaatgcctcgggagattggcattgcgattccacgtggatgggggacagagtcgtcaccaagtccacccgaacctgggtgctgcccagctacaacaaccaccagtaccgagagatcaaaagcggctccgtcgacggaagcaacgccaacgcctactttggatacagcaccccctgggggtactttgactttaaccgcttccacagccactggagcccccgagactggcaaagactcatcaacaactactggggcttcagaccccggtccctcagagtcaaaatcttcaacattcaagtcaaagaggtcacggtgcaggactccaccaccaccatcgccaacaacctcacctccaccgtccaagtgtttacggacgacgactaccagctgccctacgtcgtcggcaacgggaccgagggatgcctgccggccttccctccgcaggtctttacgctgccgcagtacggttacgcgacgctgaaccgcgacaacacagaaaatcccaccgagaggagcagcttcttctgcctagagtactttcccagcaagatgctgagaacgggcaacaactttgagtttacctacaactttgaggaggtgcccttccactccagcttcgctcccagtcagaacctcttcaagctggccaacccgctggtggaccagtacttgtaccgcttcgtgagcacaaataacactggcggagtccagttcaacaagaacctggccgggagatacgccaacacctacaaaaactggttcccggggcccatgggccgaacccagggctggaacctgggctccggggtcaaccgcgccagtgtcagcgccttcgccgcgaccaataggatggagctcgagggcgcgagttaccaggtgcccccgcagccgaacggcatgaccaacaacctccagggcagcaacacctatgccctggagaacactatgatcttcaacagccagccggcgaacccgggcaccaccgccacgtacctcgagggcaacatgctcatcaccagcgagagcgagacgcagccggtgaaccgcgtggcgtacaacgtcggcgggcagatggccaccaacaaccagagctccaccactgcccccgcgaccggcacgtacaacctccaggaaatcgtgcccggcggcgtgtggatggagagggacgtgtacctccaaggacccatctgggccaagatcccagagacgggggcgcactttcacccctctccggccatgggcggattcggactcaaacacccaccgcccatgatgctcatcaagaacacgcctgtgcccggaaataccaccagcttctcggacgtgcccgtcagcagcttcatcacccagtacagcaccgggcaggtcaccgtggagatggagtgggagctcaagaaggaaaactccaagaggtggaacccagagatccagtacacaaacaactacaacgacccccagtttgtggactttgccccggacagcaccggggaatacagaaccaccagacctatcggaacccgataccttacccgacccctttaa

SEQ ID NO: 800 - DNA, 2175 bp, Artificial Sequence
  source: /note="Description of Artificial Sequence: Synthetic polynucleotide"
atgtcttttgttgatcaccctccagattggttggaagaagttggtgaaggtcttcgcgagtttttgggccttgaagcgggcccaccgaaaccaaaacccaatcagcagcatcaagatcaagcccgtggtcttgtgctgcctggttataactatctcggacccggaaacggtctcgatcgaggagagcctgtcaacagggcagacgaggtcgcgcgagagcacgacatctcgtacaacgagcagcttgaggcgggagacaacccctacctcaagtacaaccacgcggacgccgagtttcaggagaagctcgccgacgacacatccttcgggggaaacctcggaaaggtagtctttcaggccaagaaaagggttctcgaaccttttggcctggttgaagagggtgctaagacggcccctaccggaaagcggatagacgaccactttccaaaaagaaagaaggcccggaccgaagaggactccaagccttccacctcgtcagacgccgaagctggacccagcggatcccagcagctgcaaatcccagcccaaccagcctcaagtttgggagctgatacaatgtctgcgggaggtggcggcccattgggcggcaataaccaaggtgccgatggagtgggcaatgcctcgggagattggcattgcgattccacgtggatgggggacagagtcgtcaccaagtccacccgaacctgggtgctgcccagctacaacaaccaccagtaccgagagatcaaaagcggctccgtcgacggaagcaacgccaacgcctactttggatacagcaccccctgggggtactttgactttaaccgcttccacagccactggggcccccgagactggcaaagactcatcaacaactactggggcttcagaccccggtccctcagagtcaaaatcttcaacattcaagtcaaagaggtcacggtgcaggactccaccaccaccatcgccaacaacctcacctccaccgtccaagtgtttacggacgacgactaccagctgccctacgtcgtcggcaacgggaccgagggatgcctgccggccttccctccgcaggtctttacgctgccgcagtacggttacgcgacgctgaaccgcgacaacacagaaaatcccaccgagaggagcagcttcttctgcctagagtactttcccagcaagatgctgagaacgggcaacaactttgagtttacctacaactttgaggaggtgcccttccactccagcttcgctcccagtcagaacctcttcaagctggccaacccgctggtggaccagtacttgtaccgcttcgtgagcacaaataacactggcggagtccagttcaacaagaacctggccgggagatacgccaacacctacaaaaactggttcccggggcccatgggccgaacccagggctggaacctgggctccggggtcaaccgcgccagtgtcagcgccctcgccacgaccaataggatggagctcgagggcgcgagttaccaggtgcccccgcagccgaacggcatgaccaacaacctccagggcagcaacacctatgccctggagaacactatgatcttcaacagccagccggcgaacccgggcaccaccgccacgtacctcgagggcaacatgctcatcaccagcgagagcgagacgcagccggtgaaccgcgtggcgtacaacgtcggcgggcagatggccaccaacaaccagagctccaccactgcccccgcgaccggcacgtacaacctccaggaaatcgtgcccggcagcgtgtggatggagagggacgtgtacctccaaggacccatctgggccaagatcccagagacgggggcgcactttcacccctctccggccatgggcggattcggactcaaacacccaccgcccatgatgctcatcaagaacacgcctgtgcccggaaatatcaccagcttctcggacgtgcccgtcagcagcttcatcacccagtacagcaccgggcaggtcaccgtggagatggagtgggagctcaagaaggaaaactccaagaggtggaacccagagatccagtacacaaacaactacaacgacccccagtttgtggactttgccccggacagcaccggggaatacagaaccaccagacctatcggaacccgataccttacccgacccctttaa

SEQ ID NO: 801 - DNA, 2175 bp, Artificial Sequence
  source: /note="Description of Artificial Sequence: Synthetic polynucleotide"
atgtcttttgttgatcaccctccagattggttggaagaagttggtgaaggtcttcgcgagtttttgggccttgaagcgggcccaccgaaaccaaaacccaatcagcagcatcaagatcaagcccgtggtcttgtgctgcctggttataactatctcggacccggaaacggtctcgatcgaggagagcctgtcaacagggcagacgaggtcgcgcgagagcacgacatctcgtacaacgagcagcttgaggcgggagacaacccctacctcaagtacaaccacgcggacgccgagtttcaggagaagctcgccgacgacacatccttcgggggaaacctcggaaaggcagtctttcaggccaagaaaagggttctcgaaccttttggcctggttgaagagggtgctaagacggcccctaccggaaagcggatagacgaccactttccaaaaagaaagaaggcccggaccgaagaggactccaagccttccacctcgtcagacgccgaagctggacccagcggatcccagcagctgcaaatcccagcccaaccagcctcaagtttgggagctgatacaatgtctgcgggaggtggcggcccattgggcgacaataaccaaggtgccgatggagtgggcaatgcctcgggagattggcattgcgattccacgtggatgggggacagagtcgtcaccaagtccacccgaacctgggtgctgcccagctacaacaaccaccagtaccgagagatcaaaagcggctccgtcgacggaagcaacgccaacgcctactttggatacagcaccccctgggggtactttgactttaaccgcttccacagccactggagcccccgagactggcaaagactcatcaacaactactggggcttcagaccccggtccctcagagtcaaaatcttcaacattcaagtcaaagaggtcacggtgcaggactccaccaccaccatcgccaacaacctcacctccaccgtccaagtgtttacggacgacgactaccagctgccctacgtcgtcggcaacgggaccgagggatgcctgccggccttccctccgcaggtctttacgctgccgcagtacggttacgcgacgctgaaccgcgacaacacagaaaatcccaccgagaggagcagcttcttctgcctagagtactttcccagcaagatgctgagaacgggcaacaactttgagtttacctacaactttgaggaggtgcccttccactccagcttcgctcccagtcagaacctcttcaagctggccaacccgctggtggaccagtacttgtaccgcttcgtgagcacaaataacactggcggagtccagttcaacaagaacctggccgggagatacgccaacacctacaaaaactggttcccggggcccatgggccgaacccagggctggaacctgggctccggggtcaaccgcgccagtgtcagcgccttcgccacgaccaataggatggagctcgagggcgcgagttaccaggtgcccccgcagccgaacggcatgaccaacaacctccagggcagcaacacctatgccctggagaacactatgatcttcaacagccagccggcgaacccgggcaccaccgccacgtacctcgagggcaacatgctcatcaccagcgagagcgagacgcagccggtgaaccgcgtggcgtacaacgtcggcgggcagatggccaccaacaaccagagctccaccactgcccccgcgaccggcacgtacaacctccaggaaatcgtgcccggcagcgtgtggatggagagggacgtgtacctccaaggacccatctgagccaagatcccagagacgggggcgcactttcacccctctccggccatgggcggattcggactcaaacacccaccgcccatgatgctcatcaagaacacgcctgtgcccggaaatatcaccagcttctcggacgtgcccgtcagcagcttcatcacccagtacagcaccgggcaggtcaccgtggagatggagtgggagctcaagaaggaaaactccaagaggtggaacccagagatccagtacacaaacaactacaacgacccccagtttgtggactttgccccggacagcaccggggaatgcagaaccaccagacctatcggaacccgataccttacccgacccctttaa

SEQ ID NO: 802 - DNA, 2175 bp, Artificial Sequence
  source: /note="Description of Artificial Sequence: Synthetic polynucleotide"
atgtcttttgttgatcaccctccagattggttggaagaagttggtgaaggtcttcgcgagtttttgggccttgaagcgggcccaccgaaaccaaaacccaatcagcagcatcaagatcaagcccgtggtcttgtgctgcctggttataactatctcggacccggaaacggtctcgatcgaggagagcctgtcaacagggcagacgaggtcgcgcgagagcacgacatctcgtacaacgagcagcttgaggcgggagacaacccctacctcaagtacaaccacgcggacgccgagtttcaggagaagctcgccgacgacacatccttcgggggaaacctcggaaaggcagtctttcaggccaagaaaagggttctcgaaccttttggcctggttgaagagggtgctaagacggcccctaccggaaagcggatagacgaccactttccaaaaagaaagaaggcccggaccgaagaggactccaagccttccacctcgtcagacgccgaagctggacccagcggatcccagcagctgcaaatcccagcccaaccagcctcaagtttgggagctgatacaatgtctgcgggaggtggcggcccattgggcgacaataaccaaggtgccgatggagtgggcaatgcctcgggagattggcattgcgattccacgtggatgggggacagagtcgtcaccaagtccacccgaacctgggtgctgcccagctacaacaaccaccagtaccgagagatcaaaagcggctccgtcgacggaagcaacgccaacgcctactttggatacagcaccccctgggggtactttgactttaaccgcttccacagccactggagcccccgagactggcaaagactcatcaacaactactggggcttcagaccccggtccctcagagtcaaaatcctcaacattcaagtcaaagaggtcacggtgcaggactccaccaccaccatcgccaacaacctcacctccaccgtccaagtgtttacggacgacgactaccagctgccctacgtcgtcggcaacgggaccgagggatgcctgccggccttccctccgcaggtctttacgctgccgcagtacggttacgcgacgctgaaccgcgacaacacagaaaatcccaccgagaggagcagcttcttctgcctagagtactttcccagcaagatgctgagaacgggcaacaactttgagtttacctacaactttgaggaggtgcccttccactccagcttcgctcccagtcagaacctcttcaagctggccaacccgctggtgggccagtacttgtaccgcttcgtgagcacaaataacactggcggagtccagttcaacgagaacctggccgggagatacgccaacacctacaaaaactggttcccggggcccatgggccgaacccagggctggaacctgggctccggggtcaaccgcgccagtgtcagcgccttcgccacgaccaataggatggagctcgagggcgcgagttaccaggtgcccccgcagccgaacggcatgaccaacaacctccagggcagcaacacctatgccctggagaacactatgatcttcaacagccagccggcgaacccgggcaccaccgccacgtacctcgagggcaacatgctcatcaccagcgagagcgagacgcagccggtgaaccgcgtggcgtacaacgtcggcgggcagatggccaccaacaaccagagctccaccactgcccccgcgaccggcacgtacaacctccaggaaatcgtgcccggcagcgtgtggatggagagggacgtgtacctccaaggacccatctgggccaagatcccagagacgggggcgcactttcacccctctccggccatgggcggattcggactcaaacacccaccgcccatgatgctcatcaagaacacgcctgtgcccggaaatatcaccagcttctcggacgtgcccgtcagcagcttcatcacccagtacagcaccgggcaggccaccgtggagatggagtgggagctcaagaaggaaaactccaagaggtggaacccagagatccagtacacaaacaactacaacgacccccagtttgtggactttgccccggacagcaccggggaatacagaaccaccagacctatcggaacccgataccttacccgacccctttaa

SEQ ID NO: 803 - DNA, 2175 bp, Artificial Sequence
  source: /note="Description of Artificial Sequence: Synthetic polynucleotide"
atgtcttttgttgatcaccctccagattggttggaagaagttggtgaaggtcttcgcgagtttttgggccttgaagcgggcccaccgaaaccaaaacccaatcagcagcatcaagatcaagcccgtggtcttgtgctgcctggttataactatctcggacccggaaacggcctcgatcgaggagagcctgtcaacagggcagacgaggtcgcgcgagagcacgacatctcgtacaacgagcagcttgaggcgggagacaacccctacctcaagtacaaccacgcggacgccgagtttcaggagaagctcgccgacgacacatccttcgggggaaacctcggaaaggcagtctttcaggccaagaaaagggttctcgaaccttttggcctggttgaagagggtgctaagacggcccctaccggaaagcggatagacgaccactttccaaaaagaaagaaggcccggaccgaagaggactccaagccttccacctcgtcagacgccgaagctggacccagcggatcccagcagctgcaaatcccagcccaaccagcctcaagtttgggagctgatacaatgtctgcgggaggtggcggcccattgggcgacaataaccaaggtgccgatggagtgggcaatgcctcgggagattggcattgcgattccacgtggatgggggacagagtcgtcaccaagtccacccgaacctgggtgctgcccagctacaacaaccaccagtaccgagagatcaaaagcggctccgtcgacggaagcaacgccaacgcctactttggatacagcaccccctgggggtactttgactttaaccgcttccacagccactggagcccccgagactggcaaagactcatcaacaactactggggcttcagaccccggtccctcagagtcaaaatcttcaacattcaagtcaaagaggtcacggtgcaggactccaccaccatcatcgccaacaacctcacctccaccgtccaagtgtttacggacgacgactaccagctgccctacgtcgtcggcaacgggaccgagggatgcctgccggccttccctccgcaggtctttacgctgccgcagtacggttacgcgacgctgaaccgcgacaacacagaaaatcccaccgagaggagcagcttcttctgcctagagtactttcccagcaagatgctgagaacgggcaacaactttgagtttacctacaactttgaggaggtgcccttccactccagcttcgcccccagtcagaacctcttcaagctggccaacccgctggtggaccagtacttgtaccgcttcgtgagcacaaataacactggcggagtccagttcaacaagaacctggccgggagatacgccaacacctacaaaaactggttcccggggcccatgggccgaacccagggctggaacctgggctccggggtcaaccgcgccagtgtcagcgccttcgccacgaccaataggatggagctcgagggcgcgagttaccaggtgcccccgcagccgaacggcatgaccaacaacctccagggcagcaacacctatgccctggagaacactatgatcttcaacagccagccggcgaacccgggcaccaccgccacgtacctcgagggcaacatgctcatcaccagcgagagcgagacgcagccggtgaaccgcgtggcgtacaacgtcggcgggcagatggccaccaacaaccagagctccaccactgcccccgcgaccggcacgtacaacctccaggaaatcgtgcccggcagcgtgtggatggagagggacgtgtacctccaaggacccatctgggccaagatcccagagacgggggcgcactttcacccctctccggccatgggcggattcggactcaaacacccaccgcccatgatgctcatcaagaacacgcctgtgcccggaaatatcaccagcttctcggacgtgcccgtcagcagcttcatcacccagtacagcaccgggcaggtcaccgtggagatggagtgggagctcaagaaggaaaactccaagaggtggaacccagagatccagtacacaaacaactacaacgacccccagtttgtggactttgccccggacagcaccggggaatacagaaccaccagacctatcggaacccgataccttacccgacccctttaa

SEQ ID NO: 804 - DNA, 2175 bp, Artificial Sequence
  source: /note="Description of Artificial Sequence: Synthetic polynucleotide"
atgtcttttgttgatcaccctccagattggttggaagaagttggtgaaggtcttcgcgagtttttgggccttgaagcgggcccaccgaaaccaaaacccaatcagcagcatcaagatcaagcccgtggtcttgtgctgcctggttataactatctcggacccggaaacggtctcgatcgaggagagcctgtcaacagggcagacgaggtcgcgcgagagcacgacatctcgtacaacgagcagcttgaggcgggagacaacccctacctcaagtacaaccacgcggacgccgagtttcaggagaagctcgccgacgacacatccttcgggggaaacctcggaaaggcagtctttcaggccaagaaaagggttctcgaaccttttggcctggttgaagagggtgctaagacggcccctaccggaaagcggatagacgaccactttccaaaaagaaagaaggcccggaccgaagaggactccaagccttccacctcgtcagacgccgaagctggacccagcggatcccagcagctgcaaatcccagcccaaccagcctcaagtttgggagctgatacaatgtctgcgggaggtggcggcccattgggcgacaataaccaaggtgccgatggagtgggcaatgcctcgggagattggcattgcgattccacgtggatgggggacagagtcgtcaccaagtccacccgaacctgggtgctgcccagctacaacaaccaccagtaccgagagatcaaaagcggctccgtcgacggaagcaacgccaacgcctactttggatacagcaccccctgggggtactttgactttaaccgcttccacagccactggagcccccgagactggcaaagactcatcaacaactactggggcttcagaccccggtccctcagagtcaaaatcttcaacattcaagtcaaagaggtcacggtgcaggactccaccaccaccatcgccaacaacctcacctccaccgtccaagtgtttacggacgacgactaccagctgccctacgtcgtcggcaacgggaccgagggatgcctgccggccttccctccgcaggtctttacgctgccgcagtacggttacgcgacgctgaaccgcgacaacacagaaaatcccaccgagaggagcagcttcttctgcctagagtactttcccagcaagatgctgagaacgggcaacaactttgagtttacctacaactttgaggaggtgcccttccactccagcttcgctcccagtcagaacctcttcaagctggccaacccgctggtggaccagtacttgtaccgcttcgtgagcacaaataacactggcggagtccagttcaacaagaacctggccgggagatacgccaacacctacaaaaactggttcccggggcccatgggccgaacccagggctggaacctgggctccggggtcaaccgcgccagtgtcagcgccttcgccacgaccaataggatggagctcgagggcgcgagttaccaggtgcccccgcagccgaacggcatgaccaacaacctccagggcagcaacacctatgccctggagaacactatgatcttcaacagccagccggcgaacccgggcaccaccgccacgtacctcgagggcaacatgctcatcaccagcgagagcgagacgcagccggtgaaccgcgtggcgtacaacgtcggcgggcagatggccaccaacaaccagagctccaccactgcccccgcgaccggcacgtacaacctccaggaaatcgtgcccggcagcgtgtggatggagagggacgtgtacctccaaggacccatctgggccaagatcccagagacgggggcgcactttcacccctctccggccatgggcggattcggactcaaacacccaccgcccatgatgctcatcaagaacacgcctgtgcccggaaatatcaccagcctctcggacgtgcccgtcagcagcttcatcacccagtacagcaccgggcaggtcaccgtggagatggagtgggagctcaagaaggaaaactccaagaggtggaacccagagatccagtacacaaacaactacaacgacccccagtttgtggactttgccccggacagcaccggggaatacagaaccaccagacctatcggaacccgataccttacccgacccctttaa

SEQ ID NO: 805 - DNA, 2175 bp, Artificial Sequence
  source: /note="Description of Artificial Sequence: Synthetic polynucleotide"
atgtcttttgttgatcaccctccagattggttggaagaagttggtgaaggtcttcgcgagtttttgggccttgaagcgggcccaccgaaaccaaaacccaatcagcagcatcaagatcaagcccgtggtcttgtgctgcctggttataactatctcggacccggaaacggtctcgatcgaggagagcctgccaacagggcagacgaggtcgcgcgagagcacgacatctcgtacaacgagcagcttgaggcgggagacaacccctacctcaagtacaaccacgcgggcgccgagtttcaggagaagctcgccgacgacacatccttcgggggaaacctcggaaaggcagtctttcaggccaagaaaagggttctcgaaccttttggcctggttgaagagggtgctaagacggcccctaccggaaagcggatagacgaccactttccaaaaagaaagaaggcccggaccgaagaggactccaagccttccacctcgtcagacgccgaagctggacccagcggatcccagcagctgcaaatcccagcccaaccagcctcaagtttgggagctgatacaatgtctgcgggaggtggcggcccattgggcgacaataaccaaggtgccgatggagtgggcaatgcctcgggagattggcattgcgattccacgtggatgggggacagagtcgtcaccaagtccacccgaacctgggtgctgcccggctacaacaaccaccagtaccgagagatcaaaagcggctccgtcgacggaagcaacgccaacgcctactttggatacagcaccccctgggggtactttgactttaaccgcttccacagccactggagcccccgagactggcaaagactcatcaacaactactggggcttcagaccccggtccctcagagtcaaaatcttcaacattcaagtcaaagaggtcacggtgcaggactccaccaccaccatcgccaacaacctcacctccaccgtccaagtgtttacggacgacgactaccagctgccctacgtcgtcggcaacgggaccgagggatgcctgccggccttccctccgcaggtctttacgctgccgcagtacggttacgcgacgctgaaccgcgacaacacagaaaatcccaccgagaggagcagcttcttctgcctagagtactttcccagcaagatgctgagaacgggcaacaactttgagtttacctacaactttgaggaggtgcccttccactccagcttcgctcccagtcagaacctcttcaagctggccaacccgctggtggaccagtacttgtaccgcttcgtgagcacaaataatactggcggagtccagttcaacaagaacctggccgggagatacgccaacacctacaaaaactggttcccggggcccatgggccgaacccagggctggaacctgggctccggggtcaaccgcgccagtgtcagcgccttcgccacgaccaataggatggagctcgagggcgcgagttaccaggtgcccccgcagccgaacggcatgaccaacaacctccagggcagcaacacctatgccctggagaacactatgatcttcaacagccagccggcgaacccgggcaccaccgccacgtacctcgagggcaacatgctcatcaccagcgagagcgagacgcagccggtgaaccgcgtggcgtacaacgtcggcgggcagatggccaccaacaaccagagctccaccactgcccccgcgaccggcacgtacaacctccaggaaatcgtgcccggcagcgtgtggatggagagggacgtgtacctccaaggacccatctgggccaagatcccagagacgggggcgcactttcacccctctccggccatgggcggattcggactcaaacacccaccgcccatgatgctcatcaagaacacgcctgtgcccggaaatatcaccagcttctcggacgtgcccgtcagcagcttcatcacccagtacagcaccgggcaggtcaccgtggagatggagtgggagctcaagaaggaaaactccaagaggtggaacccagagatccagtacacaaacaactacaacgacccccagtttgtggactttgccccggacagcaccggggaatacagaaccaccagacctatcggaacccgataccttacccgacccctttaa

SEQ ID NO: 806 - DNA, 2175 bp, Artificial Sequence
  source: /note="Description of Artificial Sequence: Synthetic polynucleotide"
atgtcttttgttgatcaccctccagattggttggaagaagttggtgaaggtcttcgcgagtttttgggccttgaagcgggcccaccgaaaccaaaacccaatcagcagcatcaagatcaagcccgtggtcttgtgctgcctggttataactatctcggacccggaaacggtctcgatcgaggagagcctgtcaacagggcagacgaggtcgcgcgagagcacgacatctcgtacaacgagcagcttgaggcgggagacaacccctacctcaagtacaaccacgcggacgccgagtttcaggagaagctcgccgacgacacatccttcgggggaaacctcggaaaggcagtctttcaggccaagaaaagggttctcgaaccttttggcctggttgaagagggtgctaagacggcccctaccggaaagcggatagacgaccactttccaaaaagaaagaaggcccggaccgaagaggactccaagcctcccacctcgtcagacgccgaagctggacccagcggatcccagcagctgcaaatcccagcccaaccagcctcaagtttgggagctgatacaatgtctgcgggaggtggcggcccattgggcgacaataaccaaggtgccgatggagtgggcaatgcctcgggagattggcattgcgattccacgtggatgggggacagagtcgtcaccaagtccacccgaacctgggtgctgcccagctacaacaaccaccagtaccgagagatcaaaagcggctccgtcgacggaagcaacgccaacgcctactttggatacagcaccccctgggggtactttgactttaaccgcttccacagccactggagcccccgagactggcaaagactcatcaacaactactggggcttcagaccccggtccctcagagtcaaaatcttcaacattcaagtcaaagaggtcacggtgcaggactccgccaccaccatcgccaacaacctcacctccaccgtccaagtgtttacggacgacgactaccagctgccctacgtcgtcggcaacgggaccgagggatgcctgccggccttccctccgcaggtctttacgctgccgcagtacggttacgcgacgctgaaccgcgacaacacagaaaatcccaccgagaggagcagcttcttctgcctagagtactttcccagcaagatgctgagaacgggcaacaactttgagtttacctacaactttgaggaggtgcccttccactccagcttcgctcccagtcagaacctcttcaagctggccaacccgctggtggaccagtacttgtaccgcttcgtgagcacaaataacactggcggagtccagttcaacaagaacctggccgggagatacgccaacacctacaaaaactggttcccggggcccatgggccgaacccagggctggaacctgggctccggggtcaaccgcgccagtgtcagcgccttcgccacgaccaataggatggagctcgagggcgcgagttaccaggtgcccccgcagccgaacggcatgaccaacaacctccagggcagcaacacctatgccctggagaacactatgatcttcaacagccagccggcgaacccgggcaccaccgccacgtacctcgagggcaacatgctcatcaccagcgagagcgagacgcagccggtgaaccgcgtggcgtacaacgtcggcgggcagatggccaccaacaaccagagctccaccactgcccccgcgaccggcacgtacaacctccaggaaatcgtgcccggcagcgtgtggatggagagggacgtgtacctccaaggacccatctgggccaagatcccagagacgggggcgcactttcacccctctccggccatgggcggattcggactcaaacacccaccgcccatgatgctcatcaagaacacgcctgtgcccggaaatatcaccagcttctcggacgtgcccgtcagcagcttcatcacccagtacagcaccgggcaggtcaccgtggagatggagtgggagctcaagaaggaaaactccaagaggtggaacccagagatccagtacacaaacaactacaacgacccccagtttgtggactttgccccggacagcaccggggaatacagaaccaccagacctatcggaacccgataccttacccgacccctttaa

SEQ ID NO: 807 - DNA, 2175 bp, Artificial Sequence
  source: /note="Description of Artificial Sequence: Synthetic polynucleotide"
atgtcttttgttgatcaccctccagattggttggaagaagttggtgaaggtcttcgcgagtttttgggccttgaagcgggcccaccgaaaccaaaacccaatcagcagcatcaagatcaagcccgtggtcttgtgctgcctggttataactatctcggacccggaaacggtctcgatcgaggagagcctgtcaacagggcagacgaggtcgcgcgagagcacgacatctcgtacaacgagcagcttgaggcgggagacaacccctacctcaagtacaaccacgcggacgccgagtttcaggagaagctcgccgacgacacatccttcgggggaaacctcggaaaggcagtctttcaggccaagaaaagggttctcgaaccttttggcctggttgaagagggtgctaagacggcccctaccggaaagcggatagacgaccactttccaaaaagaaagaaggcccggaccgaagaggactccaagccttccacctcgtcagacgccgaagctggacccagcggatcccagcagccgcaaatcccagcccaaccagcctcaagtttgggagctgatacaatgtctgcgggaggtggcggcccattgggcgacaataaccaaggtgccgatggagtgggcaatgcctcgggagattggcattgcgattccacgtggatgggggacagagtcgtcaccaagtccacccgaacctgggtgctgcccagctacaacaaccaccagtaccgagagatcaaaagcggctccgtcgacggaagcaacgccaacgcctactttggatacagcaccccctgggggtactttgactttaaccgcttccacagccactggagcccccgagactggcaaagactcatcaacaactactggggcttcagaccccggtccctcagagtcaaaatcttcaacattcaagtcaaagaggtcacggtgcaggactccaccaccaccatcgccaacaacctcacctccaccgtccaagtgtttacggacgacgactaccagctgccctacgtcgtcggcaacgggaccgagggatgcctgccggccttccctccgcaggtctttacgctgccgcagtacggttacgcgacgctgaaccgcgacaacacagaaaatcccaccgagaggagcagcttcttctgcctagagtactttcccagcaagatgctgagaacgggcaacaactttgagtttacctacaactttgaggaggtgcccttccactccagcttcgctcccagtcagaacctcttcaagctggccaacccgctggtggaccagtacttgtaccgcttcgtgagcacaaataacactggcggagtccagttcaacaagaacctggccgggagatacgccaacacctacaaaaactggttcccggggcccatgggccgaacccagggctggaacctgggctccggggtcaaccgcgccagtgtcagcgccttcgccacgaccaataggatggagctcgagggcgcgagttaccaggtgcccccgcagccgaacggcatgaccaacaacctccagggcagcaacacctatgccctggagaacactatgatcttcaacagccagccggcgaacccgggcaccaccgccacgtacctcgagggcaacatgctcatcaccagcgagagcgagacgcagccggtgaaccgcgtggcgtacaacgtcggcgggcagatggccaccaacaaccagagctccaccactgcccccgcgaccggcacgtacaacctccaggaaatcgtgcccggcagcgtgtggatggagagggacgtgtacctccaaggacccatctgggccaagatcccagagacgggggcgcactttcacccctctccggccatgggcggattcggactcaaacacccaccgcccatgatgctcatcaagaacacgcctgcgcccggaaatatcaccagcttctcggacgtgcccgtcagcagcttcatcacccagtacagcaccgggcaggtcaccgtggagatggagtgggagctcaagaaggaaaactccaagaggtggaacccagagatccagtacacaaacaactacaacgacccccagtttgtggactttgccccggacagcaccggggaatacagaaccaccagacctatcggaacccgataccttacccgacccctttaa

SEQ ID NO: 808 - DNA, 2175 bp, Artificial Sequence
  source: /note="Description of Artificial Sequence: Synthetic polynucleotide"
atgtcttttgttgatcaccctccagattggttggaagaagttggtgaaggtcttcgcgagtttttgggccttgaagcgggcccaccgaaaccaaaacccaatcagcagcatcaagatcaagcccgtggtcttgtgctgcctggttataactatctcggacccggaaacggtctcgatcgaggagagcctgtcaacagggcagacgaggtcgcgcgagagcacgacatctcgtacaacgagcagcttgaggcgggagacaacccctacctcaagtacaaccacgcggacgccgagtttcaggagaagctcgccgacgacacatccttcgggggaaacctcggaaaggcagtctttcaggccaagaaaagggttctcgaaccttttggcctggttgaagagggtgctaagacggcccctaccggaaagcggatagacgaccactttccaaaaagaaagaaggcccggaccgaagaggactccaagcctcccacctcgtcagacgccgaagctggacccagcggatcccagcagctgcaaatcccagcccaaccagcctcaagtttgggagctgatacaatgtctgcgggaggtggcggcccattgggcgacaataaccaaggtgccgatggagtgggcaatgcctcgggagattggcattgcgattccacgtggatgggggacagagtcgtcaccaagtccacccgaacctgggtgctgcccagctacaacaaccaccagtaccgagagatcaaaagcggctccgtcgacggaagcaacgccaacgcctactttggatacagcaccccctgggggtactttgactttaaccgcttccacagccactggagcccccgagactggcaaagactcatcaacaactactggggcttcagaccccggtccctcagagtcaaaatcttcaacattcaagtcaaagaggtcacggtgcaggactccaccaccaccatcgccaacaacctcacctccaccgtccaagtgtttacggacgacgactaccagctgccctacgtcgtcggcaacgggaccgagggatgcctgccggccttccctccgcaggtctttacgctgccgcagtacggttacgcgacgctgaaccgcgacaacacagaaaatcccaccgagaggagcagcttcttctgcctagagtactttcccagcaagatgctgagaacgggcaacaactttgagtttacctacaactttgaggaggtgcccttccactccagcttcgctcccagtcagaacctcttcaagctggccaacccgctggtggaccagtacttgtaccgcttcgtgagcacaaataacactggcggagtccagttcaacaagaacctggccgggagatacgccaacacctacaaaaactggttcccggggcccatgggccgaacccagggctggaacctgggctccggggtcaaccgcgccagtgtcagcgccttcgccacgaccaataggatggagctcgagggcgcgagttaccaggtgcccccgcagccgaacggcatgaccaacaacctccagggcagcaacacctatgccctggagaacactatgatcttcaacagccagccggcgaacccgggcaccaccgccacgtacctcgagggcaacatgctcatcaccagcgagagcgagacgcagccggtgaaccgcgtggcgtacaacgtcggcgggcagatggccaccaacaaccagagctccaccactgcccccgcgaccggcacgtacaacctccaggaaatcgtgcccggcagcgtgtggatggagagggacgtgtacctccaaggacccatctgggccaagatcccagagacgggggcgcactttcacccctctccggccatgggcggattcggactcaaacacccaccgcccatgatgctcatcaagaacacgcctgtgcccggaaatatcaccagcttctcggacgtgcccgtcagcagcttcatcacccagtacagcaccgggcaggtcaccgtggagatggagtgggagctcaagaaggaaaactccaagaggtggaacccagagatccagtacacaaacaactacaacgacccccagtttgtggactttgccccggacagcaccggggaatacagaaccaccagacctatcggaacccgataccttacccgacccctttaa

SEQ ID NO: 809 - DNA, 2175 bp, Artificial Sequence
  source: /note="Description of Artificial Sequence: Synthetic polynucleotide"
atgtcttttgttgatcaccctccagattggttggaagaagttggtgaaggtcttcgcgagtttttgggccttgaagcgggcccaccgaaaccaaaacccaatcagcagcatcaagatcaagcccgtggtcttgtgctgcctggttataactatctcggacccggaaacggtctcgatcgaggagagcctgtcaacagggcagacgaggtcgcgcgagagcacgacatctcgtacaacgagcagcttgaggcgggagacaacccctacctcaagtacaaccacgcggacgccgagtttcaggagaagctcgccgacgacacatccttcgggggaaacctcggaaaggcagtctttcaggccaagaaaagggttctcgaaccttttggcctggttgaagagggtgctaagacggcccctaccggaaagcggatagacgaccactttccaaaaagaaagaaggcccggaccgaagaggactccaagcctcccacctcgtcagacgccgaagctggacccagcggatcccagcagctgcaaatcccagcccaaccagcctcaagtttgggagctgatacaatgtctgcgggaggtggcggcccattgggcgacaataaccaaggtgccgatggagtgggcaatgcctcgggagattggcattgcgattccacgtggatgggggacagagtcgtcaccaagtccacccgaacctgggtgccgcccagctacaacaaccaccagtaccgagagatcaaaagcggctccgtcgacggaagcaacgccaacgcctactttggatacagcaccccctgggggtactttgactttaaccgcttccacagccactggagcccccgagactggcaaagactcatcaacaactactggggcttcagaccccggtccctcagagtcaaaatcttcaacattcaagtcaaagaggtcacggtgcaggactccaccaccaccatcgccaacaacctcacctccaccgtccaagtgtttacggacgacgactaccagctgccctacgtcgtcggcaacgggaccgagggatgcctgccggccttccctccgcaggtctttacgctgccgcagtacggttacgcgacgctgaaccgcgacaacacagaaaatcccaccgagaggagcagcttcttctgcctagagtactttcccagcaagatgctgagaacgggcaacaactttgagtttacctacaactttgaggaggtgcccttccactccagcttcgctcccagtcagaacctcttcaagctggccaacccgctggtggaccagtacttgtaccgcttcgtgagcacaaataacactggcggagtccagttcaacaagaacctggccgggagatacgccaacacctacaaaaactggttcccggggcccatgggccgaacccagggctggaacctgggctccggggtcaaccgcgccagtgtcagcgccttcgccacgaccaataggatggagctcgagggcgcgagttaccaggtgcccccgcagccgaacggcatgaccaacaacctccagggcagcaacacctatgccctggagaacactatgatcttcaacagccagccggcgaacccgggcaccaccgccacgtacctcgagggcaacatgctcatcaccagcgagagcgagacgcagccggtgaaccgcgtggcgtacaacgtcggcgggcagatggccaccaacaaccagagctccaccactgcccccgcgaccggcacgtacaacctccaggaaatcgtgcccggcagcgtgtggatggagagggacgtgtacctccaaggacccatctgggccaagatcccagagacgggggcgcactttcacccctctccggccatgggcggattcggactcaaacacccaccgcccatgatgctcatcaagaacacgcctgtgcccggaaatatcaccagcttctcggacgtgcccgtcagcagcttcatcacccagtacagcaccgggcaggtcgccgtggagatggagtgggagctcaagaaggaaaactccaagaggtggaacccagagatccagtacacaaacaactacaacgacccccagtttgtggactttgccccggacagcaccggggaatacagaaccaccagacctatcggaacccgataccttacccgacccctttaa

SEQ ID NO: 810 - DNA, 2175 bp, Artificial Sequence
  source: /note="Description of Artificial Sequence: Synthetic polynucleotide"
atgtcttttgttgatcaccctccagattggttggaagaagttggtgaaggtcttcgcgagtttttgggccttgaagcgggcccaccgaaaccaaaacccaatcagcagcatcaagatcaagcccgtggtcttgtgctgcctggttataactatctcggacccggaaacggtctcgatcgaggagagcctgtcaacagggcagacgaggtcgcgcgagagcacgacatctcgtacaacgagcagcttgaggcgggagacaacccctacctcaagtacaaccacgcggacgccgagtttcaggagaagctcgccgacgacacatccttcgggggaaacctcggaaaggcagtctttcaggccaagaaaagggttctcgaaccttttggcctggttgaagagggtgctaagacggcccctaccggaaagcggatagacgaccactttccaaaaagaaagaaggcccggaccgaagaggactccaagccttccacctcgtcagacgccgaagctggacccagcggatcccagcagctgcaaatcccagcccaaccagcctcaagtttgggagctgatacaatgtctgcgggaggtggcggcccattgggcgacaataaccaaggtgccgatggagtgggcaatgcctcgggagattggcattgcgattccacgtggatgggggacagagtcgtcaccaagtccacccgaacctgggtgctgcccagctacaacaaccaccagtaccgagagatcaaaagcggctccgtcgacggaagcaacgccaacgcctactttggatacagcaccccctgggggtactttgactttaaccgcttccacagccactggagcccccgagactggcaaagactcatcaacaactactggggcttcagaccccggtccctcagagtcaaaatcttcaacattcaagtcaaagaggtcacggtgcaggactccaccaccaccatcgccaacaacctcacctccaccgtccaagtgtttacggacgacgactaccagctgccctacgtcgtcggcaacgggaccgagggatgcctgccggccttccctccgcaggtctttacgctgccgcagtacggttacgcgacgctgaaccgcgacaacacagaaaatcccaccgagaggagcagcttcttctgcctagagtactttcccagcaagatgctgagaacgggcaacaactttgagtttacctacaactttgaggaggtgcccttccactccagcttcgctcccagtcagaacctcttcaagctggccaacccgctggtggaccagtacttgtaccgcttcgtgagcacaaataacactggcggagtccagttcaacaagaacctggccgggagatacgccaacacctacaaaaactggttcccggggcccatgggccgaacccagggctggaacctgggctccggggtcaaccgcgccagtgtcagcgccttcgccacgaccaataggatggagctcgagggcgcgagttaccaggtgcccccgcagccgaacggcatgaccaacaacctccagggcagcaacacctatgccctggagaacactatgatcttcaacagccagccggcgaacccgggcaccaccgccacgtacctcgagggcaacatgctcatcaccagcgagagcgagacgcagccggtgaaccgcgtggcgtacaacgtcggcgggcagatggccaccaacaaccagagctccaccactgcccccgcgaccggcacgtacaacctccaggaaatcgtgcccggcagcgtgtggatggagagggacgtgtacctccaaggacccatctgggccaagatcccagagacgggggcgcactttcacccctctccggccatgggcggattcggactcaaacacccaccgcccatgatgctcatcaagaacacgcctgcgcccggaaatatcaccagcttctcggacgtgcccgtcagcagcttcatcacccagtacagcaccgggcaggtcaccgtggagatggagtgggagctcaagaaggaaaactccaagaggtggaacccagagatccagtacacaaacaactacaacgacccccagtttgtggactttgccccggacagcaccggggaatacagaaccaccagacctatcggaacccgataccttacccgacccctttaa

SEQ ID NO: 811 - DNA, 2175 bp, Artificial Sequence
  source: /note="Description of Artificial Sequence: Synthetic polynucleotide"
atgtcttttgttgatcaccctccagattggttggaagaagttggtgaaggtcttcgcgagtttttgggccttgaagcgggcccaccgaaaccaaaacccaatcagcagcatcaagatcaagcccgtggtcttgtgctgcctggttataactatctcggacccggaaacggtctcgatcgaggagagcctgtcaacagggcagacgaggtcgcgcgagagcacgacatctcgtacaacgagcagcttgaggcgggagacaacccctacctcaagtacaaccacgcggacgccgagtttcaggagaagctcgccgacgacacatccttcgggggaaacctcggaaaggcagtctttcaggccaagaaaagggttctcgaaccttttggcctggctgaagagggtgctaagacggcccctaccggaaagcggatagacgaccactttccaaaaagaaagaaggcccggaccgaagaggactccaagccttccacctcgtcagacgccgaagctggacccagcggatcccagcagctgcaaatcccagcccaaccagcctcaagtttgggagctgatacaatgtctgcgggaggtggcggcccattgggcgacaataaccaaggtgccgatggagtgggcaatgcctcgggagattggcattgcgattccacgtggatgggggacagagtcgtcaccaagtccacccgaacctgggtgctgcccagctacaacaaccaccagtaccgagagatcaaaagcggctccgtcgacggaagcaacgccaacgcctactttggatacagcaccccctgggggtactttgactttaaccgcttccacagccactggagcccccgagactggcaaagactcatcaacaactactggggcttcagaccccggtccctcagagccaaaatcttcaacattcaagtcaaagaggtcacggtgcaggactccaccaccaccatcgccaacaacctcacctccaccgtccaagtgtttacggacgacgactaccagctgccctacgtcgtcggcaacgggaccgagggatgcctgccggccttccctccgcaggtctttacgctgccgcagtacggttacgcgacgctgaaccgcgacaacacagaaaatcccaccgagaggagcagcttcttctgcctagagtactttcccagcaagatgctgagaacgggcaacaaccttgagtttacctacaactttgaggaggtgcccttccactccagcttcgctcccagtcagaacctcttcaagctggccaacccgctggtggaccagtacttgtaccgcttcgtgagcacaaataacactggcggagtccagttcaacaagaacctggccgggagatacgccaacacctacaaaaactggttcccggggcccatgggccgaacccagggctggaacctgggctccggggtcaaccgcgccagtgtcagcgccttcgccacgaccaataggatggagctcgagggcgcgagttaccaggtgcccccgcagccgaacggcatgaccaacaacctccagggcagcaacacctatgccctggagaacactatgatcttcaacagccagccggcgaacccgggcaccaccgccacgtacctcgagggcaacatgctcatcaccagcgagagcgagacgcagccggtgaaccgcgtggtgcacaacgtcggcgggcagatggccaccaacaaccagagctccaccactgcccccgcgaccggcacgtacaacctccaggaaatcgtgcccggcagcgtgtggatggagagggacgtgtacctccaaggacccatctgggccaagatcccagagacgggggcgcactttcacccctctccggccatgggcggattcggactcaaacacccaccgcccatgatgctcatcaagaacacgcctgtgcccggaaatatcaccagcttctcggacgtgcccgtcagcagcttcatcacccagtacagcaccgggcaggtcaccgtggagatggagtgggagctcaagaaggaaaactccaagaggtggaacccggagatccagtacacaaacaactacaacgacccccagtttgtggactttgccccggacagcaccggggaatacagaaccaccagacctatcggaacccgataccttacccgacccctttaa

SEQ ID NO: 812 - DNA, 2175 bp, Artificial Sequence
  source: /note="Description of Artificial Sequence: Synthetic polynucleotide"
atgtcttttgttgatcaccctccagattggttggaagaagttggtgaaggtcttcgcgagtttttgggccttgaagcgggcccaccgaaaccaaaacccaatcagcagcatcaagatcaagcccgtggtcttgtgctgcctggttataactatctcggacccggaaacggtctcgatcgaggagagcctgtcaacagggcagacgaggtcgcgcgagagcacgacatctcgtacaacgagcagcttgaggcgggagacaacccctacctcaagtacaaccacgcggacgccgagtttcaggagaagctcgccgacgacacatccttcgggggaaacctcggaaaggcagtctttcaggccaagaaaagggttctcgaaccttttggcctggttgaagagggtgctaagacggcccctaccggaaagcggatagacgaccactttccaaaaagaaagaaggcccggaccgaagaggactccaagccttccacctcgtcagacgccgaagctggacccagcggatcccagcagctgcaaatcccagcccaaccagcctcaagtttgggagctgatacaatgtctgcgggaggtggcggcccattgggcgacaataaccaaggtgccgatggagtgggcaatgcctcgggagattggcattgcgattccacgtggatgggggacagagtcgtcaccaagtccacccgaacctgggtgctgcccagctacaacaaccaccagtaccgagagatcaaaagcggctccgtcgacggaggcaacgccaacgcctactttggatacagcaccccctgggggtactttgactttaaccgcttccacagccactggagcccccgggactggcaaagactcatcaacaactactggggcttcagaccccggtccctcagagtcaaaatcttcaacattcaagtcaaagaggtcacggtgcaggactccaccaccaccatcgccaacaacctcacctccaccgtccaagtgtttacggacgacgactaccagctgccctacgtcgtcggcaacgggaccgagggatgcctgccggccttccctccgcaggtctttacgctgccgcagtacggttacgcgacgctgaaccgcgacaacacagaaaatcccaccgagaggagcagcttcttctgcctagagtactttcccagcaagatgctgagaacgggcaacaactttgagtttacctacaactttgaggaggtgcccttccactccagcttcgctcccagtcagaacctcttcaagctggccaacccgctggtggaccagtacttgtaccgcttcgtgagcacaaataacactggcggagtccagttcaacaagaacctggccgggagatacgccaacacctacaaaaactggttcccggggcccatgggccgaacccagggctggaacctgggctccggggtcaaccgcgccagtgtcagcgccttcgccacgaccaataggatggagctcgagggcgcgagttaccaggtgcccccgcagccgaacggcatgaccaacaacctccagggcagcaacacctatgccctggagaacactatgatcttcaacagccagccggcgaacccgggcaccaccgccacgtacctcgagggcaacatgctcatcaccagcgagagcgagacgcagccggtgaaccgcgtggcgtacaacgtcggcgggcagatggccaccaacaaccagagctccaccactgcccccgcgaccggcacgtacaacctccaggaaatcgtgcccggcagcgtgtggatggagagggacgtgtacctccaaggacccatctgggccaagatcccagagacgggggcgcactttcacccctctccggccatgggcggattcggactcaaacacccaccgcccatgatgctcatcaagaacacgcctgcgcccggaaatatcaccagcttctcggacgtgcccgtcagcagcttcatcacccagtacagcaccgggcaggtcaccgtggagatggagtgggagctcaagaagggaaactccaagaggtggaacccagagatccagtacacaaacaactacaacgacccccagtttgtggactttgccccggacagcaccggggaatacagaaccaccagacctatcggaacccgataccttacccgacccctttaa

SEQ ID NO: 813 - DNA, 2175 bp, Artificial Sequence
  source: /note="Description of Artificial Sequence: Synthetic polynucleotide"
atgtcttttgttgatcaccctccagattggttggaagaagttggtgaaggtcttcgcgagtttttgggccttgaagcgggcccaccgaaaccaaaacccaatcagcagcatcaagatcaagcccgtggtcttgtgctgcctggttataactatctcggacccggaaacggtctcgatcgaggagagcctgtcaacagggcagacgaggtcgcgcgagagcacgacatctcgtacaacgagcagcttgaggcgggagacaacccctacctcaagtacaaccacgcggacgccgagtttcaggagaagctcgccgacgacacgtccttcgggggaaacctcggaaaggcagtctttcaggccaagaaaagggttctcgaaccttttggcctggttgaagagggtgctaagacggcccctaccggaaagcggatagacgaccactttccaaaaagaaagaaggcccggaccgaagaggactccaagccttccacctcgtcagacgccgaagctggacccagcggatcccagcagctgcaaatcccagcccaaccagcctcaagtttgggagctgatacaatgtctgcgggaggtggcggcccattgggcgacaataaccaaggtgccgatggagtgggcaatgcctcgggagattggcattgcgattccacgtggatgggggacagagtcgtcaccaagtccacccgaacctgggtgctgcccagctacaacaaccaccagtaccgagagatcaaaagcggctccgtcgacggaagcaacgccaacgcctactttggatacagcaccccctgggggtactttgactttaaccgcttccacagccactggagcccccgagactggcaaagactcatcaacaactactggggcttcagaccccggtccctcagagtcaaaatcttcaacattcaagtcaaagaggtcacggtgcaggactccaccaccaccatcgccaacaacctcacctccaccgtccaagtgtttacggacgacgactaccagctgccctacgtcgtcggcaacgggaccgagggatgcctgccggccttccctccgcaggtctttacgctgccgcagtacggttacgcgacgctgaaccgcgacaacacagaaaatcccaccgagaggagcagcttcttctgcctagagtactttcccagcaagatgctgagaacgggcaacaactttgagtttacctacaactttgaggaggtgcccttccactccagcttcgctcccagtcagaacctcttcaagctggccaacccgctggtggaccagtacttgtaccgcttcgtgagcacaaataacactggcggagtccagttcaacaagaacctggccgggagatacgccaacacctacaaaaactggttcccggggcccatgggccgaacccagggctggaacctgggctccggggtcaaccgcgccagtgtcagcgccttcgccacgaccaataggatggagctcgagggcgcgagttaccaggtgcccccgcagccgaacggcatgaccaacaacctccagggcagcaacacctatgccctggagaacactatgatcttcaacagccagccggcgaacccgggcaccaccgccacgtacctcgagggcaacatgctcatcaccagcgagagcgagacgcagccggtgaaccgcgtggcgtacaacgtcggcgggcagatggccaccaacaaccagagctccaccactgcccccgcgaccggcacgtacaacctccaggaaatcgtgcccggcagcgtgtggatggagagggacgtgtacctccaaggacccatctgggccaagatcccagagacgggggtgcactttcacccctctccggccatgggcggattcggactcaaacacccaccgcccatgatgctcatcaagaacacgcctgtgcccggaaatatcaccagcttctcggacgtgcccgtcagcagcttcatcacccagtacagcaccgggcaggtcaccgtggagatggagtgggagctcaagaaggaaaactccaagaggtggaacccagagatccagtacacaaacaactacaacgacccccagtttgtggactttgccccggacagcaccggggaatacagaaccaccagacctatcggaacccgataccttacccgacccctttaa

SEQ ID NO: 814 - DNA, 2175 bp, Artificial Sequence
  source: /note="Description of Artificial Sequence: Synthetic polynucleotide"
  modified_base (1652)..(1652): a, c, t, or g
atgtcttttgttgatcaccctccagattggttggaagaagttggtgaaggtcttcgcgagtttttgggccttgaagcgggcccaccgaaaccaaaacccaatcagcagcatcaagatcaagcccgtggtcttgtgctgcctggttataactatctcggacccggaaacggtctcgatcgaggagagcctgtcaacagggcagacgaggtcgcgcgagagcacgacatctcgtacaacgagcagcttgaggcgggagacaacccctacctcaagtacaaccacgcggacgccgagtttcaggagaagctcgccgacgacacatccttcgggggaaacctcggaaaggcagtctttcaggccaagaaaagggttctcgaaccttttggcctggttgaagagggtgctaagacggcccctaccggaaagcggatagacgaccactttccaaaaagaaagaaggcccggaccgaggaggactccaagccttccacctcgtcagacgccgaagctggacccagcggatcccagcagctgcaaatcccagcccaaccagcctcaagtttgggagctgatacaatgtctgcgggaggtggcggcccattgggcgacaataaccaaggtgccgatggagtgggcaatgcctcgggagattggcattgcgattccacgtggatgggggacagagtcgtcaccaagtccacccgaacctgggtgctgcccagctacaacaaccaccagtaccgagagatcaaaagcggctccgtcgacggaagcaacgccaacgcctactttggatacagcaccccctgggggtactttgactttaaccgcttccacagccactggagcccccgagactggcaaagactcatcaacaactactggggcttcagaccccggtccctcagagtcaaaatcttcaacattcaagtcaaagaggtcacggtgcaggactccaccaccaccatcgccaacaacctcacctccaccgtccaagtgtttacggacgacgactaccagctgccctacgtcgtcggcaacgggaccgagggatgcctgccggccttccctccgcaggtctttacgctgccgcagtacggttacgcgacgctgaaccgcgacaacacagaaaatcccaccgagaggagcagcttcttctgcctagagtactttcccagcaagatgctgagaacgggcaacaactttgagtttacctacaactttgaggaggtgcccttccactccagcttcgctcccagtcagaacctcttcaagctggccaacccgctggtggaccagtacttgtaccgcttcgtgagcacaaataacactggcggagtccagttcaacaagaacctggccgggagatacgccaacacctacaaaaactggttcccggggcccatgggccgaacccagggctggaacctgggctccggggtcaaccgcgccagtgtcagcgccttcgccacgaccaataggatggagctcgagggcgcgagttaccaggtgcccccgcagccgaacggcatgaccaacaacctccagggcagcaacacctatgccctggagaacactatgatcttcaacagccagccggcgaacccgggcaccaccgccacgtacctcgagggcagcatgctcatcaccancgagagcgagacgcagccggtgaaccgcgtggcgtacaacgtcggcgggcagatggccaccaacaaccagagctccaccactgcccccgcgaccggcacgtacaacctccaggaaatcgtgcccggcagcgtgtggatggagagggacgtgtacctccaaggacccatctgggccaagatcccagagacgggggcgcactttcacccctctccggccatgggcggattcggactcaaacacccaccgcccatgatgctcatcaagaacacgcctgtgcccggaaatatcaccagcttctcggacgtgcccgtcagcagcttcatcacccagtacagcaccgggcaggtcaccgtggagatggagtgggagctcaagaaggaaaactccaagaggtggaacccagagatccagtacacaaacaactacaacgacccccagtttgtggactttgccccggacagcaccggggaatacagaaccaccagacctatcggaacccgataccttacccgacccctttaa

SEQ ID NO: 815 - DNA, 2211 bp, Artificial Sequence
  source: /note="Description of Artificial Sequence: Synthetic polynucleotide"
atggctgctgacggttatcttccagattggctcgaggacaacctttctgaaggcattcgtgagtggtgggctctgaaacctggagtccctcaacccaaagcgaaccaacaacaccaggacaaccgtcggggtcttgtgcttccgggttacaaatacctcggacccggtaacggactcgacaaaggagagccggtcaacgaggcggacgcggcagccctcgaacacgacaaagcttacgaccagcagctcaaggccggtgacaacccgtacctcaagtacaaccacgccgacgccgagtttcaggagcgtcttcaagaagatacgtcttttgggggcaaccttggcagagcagtcttccaggccaaaaagaggatccttgagcctcttggtctggttgaggaagcagctaaaacggctcctggaaagaagaggcctgtagatcagtctcctcaggaaccggactcatcatctggtgttggcaaatcgggcaaacagcctgccagaaaaagactaaatttcggtcagactggcgactcagagtcagtcccagaccctcaacctctcggagaaccaccagcagcccccacaagtttgggatctaatacaatggcttcaggcggtggcgcaccaatggcagacaataacgagggtgccgatggagtgggtaattcctcaggaaattggcattgcgattcccaatggctgggcgacagagtcatcaccaccagcaccagaacctgggccctgcccacttacaacaaccatctctacaagcaaatctccagccaatcaggagcttcaaacgacaaccactactttggctacagcaccccttgggggtattttgactttaacagattccactgccacttctcaccacgtgactggcagcgactcattaacaacaactggggattccggcccaagaaactcagcttcaagctcttcaacatccaagttaaagaggtcacgcagaacgatggcacgacgactattgccaataaccttaccagcacggttcaagtgtttacggactcggagtatcagctcccgtacgtgctcgggtcggcgcaccaaggctgtctcccgccgtttccagcggacgtcttcatggtccctcagtatggatacctcaccctgaacaacggaagtcaagcggtgggacgctcatccttttactgcctggagtacttcccttcgcagatgctaaggactggaaataacttccaattcagctataccttcgaggatgtaccttttcacagcagctacgctcacagccagagtttggatcgcttgatgaatcctcttattgatcagtatctgtactacctgaacagaacgcaaggaacaacctctggaacaaccaaccaatcacggctgctttttagccaggctgggcctcagtctatgtctttgcaggccagaaattggctacctgggccctgctaccggcaacagagactttcaaagactgctaacgacaacaacaacagtaactttccttggacagcggccagcaaatatcatctcaatggccgcgactcgctggtgaatccaggaccagctatggccagtcacaaggacgatgaagaaaaatttttccctatgcacggcaatctaatatttggcaaagaagggacaacggcaagtaacgcagaattagataatgtaatgattacggatgaagaagagattcgtaccaccaatcctgtggcaacagagcagtatggaactgtggcaaataacttgcagagctcaaatacagctcccacgactagaactgtcaatgatcagggggccttacctggcatggtgtggcaagatcgtgacgtgtaccttcaaggacctatctgggcaaagattcctcacacggatggacactttcatccttctcctctgatgggaggctttggactgaaacatccgcctcctcaaatcatgatcaaaaatactccggtaccggcaaatcctccgacgactttcagcccggccaagtttgcttcatttatcactcagtactccactggacaggtcagcgtggaaattgagtgggagctacagaaagaaaacagcaaacgttggaatccagagattcagtacacttccaactacaacaagtctgttaatgtggactttactgtagacactaatggtgtttatagtgaacctcgccctattggaacccggtatctcacacgaaacttgtaa

SEQ ID NO: 816 - DNA, 2205 bp, Artificial Sequence; identical to SEQ ID NO: 84
  source: /note="Description of Artificial Sequence: Synthetic polynucleotide"

SEQ ID NO: 817 - DNA, 2234 bp, Artificial Sequence
  source: /note="Description of Artificial Sequence: Synthetic polynucleotide"
atgtcttttgttgatcaccctccagattggttggaagaagttggtgaaggtcttcgcgagtttttgggccttgaagcgggcccaccgaaaccaaaacccaatcagcagcatcaagatcaagcccgtggtcttgtgctgcctggttataactatctcggacccggaaacggtctcgatcgaggagagcctgtcaacagggcagacgaggtcgcgcgagagcacgacatctcgtacaacgagcagcttgaggcgggagacaacccctacctcaagtacaaccacgcggacgccgagtttcaggagaagctcgccgacgacacatccttcgggggaaacctcggaaaggcagtctttcaggccaagaaaagggttctcgaaccttttggcctggttgaagagggtgctaagacggcccctaccggaaagcggatagacgaccactttccaaaaagaaagaaggctcggaccgaagaggactccaagccttccacctcgtcagacgccgaagctggacccagcggatcccagcagctgcaaatcccagcccaaccagcctcaagtttgggagctgatacaatgtctgcgggaggtggcggcccattgggcgacaataaccaaggtgccgatggagtgggcaatgcctcgggagattggcattgcgattccacgtggatgggggacagagtcgtcaccaagtccacccgaacctgggtgctgcccagctacaacaaccaccagtaccgagagatcaaaagcggctccgtcgacggaagcaacgccaacgcctactttggatacagcaccccctgggggtactttgactttaaccgcttccacagccactggagcccccgagactggcaaagactcatcaacaactactggggcttcagaccccggtccctcagagtcaaaatcttcaacattcaagtcaaagaggtcacggtgcaggactccaccaccaccatcgccaacaacctcacctccaccgtccaagtgtttacggacgacgactaccagctgccctacgtcgtcggcaacgggaccgagggatgcctgccggccttccctccgcaggtctttacgctgccgcagtacggttacgcgacgctgaaccgcgacaacacagaaaatcccaccgagaggagcagcttcttctgcctagagtactttcccagcaagatgctgagaacgggcaacaactttgagtttacctacaactttgaggaggtgcccttccactccagcttcgctcccagtcagaacctgttcaagctggccaacccgctggtggaccagtacttgtaccgcttcgtgagcacaaataacactggcggagtccagttcaacaagaacctggccgggagatacgccaacacctacaaaaactggttcccggggcccatgggccgaacccagggctggaacctgggctccggggtcaaccgcgccagtgtcagcgccttcgccacgaccaataggatggagctcgagggcgcgagttaccaggtgcccccgcagccgaacggcatgaccaacaacctccagggcagcaacacctatgccctggagaacactatgatcttcaacagccagccggcgaacccgggcaccaccgccacgtacctcgagggcaacatgctcatcaccagcgagagcgagacgcagccggtgaaccgcgtggcgtacaacgtcggcgggcagatggccaccaacaaccagagctccaccactgcccccgcgaccggcacgtacaacctccaggaaatcgtgcccggcagcgtgtggatggagagggacgtgtacctccaaggacccatctgggccaagatcccagagacgggggcgcactttcacccctctccggccatgggcggattcggactcaaacacccaccgcccatgatgctcatcaagaacacgcctgtgcccggaaatatcaccagcttctcggacgtgcccgtcagcagcttcatcacccagtacagcaccgggcaggtcaccgtggagatggagtgggagctcaagaaggaaaactccaagaggtggaacccagagatccagtacacaaacaactacaacgacccccagtttgtggactttgccccggacagcaccggggaatacagaaccaccagacctatcggaacccgataccttacccgacccctttaacccattcatgtcgcataccctcaataaaccgtgtattcgtgtcagtaaaatactgcctc

SEQ ID NO: 818 - protein, 736 aa, Artificial Sequence
  source: /note="Description of Artificial Sequence: Synthetic polypeptide"
MAADGYLPDWLEDNLSEGIREWWALKPGVPQPKANQQHQDNRRGLVLPGYKYLGPGNGLDKGEPVNEADAAALEHDKAYDQQLKAGDNPYLKYNHADAEFQERLQEDTSFGGNLGRAVFQAKKRILEPLGLVEEAAKTAPGKKRPVDQSPQEPDSSSGVGKSGKQPARKRLNFGQTGDSESVPDPQPLGEPPAAPTSLGSNTMASGGGAPMADNNEGADGVGNSSGNWHCDSQWLGDRVITTSTRTWALPTYNNHLYKQISSQSGASNDNHYFGYSTPWGYFDFNRFHCHFSPRDWQRLINNNWGFRPKKLSFKLFNIQVKEVTQNDGTTTIANNLTSTVQVFTDSEYQLPYVLGSAHQGCLPPFPADVFMVPQYGYLTLNNGSQAVGRSSFYCPEYFPSQMLRTGNNFQFSYTFEDVPFHSSYAHSQSLDRLMNPLIDQYLYYLNRTQGTTSGTTNQSRLLFSQAGPQSMSLQARNWLPGPCYRQQRLSKTANDNNNSNFPWTAASKYHLNGRDSLVNPGPAMASHKDDEEKFFPMHGNLIFGKEGTTASNAELDNVMITDEEEIRTTNPVATEQYGTVANNLQSSNTAPTTRTVNDQGALPGMVWQDRDVYLQGPIWAKIPHTDGHFHPSPLMGGFGLKHPPPQIMIKNTPVPANPPTTFSPAKFASFITQYSTGQVSVEIEWELQKENSKRWNPEIQYTSNYNKSVNVDFTVDTNGVYSEPHPIGTRYLTRNL

SEQ ID NO: 819 - protein, 736 aa, Artificial Sequence
  source: /note="Description of Artificial Sequence: Synthetic polypeptide"
MAADGYLPDWLEDNLSEGIREWWALKPGVPQPKANQQHQDNRRGLVLPGYKYLGPGNGLDKGEPVNEADAAALEHDKAYDQQLKAGDNPYLKYNHADAEFQERLQEDTSFGGNLGRAVFQAKKRILEPLGLVEEAAKTAPGKKRPVDQSPQEPDSSSGVGKSGKQPARKRLNFGQTGDSESVPDPQPLGEPPAAPTSLGSNTMASGGGAPMADNNEGADGVGNSSGNWHCDSQWLGDRVITTSTRTWALPTYNNHLYKQISSQSGASNDNHYFGYSTPWGYFDFNRFHCHFSPRDWQRLINNNWGFRPKKLSFKLFNIQVKEVTQNDGTTTVANNLTSTVQVFTDSEYQLPYVLGSAHQGCLPPFPADVFMVPQYGYLTLNNGSQAVGRSSFYCLEYFPSQMLRTGNNFQFSYTFEDVPFHSSYAHSQSLDRLMNPLIDQYLYYLNRTQGTTSGTTNQSRLLFSQAGPQSMSLQARNWLPGPCYRQQRLSKTANDNNNSNFPWTAASKYHLNGRDSLVNPGPAMASHKDDEEKFFPMHGNLIFGKEGTTASNAELDNVMITDEEEIRTTNPVATEQYGTVANNLQSSNTAPTTRTVNDQGALPGMVWQDRDVYLQGPIWAKIPHTDGHFHPSPLMGGFGLKHPPPQIMIKNTPVPANPPTTFSPAKFASFITQYSTGQVSVEIEWELQKENSKRWNPEIQYTSNYNKSVNVDFTVDTNGVYSEPRPIGTRYLTRNL

SEQ ID NO: 820 - protein, 736 aa, Artificial Sequence
  source: /note="Description of Artificial Sequence: Synthetic polypeptide"
MAADGYLPDWLEDNLSEGIREWWALKPGVPQPKANQQHQDNRRGLVLPGYKYLGPGNGLDKGEPVNEADAAALEHDKAYDQQLKAGDNPYLKYNHADAEFQERLQEDTSFGGNLGRAVFQAKKRILEPLGLVEEAAKTAPGKKRPVDQSPQEPDSSSGVGKSGKQPARKRLNFGQTGDSESVPDPQPLGEPPAAPTSLGSNTMASGGGAPMADNNEGADGVGNSSGNWHCDSQWLGDRVITTSTRTWALPTYNNHLYKQISGQSGASNDNHYFGYSTPWGYFDFNRFHCHFSPRDWQRLINNNWGFRPKKLSFKLFNIQVKEVTQNDGTTTIANNLTSTVQVFTDSEYQLPYVLGSAHQGCLPPFPADVFMVPQYGYLTLNNGSQAVGRSSFYCLEYFPSQMLRTGNNFQFSYTFEDVPFHSSYAHSQSLDRLMNPLIDQYLYYLNRTQGTTSGTTNQSRLLFSQAGPQSMSLQARNWLPGPCYRQQRLSKTANGNNNSNFPWTAASKYHLNGRDSLVNPGPAMASHKDDEEKFFPMHGNLIFGKEGTTASNAELDNVMITDEEEIRTTNPVATEQCGTVANNLQSSNTAPTTRTVNDQGALPGMVWQDRDVYLQGPIWAKIPHTDGHFHPSPLMGGFGLKHPPPQIMIKNTPVPANPPTTFSPAKFASFITQYSTGQVSVEIEWELQKENSKRWNPEIQYTSNYNKSVNVDFTVDTNGVYSEPRPIGTRYLTRNL

SEQ ID NO: 821 - protein, 736 aa, Artificial Sequence
  source: /note="Description of Artificial Sequence: Synthetic polypeptide"
MAADGYLPDWLEDNLSEGIREWWALKPGVPQPKANQQHQDNRRGLVLPGYKYLGPGNGLDKGEPVNEADAAALEHDKAYDQQLKAGDNPYLKYNHADAEFQERLQEDTSFGGNLGRAVFQAKKRILEPLGLVEGAAKTAPGKKRPVDQSPQEPDSSSGVGKSGKQPARKRLNFGQTGDSESVPDPQPLGEPPAAPTSLGSNTMASGGGAPMADNNEGADGVGNSSGNWHCDSQWLGDRVITTSTRTWALPTYNSHLYKQISSQSGASNDNHYFGYSTPWGYFDFNRFHCHFSPRDWQRLINNNWGFRPKKLSFKLFNIQVKEVTQNDGTTTIANNLTSTVQVFTDSEYQLPYVLGSAHQGCLPPFPADAFMVPQYGYLTLNNGSQAVGRSSFYCLEYFPSQMLRTGNNFQFSYTFEDVPFHGSYAHSQSLDRLMNPLIDQYLYYLNRTQGTTSGTTNQSRLLFSQAGPQSMSLQARNWLPGPCYRQQRLSKTANDNNNSNFPWTAASKYHLNGRDSLVNPGPAMASHKDDEEKFFPMHGNLIFGKEGTTASNAELDNVMITDEEEIRTTNPVATEQYGTVANNLQSSNTAPTTRTVNDQGALPGMVWQDRDVYLQGPIWAKIPHTDGHFHPSPLMGGFGLKHPPPQIMIKNTPVPANPPTTFSPAKFASFITQYSTGQVSVEIEWELQKENSKRWNPEIQYTSNYNKSVNVDFTVDTNGVYSEPRPIGTRYLTRNS

SEQ ID NO: 822 - protein, 736 aa, Artificial Sequence
  source: /note="Description of Artificial Sequence: Synthetic polypeptide"
MAADGYLPDWLEDNLSEGIREWWALKPGVPQPKANQQHQDNRRGLVLPGYKYLGPGNGLDKGEPVNEADAAALEHDKAYDQQLKAGDNPYLKYNHADAEFQERLQEDTSFGGNLGRAVFQAKKRILEPLGLVEGAAKTAPGKKRPVDQSPQEPDSSSGVGKSGKQLARKRLNFGQTGDSESVPDPQPLGEPPAAPTSLGSNTMASGGGAPMADNNEGADGVGNSSGNWHCDSQWLGDRVITTSTRTWALPTYNSHLYKQISGQSGASNDNHYFGYSTPWGYFDFNRFHCHFSPRDWQRLINNNWGFRPKKLSFKLFNIQVKEVTQNDGTTTIANNLTSTVQVFTDSEYQLPYVLGSAHQGCLPPFPADVFMVPQYGYLTLNNGSQAVGRSSFYCLEYFPSQMLRTGNNFQFSYTFEDVPFHSSYAHSQSLDRLMNPLIDQYLYYLNRTQGTTSGTTNQSRLLFSQAGPQSMSLQARNWLPGPCYRQQRLSKTANDNNNSNFPWTAASKYHLNGRDSLVNPGPAMASHKDDEEKFFPMHGNLIFGKEGTTASNAELDNVMITDEEEIRTTNPVATEQYGTVANNLQSSNTAPTTRTVNDQGALPGMVWQDRDVYLQGPIWAKIPHTDGHFHPSPLMGGFGLKHPPPQIMIKNTPVPANPPTTFSPAKFASFITQYSTGQVSVEIEWELQKENSKRWNPEIQYTSNYNKSVNVDFTVDTNGVYSEPRPIGTRYLTRNL

SEQ ID NO: 823 - protein, 736 aa, Artificial Sequence
  source: /note="Description of Artificial Sequence: Synthetic polypeptide"
MAADGYLPDWLEDNLSEGIREWWALKPGVPQPKANQQHQDDRRGLVLPGYKYLGPGNGLDKGEPVNEADAAALEHDKAYDQQLKAGDNPCLKYNHADAEFQERLQEDTSFGGNLGRAVFQAKKRILEPLGLVEEAAKTAPGKKRPVDQSPQEPDSSSGVGKSGKQPARKRLNFGQTGDSESVPDPQPLGEPPAAPTSLGSNTMASGGSAPMADNNEGADGVGNSSGNWHCDSQWLGDRVITTSTRTWALPTYNNHLYKQISSQSGASNDNHYFGYSTPWGYFDFNRFHCHFSPRDWQRLINNNWGFRPKKLSFKLFNIQVKEVTQNDGTTTIANNLTSTVQVFTDSEYQLPYVLGSAHQGCLPPFPADVFMVPQYGYLTLNNGSQAVGRSSFYCLEYFPSQMLRTGNNFQFSYTFEDVPFHSSYAHSQSLDRLMDPLIDQYLYYLNRTQGTTSGTTNQSRLLFSQAGPQSMSLQARNWLPGPCYRQQRLSKTANDNNNSNFPWTAASKYHLNGRDSLVNPGPAMASHKDDEEKFFPMHGNLIFGKEGTTASNAELDNVMITDEEEIRTTNPVATEQYGTVANNLQSSNTAPTTRTVNDQGALPGMVWQDRDVYLQGPIWAKIPHTDGHFHPSPLMGGFGLKHPPPQIMIKNTPVPANPPTTFSPAKFASFITQYSTGQVSVEIEWELQKENSKRWNPEIQYTSNYNKSVNVDFTVDTNGVYSEPRPIGTRYLTRNL

SEQ ID NO: 824 - protein, 736 aa, Artificial Sequence
  source: /note="Description of Artificial Sequence: Synthetic polypeptide"
MAADGYLPDWLEDNLSEGIREWWALKPGVPQPKANQQHQDDRRGLVLPGYKYLGPGNGLDKGEPVNEADAAALEHDKAYDQQLKAGDNPYLKYNHADAEFQERLQEDTSFGGNLGRAVFQAKKRILEPLGLVEEAAKTAPGKKRPVDQSPQEPDSSSGVGKSGKQPARKRLNFGQTGDSESVPDPQPLGEPPAAPTSLGSNTMASGGGAPMADNNEGADGVGNSSGNWHCDSQWLGNRVITTSTRTWALPTYNNHLYKQISSQSGASNDNHYFGYSTPWGYFDFNRFHCHFSPRDWQRLINNNWGFRPKKLSFKLFNIQVKEVTQNDGTTTIANNLTSTVQVFTDSEYQLPYVLGSAHQGCLPPFPADVFMVPQYGYLTLNNGSQAVGRSSFYCLEYFPSQMLRTGNNFQFSYTFEDVPFHSSYAHSQSLDRLMNPLIDQYLYYLNRTQGTTSGTTNQSRLLFSQAGPQSMSLQARNWLPGPCYRQQRLSKTANDNNNSNFPWTAASKYHLNGRDSLVNPGPAMASHKDDEEKFFPMHGNLIFGKEGTTASNAELDNVMITDEEEIRTTNPVATEQYGTVANNLQSSNTAPTTRTVNDQGALPGMVWQDRDVYLQGPIWAKIPHTDGHFHPSPLMGGFGLKHPPPQIMIKNTPVPANPPTTFSPAKFASFITQYSTGQVSVEIEWELQKENSKRWNPEIQYTSNYNKSVNVDFTVDTNGVYSEPRPIGTRYLTRNL

SEQ ID NO: 825 - protein, 736 aa, Artificial Sequence
  source: /note="Description of Artificial Sequence: Synthetic polypeptide"
MAADGYLPDWLEDNLSEGIREWWALKPGVPQPKANQQHQDDRRGLVLPGYKYLGPGNGLDKGEPVNEADAAALEHDKAYDQQLKAGDNPYLKYNHADAEFQERLQEDTSFGGNLGRAVFQAKKRILEPLGLVEEAAKTAPGKKRPVDQSPQEPDSSSGVGKSGKQPARKRLNFGQTGDSESVPDPQPLGEPPAAPTSLGSNTMASGGGAPMADNNEGADGVGNSSGNWHCDSQWLGDRVITTSTRTWALPTYNNHLYKQISSQSGASNDNHYFGYSTPWGYFDFNRFHCHFSPRDWQRLINNNWGFRPKKLSFKLFNIQVKEVTQNDGTTTIANNLTSTVQVFTDSEYQLPYVLGSAHQGCLPPFPADVFMVPQYGYLTLNNGSQAVGRSSFYCLEYFPSQMLRTGNNFQFSYTFEDVPFHSSYAHSQSLDRLMNPLIDQYLYYLNRTQGTTSGTTNQSRLLFSQAGPQSMSLQARNWLPGPCYRQQRLSKTANDNNNSNFPWTAASKYHLNGRDSLVNPGPAMASHKDDEEKFFPMHGNLIFGKEGTTASNAELDNVMITDEEEIRTTNPVATVQYGTVANNLQSSNTAPTTRTVNDQGALPGMVWQDRDVYLQGPIWAKIPHTDGHFHPSPLMGGFGLKHPPPQIMIKNTPVPANPPTTFSPAKFASFITQYSTGQVSVEIEWELQKENSKRWNPEIQYTSNYNKSVNVDFTVDTNGVYSEPRPIGTRYLTRNL

SEQ ID NO: 826 - protein, 735 aa, Artificial Sequence
  source: /note="Description of Artificial Sequence: Synthetic polypeptide"
MAADGYLPDWLEDNLSEGIREWWALKPGVPQPKANQQHQDNRRGLVLPGYKYLGPGNGLDKGEPVNEADAAALEHDKAYDQQLKAGDNPYLKYNHADAEFQERLQEDTSFGGNLGRAVFQAKKGILEPLGLVEEAAKTAPGKKRPVDQSPQEPDSSSGVGKSGKQPARKRLNFGQTGDSESVPDPQPLGEPPAAPTSLGSNTMASGGGAPMADNNEGADGVGNSSGNWHCDSQWLGDRVITTSTRTWALPTYNNHLYKQISSQSGASNDNHYFGYSTPWGYFDFNRFHCHFSPRDWQRLINNNWGFRPKKLSFKLFNIQVKEVTQNDGTTTIANNLTSTVQVFTDSEYQLPYVFGSAHQGCLPPFPADVFMVPQYGYLTLNNGSQAVGRSSFYCLEYFPSQMLRTGNNFQFSYTFEDVPFHSSYAHSQSSDRLMNPLIDQYLYYLNRTQGTTSGTTNQSRLLFSQAGPQSMSLQARNWLPGPCYRQQRLSKTANDNNNSNFPTAASKYHLNGRDSLVNPGPAMASHKDDEEKFFPMHGNLIFGKEGTTASNAELDNVMITDEEEIRTTNPVATEQYGTVANNLQSSNTAPTTRTVNDQGALPGMVWQDRDVYLQGPIWAKIPHTDGHFHPSPLMGGFGLKHPPPQIMIKNTPVPANPPTTFSPAKFASFITQYSTGQVSVEIEWELQKENSKRWNPEIQYTSNYNKSVNVDFTVDTNGVYSEPRPIGTRYLTRNL

SEQ ID NO: 827 - protein, 736 aa, Artificial Sequence
  source: /note="Description of Artificial Sequence: Synthetic polypeptide"
MAADGYLPDWLEDNLSEGIREWWALKPGVPQPKANQQHQDNRRGLVLPGYKYLGPGNGLDEGEPVNEADAAALEHDKAYDQQLKAGDNPYLKYNHADAEFQERLQEDTSFGGNLGRAVFQAKKRILEPLGLVEGAAKTAPGKKRPVDQSPQEPDSSSGVGKSGKQPARKRLNFGQTGDSESVPDPQPLGEPPAAPTSLGSNTMASGGGAPMADNNEGADGVGNSSGNWHCDSQWLGDRVITTSTRTWALPTYNSHLYKQISSQSGASNDNHYFGYSTPWGYFDFNRFHCHFSPRDWQRLINNNWGFRPKKLSFKLFNIQVKEVTQNDGTTTIANNLTSTVQVFTDSEYQLPYVLGSAHQGCLPPFPADVFMVPQYGYLTLNNGSQAVGRSSFYCLEYFPSQMLRTGNNFQFSYTFEDVPFHSSYAHSQSLDRLMNPLIDQYLYYLNRTQGTTSGTTNQSRLLFSQAGPQSMSLQARNWLPGPCYRQQRLSKTANDNNNSNFPWTAASKYHLNGRDSLVNPGPAMASHKDDEEKFFPMHGNLIFGKEGTTASNAELDNVMITDEEEIRTTNPVATEQYGTVANNLQSSNTAPTTRTVNDQGALPGMVWQDRDVYLQGPIWAKIPHTDGHFHPSPLMGGFGLKHPPPQIMIKNTPVPANPPTTFSPAKFASFITQYSTGQVSVEIEWELQKENSKRWNPEIQYTSNYNKSVNVDFTVDTNGVYSEPRPIGTRYLTRNL

SEQ ID NO: 828 - protein, 668 aa, Artificial Sequence
  source: /note="Description of Artificial Sequence: Synthetic polypeptide"
MAADGYLPDWLEDNLSEGIREWWALKPGVPQPKANQQHQDNRRGLVLPGYKYLGPGNGLDKGEPVNEADAAALEHDKAYDQQLKAGDNPYLKYNHADAEFQERLQEDTSFGGNLGRAVFQAKKRILEPLGLVEGAAKTAPGKKRPVDQSPQEPDSSSGVGKSGKQPARKRLNFGQTGDSESVPDPQPLGEPPAAPTSLGSNTMASGGGAPMADNNEGADGVGNSSGNWHCDSQWLGDRVITTSTRTWALPTYNSHLYKQISSQSGASNDNHYFGYSTPWGILTLTDSTATSHHVTGSDSLTTTGDSGPRNSASSSSTSKLKRSRRTMARRLLPITLPARFKCLRTRSISSRTCSGRRTKAVSRRFQRTPSWSLSMDTSPTTEVKRWDAHPFTAWSTSLRRCGLEITSNSAIPSRMYLFTAATLTARVWIAILLLISICTTTERKEQPLEQPTNHGCFLARLGLSLCLCRPEIGYLGPATGNRDFQRLLTTTTTVTFLGQRPANIISMAATRWIQDQLWPVTRTMKKNFSLCTAIRGPYLAWCGKIVTCTFKDLSGQRFLTRMDTFILLLWEALDNIRLLKSSKILRYRQILRRLSARPSLLHLSLSTPLDRSAWKLSGSYRKKTANVGIQRFSTLPTTTSLLMWTLLTLMVFIVNLALLEPGISHETC

SEQ ID NO: 829 - protein, 734 aa, Artificial Sequence
  source: /note="Description of Artificial Sequence: Synthetic polypeptide"
MTDGYLPDWLEDNLSEGVREWWALQPGAPKPKANQQHQDNARGLVLPGYKYLGPGNGLDKGEPVNAADAAALEHDKAYDQQLKAGDNPYLKYNHADAEFQQRLQGDTSFGGNLGRAVFQAKKRVLEPLGLVEQAGETAPGKKRPLIESPQQPDSSTGIGKKGKQPAKKKLVFEDETGAGDGPPEGSTSGAMSDDSEMRAATGGAAVEGGQGADGVGNASGDWHCDSTWSEGHVTTTSTRTWVLPTYNNHLYKRLGESLQSNTYNGFSTPWGYFDFNRFHCHFSPRDWQRLINNNWGMRPKAMRVKIFNIQVKEVTTSNGETTVANNLTSTVQIFADSSYELPYVMDAGQEGSLPPFPNDVFMVPQYGYCGLVTGNTSQQQTDRNAFYCLEYFPSQMLRTGNNFEITYSFEKVPFHSMYAHSQSLDRLMNPLIDQYLWGLQSTTTGTTLNAGTATTNFTKLRPTNLSNFKKNWLPGPSIKQQGFSKTANQNYKIPATGSDSLIKYETHSTLDGRWSALTPGPPMATAGPADSKFSNSQLIFAGPKQNGNTATVPGTLIFTSEEELAATNATDTDMWGNLPGGDQSNSNLPTVDRLTALGAVPGMVWQNRDIYYQGPIWAKIPHTDGHFHPSPLIGGFGLKHPPPQIFIKNTPVPANPATTFSSTPVNSFITQYSTGQVSVQIDWEIQKERSKRWNPEVQFTSNYGQQNSLLWAPDAAGKYTEPRAIGTRYLTHHL

SEQ ID NO: 830 - protein, 734 aa, Artificial Sequence
  source: /note="Description of Artificial Sequence: Synthetic polypeptide"
MTDGYLPDWLEDNLSEGVREWWALQPGAPKPKANQQHQDNARGLVLPGYKYLGPGNGLDKGEPVNAADAAALEHDKAYDQQLKAGDNPYLKYNHADAEFQQRLQGDTSFGGNLGRAVFQAKKRVLEPLGLVEQAGETAPGKKRPLIESPQQPDSSTGIGKKGKQPAKKKLVFEDETGAGDGPPEGSTSGAMSDDSEMRAAAGGAAVEGGQGADGVGNASGDWHCDSTWSEGHVTTTSTRTWVLPTYNNHLYKRLGESLQSNTYNGFSTPWGYFDFNRFHCHFLPRDWQRLINNNWGVRPKAMRVKIFNIQVKEVTTSNGETTVANNLTSTVQIFADSSYELPYVMDAGQEGSLPPFPNDVFMVPQYGYCGLVTGDTSQQQTDRNAFYCLEYFPSQMLRTGNNFEITYSFEKVPFHSMYAHSQSLDRLMNPLIDQYLWGLQSTTTGTTLNAGTATTNFTKLRPTNFSNFKKNWLPGPSIKQQGFSKTANQNYKIPATGSDSLIKYETHSTLDGRWSALTPGPPMATAGPADSKFSNSQLIFAGPKQNGNTATVPGTLIFTSEEELAATNATDTDMWGNLPGGDQSNSNLPTVDRLTALGAVPGMVWQNRDIYYQGPIWAKIPHTDGHFHPSPLIGGFGLKHPPPQIFIKNTPVPANPATTFSSTPVNSFITQYSTGQVSVQIDWEIQKERSKRWNPEVQFTSNYGQQNSLLWAPDAAGKYTEPRAIGTRYLTHHL

SEQ ID NO: 831 - protein, 734 aa, Artificial Sequence
  source: /note="Description of Artificial Sequence: Synthetic polypeptide"
MTDGYLPDWLEDNLSEGVREWWALQPGAPKPKANQQHQDNARGLVLPGYKYLGPGNGLDEGEPVNAADAAALEHDKAYDQQLKAGDNPYLKYNHADAEFQQRLQGDTSFGGNLGRAVFQAKKRVLEPLGLVEQAGETAPGKKRPLIESPQQPDSSTGIGKKGKQPAKKKLVFEDETGAGDGPPEGSTSGAMSDDSEMRAAAGGAAVEGGQGADGVGNASGDWHCDSTWSEGHVTTTSTRTWVLPTYNNHLYKRLGESLQSNTYNGFSTPWGYFDFNRFHCHFSPRDWQRLINNNWGMRPKAMRVKIFNIQVKEVTTSNGETTVANNLTSTVQIFADSSYELPYVMDAGQEGSLPPFPNDVFMVPQYGYCGLVTGNTSQQQTDRNAFYCLEYFPSQMLRTGNNFEITYSFEKVPFHSMYAHSQSLDRLMNPLIDQYLWGLQSTTTGTTLNAGTATTNFTKLRPTNFSNFKKNWLPGPSIKQQGFSKTANQNYKIPATGSDSLIKYETHSTLDGRWSALTPGPPMATAGPADSKFSNSQLIFAGPKQNGNTATVPGTLIFTSEEELAATNATDTDMWGNLPGGDQSNSNLPTVDRLTALGAVPGMVWQNRDIYYQGPIWAKIPHTDGHFHPSPLIGGFGLKHPPPQIFIKNTPVPANPATTFSSTPVNSFITQYSTGQVSVQIDWEIQKERSKRWNPEVQFTSNYGQQNSLLWAPDAAGKYTEPRAIGTRYLTHHL

SEQ ID NO: 832 - protein, 734 aa, Artificial Sequence
  source: /note="Description of Artificial Sequence: Synthetic polypeptide"
MTDGYLPDWLEDNLSEGVREWWALQPGAPKPKANQQHQDNARGLVLPGYKYLGPGNGLDKGEPVNAADAAALEHDKAYDQQLKAGDNPYLKYNHADAEFQQRLQGDTSFGGNLGRAVFQAKKRVLEPLGLVEQAGETAPGKKRPLIESPQQPDSSTGIGKKGKQPAKKKLVFEDGTGAGDGPPEGSTSGAMSDDSEMRAAAGGAAVEGGQGADGVGNASGDWHCDSTWSEGHVTTTSTRTWVLPTYNNHLYKRLGESLQSNTYNGFPTPWGYFDFNRFHCHFSPRDWQRLINNNWGMRPKAMRVKIFNIQVKEVTTSNGETTAANNLTSTVQIFADSSYELPYVMDAGQEGSLPPFPNDVFMVPQYGYCGLVTGNTSQQQTDRNAFYCLEYFPSQMLRTGNNFEITYSFEKVPFHSMYAHSQSLDRLMNPLIDQYLWGLQSTTTGTTLNAGTATTNFTKLRPTNFSNFKKNWLPGPSIKQQGFSKTANQNYKIPATGSDSLIKYETHSTLDGRWSALTPGPPMATAGPADSKFSNSQLIFAGPKQNGNTATVPGTLIFTSEEELAATNATDTDMWGNLPGGDQSNSNLPTVDRLTALGAVPGMVWQNRDIYYQGPIWAKIPHTDGHFHPSPLIGGFGLKHPPPQIFIKNTPVPANPATTFSSTPVNSFITQYSTGQVSVQIDWEIQKERSKRWNPEVQFTSNYGQQNSLLWAPDAAGKYTEPRAIGTRYLTHHL

SEQ ID NO: 833 - protein, 734 aa, Artificial Sequence
  source: /note="Description of Artificial Sequence: Synthetic polypeptide"
MTDGYLPDWLEDNLSEGVREWWALQPGAPKPKANQQHQDNARGLVLPGYKYLGPGNGLDKGEPVNAADAAALEHDKAYDQQLKAGDNPYLKYNHADAEFQQRLQGDTSFGGNLGRAVFQAKKRVLEPLGLVEQAGETAPGKKRPLIESPQQPDSSTGIGKKGKQPAKKKLVFEDETGAGDGPPEGSTSGAMSDDSEMRAAAGGAAVEGGQGADGVGNASGDWHCDSTWSEGHVTTTSTRTWVLPTYNNHLYKRLGESLQSNTYNGFSTPWGYFDFNRFHCHFSPRDWQRLINNNWGMRPKAMRVKIFNIQVKEVTTSNGETTVANNLTSTVQIFADSSYELPYVMDAGQEGSLPPFPNDVFMVPQYGYRGLVTGNTSQQQTDRNAFYCLEYFPSQMLRTGNNFEITYSFEKVPFHSMYAHSQSLDRLMNPLIDQYLWGLQSTTTGTTLNAGTATTNFTKLRPTNFSNFKKNWLPGPSIKQQGFSKTANQNYKIPATGSDSLIKYETHSTLDGRWSALTPGPPMATAGPADSKFSNSQLIFAGPKQNGNTATVPGTLIFTSEEELAATNATDTDMWGNLPGGDQSNSNLPTVDRLTALGAVPGMVWQNRDIYYQGPIWAKIPHTDGHFHPSPLIGGFGLKHPPPQIFIKNTPVPANPATTFSSTPVNSFITQYSTGQVSVQIDWEIQKERSKRWNPEVQFTSNYGQQNSLLWAPDAAGKYTEPRAIGTRYLTHHL

SEQ ID NO: 834 - protein, 734 aa, Artificial Sequence
  source: /note="Description of Artificial Sequence: Synthetic polypeptide"
MTDGYLPDWLEDNLSEGVREWWALQPGAPKPKANQQHQDNARGLVLQGYKYLGPGNGLDKGEPVNAADAAALEHDKAYDQQLKAGDNPYLKYNHADAEFQQRLQGDTSFGGNLGRAVFQAKKRVLEPLGLVEQAGETAPGKKRPLIESPQQPDSSTGIGKKGKQPAKKKLVFEDETGAGDGPPEGSTSGAMSDDSEMRAAAGGAAVEGGQGADGVGNASGDWHCDSTRSEGHVTTTSTRTWVLPTYNNHLYKRLGESLQSNTYNGFSTPWGYFDFNRFHCHFSPRDWQRLINNNWGMRPKAMRVKIFNIQVKEVTTSNGETTVANNLTSTVQIFADSSYELPYVMDAGQEGSLPPFPNDVFMVPQYGYCGLVTGNTSQQQTDRNAFYCLEYFPSQMLRTGNNFEITYSFEKVPFHSMYAHSQSLDRLMNPLIDQYLWGLQSTTTGTTLNAGTATTNFTKLRPTNFSNFKKNWLPGPSIKQQGFSKTANQNYKIPATGSDSLIKYETHSTLDGRWSARTPGPPMATAGPADSKFSNSQLIFAGPKQNGNTATVPGTLIFTSEEELAATNATDTDMWGNLPGGDQSNSNLPTVDRLTALGAVPGMVWQNRDIYYQGPIWAKIPHTDGHFHPSPLIGGFGLKHPPPQIFIKNTPVPANPATTFSSTPVNSFITQYSTGQVSVQIDWEIQKERSKRWNPEVQFTSNYGQQNSLLWAPDAAGKYTEPRAIGTRYLTHHL

SEQ ID NO: 835 - protein, 724 aa, Artificial Sequence
  source: /note="Description of Artificial Sequence: Synthetic polypeptide"
MSFVDHPPDWLEEVGEGLREFLGLEAGPPKPKPNQQHQDQARGLVLPGYNYLGPGNGLDRGEPVNRADEVAREHDISYNEQLEAGDNPYLKYNHADAEFQERLADDTSFGGNLGKAVFQAKKRVLEPFGLVEEGAKTAPTGKRIDDHFPKRKKARTEEDSKPSTSSDAEAGPSGSQQLQIPAQPASSLGADTMSAGGGGPLGDNNQGADGVGNASGDWHCDSTWMGDRVVTKSTRTWVLPSYNNHQYREIKSGSVDGSNANAYFGYSTPWGYFDFNRFHSHWSPRDWQRLINNYWGFRPRSLRVKIFNIQVKEVTVQDSTTTIANNLTSTVQVFTDDDYQLPYVVGNGTEGCLPAFPPQVFTLPQYGYATLNRDNTENPTERSSFFCLEYFPSKMLRTGNNFEFTYNFEEVPFHSSFAPSQNLFKLANPLVDQYLYRFVSTNNTGGVQFNKNLAGRYANTYKNWFPGPMGRTQGWNLGSGVNRASVSAFATTNRMELEGASYQVPPQPNGMTNNLQGSNTYALENTMIFNSQPANPGTTATYLEGNMLITSESETQPVNRVAYNVGGQMATNNQSSTTAPATGTYNLQEIVPGSVWMERDVYLQGPIWAKIPETEAHFHPSPAMGGFGLKHPPPMMLIKNTPVPGNITSFSDVPVSSFITQYSTGQVTVEMEWELKKENSKRWNPEIQYTNNYNDPQFVDFAPDSTGEYRTTRPIGTRYLTRPL

SEQ ID NO: 836 - protein, 724 aa, Artificial Sequence
  source: /note="Description of Artificial Sequence: Synthetic polypeptide"
MSFVDHPPDWLEEVGEGLREFLGLEAGPPKPKPNQQHQDQARGLVLPGYNYLGPGNGLDRGEPVNRADEVAREHDISYNEQLEAGDNPYLKYNHADAEFQEKLADDTSSGGNLGKAVFQAKKRVLEPFGLVEEGAKTAPTGKRIDDHFPKRKKARTEEDSKPSTSSDAEAGPSGSQQLQIPAQPASSLGADTMSAGGGGPLGDNNQGADGVGNASGDWHCDSTWMGDRVVTKSTRTWVLPSYNNHQYREIKSGSVDGSNANAYFGYSTPWGYFDFNRFHSHWSPRDWQRLINNYWGFRPRSLRVKIFNIQVKEVTVQDSTTTIANNLTSTVQVFTDDDYQLPYVVGNGTEGCLPAFPPQVFTLPQYGYATLNRDNTENPTERSSFFCLEYFPSKMLRTGNNFEFTYNFEEVPFHSSFAPSQNLFKLANPLVDQYLYRFVSTNNTGGVQFNKNLAGRYANTYKNWFPGPMGRTQGWNLGSGVNRASVSAFATTNRMELEGASYQVPPQPNGMTNNLQGSNTYALENTMIFNSQPANPGTTATYLEGNMLITSESETQPVNRVAYNVGGQMATNNQSSTTAPATGTYNLQEIVPGSVWMERDVYLQGPIWAKIPETGAHFHPSPAMGGFGLKHPPPMMLIKNTPVPGNITSFSDVPVSSFITQYSTGQVTVEMEWELKKENSKRWNPEIQYTNNYNDPQFVDFAPDSTGEYRTTRPIGTRYLTRPL

SEQ ID NO: 837 - protein, 724 aa, Artificial Sequence
  source: /note="Description of Artificial Sequence: Synthetic polypeptide"
MSFVDHPPDWLEEVGEGLREFLGLEAGPPKPKPNQQHQDQARGLVLPGYNYLGPGNGLDRGEPVNRADEVAREHDISYNEQLEAGDNPYLKYNHADAEFQEKLADDTSFGGNLGKAVFQAKKRVLEPFGLVEEGAKTAPTGKRIDDHFPKRKKARTEEDSKPSTSSDAEAGPSGSQQLQIPAQPASSLGADTMSAGGGGPLGDNNQGADGVGNASGDWHCDSTWMGDRVVTKSTRTWVLPSYNNHQYREIKSGSVDGSNANAYFGYSTPWGYFDFNRFHSHWSPRDWQRLINNYWGFRPRSLRVKIFNIQVKEVTVQDSTTTIANNLTSTVQVFTDDDYQLPYVVGNGTEGCLPAFPPQVFTLPQYGYATLNRDNTENPTERSSFFCLEYFPSKMLRTGNNFEFTYNFEEVPFHSSFAPSQNLFKLANPLVDQYLYRFVSTNNTGGVQFNKNLAGRYANTYKNWFPGPMGRTQGWNLGSGVNRASVSAFATTNRMELEGASYQVPPQPNGMTNNLQGSNTYALENTMIFNSQPANPGTTATYLEGNMLITSESETQPVNRVAYNVGGQMATNNQSSTTAPATGTYNLQEIVPGSVWMERDVYLQGPIWAKIPETGAHFHPSPAMGGFGLKHPPPMMLIKSTPVPGNITSFSDVPVSSFITQYSTGQVTVEMEWELKKENSKRWNPEIQYTNNYNDPQFVDFAPDSTGEYRTTRPIGTRYLTRPL

SEQ ID NO: 838 - protein, 724 aa, Artificial Sequence
  source: /note="Description of Artificial Sequence: Synthetic polypeptide"
MSFVDHPPDWLEEVGEGLREFLGPEAGPPKPKPNQQHQDQARGLVLPGYNYLGPGNGLDRGEPVNRADEVAREHDISYNEQLEAGDNPYLKYNHADAEFQEKLADDTSFGGNLGKAVFQAKKRVLEPFGLVEEGAKTAPTGKRIDDHFPKRKKVRTEEDSKPSTSSDAEAGPSGSQQLQIPAQPASSLGADTMSAGGGGPLGDNNQGADGVGNASGDWHCDSTWMGDRVVTKSTRTWVPPSYNNHQYREIKSGSVDGSNANAYFGYSTPWGYFDFNRFHSHWSPRDWQRLINNYWGFRPRSLRVKIFNIQVKEVTVQDSTTTIANNLTSTVQVFTDDDYQLPYVVGNGTEGCLPAFPPQVFTLPQYGYATLNRDNTENPTERSSFFCLEYFPSKMLRTGNNFEFTYNFEEVPFHSSFAPSQNLFKLANPLVDQYLYRFVSTNNTGGVQFNKNLAGRYANTYKNWFPGPMGRTQGWNLGSGVNRASVSAFATTNRMELEGASYQVPPQPNGMTNNLQGSNTYALENTMIFNSQPANPGTTATYLEGNMLITSESETQPVNRVACNVGGQMATNNQSSTTAPATGTYNLQEIVPGSVWMERDVYLQGPIWAKIPETGAHFHPSPAMGGFGLKHPPPMMLIKNTPVPGNITSFSDVPVSSFITQYSTGQVTVEMEWELKKENSKRWNPEIQYTNNYNDPQFVDFAPDSTGEYRTTRPIGTRYLTRPL

SEQ ID NO: 839 - protein, 724 aa, Artificial Sequence
  source: /note="Description of Artificial Sequence: Synthetic polypeptide"
MSFVDHPPDWLEEVGEGLREFLGLEAGPPKPKPNQQHQDQARGLVLPGYNYLGPGNGLDRGEPVNRADEVAREHDISYNEQLEAGDNPYLKYNHADAEFQEKLADDTSFGGNLGKAVFQAKKRVLEPFGLVEEGAKTAPTGKRIDDHFPKRKKARTEEDSKPSTSSDAEAGPSGSQQLQIPAQPASSLGADTMSAGGGGPLGDNNQGADGVGNASGDWHCDSTWMGDRVVTKSTRTWVLPSYNNHQYREIKSGSVDGSNANAYFGYSTPWGYFDFNRFHSHWSPRDWQRLINNYWGFRPRSLRVKIFNIQVKEVTVQDSTTTIANNLTSTVQVFTDDDYQLPYVVGNGTEGCLPAFPPQVFTLPQYGYATLNRDNTENPTERSSFFCLEYFPSKMLRTGNNFEFTYNFEEVPFHSSFAPSQNLFKLANPLVDQYLYRFVSTNNTGGVQFNKNLAGRYANTYKNWFPGPMGRTQGWNLGSGVNRASVSAFATTNRMELEGASYQVPPQPNGMTNNLQGSNTYALENTMIFNSQPANPGTTATYLEGNMLITSESETQPVNRVAYNVGGQMATNNQSSTTAPATGAYNLQEIVPGSVWMERDVYLQGPIWAKIPETGAHFHPSPAMGGFGLKHPPPMMLIKNTPVPGNITSFSDVPVSSFITQYSTGQVTVEMEWELKKENSKRWNPEIQYTNNYNDPQFVDFAPDSTGEYRTTRPIGTRYLTRPL

SEQ ID NO: 840 - protein, 724 aa, Artificial Sequence
  source: /note="Description of Artificial Sequence: Synthetic polypeptide"
MSFVDHPPDWLEEVGEGLREFLGLEAGPPKPKPNQQHQDQARGLVLPGYNYLGPGNGLDRGEPVNRADGVAREHDISYNEQLEAGDNPYLKYNHADAEFQEKLADDTSFGGNLGKAVFQAKKRVLEPFGLVEEGAKTAPTGKRIDDHFPKRKKARTEEDSKPSTSSDAEAGPSGSQQLQIPAQPASSLGADTMSAGGGGPLGDNNQGADGVGNASGDWHCDSTWMGDRVVTKSTRTWVLPSYNNHQYREIKSGSVDGSNANAYFGYSTPWGYFDFNRFHSHWSPRDWQRLINNYWGFRPRSLRVKIFNIQVKEVTVQDSTTTIANNLTSTVQAFTDDDYQLPYVVGNGTEGCLPAFPPQVFTLPQYGYATLNRDNTENPTERSSFFCLEYFPSKMLRTGNNFEFTYNFEEVPFHSSFAPSQNLFKLANPLVDQYLYRFVSTNNTGGVQFNKNLAGRYANTYKNWFPGPMGRTQGWNLGSGVNRASVSAFATTNRMELEGASYQVPPQPNGMTNNLQGSNTYALENTMIFNSQPANPGTTATYLEGNMLITSESETQPVNRVAYNVGGQMATNNQSSTTAPATGTYNLQEIVPGSVWMERDVYLQGPIWAKIPETGAHFHPSPAMGGFGLKHPPPMMLIKNTPVPGNITSFSDVPVSSFITQYSTGQVTVEMEWELKKENSKRWNPEIQYTNNYNDPQFVDFAPDSTGEYRTTRPIGTRYLTRPL

SEQ ID NO: 841 - protein, 723 aa, Artificial Sequence
  source: /note="Description of Artificial Sequence: Synthetic polypeptide"
MSFVDHPPDWLEEVGEGLREFLGLEAGPPKPKPNQQHQDQARGLVLPGYNYLGPGNGLDRGEPVNRADEVAREHDISYNEQLEAGDNPYLKYNHADAEFQEKLADDTSFGGNLGKAVFQAKKRVLEPFGLVEEGAKTAPTGKRIDDHFPKRKKARTEEDSKPSTSSDAEAGPSGSQQLQIPAQPASSLGADTMSAGGGGPLGDNNQGADGVGNASGDWHCDSTWMGDRVVTKSTRTWVLPSYNNHQYREIKSGSVDGSNANAYFGYSTPWGYFDFNRFHSHWSPRDWQRLINNYWGFRPRSLRVKIFNIQVKEVTVQDSTTTIANNLTSTVQVFTDDDYQLPYVVGNGTEGCLPAFPPQVFTLPQYGYATLNRDNTENPTERSSFFCLEYFPSKMLRTGNNFEFTYNFEEVPFHSSFAPSQNLFKLANPLVDQYLYRFVSTNNTGGVQFNKNLAGRYANTYKNWFPGPMGRTQGWNLGSGVNRASVSAFATTNRMELEGASYVPPQPNGMTNNLQGSNTYALENTMIFNSQPANPGTTATYLEGNMLITSESETQPVNRVAYNVGGQMATNNQSSTTAPATGTYNLQEIVPGSVWMEGDVYLQGPIWAKIPETGAHFHPSPAMGGFGLKHPPPMMLIKNTPVPGNITSFSDVPVSSFITQYSTGQVTVEMEWELKKENSKRWNPEIQYTNNYNDPQFVDFAPDSTGEYRTTRPIGTRYLTRPL

SEQ ID NO: 842 - protein, 724 aa, Artificial Sequence
  source: /note="Description of Artificial Sequence: Synthetic polypeptide"
MSFVDHPPDWLEEVGEGLREFLGLEAGPPKPKPNQQHQDQARGLVLPGYNYLGPGNGLDRGEPVNRADEVAREHDISYNEQLEAGDNPYLKYNHADAEFQEKLADDTSFGGNLGKAVFQAKKRVLEPFGLVEEGAKTAPTGKRIDDHFPKRKKVRTEEDSKPSTSSDAEAGPSGSQQLQIPAQPASSLGADTMSAGGGGPLGDNNQGADGVGNASGDWHCDSTWMGDRVVTKSTRTWVLPSYNNHQYREIKSGSVDGSNANAYFGYSTPWGYFDFNRFHSHWSPRDWQRLINNYWGFRPRSLRVKIFNIQVKEVTVQDSTTTIANNLTSTVQVFTDDDYQLPYVVGNGTEGCLPAFPPQVFTLPQYGYATLNRDNTENPTERSSFFCLEYFPSKMLRTGNNFEFTYNFEEVPFHSSFAPSQNLFKLANPLVDQYLYRFVSTNNTGGVQFNKNLAGRYANTYKNWFPGPMGRTQGWNLGSGVNRASVSAFATTNRMELEGASYQVPPQPNGMTNNLQGSNTYALENTMIFNSQPANPGTTATYLEGNMLITSESETQPVNRVAYNVGGQMATNNQSSTTAPATGTYNLQEIVPGSVWMERDVYLQGPIWAKIPETGAHFHPSPAMGGFGLKHPPPMMLIKNTPVPGNITSFSDVPVSSFITQYSTGQVTVEMEWELKKENSERWNPEIQYTNNYNDPQFVDFAPDSTGEYRTTRPIGTRYLTRPL

SEQ ID NO: 843 - protein, 724 aa, Artificial Sequence
  source: /note="Description of Artificial Sequence: Synthetic polypeptide"
MSFVDHPPDWLEEVGEGLREFLGLEAGPPKPKPNQQHQDQARGLVLPGYNYLGPGNGLDRGEPVNRADEVAREHDISYSEQLEAGDNPYLKYNHADAEFQEKLADDTSFGGNLGKAVFQAKKRVLEPFGLVEEGAKTAPTGKRIDDHFPKRKKARTEEDSKPSTSSDAEAGPSGSQQLQIPAQPASSLGADTMSAGGGGPLGDNNQGADGVGNASGDWHCDSTWMGDRVVTKSTRTWVLPSYNNHQYREIKSGSVDGSNANAYFGYSTPWGYFDFNRFHSHWSPRDWQRLINNYWGFRPRSLRVKIFNIQVKEVTVQDSTTTIANNLTSTVQVFTDDDYQLPYVVGNGTEGCLPAFPPQVFTLPQYGYATLNRDNTENPTERSSFFCLEYFPSKMLRTGNNFEFTYNFEEVPFHSSFAPSQNLFKLANPLVDQYLYRFVSTNNTGGVQFNKNLAGRYANTYKNWFPGPMGRTQGWNLGSGVNRASVSAFATTNRMELEGASYQVPPQPNGMTNNLQGSNTYALENTMIFNSQPANPGTTATYLEGNMLITSESETQPVNRVAYNVGGQMATNNQSSTTAPATGTYNLQEIVPGSVWMERDVYLQGPIWAKIPETGAHFHPSPAMGGFGLKHPPPMMLIKNTPVPGNITSFSDVPVSSFITQYSTGQVTVEMEWELKKENSKRWNPEIQYTNNYNDPQFVDFAPDSTGEYRTARPIGTRYLTRPL

SEQ ID NO: 844 - protein, 724 aa, Artificial Sequence
  source: /note="Description of Artificial Sequence: Synthetic polypeptide"
MSFVDHPPDWLEEVGEGLREFLGPEAGPPKPKPNQQHQDQARGLVLPGYNYLGPGNGLDRGEPVNRADEVAREHDISYNEQLEAGDNPYLKYNHADAEFQEKLADDTSFGGNLGKAVFQAKKRVLEPFGLVEEGAKTAPTGKRIDDHFPKRKKARTEEDSKPSTSSDAEAGPSGSQQLQIPAQPASSLGADTMSAGGGGPLGDNNQGADGVGNASGDWHCDSTWMGDRVVTKSTRTWVLPSYNNHQYREIKSGSVDGSNANAYFGYSTPWGYFDFNRFHSHWSPRDWQRLINNYWGFRPRSLRVKIFNIQVKEVTVQDSTTTIANNLTSTVQVFTDDDYQLPYVVGNGTEGCLPAFPPQVFTLPQYGYATLNRDNTENPTERSSFFCLEYFPSKMLRTGNNFEFTYNFEEVPFHSSFAPSQNLFKLANPLVDQYLYRFVSTNNTGGVQFNKNLAGRYANTYKNWFPGPMGRTQGWNLGSGVNRASVSAFATTNRMELEGASYQVPPQPNGMTNNLQGSNTYALENTMIFNSQPANPGTTATYLEGNMLITSESETQPVNRVAYNVGGQMTTNNQSSTTAPATGTYNLQEIVPGSVWMERDVYPQGPIWAKIPETGAHFHPSPAMGGFGLKHPPPMMLIKNTPVPGNITSFSDVPVSSFITQYSTGQVTVEMEWELKKENSKRWNPEIQYTNNYNDPQFVDFAPDSTGEYRTTRPIGTRYLTRPL

SEQ ID NO: 845 - protein, 724 aa, Artificial Sequence
  source: /note="Description of Artificial Sequence: Synthetic polypeptide"
MSFVDHPPDWLEEVGEGLREFLGLEAGPPKPKPNQQHQDQARGLVLPGYNYLGPGNGLDRGEPVNRADEVAREHDISYNEQLEAGDNPYLKYNHADAEFQEKLADDTSFGGNLGKAVFQAKKRVLEPFGLVEEGAKTAPTGKRIDDHFPKRKKARTEEDSKPSTSSDAEAGPSGSQQLQIPAQPASSLGADTMSAGGGGPLGDNNQGADGVGNASGDWHCDSTWMGDRVVTKSTRTWVLPSYNNHQYREIKSGSVDGSNANAYFGYSTPWGYFDFNRFHSHWSPRDWQRLINNYWGFRPRSLRVKIFNIQVKEVTVQDSTTTIANNLTSTVQVFTDDDYQLPYVVGNGTEGCLPAFPPQVFTLPQYGYATLNRDNTENPTERSSFLCLEYFPSKMLRTGNNFEFTYNFEEVPFHSSFAPSQNLFKLANPLVDQYLYRFVSTNNTGGVQFNKNLAGRYANTYKNWFPGPMGRTQGWNLGSGVNRASVSAFATTNRMELEGASYQVPPQPNGMTNNLQGSNTYALENTMIFNSQPANPGTTATYLEGNMLITSESETQPVNRVAYNVGGQMATNNQSSTTAPATGTYNLQEIVPGSVWMKRDVYLQGPIWAKIPETGAHFHPSPAMGGFGLKHPPPMMLIKNTPVPGNITSFSDVPVSSFITQYSTGQVTVEMEWELKKENSKRWNPEIQYTNNYNDPQFVDFAPDSTGEYRTTRPIGTRYLTRPL

SEQ ID NO: 846 - protein, 724 aa, Artificial Sequence
  source: /note="Description of Artificial Sequence: Synthetic polypeptide"
MSFVDHPPDWLEEVGEGLREFLGLEAGPPKPKPNQQHQDQARGLVLPGYNYLGPGNGLDRGEPVNRADEVAREHDISYNEQLEAGDNPYLKYNHADAEFQEKLADDTSFGGNLGKAVFQAKKRVLEPFGLVEEGAKTAPTGKRIDDHFPKRKKARTEEDSKPSTPSDAEAGPSGSQQLQIPAQPASSLGADTMSAGGGGPLGDNNQGADGVGNASGDWHCDSTWMGDRVVTKSTRTWVLPSYNNHQYREIKSGSVDGSNANAYFGYSTPWGYFDFNRFHSHWSPRDWQRLINNYWGFRPRSLRVKIFNIQVKEVTVQDSTTTIANNLTSTVQVFTDDDYQLPYVVGNGTEGCLPAFPPQVFTLPQYGYATLNRDNTENPTERSSFFCLEYFPSKMLRTGNNFEFTYNFEEVPFHSSFAPSQNLFKLANPLVDQYLYRFVSTNNTGGVQFNKNLAGRYANTYKNWFPGPMGRTQGWNLGSGVNRASVSAFATTNRMELEGASYQVPPQPNGMTNNLQGSNTYALENTMIFNSQPANPGTTATYLEGNMLITSESETQPVNRVAYNVGGQMATNNQSSTTAPATGTYNLQEIVPGSVWMERDVYLQGPIWAKIPETGAHFHPSPAMGGFGLKHPPPMMLIKNTPVPGNITSFSDVPVSSFITQYSTGQVTVEMEWELKKENSKRWNPEIQYTNNYNDPQFVDFAPDSTGEYRTTRPIGTRYLTRPL

SEQ ID NO: 847 - protein, 724 aa, Artificial Sequence
  source: /note="Description of Artificial Sequence: Synthetic polypeptide"
MSFVDHPPDWLEEVGEGLREFLGLEAGPPKPKPNQQHQDQARGLVLPGYNYLGPGNGLDRGEPVNRADEVAREHDISYNEQLEAGDNPYLKYNHADAEFQEKLADDTSFGGNLGKAVFQAKKRVLEPFGLVEEGAKTAPTGKRIDDHFPKRKKARTEEDSKPSTSSDAEAGPSGSQQLQIPAQPASSLGADTMSAGGGGPLGDNNQGADGVGNASGDWHCDSTWMGDRVVTKSTRTWVLPSYNNHQYREIKSGSVDGSNANAYFGYSTPWGYFDFNRFHSHWSPRDWQRLINNYWGFRPRSLRVKIFNIQVKEVTVQDSTTTIANNLTSTVQVFTDDDYQLPYVVGNGTEGCLPAFPPQVFTLPQYGYATLNRDNTENPTERSSFFCLEYFPSKMLRTGNNFEFTYNFEEVPFHSSFAPSQNLFKLANPLVDQYLYRFVSTNNTGGVQFNKNLAGRYANTHKNWFPGPMGRTQGWNLGSGVNRASVSAFATTNRMELEGASYQVPPQSNGMTNNLRGSNTYALENTMIFNSQPANPGTTATYLEGNMLITSESETQPVNRVAYNVGGQMATNNQSSTTAPATGTYNLQEIVPGSVWMERDVYLQGPIWAKIPETGAHFHPSPAMGGFGLKHPPPMMLIKNTPVPGNITSFSDVPVSSFITQYSTGQVTVEMEWELKKENSKRWNPEIQYTNNYNDPQFVDFAPDSTGEYRTTRPIGTRYLTRPL

SEQ ID NO: 848 - protein, 724 aa, Artificial Sequence
  source: /note="Description of Artificial Sequence: Synthetic polypeptide"
MSFVDHPPDWLEEVGEGLREFLGLEAGPPKPKPNQQHQDQARGLVLPGYNYLGPGNGLDRGEPVNRADEVAREHDISYNEQLEAGDNPYLKYNHADAEFQEKLADDTSFGGNLGKAVFQAKKRVLEPFGLVEEGAKTAPTGKRIDDHFPKRKKARTEEDSKPSTSSDAEAGPSGSQQLQIPAQPASSLGADTMSAGGGGPLGDNNQGADGVGNASGDWHCDSTWMGDRVVTKSTRTWVLPSYNNHQYREIKSGSVDGSNANAYFGYSTPWGYFDFNRFHSHWSPRDWQRLINNYWGFRPRSLRVKIFNIQVKEVTVQDSTTTIANNLTSTVQVFTDDDYQLPYVVGNGTEGCLPAFPPQVFTLPQYGYATLNRDNTENPTERSSFFCLEYFPSKMLRTGNNFEFTYNFEEVPFHSSFAPSQNLFKLANPLVDQYLYRFVSTNNTGGVQFNKNLAGRYANTYKNWFPGPMGRTQGWNLGSGVNRASVSAFATTNRMELEGASYQVPPQPNGMTNNLQGSNTYALENTMIFNSQPANPGTTATYLEGNMLITSESETQPVNRVAYSVGGQMATNNQSSTTAPTTGTYNLQEIVPGSVWMERDVYLQGPIWAKIPETGAHFHPSPAMGGFRLKHPPPMMLIKNTPVPGNITSFSDVPVSSFITQYSTGQVTVEMEWELKKENSKRWNPEIQYTNNYNDPQFVDFAPDSTGEYRTTRPIGTRYLTRPL

SEQ ID NO: 849 - protein, 724 aa, Artificial Sequence
  source: /note="Description of Artificial Sequence: Synthetic polypeptide"
MSFVDHPPDWLEEVGEGLREFLGLEAGPPKPKPNQQHQDQARGLVLPGYNYLGPGNGLDRGEPVNRADEVAREHDISYNEQLEAGDNPYLKYNHADAEFQEKLADDTSFGGNLGKAVFQAKKRVLEPFGLVEEGAKTAPTGKRIDDHFPKRKKARTEEDSKPSTSSDAEAGPSGSQQLQIPAQPASSLGADTMSAGGGGPLGDNNQGADGVGNASGDWHCDSTWMGDRVVTKSTRTWVLPSYNNHQYREIKSGSVDGSNANAYFGYSTPWGYFDFNRFHSHWSPRDWQRLINNYWGFRPRSLRVKIFNIQVKEVTVQDSTTTIANNLTSTVQVFTDDDYQLPYVVGNGTEGCLPAFPPQVFTLPQYGYATLNRDNTENPTERSSFFCLEYFPSKMLRTGNNFEFTYNFEEVPFHSSFAPSQNLFKLANPLVDQYLYRFVSTNNTGGVQFNKNLAGRYANTYKNWFPGPMGRTQGWNLGSGVNRASVSAFAATNRMELEGASYQVPPQPNGMTNNLQGSNTYALENTMIFNSQPANPGTTATYLEGNMLITSESETQPVNRVAYNVGGQMATNNQSSTTAPATGTYNLQEIVPGGVWMERDVYLQGPIWAKIPETGAHFHPSPAMGGFGLKHPPPMMLIKNTPVPGNTTSFSDVPVSSFITQYSTGQVTVEMEWELKKENSKRWNPEIQYTNNYNDPQFVDFAPDSTGEYRTTRPIGTRYLTRPL

SEQ ID NO: 850 - protein, 724 aa, Artificial Sequence
  source: /note="Description of Artificial Sequence: Synthetic polypeptide"
MSFVDHPPDWLEEVGEGLREFLGLEAGPPKPKPNQQHQDQARGLVLPGYNYLGPGNGLDRGEPVNRADEVAREHDISYNEQLEAGDNPYLKYNHADAEFQEKLADDTSFGGNLGKVVFQAKKRVLEPFGLVEEGAKTAPTGKRIDDHFPKRKKARTEEDSKPSTSSDAEAGPSGSQQLQIPAQPASSLGADTMSAGGGGPLGGNNQGADGVGNASGDWHCDSTWMGDRVVTKSTRTWVLPSYNNHQYREIKSGSVDGSNANAYFGYSTPWGYFDFNRFHSHWGPRDWQRLINNYWGFRPRSLRVKIFNIQVKEVTVQDSTTTIANNLTSTVQVFTDDDYQLPYVVGNGTEGCLPAFPPQVFTLPQYGYATLNRDNTENPTERSSFFCLEYFPSKMLRTGNNFEFTYNFEEVPFHSSFAPSQNLFKLANPLVDQYLYRFVSTNNTGGVQFNKNLAGRYANTYKNWFPGPMGRTQGWNLGSGVNRASVSALATTNRMELEGASYQVPPQPNGMTNNLQGSNTYALENTMIFNSQPANPGTTATYLEGNMLITSESETQPVNRVAYNVGGQMATNNQSSTTAPATGTYNLQEIVPGSVWMERDVYLQGPIWAKIPETGAHFHPSPAMGGFGLKHPPPMMLIKNTPVPGNITSFSDVPVSSFITQYSTGQVTVEMEWELKKENSKRWNPEIQYTNNYNDPQFVDFAPDSTGEYRTTRPIGTRYLTRPL

SEQ ID NO: 851 - protein, 723 aa, Artificial Sequence
  source: /note="Description of Artificial Sequence: Synthetic polypeptide"
MSFVDHPPDWLEEVGEGLREFLGLEAGPPKPKPNQQHQDQARGLVLPGYNYLGPGNGLDRGEPVNRADEVAREHDISYNEQLEAGDNPYLKYNHADAEFQEKLADDTSFGGNLGKAVFQAKKRVLEPFGLVEEGAKTAPTGKRIDDHFPKRKKARTEEDSKPSTSSDAEAGPSGSQQLQIPAQPASSLGADTMSAGGGGPLGDNNQGADGVGNASGDWHCDSTWMGDRVVTKSTRTWVLPSYNNHQYREIKSGSVDGSNANAYFGYSTPWGYFDFNRFHSHWSPRDWQRLINNYWGFRPRSLRVKIFNIQVKEVTVQDSTTTIANNLTSTVQVFTDDDYQLPYVVGNGTEGCLPAFPPQVFTLPQYGYATLNRDNTENPTERSSFFCLEYFPSKMLRTGNNFEFTYNFEEVPFHSSFAPSQNLFKLANPLVDQYLYRFVSTNNTGGVQFNKNLAGRYANTYKNWFPGPMGRTQGWNLGSGVNRASVSAFATTNRMELEGASYQVPPQPNGMTNNLQGSNTYALENTMIFNSQPANPGTTATYLEGNMLITSESETQPVNRVAYNVGGQMATNNQSSTTAPATGTYNLQEIVPGSVWMERDVYLQGPIAKIPETGAHFHPSPAMGGFGLKHPPPMMLIKNTPVPGNITSFSDVPVSSFITQYSTGQVTVEMEWELKKENSKRWNPEIQYTNNYNDPQFVDFAPDSTGECRTTRPIGTRYLTRPL

SEQ ID NO: 852 - protein, 724 aa, Artificial Sequence
  source: /note="Description of Artificial Sequence: Synthetic polypeptide"
MSFVDHPPDWLEEVGEGLREFLGLEAGPPKPKPNQQHQDQARGLVLPGYNYLGPGNGLDRGEPVNRADEVAREHDISYNEQLEAGDNPYLKYNHADAEFQEKLADDTSFGGNLGKAVFQAKKRVLEPFGLVEEGAKTAPTGKRIDDHFPKRKKARTEEDSKPSTSSDAEAGPSGSQQLQIPAQPASSLGADTMSAGGGGPLGDNNQGADGVGNASGDWHCDSTWMGDRVVTKSTRTWVLPSYNNHQYREIKSGSVDGSNANAYFGYSTPWGYFDFNRFHSHWSPRDWQRLINNYWGFRPRSLRVKILNIQVKEVTVQDSTTTIANNLTSTVQVFTDDDYQLPYVVGNGTEGCLPAFPPQVFTLPQYGYATLNRDNTENPTERSSFFCLEYFPSKMLRTGNNFEFTYNFEEVPFHSSFAPSQNLFKLANPLVGQYLYRFVSTNNTGGVQFNENLAGRYANTYKNWFPGPMGRTQGWNLGSGVNRASVSAFATTNRMELEGASYQVPPQPNGMTNNLQGSNTYALENTMIFNSQPANPGTTATYLEGNMLITSESETQPVNRVAYNVGGQMATNNQSSTTAPATGTYNLQEIVPGSVWMERDVYLQGPIWAKIPETGAHFHPSPAMGGFGLKHPPPMMLIKNTPVPGNITSFSDVPVSSFITQYSTGQATVEMEWELKKENSKRWNPEIQYTNNYNDPQFVDFAPDSTGEYRTTRPIGTRYLTRPL

SEQ ID NO: 853 - protein, 724 aa, Artificial Sequence
  source: /note="Description of Artificial Sequence: Synthetic polypeptide"
MSFVDHPPDWLEEVGEGLREFLGLEAGPPKPKPNQQHQDQARGLVLPGYNYLGPGNGLDRGEPVNRADEVAREHDISYNEQLEAGDNPYLKYNHADAEFQEKLADDTSFGGNLGKAVFQAKKRVLEPFGLVEEGAKTAPTGKRIDDHFPKRKKARTEEDSKPSTSSDAEAGPSGSQQLQIPAQPASSLGADTMSAGGGGPLGDNNQGADGVGNASGDWHCDSTWMGDRVVTKSTRTWVLPSYNNHQYREIKSGSVDGSNANAYFGYSTPWGYFDFNRFHSHWSPRDWQRLINNYWGFRPRSLRVKIFNIQVKEVTVQDSTTIIANNLTSTVQVFTDDDYQLPYVVGNGTEGCLPAFPPQVFTLPQYGYATLNRDNTENPTERSSFFCLEYFPSKMLRTGNNFEFTYNFEEVPFHSSFAPSQNLFKLANPLVDQYLYRFVSTNNTGGVQFNKNLAGRYANTYKNWFPGPMGRTQGWNLGSGVNRASVSAFATTNRMELEGASYQVPPQPNGMTNNLQGSNTYALENTMIFNSQPANPGTTATYLEGNMLITSESETQPVNRVAYNVGGQMATNNQSSTTAPATGTYNLQEIVPGSVWMERDVYLQGPIWAKIPETGAHFHPSPAMGGFGLKHPPPMMLIKNTPVPGNITSFSDVPVSSFITQYSTGQVTVEMEWELKKENSKRWNPEIQYTNNYNDPQFVDFAPDSTGEYRTTRPIGTRYLTRPL

SEQ ID NO: 854 - protein, 724 aa, Artificial Sequence
  source: /note="Description of Artificial Sequence: Synthetic polypeptide"
MSFVDHPPDWLEEVGEGLREFLGLEAGPPKPKPNQQHQDQARGLVLPGYNYLGPGNGLDRGEPVNRADEVAREHDISYNEQLEAGDNPYLKYNHADAEFQEKLADDTSFGGNLGKAVFQAKKRVLEPFGLVEEGAKTAPTGKRIDDHFPKRKKARTEEDSKPSTSSDAEAGPSGSQQLQIPAQPASSLGADTMSAGGGGPLGDNNQGADGVGNASGDWHCDSTWMGDRVVTKSTRTWVLPSYNNHQYREIKSGSVDGSNANAYFGYSTPWGYFDFNRFHSHWSPRDWQRLINNYWGFRPRSLRVKIFNIQVKEVTVQDSTTTIANNLTSTVQVFTDDDYQLPYVVGNGTEGCLPAFPPQVFTLPQYGYATLNRDNTENPTERSSFFCLEYFPSKMLRTGNNFEFTYNFEEVPFHSSFAPSQNLFKLANPLVDQYLYRFVSTNNTGGVQFNKNLAGRYANTYKNWFPGPMGRTQGWNLGSGVNRASVSAFATTNRMELEGASYQVPPQPNGMTNNLQGSNTYALENTMIFNSQPANPGTTATYLEGNMLITSESETQPVNRVAYNVGGQMATNNQSSTTAPATGTYNLQEIVPGSVWMERDVYLQGPIWAKIPETGAHFHPSPAMGGFGLKHPPPMMLIKNTPVPGNITSLSDVPVSSFITQYSTGQVTVEMEWELKKENSKRWNPEIQYTNNYNDPQFVDFAPDSTGEYRTTRPIGTRYLTRPL

SEQ ID NO: 855 - protein, 724 aa, Artificial Sequence
  source: /note="Description of Artificial Sequence: Synthetic polypeptide"
MSFVDHPPDWLEEVGEGLREFLGLEAGPPKPKPNQQHQDQARGLVLPGYNYLGPGNGLDRGEPANRADEVAREHDISYNEQLEAGDNPYLKYNHAGAEFQEKLADDTSFGGNLGKAVFQAKKRVLEPFGLVEEGAKTAPTGKRIDDHFPKRKKARTEEDSKPSTSSDAEAGPSGSQQLQIPAQPASSLGADTMSAGGGGPLGDNNQGADGVGNASGDWHCDSTWMGDRVVTKSTRTWVLPGYNNHQYREIKSGSVDGSNANAYFGYSTPWGYFDFNRFHSHWSPRDWQRLINNYWGFRPRSLRVKIFNIQVKEVTVQDSTTTIANNLTSTVQVFTDDDYQLPYVVGNGTEGCLPAFPPQVFTLPQYGYATLNRDNTENPTERSSFFCLEYFPSKMLRTGNNFEFTYNFEEVPFHSSFAPSQNLFKLANPLVDQYLYRFVSTNNTGGVQFNKNLAGRYANTYKNWFPGPMGRTQGWNLGSGVNRASVSAFATTNRMELEGASYQVPPQPNGMTNNLQGSNTYALENTMIFNSQPANPGTTATYLEGNMLITSESETQPVNRVAYNVGGQMATNNQSSTTAPATGTYNLQEIVPGSVWMERDVYLQGPIWAKIPETGAHFHPSPAMGGFGLKHPPPMMLIKNTPVPGNITSFSDVPVSSFITQYSTGQVTVEMEWELKKENSKRWNPEIQYTNNYNDPQFVDFAPDSTGEYRTTRPIGTRYLTRPL

SEQ ID NO: 856 - protein, 724 aa, Artificial Sequence
  source: /note="Description of Artificial Sequence: Synthetic polypeptide"
MSFVDHPPDWLEEVGEGLREFLGLEAGPPKPKPNQQHQDQARGLVLPGYNYLGPGNGLDRGEPVNRADEVAREHDISYNEQLEAGDNPYLKYNHADAEFQEKLADDTSFGGNLGKAVFQAKKRVLEPFGLVEEGAKTAPTGKRIDDHFPKRKKARTEEDSKPPTSSDAEAGPSGSQQLQIPAQPASSLGADTMSAGGGGPLGDNNQGADGVGNASGDWHCDSTWMGDRVVTKSTRTWVLPSYNNHQYREIKSGSVDGSNANAYFGYSTPWGYFDFNRFHSHWSPRDWQRLINNYWGFRPRSLRVKIFNIQVKEVTVQDSATTIANNLTSTVQVFTDDDYQLPYVVGNGTEGCLPAFPPQVFTLPQYGYATLNRDNTENPTERSSFFCLEYFPSKMLRTGNNFEFTYNFEEVPFHSSFAPSQNLFKLANPLVDQYLYRFVSTNNTGGVQFNKNLAGRYANTYKNWFPGPMGRTQGWNLGSGVNRASVSAFATTNRMELEGASYQVPPQPNGMTNNLQGSNTYALENTMIFNSQPANPGTTATYLEGNMLITSESETQPVNRVAYNVGGQMATNNQSSTTAPATGTYNLQEIVPGSVWMERDVYLQGPIWAKIPETGAHFHPSPAMGGFGLKHPPPMMLIKNTPVPGNITSFSDVPVSSFITQYSTGQVTVEMEWELKKENSKRWNPEIQYTNNYNDPQFVDFAPDSTGEYRTTRPIGTRYLTRPL

SEQ ID NO: 857 - protein, 724 aa, Artificial Sequence
  source: /note="Description of Artificial Sequence: Synthetic polypeptide"
MSFVDHPPDWLEEVGEGLREFLGLEAGPPKPKPNQQHQDQARGLVLPGYNYLGPGNGLDRGEPVNRADEVAREHDISYNEQLEAGDNPYLKYNHADAEFQEKLADDTSFGGNLGKAVFQAKKRVLEPFGLVEEGAKTAPTGKRIDDHFPKRKKARTEEDSKPSTSSDAEAGPSGSQQPQIPAQPASSLGADTMSAGGGGPLGDNNQGADGVGNASGDWHCDSTWMGDRVVTKSTRTWVLPSYNNHQYREIKSGSVDGSNANAYFGYSTPWGYFDFNRFHSHWSPRDWQRLINNYWGFRPRSLRVKIFNIQVKEVTVQDSTTTIANNLTSTVQVFTDDDYQLPYVVGNGTEGCLPAFPPQVFTLPQYGYATLNRDNTENPTERSSFFCLEYFPSKMLRTGNNFEFTYNFEEVPFHSSFAPSQNLFKLANPLVDQYLYRFVSTNNTGGVQFNKNLAGRYANTYKNWFPGPMGRTQGWNLGSGVNRASVSAFATTNRMELEGASYQVPPQPNGMTNNLQGSNTYALENTMIFNSQPANPGTTATYLEGNMLITSESETQPVNRVAYNVGGQMATNNQSSTTAPATGTYNLQEIVPGSVWMERDVYLQGPIWAKIPETGAHFHPSPAMGGFGLKHPPPMMLIKNTPAPGNITSFSDVPVSSFITQYSTGQVTVEMEWELKKENSKRWNPEIQYTNNYNDPQFVDFAPDSTGEYRTTRPIGTRYLTRPL

SEQ ID NO: 858 - protein, 724 aa, Artificial Sequence
  source: /note="Description of Artificial Sequence: Synthetic polypeptide"
MSFVDHPPDWLEEVGEGLREFLGLEAGPPKPKPNQQHQDQARGLVLPGYNYLGPGNGLDRGEPVNRADEVAREHDISYNEQLEAGDNPYLKYNHADAEFQEKLADDTSFGGNLGKAVFQAKKRVLEPFGLVEEGAKTAPTGKRIDDHFPKRKKARTEEDSKPPTSSDAEAGPSGSQQLQIPAQPASSLGADTMSAGGGGPLGDNNQGADGVGNASGDWHCDSTWMGDRVVTKSTRTWVLPSYNNHQYREIKSGSVDGSNANAYFGYSTPWGYFDFNRFHSHWSPRDWQRLINNYWGFRPRSLRVKIFNIQVKEVTVQDSTTTIANNLTSTVQVFTDDDYQLPYVVGNGTEGCLPAFPPQVFTLPQYGYATLNRDNTENPTERSSFFCLEYFPSKMLRTGNNFEFTYNFEEVPFHSSFAPSQNLFKLANPLVDQYLYRFVSTNNTGGVQFNKNLAGRYANTYKNWFPGPMGRTQGWNLGSGVNRASVSAFATTNRMELEGASYQVPPQPNGMTNNLQGSNTYALENTMIFNSQPANPGTTATYLEGNMLITSESETQPVNRVAYNVGGQMATNNQSSTTAPATGTYNLQEIVPGSVWMERDVYLQGPIWAKIPETGAHFHPSPAMGGFGLKHPPPMMLIKNTPVPGNITSFSDVPVSSFITQYSTGQVTVEMEWELKKENSKRWNPEIQYTNNYNDPQFVDFAPDSTGEYRTTRPIGTRYLTRPL

SEQ ID NO: 859 - protein, 724 aa, Artificial Sequence
  source: /note="Description of Artificial Sequence: Synthetic polypeptide"
MSFVDHPPDWLEEVGEGLREFLGLEAGPPKPKPNQQHQDQARGLVLPGYNYLGPGNGLDRGEPVNRADEVAREHDISYNEQLEAGDNPYLKYNHADAEFQEKLADDTSFGGNLGKAVFQAKKRVLEPFGLVEEGAKTAPTGKRIDDHFPKRKKARTEEDSKPPTSSDAEAGPSGSQQLQIPAQPASSLGADTMSAGGGGPLGDNNQGADGVGNASGDWHCDSTWMGDRVVTKSTRTWVPPSYNNHQYREIKSGSVDGSNANAYFGYSTPWGYFDFNRFHSHWSPRDWQRLINNYWGFRPRSLRVKIFNIQVKEVTVQDSTTTIANNLTSTVQVFTDDDYQLPYVVGNGTEGCLPAFPPQVFTLPQYGYATLNRDNTENPTERSSFFCLEYFPSKMLRTGNNFEFTYNFEEVPFHSSFAPSQNLFKLANPLVDQYLYRFVSTNNTGGVQFNKNLAGRYANTYKNWFPGPMGRTQGWNLGSGVNRASVSAFATTNRMELEGASYQVPPQPNGMTNNLQGSNTYALENTMIFNSQPANPGTTATYLEGNMLITSESETQPVNRVAYNVGGQMATNNQSSTTAPATGTYNLQEIVPGSVWMERDVYLQGPIWAKIPETGAHFHPSPAMGGFGLKHPPPMMLIKNTPVPGNITSFSDVPVSSFITQYSTGQVAVEMEWELKKENSKRWNPEIQYTNNYNDPQFVDFAPDSTGEYRTTRPIGTRYLTRPL

SEQ ID NO: 860 - protein, 724 aa, Artificial Sequence
  source: /note="Description of Artificial Sequence: Synthetic polypeptide"
MSFVDHPPDWLEEVGEGLREFLGLEAGPPKPKPNQQHQDQARGLVLPGYNYLGPGNGLDRGEPVNRADEVAREHDISYNEQLEAGDNPYLKYNHADAEFQEKLADDTSFGGNLGKAVFQAKKRVLEPFGLVEEGAKTAPTGKRIDDHFPKRKKARTEEDSKPSTSSDAEAGPSGSQQLQIPAQPASSLGADTMSAGGGGPLGDNNQGADGVGNASGDWHCDSTWMGDRVVTKSTRTWVLPSYNNHQYREIKSGSVDGSNANAYFGYSTPWGYFDFNRFHSHWSPRDWQRLINNYWGFRPRSLRVKIFNIQVKEVTVQDSTTTIANNLTSTVQVFTDDDYQLPYVVGNGTEGCLPAFPPQVFTLPQYGYATLNRDNTENPTERSSFFCLEYFPSKMLRTGNNFEFTYNFEEVPFHSSFAPSQNLFKLANPLVDQYLYRFVSTNNTGGVQFNKNLAGRYANTYKNWFPGPMGRTQGWNLGSGVNRASVSAFATTNRMELEGASYQVPPQPNGMTNNLQGSNTYALENTMIFNSQPANPGTTATYLEGNMLITSESETQPVNRVAYNVGGQMATNNQSSTTAPATGTYNLQEIVPGSVWMERDVYLQGPIWAKIPETGAHFHPSPAMGGFGLKHPPPMMLIKNTPAPGNITSFSDVPVSSFITQYSTGQVTVEMEWELKKENSKRWNPEIQYTNNYNDPQFVDFAPDSTGEYRTTRPIGTRYLTRPL

SEQ ID NO: 861 - protein, 724 aa, Artificial Sequence
  source: /note="Description of Artificial Sequence: Synthetic polypeptide"
MSFVDHPPDWLEEVGEGLREFLGLEAGPPKPKPNQQHQDQARGLVLPGYNYLGPGNGLDRGEPVNRADEVAREHDISYNEQLEAGDNPYLKYNHADAEFQEKLADDTSFGGNLGKAVFQAKKRVLEPFGLAEEGAKTAPTGKRIDDHFPKRKKARTEEDSKPSTSSDAEAGPSGSQQLQIPAQPASSLGADTMSAGGGGPLGDNNQGADGVGNASGDWHCDSTWMGDRVVTKSTRTWVLPSYNNHQYREIKSGSVDGSNANAYFGYSTPWGYFDFNRFHSHWSPRDWQRLINNYWGFRPRSLRAKIFNIQVKEVTVQDSTTTIANNLTSTVQVFTDDDYQLPYVVGNGTEGCLPAFPPQVFTLPQYGYATLNRDNTENPTERSSFFCLEYFPSKMLRTGNNLEFTYNFEEVPFHSSFAPSQNLFKLANPLVDQYLYRFVSTNNTGGVQFNKNLAGRYANTYKNWFPGPMGRTQGWNLGSGVNRASVSAFATTNRMELEGASYQVPPQPNGMTNNLQGSNTYALENTMIFNSQPANPGTTATYLEGNMLITSESETQPVNRVVHNVGGQMATNNQSSTTAPATGTYNLQEIVPGSVWMERDVYLQGPIWAKIPETGAHFHPSPAMGGFGLKHPPPMMLIKNTPVPGNITSFSDVPVSSFITQYSTGQVTVEMEWELKKENSKRWNPEIQYTNNYNDPQFVDFAPDSTGEYRTTRPIGTRYLTRPL

SEQ ID NO: 862 - protein, 724 aa, Artificial Sequence
  source: /note="Description of Artificial Sequence: Synthetic polypeptide"
MSFVDHPPDWLEEVGEGLREFLGLEAGPPKPKPNQQHQDQARGLVLPGYNYLGPGNGLDRGEPVNRADEVAREHDISYNEQLEAGDNPYLKYNHADAEFQEKLADDTSFGGNLGKAVFQAKKRVLEPFGLVEEGAKTAPTGKRIDDHFPKRKKARTEEDSKPSTSSDAEAGPSGSQQLQIPAQPASSLGADTMSAGGGGPLGDNNQGADGVGNASGDWHCDSTWMGDRVVTKSTRTWVLPSYNNHQYREIKSGSVDGGNANAYFGYSTPWGYFDFNRFHSHWSPRDWQRLINNYWGFRPRSLRVKIFNIQVKEVTVQDSTTTIANNLTSTVQVFTDDDYQLPYVVGNGTEGCLPAFPPQVFTLPQYGYATLNRDNTENPTERSSFFCLEYFPSKMLRTGNNFEFTYNFEEVPFHSSFAPSQNLFKLANPLVDQYLYRFVSTNNTGGVQFNKNLAGRYANTYKNWFPGPMGRTQGWNLGSGVNRASVSAFATTNRMELEGASYQVPPQPNGMTNNLQGSNTYALENTMIFNSQPANPGTTATYLEGNMLITSESETQPVNRVAYNVGGQMATNNQSSTTAPATGTYNLQEIVPGSVWMERDVYLQGPIWAKIPETGAHFHPSPAMGGFGLKHPPPMMLIKNTPAPGNITSFSDVPVSSFITQYSTGQVTVEMEWELKKGNSKRWNPEIQYTNNYNDPQFVDFAPDSTGEYRTTRPIGTRYLTRPL

SEQ ID NO: 863 - protein, 724 aa, Artificial Sequence
  source: /note="Description of Artificial Sequence: Synthetic polypeptide"
MSFVDHPPDWLEEVGEGLREFLGLEAGPPKPKPNQQHQDQARGLVLPGYNYLGPGNGLDRGEPVNRADEVAREHDISYNEQLEAGDNPYLKYNHADAEFQEKLADDTSFGGNLGKAVFQAKKRVLEPFGLVEEGAKTAPTGKRIDDHFPKRKKARTEEDSKPSTSSDAEAGPSGSQQLQIPAQPASSLGADTMSAGGGGPLGDNNQGADGVGNASGDWHCDSTWMGDRVVTKSTRTWVLPSYNNHQYREIKSGSVDGSNANAYFGYSTPWGYFDFNRFHSHWSPRDWQRLINNYWGFRPRSLRVKIFNIQVKEVTVQDSTTTIANNLTSTVQVFTDDDYQLPYVVGNGTEGCLPAFPPQVFTLPQYGYATLNRDNTENPTERSSFFCLEYFPSKMLRTGNNFEFTYNFEEVPFHSSFAPSQNLFKLANPLVDQYLYRFVSTNNTGGVQFNKNLAGRYANTYKNWFPGPMGRTQGWNLGSGVNRASVSAFATTNRMELEGASYQVPPQPNGMTNNLQGSNTYALENTMIFNSQPANPGTTATYLEGNMLITSESETQPVNRVAYNVGGQMATNNQSSTTAPATGTYNLQEIVPGSVWMERDVYLQGPIWAKIPETGVHFHPSPAMGGFGLKHPPPMMLIKNTPVPGNITSFSDVPVSSFITQYSTGQVTVEMEWELKKENSKRWNPEIQYTNNYNDPQFVDFAPDSTGEYRTTRPIGTRYLTRPL

SEQ ID NO: 864 - protein, 724 aa, Artificial Sequence
  source: /note="Description of Artificial Sequence: Synthetic polypeptide"
  MOD_RES (551)..(551): Any amino acid
MSFVDHPPDWLEEVGEGLREFLGLEAGPPKPKPNQQHQDQARGLVLPGYNYLGPGNGLDRGEPVNRADEVAREHDISYNEQLEAGDNPYLKYNHADAEFQEKLADDTSFGGNLGKAVFQAKKRVLEPFGLVEEGAKTAPTGKRIDDHFPKRKKARTEEDSKPSTSSDAEAGPSGSQQLQIPAQPASSLGADTMSAGGGGPLGDNNQGADGVGNASGDWHCDSTWMGDRVVTKSTRTWVLPSYNNHQYREIKSGSVDGSNANAYFGYSTPWGYFDFNRFHSHWSPRDWQRLINNYWGFRPRSLRVKIFNIQVKEVTVQDSTTTIANNLTSTVQVFTDDDYQLPYVVGNGTEGCLPAFPPQVFTLPQYGYATLNRDNTENPTERSSFFCLEYFPSKMLRTGNNFEFTYNFEEVPFHSSFAPSQNLFKLANPLVDQYLYRFVSTNNTGGVQFNKNLAGRYANTYKNWFPGPMGRTQGWNLGSGVNRASVSAFATTNRMELEGASYQVPPQPNGMTNNLQGSNTYALENTMIFNSQPANPGTTATYLEGSMLITXESETQPVNRVAYNVGGQMATNNQSSTTAPATGTYNLQEIVPGSVWMERDVYLQGPIWAKIPETGAHFHPSPAMGGFGLKHPPPMMLIKNTPVPGNITSFSDVPVSSFITQYSTGQVTVEMEWELKKENSKRWNPEIQYTNNYNDPQFVDFAPDSTGEYRTTRPIGTRYLTRPL

SEQ ID NO: 865 - protein, 736 aa, Artificial Sequence; identical to SEQ ID NO: 39
  source: /note="Description of Artificial Sequence: Synthetic polypeptide"

SEQ ID NO: 866 - protein, 734 aa, Artificial Sequence; identical to SEQ ID NO: 57
  source: /note="Description of Artificial Sequence: Synthetic polypeptide"

SEQ ID NO: 867 - protein, 723 aa, Artificial Sequence
  source: /note="Description of Artificial Sequence: Synthetic polypeptide"
MSFVDHPPDWLEEVGEGLREFLGLEAGPPKPKPNQQHQDQARGLVLPGYNYLGPGNGLDRGEPVNRADEVAREHDISYNEQLEAGDNPYLKYNHADAEFQEKLADDTSFGGNLGKAVFQAKKRVLEPFGLVEEGAKTAPTGKRIDDHFPKRKKARTEEDSKPSTSSDAEAGPSGSQQLQIPAQPASSLGADTMSAGGGPLGDNNQGADGVGNASGDWHCDSTWMGDRVVTKSTRTWVLPSYNNHQYREIKSGSVDGSNANAYFGYSTPWGYFDFNRFHSHWSPRDWQRLINNYWGFRPRSLRVKIFNIQVKEVTVQDSTTTIANNLTSTVQVFTDDDYQLPYVVGNGTEGCLPAFPPQVFTLPQYGYATLNRDNTENPTERSSFFCLEYFPSKMLRTGNNFEFTYNFEEVPFHSSFAPSQNLFKLANPLVDQYLYRFVSTNNTGGVQFNKNLAGRYANTYKNWFPGPMGRTQGWNLGSGVNRASVSAFATTNRMELEGASYQVPPQPNGMTNNLQGSNTYALENTMIFNSQPANPGTTATYLEGNMLITSESETQPVNRVAYNVGGQMATNNQSSTTAPATGTYNLQEIVPGSVWMERDVYLQGPIWAKIPETGAHFHPSPAMGGFGLKHPPPMMLIKNTPVPGNITSFSDVPVSSFITQYSTGQVTVEMEWELKKENSKRWNPEIQYTNNYNDPQFVDFAPDSTGEYRTTRPIGTRYLTRPL

SEQ ID NO: 868 - protein, 743 aa, Artificial Sequence
  source: /note="Description of Artificial Sequence: Synthetic polypeptide"
MAADGYLPDWLEDNLSEGIREWWALKPGAPQPKANQQHQDNARGLVLPGYKYLGPGNGLDKGEPVNAADAAALEHDKAYDQQLKAGDNPYLKYNHADAEFQERLKEDTSFGGNLGRAVFQAKKRLLEPLGLVEEAAKTAPGKKRPVEQSPQEPDSSAGIGKSGAQPAKKRLNFGQTGDTESVPDPQPIGEPPAAPSGVGSLTMASGGGAPVADNNEGADGVGSSSGNWHCDSQWLGDRVITTSTRTWALPTYNNHLYKQISNSTSGGSSNDNAYFGYSTPWGYFDFNRFHCHFSPRDWQRLINNNWGFRPKRLNFKLFNIQVKEVTDNNGVKTIANNLTSTVQVFTDSDYQLPYVLGSAHEGCLPPFPADVFMIPQYGYLTLNDGSQAVGRSSFYCLEYFPSQMLRTGNNFQFSYEFENVPFHSSYAHSQSLDRLMNPLIDQYLYYLSRTINGSGQNQQTLKFSVAGPSNMAVQGRNYIPGPSYRQQRVSTTVTQNNNSEFAWPGASSWALNGRNSLMNPGPAMASHKEGEDRFFPLSGSLIFGKQGTGRDNVDADKVMITNEEEIKTTNPVATESYGQVATNHQSAQTLAVPFKAQAQTGWVQNQGILPGMVWQDRDVYLQGPIWAKIPHTDGNFHPSPLMGGFGMKHPPPQILIKNTPVPADPPTAFNKDKLNSFITQYSTGQVSVEIEWELQKENSKRWNPEIQYTSNYYKSNNVEFAVNTEGVYSEPRPIGTRYLTRNL

SEQ ID NO: 869 - DNA, 2232 bp, Artificial Sequence
  source: /note="Description of Artificial Sequence: Synthetic polynucleotide"
atggctgccgatggttatcttccagattggctcgaggacaaccttagtgaaggaattcgcgagtggtgggctttgaaacctggagcccctcaacccaaggcaaatcaacaacatcaagacaacgctcgaggtcttgtgcttccgggttacaaataccttggacccggcaacggactcgacaagggggagccggtcaacgcagcagacgcggcggccctcgagcacgacaaggcctacgaccagcagctcaaggccggagacaacccgtacctcaagtacaaccacgccgacgccgagttccaggagcggctcaaagaagatacgtcttttgggggcaacctcgggcgagcagtcttccaggccaaaaagaggcttcttgaacctcttggtctggttgaggaagcggctaagacggctcctggaaagaagaggcctgtagagcagtctcctcaggaaccggactcctccgcgggtattggcaaatcgggtgcacagcccgctaaaaagagactcaatttcggtcagactggcgacacagagtcagtcccagaccctcaaccaatcggagaacctcccgcagccccctcaggtgtgggatctcttacaatggcttcaggtggtggcgcaccagtggcagacaataacgaaggtgccgatggagtgggtagttcctcgggaaattggcattgcgattcccaatggctgggggacagagtcatcaccaccagcacccgaacctgggccctgcccacctacaacaatcacctctacaagcaaatctccaacagcacatctggaggatcttcaaatgacaacgcctacttcggctacagcaccccctgggggtattttgacttcaacagattccactgccacttctcaccacgtgactggcagcgactcatcaacaacaactggggattccggcctaagcgactcaacttcaagctcttcaacattcaggtcaaagaggttacggacaacaatggagtcaagaccatcgccaataaccttaccagcacggtccaggtcttcacggactcagactatcagctcccgtacgtgctcgggtcggctcacgagggctgcctcccgccgttcccagcggacgttttcatgattcctcagtacgggtatctgacgcttaatgatggaagccaggccgtgggtcgttcgtccttttactgcctggaatatttcccgtcgcaaatgctaagaacgggtaacaacttccagttcagctacgagtttgagaacgtacctttccatagcagctacgctcacagccaaagcctggaccgactaatgaatccactcatcgaccaatacttgtactatctctctagaactattaacggttctggacagaatcaacaaacgctaaaattcagtgtggccggacccagcaacatggctgtccagggaagaaactacatacctggacccagctaccgacaacaacgtgtctcaaccactgtgactcaaaacaacaacagcgaatttgcttggcctggagcttcttcttgggctctcaatggacgtaatagcttgatgaatcctggacctgctatggccagccacaaagaaggagaggaccgtttctttcctttgtctggatctttaatttttggcaaacaaggtaccggcagagacaacgtggatgcggacaaagtcatgataaccaacgaagaagaaattaaaactactaacccggtagcaacggagtcctatggacaagtggccacaaaccaccagagtgcccaaactttggcggtgccttttaaggcacaggcgcagaccggttgggttcaaaaccaaggaatacttccgggtatggtttggcaggacagagatgtgtacctgcaaggacccatttgggccaaaattcctcacacggacggcaactttcacccttctccgctgatgggagggtttggaatgaagcacccgcctcctcagatcctcatcaaaaacacacctgtacctgcggatcctccaacggccttcaacaaggacaagctgaactctttcatcacccagtattctactggccaagtcagcgtggagatcgagtgggagctgcagaaggaaaacagcaagcgctggaacccggagatccagtacacttccaactattacaagtctaataatgttgaatttgctgttaatactgaaggtgtatatagtgaaccccgccccattggcaccagatacctgactcgtaatctgtaa

SEQ ID NO: 870 - protein, 736 aa, Artificial Sequence
  source: /note="Description of Artificial Sequence: Synthetic polypeptide"
MAADGYLPDWLEDNLSEGIREWWALKPGAPQPKANQQHQDNARGLVLPGYKYLGPGNGLDKGEPVNAADAAALEHDKAYDQQLKAGDNPYLKYNHADAEFQERLKEDTSFGGNLGRAVFQAKKRLLEPLGLVEEAAKTAPGKKRPVEQSPQEPDSSAGIGKSGAQPAKKRLNFGQTGDTESVPDPQPIGEPPAAPSGVGSLTMASGGGAPVADNNEGADGVGSSSGNWHCDSQWLGDRVITTSTRTWALPTYNNHLYKQISNSTSGGSSNDNAYFGYSTPWGYFDFNRFHCHFSPRDWQRLINNNWGFRPKRLNFKLFNIQVKEVTDNNGVKTIANNLTSTVQVFTDSDYQLPYVLGSAHEGCLPPFPADVFMIPQYGYLTLNDGSQAVGRSSFYCLEYFPSQMLRTGNNFQFSYEFENVPFHSSYAHSQSLDRLMNPLIDQYLYYLSRTIQSSQTPRQTLKFSVAGPSNMAVQGRNYIPGPSYRQQRVSTTVTQNNNSEFAWPGASSWALNGRNSLMNPGPAMASHKEGEDRFFPLSGSLIFGKQGTGRDNVDADKVMITNEEEIKTTNPVATESYGQVATNHQSAQAQAQTGWVQNQGILPGMVWQDRDVYLQGPIWAKIPHTDGNFHPSPLMGGFGMKHPPPQILIKNTPVPADPPTAFNKDKLNSFITQYSTGQVSVEIEWELQKENSKRWNPEIQYTSNYYKSNNVEFAVNTEGVYSEPRPIGTRYLTRNL

SEQ ID NO: 871 - protein, 743 aa, Artificial Sequence
  source: /note="Description of Artificial Sequence: Synthetic polypeptide"
MAADGYLPDWLEDNLSEGIREWWALKPGAPQPKANQQHQDNARGLVLPGYKYLGPGNGLDKGEPVNAADAAALEHDKAYDQQLKAGDNPYLKYNHADAEFQERLKEDTSFGGNLGRAVFQAKKRLLEPLGLVEEAAKTAPGKKRPVEQSPQEPDSSAGIGKSGAQPAKKRLNFGQTGDTESVPDPQPIGEPPAAPSGVGSLTMASGGGAPVADNNEGADGVGSSSGNWHCDSQWLGDRVITTSTRTWALPTYNNHLYKQISNSTSGGSSNDNAYFGYSTPWGYFDFNRFHCHFSPRDWQRLINNNWGFRPKRLNFKLFNIQVKEVTDNNGVKTIANNLTSTVQVFTDSDYQLPYVLGSAHEGCLPPFPADVFMIPQYGYLTLNDGSQAVGRSSFYCLEYFPSQMLRTGNNFQFSYEFENVPFHSSYAHSQSLDRLMNPLIDQYLYYLSRTIILGTGTSQTLKFSVAGPSNMAVQGRNYIPGPSYRQQRVSTTVTQNNNSEFAWPGASSWALNGRNSLMNPGPAMASHKEGEDRFFPLSGSLIFGKQGTGRDNVDADKVMITNEEEIKTTNPVATESYGQVATNHQSAQTRTNPEAAQAQTGWVQNQGILPGMVWQDRDVYLQGPIWAKIPHTDGNFHPSPLMGGFGMKHPPPQILIKNTPVPADPPTAFNKDKLNSFITQYSTGQVSVEIEWELQKENSKRWNPEIQYTSNYYKSNNVEFAVNTEGVYSEPRPIGTRYLTRNL

SEQ ID NO: 872 - protein, 743 aa, Artificial Sequence
  source: /note="Description of Artificial Sequence: Synthetic polypeptide"
MAADGYLPDWLEDNLSEGIREWWALKPGAPQPKANQQHQDNARGLVLPGYKYLGPGNGLDKGEPVNAADAAALEHDKAYDQQLKAGDNPYLKYNHADAEFQERLKEDTSFGGNLGRAVFQAKKRLLEPLGLVEEAAKTAPGKKRPVEQSPQEPDSSAGIGKSGAQPAKKRLNFGQTGDTESVPDPQPIGEPPAAPSGVGSLTMASGGGAPVADNNEGADGVGSSSGNWHCDSQWLGDRVITTSTRTWALPTYNNHLYKQISNSTSGGSSNDNAYFGYSTPWGYFDFNRFHCHFSPRDWQRLINNNWGFRPKRLNFKLFNIQVKEVTDNNGVKTIANNLTSTVQVFTDSDYQLPYVLGSAHEGCLPPFPADVFMIPQYGYLTLNDGSQAVGRSSFYCLEYFPSQMLRTGNNFQFSYEFENVPFHSSYAHSQSLDRLMNPLIDQYLYYLSRTIILGTGTSQTLKFSVAGPSNMAVQGRNYIPGPSYRQQRVSTTVTQNNNSEFAWPGASSWALNGRNSLMNPGPAMASHKEGEDRFFPLSGSLIFGKQGTGRDNVDADKVMITNEEEIKTTNPVATESYGQVATNHQSAQNGGTSSSAQAQTGWVQNQGILPGMVWQDRDVYLQGPIWAKIPHTDGNFHPSPLMGGFGMKHPPPQILIKNTPVPADPPTAFNKDKLNSFITQYSTGQVSVEIEWELQKENSKRWNPEIQYTSNYYKSNNVEFAVNTEGVYSEPRPIGTRYLTRNL

SEQ ID NO: 873 - protein, 7 aa, Artificial Sequence
  source: /note="Description of Artificial Sequence: Synthetic peptide"
TLAVPFK

SEQ ID NO: 874 - protein, 7 aa, Artificial Sequence
  source: /note="Description of Artificial Sequence: Synthetic peptide"
KFPVALT

SEQ ID NO: 875 - protein, 6 aa, Artificial Sequence
  source: /note="Description of Artificial Sequence: Synthetic peptide"
LAVPFK

SEQ ID NO: 876 - protein, 5 aa, Artificial Sequence
  source: /note="Description of Artificial Sequence: Synthetic peptide"
AVPFK

SEQ ID NO: 877 - protein, 4 aa, Artificial Sequence
  source: /note="Description of Artificial Sequence: Synthetic peptide"
VPFK

SEQ ID NO: 878 - protein, 6 aa, Artificial Sequence
  source: /note="Description of Artificial Sequence: Synthetic peptide"
TLAVPF

SEQ ID NO: 879 - protein, 5 aa, Artificial Sequence
  source: /note="Description of Artificial Sequence: Synthetic peptide"
TLAVP

SEQ ID NO: 880 - protein, 4 aa, Artificial Sequence
  source: /note="Description of Artificial Sequence: Synthetic peptide"
TLAV

SEQ ID NO: 881 - protein, 7 aa, Artificial Sequence
  source: /note="Description of Artificial Sequence: Synthetic peptide"
SVSKPFL

SEQ ID NO: 882 - protein, 7 aa, Artificial Sequence
  source: /note="Description of Artificial Sequence: Synthetic peptide"
FTLTTPK

SEQ ID NO: 883 - protein, 7 aa, Artificial Sequence
  source: /note="Description of Artificial Sequence: Synthetic peptide"
MNATKNV

SEQ ID NO: 884 - protein, 7 aa, Artificial Sequence
  source: /note="Description of Artificial Sequence: Synthetic peptide"
QSSQTPR

SEQ ID NO: 885 - protein, 7 aa, Artificial Sequence
  source: /note="Description of Artificial Sequence: Synthetic peptide"
ILGTGTS

SEQ ID NO: 886 - protein, 7 aa, Artificial Sequence
  source: /note="Description of Artificial Sequence: Synthetic peptide"
TRTNPEA

SEQ ID NO: 887 - protein, 7 aa, Artificial Sequence
  source: /note="Description of Artificial Sequence: Synthetic peptide"
NGGTSSS

SEQ ID NO: 888 - protein, 7 aa, Artificial Sequence
  source: /note="Description of Artificial Sequence: Synthetic peptide"
YTLSQGW

SEQ ID NO: 889 - DNA, 21 bp, Artificial Sequence
  source: /note="Description of Artificial Sequence: Synthetic oligonucleotide"
aagtttcctgtggcgttgact

SEQ ID NO: 890 - DNA, 21 bp, Artificial Sequence
  source: /note="Description of Artificial Sequence: Synthetic oligonucleotide"
actttggcggtgccttttaag

SEQ ID NO: 891 - DNA, 21 bp, Artificial Sequence
  source: /note="Description of Artificial Sequence: Synthetic oligonucleotide"
agtgtgagtaagccttttttg

SEQ ID NO: 892 - DNA, 21 bp, Artificial Sequence
  source: /note="Description of Artificial Sequence: Synthetic oligonucleotide"
tttacgttgacgacgcctaag

SEQ ID NO: 893 - DNA, 21 bp, Artificial Sequence
  source: /note="Description of Artificial Sequence: Synthetic oligonucleotide"
atgaatgctacgaagaatgtg

SEQ ID NO: 894 - DNA, 21 bp, Artificial Sequence
  source: /note="Description of Artificial Sequence: Synthetic oligonucleotide"
cagtcgtcgcagacgcctagg

SEQ ID NO: 895 - DNA, 21 bp, Artificial Sequence
  source: /note="Description of Artificial Sequence: Synthetic oligonucleotide"
attctggggactggtacttcg

SEQ ID NO: 896 - DNA, 21 bp, Artificial Sequence
  source: /note="Description of Artificial Sequence: Synthetic oligonucleotide"
acgcggactaatcctgaggct

SEQ ID NO: 897 - DNA, 21 bp, Artificial Sequence
  source: /note="Description of Artificial Sequence: Synthetic oligonucleotide"
aatggggggactagtagttct

SEQ ID NO: 898 - DNA, 21 bp, Artificial Sequence
  source: /note="Description of Artificial Sequence: Synthetic oligonucleotide"
tatactttgtcgcagggttgg

SEQ ID NO: 899 - protein, 9 aa, Artificial Sequence
  source: /note="Description of Artificial Sequence: Synthetic peptide"
SADNNNSEY

SEQ ID NO: 900 - protein, 9 aa, Artificial Sequence
  source: /note="Description of Artificial Sequence: Synthetic peptide"
LIDQYLYYL

SEQ ID NO: 901 - protein, 9 aa, Artificial Sequence
  source: /note="Description of Artificial Sequence: Synthetic peptide"
VPQYGYLTL

SEQ ID NO: 902 - protein, 9 aa, Artificial Sequence
  source: /note="Description of Artificial Sequence: Synthetic peptide"
TTSTRTWAL

SEQ ID NO: 903 - protein, 9 aa, Artificial Sequence
  source: /note="Description of Artificial Sequence: Synthetic peptide"
YHLNGRDSL

SEQ ID NO: 904 - protein, 9 aa, Artificial Sequence
  source: /note="Description of Artificial Sequence: Synthetic peptide"
SQAVGRSSF

SEQ ID NO: 905 - protein, 9 aa, Artificial Sequence
  source: /note="Description of Artificial Sequence: Synthetic peptide"
VPANPSTTF

SEQ ID NO: 906 - protein, 9 aa, Artificial Sequence
  source: /note="Description of Artificial Sequence: Synthetic peptide"
FPQSGVLIF

SEQ ID NO: 907 - protein, 15 aa, Artificial Sequence
  source: /note="Description of Artificial Sequence: Synthetic peptide"
YFDFNRFHCHFSPRD

SEQ ID NO: 908 - protein, 15 aa, Artificial Sequence
  source: /note="Description of Artificial Sequence: Synthetic peptide"
VGNSSGNWHCDSTWM

SEQ ID NO: 909 - protein, 15 aa, Artificial Sequence
  source: /note="Description of Artificial Sequence: Synthetic peptide"
QFSQAGASDIRDQSR

SEQ ID NO: 910 - protein, 13 aa, Artificial Sequence
  source: /note="Description of Artificial Sequence: Synthetic peptide"
GASDIRQSRNWLP

SEQ ID NO: 911 - protein, 15 aa, Artificial Sequence
  source: /note="Description of Artificial Sequence: Synthetic peptide"
GNRQAATADVNTQGV

SEQ ID NO: 912 - protein, 9 aa, Artificial Sequence
  source: /note="Description of Artificial Sequence: Synthetic peptide"
LDRLMNPLI

SEQ ID NO: 913 - protein, 9 aa, Artificial Sequence
  source: /note="Description of Artificial Sequence: Synthetic peptide"
QPAKKRLNF

SEQ ID NO: 914 - RNA, 21 nt, Artificial Sequence
  source: /note="Description of Artificial Sequence: Synthetic oligonucleotide"
uuaacgucaguucauaaacuu

SEQ ID NO: 915 - DNA, 21 bp, Artificial Sequence
  source: /note="Description of Artificial Sequence: Synthetic oligonucleotide"
  source: /note="Description of Combined DNA/RNA Molecule: Synthetic oligonucleotide"
uuaacgucaguucauaaactt

SEQ ID NO: 916 - RNA, 21 nt, Artificial Sequence
  source: /note="Description of Artificial Sequence: Synthetic oligonucleotide"
ugucgguaccgucuaacacuu

SEQ ID NO: 917 - DNA, 21 bp, Artificial Sequence
  source: /note="Description of Artificial Sequence: Synthetic oligonucleotide"
  source: /note="Description of Combined DNA/RNA Molecule: Synthetic oligonucleotide"
ugucgguaccgucuaacactt

SEQ ID NO: 918 - RNA, 21 nt, Artificial Sequence
  source: /note="Description of Artificial Sequence: Synthetic oligonucleotide"
uaagcauggagcuagcagguu

SEQ ID NO: 919 - DNA, 21 bp, Artificial Sequence
  source: /note="Description of Artificial Sequence: Synthetic oligonucleotide"
  source: /note="Description of Combined DNA/RNA Molecule: Synthetic oligonucleotide"
uaagcauggagcuagcaggtt

SEQ ID NO: 920 - RNA, 21 nt, Artificial Sequence
  source: /note="Description of Artificial Sequence: Synthetic oligonucleotide"
uacaacgagacugaauugcuu

SEQ ID NO: 921 - DNA, 21 bp, Artificial Sequence
  source: /note="Description of Artificial Sequence: Synthetic oligonucleotide"
  source: /note="Description of Combined DNA/RNA Molecule: Synthetic oligonucleotide"
uacaacgagacugaauugctt

SEQ ID NO: 922 - RNA, 21 nt, Artificial Sequence
  source: /note="Description of Artificial Sequence: Synthetic oligonucleotide"
uucaguucauaaaccuggauu

SEQ ID NO: 923 - DNA, 21 bp, Artificial Sequence
  source: /note="Description of Artificial Sequence: Synthetic oligonucleotide"
  source: /note="Description of Combined DNA/RNA Molecule: Synthetic oligonucleotide"
uucaguucauaaaccuggatt

SEQ ID NO: 924 - RNA, 21 nt, Artificial Sequence
  source: /note="Description of Artificial Sequence: Synthetic oligonucleotide"
uaacgucaguucauaaaccuu

SEQ ID NO: 925 - DNA, 21 bp, Artificial Sequence
  source: /note="Description of Artificial Sequence: Synthetic oligonucleotide"
  source: /note="Description of Combined DNA/RNA Molecule: Synthetic oligonucleotide"
uaacgucaguucauaaacctt

SEQ ID NO: 926 - RNA, 21 nt, Artificial Sequence
  source: /note="Description of Artificial Sequence: Synthetic oligonucleotide"
uccggucacaacauugugguu

SEQ ID NO: 927 - DNA, 21 bp, Artificial Sequence
  source: /note="Description of Artificial Sequence: Synthetic oligonucleotide"
  source: /note="Description of Combined DNA/RNA Molecule: Synthetic oligonucleotide"
uccggucacaacauuguggtt

SEQ ID NO: 928 - RNA, 21 nt, Artificial Sequence
  source: /note="Description of Artificial Sequence: Synthetic oligonucleotide"
uugcacgguucuuugugacuu

SEQ ID NO: 929 - DNA, 21 bp, Artificial Sequence
  source: /note="Description of Artificial Sequence: Synthetic oligonucleotide"
  source: /note="Description of Combined DNA/RNA Molecule: Synthetic oligonucleotide"
uugcacgguucuuugugactt

SEQ ID NO: 930 - RNA, 21 nt, Artificial Sequence
  source: /note="Description of Artificial Sequence: Synthetic oligonucleotide"
uuuuauaacaagagguucauu

SEQ ID NO: 931 - DNA, 21 bp, Artificial Sequence
  source: /note="Description of Artificial Sequence: Synthetic oligonucleotide"
  source: /note="Description of Combined DNA/RNA Molecule: Synthetic oligonucleotide"
uuuuauaacaagagguucatt

SEQ ID NO: 932 - RNA, 21 nt, Artificial Sequence
  source: /note="Description of Artificial Sequence: Synthetic oligonucleotide"
uccaaauacugguugucgguu

SEQ ID NO: 933 - DNA, 21 bp, Artificial Sequence
  source: /note="Description of Artificial Sequence: Synthetic oligonucleotide"
  source: /note="Description of Combined DNA/RNA Molecule: Synthetic oligonucleotide"
uccaaauacugguugucggtt

SEQ ID NO: 934 - RNA, 21 nt, Artificial Sequence
  source: /note="Description of Artificial Sequence: Synthetic oligonucleotide"
uauuuuaggaauuccaauguu

SEQ ID NO: 935 - DNA, 21 bp, Artificial Sequence
  source: /note="Description of Artificial Sequence: Synthetic oligonucleotide"
  source: /note="Description of Combined DNA/RNA Molecule: Synthetic oligonucleotide"
uauuuuaggaauuccaaugtt

SEQ ID NO: 936 - RNA, 21 nt, Artificial Sequence
  source: /note="Description of Artificial Sequence: Synthetic oligonucleotide"
uuuaggaauuccaaugaucuu

SEQ ID NO: 937 - DNA, 21 bp, Artificial Sequence
  source: /note="Description of Artificial Sequence: Synthetic oligonucleotide"
  source: /note="Description of Combined DNA/RNA Molecule: Synthetic oligonucleotide"
uuuaggaauuccaaugauctt

SEQ ID NO: 938 - DNA, 21 bp, Artificial Sequence
  source: /note="Description of Artificial Sequence: Synthetic oligonucleotide"
  source: /note="Description of Combined DNA/RNA Molecule: Synthetic oligonucleotide"
uuaaucucuuuacugauautt

SEQ ID NO: 939 - DNA, 21 bp, Artificial Sequence
  source: /note="Description of Artificial Sequence: Synthetic oligonucleotide"
  source: /note="Description of Combined DNA/RNA Molecule: Synthetic oligonucleotide"
gauuuuaggaauuccaaugtt

SEQ ID NO: 940 - RNA, 22 nt, Artificial Sequence
  source: /note="Description of Artificial Sequence: Synthetic oligonucleotide"
uaagcauggagcuagcaggcuu

SEQ ID NO: 941 - RNA, 21 nt, Artificial Sequence
  source: /note="Description of Artificial Sequence: Synthetic oligonucleotide"
uaagcauggagcuagcagggu

SEQ ID NO: 942 - RNA, 22 nt, Artificial Sequence
  source: /note="Description of Artificial Sequence: Synthetic oligonucleotide"
aaggacuugagggacucgaagu

SEQ ID NO: 943 - RNA, 21 nt, Artificial Sequence
  source: /note="Description of Artificial Sequence: Synthetic oligonucleotide"
aaggacuugagggacucgaag

SEQ ID NO: 944 - RNA, 19 nt, Artificial Sequence
  source: /note="Description of Artificial Sequence: Synthetic oligonucleotide"
aaggacuugagggacucga

SEQ ID NO: 945 - RNA, 21 nt, Artificial Sequence
  source: /note="Description of Artificial Sequence: Synthetic oligonucleotide"
aggacuugagggacucgaagu

SEQ ID NO: 946 - RNA, 22 nt, Artificial Sequence
  source: /note="Description of Artificial Sequence: Synthetic oligonucleotide"
gaggacuugagggacucgaagu

SEQ ID NO: 947 - RNA, 22 nt, Artificial Sequence
  source: /note="Description of Artificial Sequence: Synthetic oligonucleotide"
aaggacuugagggacucgaagu

SEQ ID NO: 948 - RNA, 23 nt, Artificial Sequence
  source: /note="Description of Artificial Sequence: Synthetic oligonucleotide"
aaggacuugagggacucgaaguu

SEQ ID NO: 949 - RNA, 21 nt, Artificial Sequence
  source: /note="Description of Artificial Sequence: Synthetic oligonucleotide"
aaggacuugagggacucgaag

SEQ ID NO: 950 - RNA, 19 nt, Artificial Sequence
  source: /note="Description of Artificial Sequence: Synthetic oligonucleotide"
aaggacuugagggacucga

SEQ ID NO: 951 - RNA, 22 nt, Artificial Sequence
  source: /note="Description of Artificial Sequence: Synthetic oligonucleotide"
aaggacuugagggacucgaagg

SEQ ID NO: 952 - RNA, 21 nt, Artificial Sequence
  source: /note="Description of Artificial Sequence: Synthetic oligonucleotide"
aaggacuugagggacucgaau

SEQ ID NO: 953 - RNA, 22 nt, Artificial Sequence
  source: /note="Description of Artificial Sequence: Synthetic oligonucleotide"
aaggacuugagggacucgaaga

SEQ ID NO: 954 - RNA, 22 nt, Artificial Sequence
  source: /note="Description of Artificial Sequence: Synthetic oligonucleotide"
aaggacuugagggacucgaagg

SEQ ID NO: 955 - RNA, 23 nt, Artificial Sequence
  source: /note="Description of Artificial Sequence: Synthetic oligonucleotide"
aaggacuugagggacucgaaggu

SEQ ID NO: 956 - RNA, 23 nt, Artificial Sequence
  source: /note="Description of Artificial Sequence: Synthetic oligonucleotide"
aaggacuugagggacucgaagga

SEQ ID NO: 957 - RNA, 21 nt, Artificial Sequence
  source: /note="Description of Artificial Sequence: Synthetic oligonucleotide"
aaggacuugagggacucgaag

SEQ ID NO: 958 - RNA, 22 nt, Artificial Sequence
  source: /note="Description of Artificial Sequence: Synthetic oligonucleotide"
aaggacuugagggacucgaagu

SEQ ID NO: 959 - RNA, 19 nt, Artificial Sequence
  source: /note="Description of Artificial Sequence: Synthetic oligonucleotide"
aaggacuugagggacucga

SEQ ID NO: 960 - RNA, 23 nt, Artificial Sequence
  source: /note="Description of Artificial Sequence: Synthetic oligonucleotide"
aaggacuugagggacucgaagga

SEQ ID NO: 961 - RNA, 22 nt, Artificial Sequence
  source: /note="Description of Artificial Sequence: Synthetic oligonucleotide"
aaggacuugagggacucgaagg

SEQ ID NO: 962 - RNA, 24 nt, Artificial Sequence
  source: /note="Description of Artificial Sequence: Synthetic oligonucleotide"
aaggacuugagggacucgaaggau

SEQ ID NO: 963 - RNA, 25 nt, Artificial Sequence
  source: /note="Description of Artificial Sequence: Synthetic oligonucleotide"
aaggacuugagggacucgaaggauu

SEQ ID NO: 964 - RNA, 21 nt, Artificial Sequence
  source: /note="Description of Artificial Sequence: Synthetic oligonucleotide"
aaggacuugagggacucgaag

SEQ ID NO: 965 - RNA, 24 nt, Artificial Sequence
  source: /note="Description of Artificial Sequence: Synthetic oligonucleotide"
aaggacuugagggacucgaaggaa

SEQ ID NO: 966 - RNA, 23 nt, Artificial Sequence
  source: /note="Description of Artificial Sequence: Synthetic oligonucleotide"
gaugaagugcacacauuggauga

SEQ ID NO: 967 - RNA, 22 nt, Artificial Sequence
  source: /note="Description of Artificial Sequence: Synthetic oligonucleotide"
gaugaacugcacacauuggaug

SEQ ID NO: 968 - RNA, 23 nt, Artificial Sequence
  source: /note="Description of Artificial Sequence: Synthetic oligonucleotide"
gaugaauugcacacaguagauga

SEQ ID NO: 969 - RNA, 24 nt, Artificial Sequence
  source: /note="Description of Artificial Sequence: Synthetic oligonucleotide"
aaggacuugagggacucgaagguu

SEQ ID NO: 970 - RNA, 25 nt, Artificial Sequence
  source: /note="Description of Artificial Sequence: Synthetic oligonucleotide"
aaggacuugagggacucgaagguuu

SEQ ID NO: 971 - RNA, 23 nt, Artificial Sequence
  source: /note="Description of Artificial Sequence: Synthetic oligonucleotide"
aaggacuugagggacucgaaggu

SEQ ID NO: 972 - RNA, 26 nt, Artificial Sequence
  source: /note="Description of Artificial Sequence: Synthetic oligonucleotide"
aaggacuugagggacucgaagguuuu

SEQ ID NO: 973 - RNA, 27 nt, Artificial Sequence
  source: /note="Description of Artificial Sequence: Synthetic oligonucleotide"
aaggacuugagggacucgaagguuuuu

SEQ ID NO: 974 - RNA, 22 nt, Artificial Sequence
  source: /note="Description of Artificial Sequence: Synthetic oligonucleotide"
aaggacuugagggacucgaagg

SEQ ID NO: 975 - RNA, 22 nt, Artificial Sequence
  source: /note="Description of Artificial Sequence: Synthetic oligonucleotide"
uaaggacuugagggacucgaag

SEQ ID NO: 976 - RNA, 21 nt, Artificial Sequence
  source: /note="Description of Artificial Sequence: Synthetic oligonucleotide"
aaggacuugagggacucgaag

SEQ ID NO: 977 - RNA, 22 nt, Artificial Sequence
  source: /note="Description of Artificial Sequence: Synthetic oligonucleotide"
aaggacuugagggacucgaagu

SEQ ID NO: 978 - RNA, 30 nt, Artificial Sequence
  source: /note="Description of Artificial Sequence: Synthetic oligonucleotide"
aaggacuugagggacucgaagacgaguccc

SEQ ID NO: 979 - RNA, 31 nt, Artificial Sequence
  source: /note="Description of Artificial Sequence: Synthetic oligonucleotide"
aaggacuugagggacucgaagacgaguccca

SEQ ID NO: 980 - RNA, 31 nt, Artificial Sequence
  source: /note="Description of Artificial Sequence: Synthetic oligonucleotide"
aaggacuugagggacucgaagacgagucccu

SEQ ID NO: 981 - RNA, 23 nt, Artificial Sequence
  source: /note="Description of Artificial Sequence: Synthetic oligonucleotide"
gaugaagugcacacauuggauac

SEQ ID NO: 982 - RNA, 24 nt, Artificial Sequence
  source: /note="Description of Artificial Sequence: Synthetic oligonucleotide"
gaugaagugcacacauuggauaca

SEQ ID NO: 983 - RNA, 30 nt, Artificial Sequence
  source: /note="Description of Artificial Sequence: Synthetic oligonucleotide"
gaugaagugcacacauuggauacaaugugu

SEQ ID NO: 984 - RNA, 21 nt, Artificial Sequence
  source: /note="Description of Artificial Sequence: Synthetic oligonucleotide"
gaugaagugcacacauuggau

SEQ ID NO: 985 - RNA, 22 nt, Artificial Sequence
  source: /note="Description of Artificial Sequence: Synthetic oligonucleotide"
gaugaagugcacacauuggaua

SEQ ID NO: 986 - RNA, 23 nt, Artificial Sequence
  source: /note="Description of Artificial Sequence: Synthetic oligonucleotide"
gaugaauugcacacaguagauau

SEQ ID NO: 987 - RNA, 25 nt, Artificial Sequence
  source: /note="Description of Artificial Sequence: Synthetic oligonucleotide"
gaugaauugcacacaguagauauac

SEQ ID NO: 988 - RNA, 30 nt, Artificial Sequence
  source: /note="Description of Artificial Sequence: Synthetic oligonucleotide"
gaugaauugcacacaguagauauacugugu

SEQ ID NO: 989 - RNA, 24 nt, Artificial Sequence
  source: /note="Description of Artificial Sequence: Synthetic oligonucleotide"
gaugaauugcacacaguagauaua

SEQ ID NO: 990 - RNA, 24 nt, Artificial Sequence
  source: /note="Description of Artificial Sequence: Synthetic oligonucleotide"
augaauugcacacaguagauauac

SEQ ID NO: 991 - RNA, 22 nt, Artificial Sequence
  source: /note="Description of Artificial Sequence: Synthetic oligonucleotide"
gaugaauugcacacaguagaua

SEQ ID NO: 992 - RNA, 30 nt, Artificial Sequence; identical to SEQ ID NO: 988
  source: /note="Description of Artificial Sequence: Synthetic oligonucleotide"

SEQ ID NO: 993 - RNA, 20 nt, Artificial Sequence
  source: /note="Description of Artificial Sequence: Synthetic oligonucleotide"
uacaacgagacugaauugcu

SEQ ID NO: 994 - RNA, 20 nt, Artificial Sequence
  source: /note="Description of Artificial Sequence: Synthetic oligonucleotide"
acaacgagacugaauugcuu

SEQ ID NO: 995 - RNA, 22 nt, Artificial Sequence
  source: /note="Description of Artificial Sequence: Synthetic oligonucleotide"
uccggucacaacauugugguuc

SEQ ID NO: 996 - RNA, 20 nt, Artificial Sequence
  source: /note="Description of Artificial Sequence: Synthetic oligonucleotide"
uccggucacaacauuguggu

SEQ ID NO: 997 - RNA, 18 nt, Artificial Sequence
  source: /note="Description of Artificial Sequence: Synthetic oligonucleotide"
uccggucacaacauugug

SEQ ID NO: 998 - RNA, 20 nt, Artificial Sequence
  source: /note="Description of Artificial Sequence: Synthetic oligonucleotide"
ccggucacaacauugugguu

SEQ ID NO: 999 - RNA, 20 nt, Artificial Sequence
  source: /note="Description of Artificial Sequence: Synthetic oligonucleotide"
uuuuauaacaagagguucau

SEQ ID NO: 1000 - RNA, 20 nt, Artificial Sequence
  source: /note="Description of Artificial Sequence: Synthetic oligonucleotide"
uuuauaacaagagguucauu

SEQ ID NO: 1001 - RNA, 20 nt, Artificial Sequence
  source: /note="Description of Artificial Sequence: Synthetic oligonucleotide"
uaagcauggagcuagcaggu

SEQ ID NO: 1002 - RNA, 20 nt, Artificial Sequence
  source: /note="Description of Artificial Sequence: Synthetic oligonucleotide"
aagcauggagcuagcagguu

SEQ ID NO: 1003 - RNA, 20 nt, Artificial Sequence
  source: /note="Description of Artificial Sequence: Synthetic oligonucleotide"
ccaaauacugguugucgguu

SEQ ID NO: 1004 - RNA, 22 nt, Artificial Sequence
  source: /note="Description of Artificial Sequence: Synthetic oligonucleotide"
uacaacgagacugaauugcuuu

SEQ ID NO: 1005 - RNA, 22 nt, Artificial Sequence
  source: /note="Description of Artificial Sequence: Synthetic oligonucleotide"
uaacgucaguucauaaaccuuu

SEQ ID NO: 1006 - RNA, 22 nt, Artificial Sequence
  source: /note="Description of Artificial Sequence: Synthetic oligonucleotide"
guccggucacaacauugugguu

SEQ ID NO: 1007 - RNA, 23 nt, Artificial Sequence
  source: /note="Description of Artificial Sequence: Synthetic oligonucleotide"
uccggucacaacauugugguuug

SEQ ID NO: 1008 - RNA, 22 nt, Artificial Sequence
  source: /note="Description of Artificial Sequence: Synthetic oligonucleotide"
uccggucacaacauugugguuu

SEQ ID NO: 1009 - RNA, 19 nt, Artificial Sequence
  source: /note="Description of Artificial Sequence: Synthetic oligonucleotide"
uccggucacaacauugugg

SEQ ID NO: 1010 - RNA, 22 nt, Artificial Sequence
  source: /note="Description of Artificial Sequence: Synthetic oligonucleotide"
uaagcauggagcuagcagguuu

SEQ ID NO: 1011 - RNA, 21 nt, Artificial Sequence
  source: /note="Description of Artificial Sequence: Synthetic oligonucleotide"
aagcauggagcuagcagguuu

SEQ ID NO: 1012 - RNA, 22 nt, Artificial Sequence
  source: /note="Description of Artificial Sequence: Synthetic oligonucleotide"
uccaaauacugguugucgguuu

SEQ ID NO: 1013 - RNA, 21 nt, Artificial Sequence
  source: /note="Description of Artificial Sequence: Synthetic oligonucleotide"
ccaaauacugguugucgguuu

SEQ ID NO: 1014 - RNA, 21 nt, Artificial Sequence
  source: /note="Description of Artificial Sequence: Synthetic oligonucleotide"
guuuaugaacugaucuuaccc

SEQ ID NO: 1015 - RNA, 21 nt, Artificial Sequence
  source: /note="Description of Artificial Sequence: Synthetic oligonucleotide"
guguuagacgguacugauccc

SEQ ID NO: 1016 - RNA, 21 nt, Artificial Sequence
  source: /note="Description of Artificial Sequence: Synthetic oligonucleotide"
ccugcuagcuccaugcuuccc

SEQ ID NO: 1017 - RNA, 21 nt, Artificial Sequence
  source: /note="Description of Artificial Sequence: Synthetic oligonucleotide"
guuuaugaacugaucuuagcc

SEQ ID NO: 1018 - RNA, 21 nt, Artificial Sequence
  source: /note="Description of Artificial Sequence: Synthetic oligonucleotide"
guguuagacgguacugaugcc

SEQ ID NO: 1019 - RNA, 21 nt, Artificial Sequence
  source: /note="Description of Artificial Sequence: Synthetic oligonucleotide"
ccugcuagcuccaugcuugcc

SEQ ID NO: 1020 - RNA, 21 nt, Artificial Sequence
  source: /note="Description of Artificial Sequence: Synthetic oligonucleotide"
guuuaugaagugaucuuaacc

SEQ ID NO: 1021 - RNA, 21 nt, Artificial Sequence
  source: /note="Description of Artificial Sequence: Synthetic oligonucleotide"
guguuagaccguacugauacc

SEQ ID NO: 1022 - RNA, 21 nt, Artificial Sequence
  source: /note="Description of Artificial Sequence: Synthetic oligonucleotide"
ccugcuagcaccaugcuuacc

SEQ ID NO: 1023 - RNA, 21 nt, Artificial Sequence
  source: /note="Description of Artificial Sequence: Synthetic oligonucleotide"
guuuaugaacugaucuuaacc

SEQ ID NO: 1024 - RNA, 21 nt, Artificial Sequence
  source: /note="Description of Artificial Sequence: Synthetic oligonucleotide"
guguuagacgguacugauacc

SEQ ID NO: 1025 - RNA, 21 nt, Artificial Sequence
  source: /note="Description of Artificial Sequence: Synthetic oligonucleotide"
ccugcuagcuccaugcuuacc

SEQ ID NO: 1026 - DNA, 21 bp, Artificial Sequence
  source: /note="Description of Artificial Sequence: Synthetic oligonucleotide"
  source: /note="Description of Combined DNA/RNA Molecule: Synthetic oligonucleotide"
ccugcuagcuccaugcuuatt

SEQ ID NO: 1027 - RNA, 21 nt, Artificial Sequence
  source: /note="Description of Artificial Sequence: Synthetic oligonucleotide"
guuuaugaacugaucuugccc

SEQ ID NO: 1028 - RNA, 21 nt, Artificial Sequence
  source: /note="Description of Artificial Sequence: Synthetic oligonucleotide"
guuuaugaacugaucuuggcc

SEQ ID NO: 1029 - RNA, 21 nt, Artificial Sequence
  source: /note="Description of Artificial Sequence: Synthetic oligonucleotide"
guuuaugaacugaucuugacc

SEQ ID NO: 1030 - RNA, 21 nt, Artificial Sequence
  source: /note="Description of Artificial Sequence: Synthetic oligonucleotide"
gcaauucagucucguuguccc

SEQ ID NO: 1031 - RNA, 21 nt, Artificial Sequence
  source: /note="Description of Artificial Sequence: Synthetic oligonucleotide"
uccagguuuaugaacugaccc

SEQ ID NO: 1032 - RNA, 21 nt, Artificial Sequence
  source: /note="Description of Artificial Sequence: Synthetic oligonucleotide"
gguuuaugaacugacguuccc

SEQ ID NO: 1033 - RNA, 21 nt, Artificial Sequence
  source: /note="Description of Artificial Sequence: Synthetic oligonucleotide"
ccacaauguugugacuggccc

SEQ ID NO: 1034 - RNA, 21 nt, Artificial Sequence
  source: /note="Description of Artificial Sequence: Synthetic oligonucleotide"
gucacaaagaaccguguaccc

SEQ ID NO: 1035 - RNA, 21 nt, Artificial Sequence
  source: /note="Description of Artificial Sequence: Synthetic oligonucleotide"
ugaaccucuuguuauaaaccc

SEQ ID NO: 1036 - RNA, 21 nt, Artificial Sequence
  source: /note="Description of Artificial Sequence: Synthetic oligonucleotide"
ccgacaaccaguauuuggccc

SEQ ID NO: 1037 - RNA, 21 nt, Artificial Sequence
  source: /note="Description of Artificial Sequence: Synthetic oligonucleotide"
gcaauucagucucguugugcc

SEQ ID NO: 1038 - RNA, 21 nt, Artificial Sequence
  source: /note="Description of Artificial Sequence: Synthetic oligonucleotide"
uccagguuuaugaacugagcc

SEQ ID NO: 1039 - RNA, 21 nt, Artificial Sequence
  source: /note="Description of Artificial Sequence: Synthetic oligonucleotide"
gguuuaugaacugacguugcc

SEQ ID NO: 1040 - RNA, 21 nt, Artificial Sequence
  source: /note="Description of Artificial Sequence: Synthetic oligonucleotide"
ccacaauguugugacugggcc

SEQ ID NO: 1041 - RNA, 21 nt, Artificial Sequence
  source: /note="Description of Artificial Sequence: Synthetic oligonucleotide"
gucacaaagaaccguguagcc

SEQ ID NO: 1042 - RNA, 21 nt, Artificial Sequence
  source: /note="Description of Artificial Sequence: Synthetic oligonucleotide"
ugaaccucuuguuauaaagcc

SEQ ID NO: 1043 - RNA, 21 nt, Artificial Sequence
  source: /note="Description of Artificial Sequence: Synthetic oligonucleotide"
ccgacaaccaguauuugggcc

SEQ ID NO: 1044 - RNA, 21 nt, Artificial Sequence
  source: /note="Description of Artificial Sequence: Synthetic oligonucleotide"
gcaauucagucucguuguacc

SEQ ID NO: 1045 - DNA, 21 bp, Artificial Sequence
  source: /note="Description of Artificial Sequence: Synthetic oligonucleotide"
  source: /note="Description of Combined DNA/RNA Molecule: Synthetic oligonucleotide"
gcaauucagucucguuguatt

SEQ ID NO: 1046 - RNA, 21 nt, Artificial Sequence
  source: /note="Description of Artificial Sequence: Synthetic oligonucleotide"
uccagguuuaugaacugaacc

SEQ ID NO: 1047 - DNA, 21 bp, Artificial Sequence
  source: /note="Description of Artificial Sequence: Synthetic oligonucleotide"
  source: /note="Description of Combined DNA/RNA Molecule: Synthetic oligonucleotide"
uccagguuuaugaacugaatt

SEQ ID NO: 1048 - RNA, 21 nt, Artificial Sequence
  source: /note="Description of Artificial Sequence: Synthetic oligonucleotide"
gguuuaugaacugacguuacc

SEQ ID NO: 1049 - RNA, 21 nt, Artificial Sequence
  source: /note="Description of Artificial Sequence: Synthetic oligonucleotide"
ccacaauguugugacuggacc

SEQ ID NO: 1050 - RNA, 21 nt, Artificial Sequence
  source: /note="Description of Artificial Sequence: Synthetic oligonucleotide"
gucacaaagaaccguguaacc

SEQ ID NO: 1051 - RNA, 21 nt, Artificial Sequence
  source: /note="Description of Artificial Sequence: Synthetic oligonucleotide"
ugaaccucuuguuauaaaacc

SEQ ID NO: 1052 - DNA, 21 bp, Artificial Sequence
  source: /note="Description of Artificial Sequence: Synthetic oligonucleotide"
  source: /note="Description of Combined DNA/RNA Molecule: Synthetic oligonucleotide"
ugaaccucuuguuauaaaatt

SEQ ID NO: 1053 - RNA, 21 nt, Artificial Sequence
  source: /note="Description of Artificial Sequence: Synthetic oligonucleotide"
ccgacaaccaguauuuggacc

SEQ ID NO: 1054 - DNA, 21 bp, Artificial Sequence
  source: /note="Description of Artificial Sequence: Synthetic oligonucleotide"
  source: /note="Description of Combined DNA/RNA Molecule: Synthetic oligonucleotide"
ccgacaaccaguauuuggatt

SEQ ID NO: 1055 - RNA, 21 nt, Artificial Sequence
  source: /note="Description of Artificial Sequence: Synthetic oligonucleotide"
gcaauucagacucguuguacc

SEQ ID NO: 1056 - RNA, 21 nt, Artificial Sequence
  source: /note="Description of Artificial Sequence: Synthetic oligonucleotide"
uccagguuuuugaacugaacc

SEQ ID NO: 1057 - RNA, 21 nt, Artificial Sequence
  source: /note="Description of Artificial Sequence: Synthetic oligonucleotide"
gguuuaugaucugacguuacc

SEQ ID NO: 1058 - RNA, 21 nt, Artificial Sequence
  source: /note="Description of Artificial Sequence: Synthetic oligonucleotide"
ccacaauguagugacuggacc

SEQ ID NO: 1059 - RNA, 21 nt, Artificial Sequence
  source: /note="Description of Artificial Sequence: Synthetic oligonucleotide"
gucacaaaguaccguguaacc

SEQ ID NO: 1060 - RNA, 21 nt, Artificial Sequence
  source: /note="Description of Artificial Sequence: Synthetic oligonucleotide"
ugaaccucuaguuauaaaacc

SEQ ID NO: 1061 - RNA, 21 nt, Artificial Sequence
  source: /note="Description of Artificial Sequence: Synthetic oligonucleotide"
ccgacaaccuguauuuggacc

SEQ ID NO: 1062 - RNA, 21 nt, Artificial Sequence
  source: /note="Description of Artificial Sequence: Synthetic oligonucleotide"
cauuggaauuccuaaaauucc

SEQ ID NO: 1063 - RNA, 21 nt, Artificial Sequence
  source: /note="Description of Artificial Sequence: Synthetic oligonucleotide"
gaucauuggaauuccuaaucc

SEQ ID NO: 1064 - RNA, 21 nt, Artificial Sequence
  source: /note="Description of Artificial Sequence: Synthetic oligonucleotide"
cauuggaauuccuaaaaugcc

SEQ ID NO: 1065 - RNA, 21 nt, Artificial Sequence
  source: /note="Description of Artificial Sequence: Synthetic oligonucleotide"
gaucauuggaauuccuaagcc

SEQ ID NO: 1066 - RNA, 21 nt, Artificial Sequence
  source: /note="Description of Artificial Sequence: Synthetic oligonucleotide"
cauuggaauuccuaaaauacc

SEQ ID NO: 1067 - DNA, 21 bp, Artificial Sequence
  source: /note="Description of Artificial Sequence: Synthetic oligonucleotide"
  source: /note="Description of Combined DNA/RNA Molecule: Synthetic oligonucleotide"
cauuggaauuccuaaaauatt

SEQ ID NO: 1068 - RNA, 21 nt, Artificial Sequence
  source: /note="Description of Artificial Sequence: Synthetic oligonucleotide"
gaucauuggaauuccuaaacc

SEQ ID NO: 1069 - DNA, 21 bp, Artificial Sequence
  source: /note="Description of Artificial Sequence: Synthetic oligonucleotide"
  source: /note="Description of Combined DNA/RNA Molecule: Synthetic oligonucleotide"
gaucauuggaauuccuaaatt

SEQ ID NO: 1070 - RNA, 21 nt, Artificial Sequence
  source: /note="Description of Artificial Sequence: Synthetic oligonucleotide"
cauuggaauaccuaaaauacc

SEQ ID NO: 1071 - RNA, 21 nt, Artificial Sequence
  source: /note="Description of Artificial Sequence: Synthetic oligonucleotide"
gaucauugguauuccuaaacc

SEQ ID NO: 1072 - DNA, 21 bp, Artificial Sequence
  source: /note="Description of Artificial Sequence: Synthetic oligonucleotide"
  source: /note="Description of Combined DNA/RNA Molecule: Synthetic oligonucleotide"
guuuaugaacugacguuaatt

SEQ ID NO: 1073 - DNA, 21 bp, Artificial Sequence
  source: /note="Description of Artificial Sequence: Synthetic oligonucleotide"
  source: /note="Description of Combined DNA/RNA Molecule: Synthetic oligonucleotide"
guguuagacgguaccgacatt

SEQ ID NO: 1074 - DNA, 21 bp, Artificial Sequence
  source: /note="Description of Artificial Sequence: Synthetic oligonucleotide"
  source: /note="Description of Combined DNA/RNA Molecule: Synthetic oligonucleotide"
auaucaguaaagagauuaatt

SEQ ID NO: 1075 - DNA, 21 bp, Artificial Sequence
  source: /note="Description of Artificial Sequence: Synthetic oligonucleotide"
  source: /note="Description of Combined DNA/RNA Molecule: Synthetic oligonucleotide"
gguuuaugaacugacguuatt

SEQ ID NO: 1076 - DNA, 21 bp, Artificial Sequence
  source: /note="Description of Artificial Sequence: Synthetic oligonucleotide"
  source: /note="Description of Combined DNA/RNA Molecule: Synthetic oligonucleotide"
ccacaauguugugaccggatt

SEQ ID NO: 1077 - DNA, 21 bp, Artificial Sequence
  source: /note="Description of Artificial Sequence: Synthetic oligonucleotide"
  source: /note="Description of Combined DNA/RNA Molecule: Synthetic oligonucleotide"
gucacaaagaaccgugcaatt

SEQ ID NO: 1078 - DNA, 21 bp, Artificial Sequence
  source: /note="Description of Artificial Sequence: Synthetic oligonucleotide"
  source: /note="Description of Combined DNA/RNA Molecule: Synthetic oligonucleotide"
cauuggaauuccuaaaauctt

SEQ ID NO: 1079 - RNA, 21 nt, Artificial Sequence
  source: /note="Description of Artificial Sequence: Synthetic oligonucleotide"
ccugcuagcuccaugcuugcu

SEQ ID NO: 1080 - RNA, 21 nt, Artificial Sequence
  source: /note="Description of Artificial Sequence: Synthetic oligonucleotide"
ccugcuagcuccaugcuugau

SEQ ID NO: 1081 - RNA, 21 nt, Artificial Sequence
  source: /note="Description of Artificial Sequence: Synthetic oligonucleotide"
ccugcuagcuccaugcuuauu

SEQ ID NO: 1082 - RNA, 21 nt, Artificial Sequence
  source: /note="Description of Artificial Sequence: Synthetic oligonucleotide"
ccugcuagcuccaugcuuguu

SEQ ID NO: 1083 - RNA, 20 nt, Artificial Sequence
  source: /note="Description of Artificial Sequence: Synthetic oligonucleotide"
uucgagucccucaaguagcu

SEQ ID NO: 1084 - RNA, 22 nt, Artificial Sequence
  source: /note="Description of Artificial Sequence: Synthetic oligonucleotide"
uucgagucccucaaguagcuuu

SEQ ID NO: 1085 - RNA, 22 nt, Artificial Sequence
  source: /note="Description of Artificial Sequence: Synthetic oligonucleotide"
ucgagucccucaaguccauucu

SEQ ID NO: 1086 - RNA, 21 nt, Artificial Sequence
  source: /note="Description of Artificial Sequence: Synthetic oligonucleotide"
uuccaguccaucaagucaauu

SEQ ID NO: 1087 - RNA, 22 nt, Artificial Sequence
  source: /note="Description of Artificial Sequence: Synthetic oligonucleotide"
uuccgagucuaaaaguccuugg

SEQ ID NO: 1088 - RNA, 23 nt, Artificial Sequence
  source: /note="Description of Artificial Sequence: Synthetic oligonucleotide"
uuccgagucuaaaaguccuuggc

SEQ ID NO: 1089 - RNA, 23 nt, Artificial Sequence
  source: /note="Description of Artificial Sequence: Synthetic oligonucleotide"
cuuccgagucuaaaaguccuugg

SEQ ID NO: 1090 - RNA, 23 nt, Artificial Sequence
  source: /note="Description of Artificial Sequence: Synthetic oligonucleotide"
uuccgagucuaaaaguccuuggu

SEQ ID NO: 1091 - RNA, 24 nt, Artificial Sequence
  source: /note="Description of Artificial Sequence: Synthetic oligonucleotide"
uuccgagucuaaaaguccuuggcu

SEQ ID NO: 1092 - RNA, 23 nt, Artificial Sequence
  source: /note="Description of Artificial Sequence: Synthetic oligonucleotide"
uccaaugugaaacuucaucggcu

SEQ ID NO: 1093 - RNA, 22 nt, Artificial Sequence
  source: /note="Description of Artificial Sequence: Synthetic oligonucleotide"
uccaaugugaaacuucaucggc

SEQ ID NO: 1094 - RNA, 22 nt, Artificial Sequence
  source: /note="Description of Artificial Sequence: Synthetic oligonucleotide"
auccaaugugaaacuucaucgu

SEQ ID NO: 1095 - RNA, 23 nt, Artificial Sequence
  source: /note="Description of Artificial Sequence: Synthetic oligonucleotide"
auccaaugugaaacuucaucggu

SEQ ID NO: 1096 - RNA, 22 nt, Artificial Sequence
  source: /note="Description of Artificial Sequence: Synthetic oligonucleotide"
uccaaugugaaacuucaucggu

SEQ ID NO: 1097 - RNA, 24 nt, Artificial Sequence
  source: /note="Description of Artificial Sequence: Synthetic oligonucleotide"
uccaaugugaaacuucaucggcuu

SEQ ID NO: 1098 - RNA, 22 nt, Artificial Sequence
  source: /note="Description of Artificial Sequence: Synthetic oligonucleotide"
aucuacugugaaaauucaucgg

SEQ ID NO: 1099 - RNA, 21 nt, Artificial Sequence
  source: /note="Description of Artificial Sequence: Synthetic oligonucleotide"
ucuacugugaaaauucaucgg

SEQ ID NO: 1100 - RNA, 22 nt, Artificial Sequence
  source: /note="Description of Artificial Sequence: Synthetic oligonucleotide"
ucuacugugaaaauucaucggc

SEQ ID NO: 1101 - RNA, 23 nt, Artificial Sequence
  source: /note="Description of Artificial Sequence: Synthetic oligonucleotide"
aucuacugugaaaauucaucggu

SEQ ID NO: 1102 - RNA, 22 nt, Artificial Sequence
  source: /note="Description of Artificial Sequence: Synthetic oligonucleotide"
ucuacugugaaaauucaucggu

SEQ ID NO: 1103 - RNA, 23 nt, Artificial Sequence
  source: /note="Description of Artificial Sequence: Synthetic oligonucleotide"
ucuacugugaaaauucaucggcu

SEQ ID NO: 1104 - RNA, 22 nt, Artificial Sequence
  source: /note="Description of Artificial Sequence: Synthetic oligonucleotide"
ccuucgguccucaaguccuuca

SEQ ID NO: 1105 - RNA, 24 nt, Artificial Sequence
  source: /note="Description of Artificial Sequence: Synthetic oligonucleotide"
uucgaguccaucaaauccuauagu

SEQ ID NO: 1106 - RNA, 21 nt, Artificial Sequence
  source: /note="Description of Artificial Sequence: Synthetic oligonucleotide"
uacaaugugugcacuucauau

SEQ ID NO: 1107 - RNA, 23 nt, Artificial Sequence
  source: /note="Description of Artificial Sequence: Synthetic oligonucleotide"
uauacugugugcaauucauuucu

SEQ ID NO: 1108 - RNA, 20 nt, Artificial Sequence
  source: /note="Description of Artificial Sequence: Synthetic oligonucleotide"
gcaauucagucucguugucc

SEQ ID NO: 1109 - RNA, 19 nt, Artificial Sequence
  source: /note="Description of Artificial Sequence: Synthetic oligonucleotide"
gcaauucagucucguuguc

SEQ ID NO: 1110 - RNA, 20 nt, Artificial Sequence
  source: /note="Description of Artificial Sequence: Synthetic oligonucleotide"
caauucagucucguuguccc

SEQ ID NO: 1111 - RNA, 19 nt, Homo sapiens
caauucagucucguugucc

SEQ ID NO: 1112 - RNA, 20 nt, Artificial Sequence
  source: /note="Description of Artificial Sequence: Synthetic oligonucleotide"
gcaauucagucucguugugc

SEQ ID NO: 1113 - RNA, 20 nt, Artificial Sequence
  source: /note="Description of Artificial Sequence: Synthetic oligonucleotide"
caauucagucucguugugcc

SEQ ID NO: 1114 - RNA, 22 nt, Artificial Sequence
  source: /note="Description of Artificial Sequence: Synthetic oligonucleotide"
ccacaauguugugacugggccu

SEQ ID NO: 1115 - RNA, 20 nt, Artificial Sequence
  source: /note="Description of Artificial Sequence: Synthetic oligonucleotide"
ccacaauguugugacugggc

SEQ ID NO: 1116 - RNA, 20 nt, Artificial Sequence
  source: /note="Description of Artificial Sequence: Synthetic oligonucleotide"
cacaauguugugacugggcc

SEQ ID NO: 1117 - RNA, 22 nt, Artificial Sequence
  source: /note="Description of Artificial Sequence: Synthetic oligonucleotide"
ugaaccucuuguuauaaagccu

SEQ ID NO: 1118 - RNA, 20 nt, Artificial Sequence
  source: /note="Description of Artificial Sequence: Synthetic oligonucleotide"
ugaaccucuuguuauaaagc

SEQ ID NO: 1119 - RNA, 20 nt, Artificial Sequence
  source: /note="Description of Artificial Sequence: Synthetic oligonucleotide"
gaaccucuuguuauaaagcc

SEQ ID NO: 1120 - RNA, 22 nt, Artificial Sequence
  source: /note="Description of Artificial Sequence: Synthetic oligonucleotide"
ccugcuagcuccaugcuugccu

SEQ ID NO: 1121 - RNA, 20 nt, Artificial Sequence
  source: /note="Description of Artificial Sequence: Synthetic oligonucleotide"
ccugcuagcuccaugcuugc

SEQ ID NO: 1122 - RNA, 19 nt, Artificial Sequence
  source: /note="Description of Artificial Sequence: Synthetic oligonucleotide"
ccugcuagcuccaugcuug

SEQ ID NO: 1123 - RNA, 20 nt, Artificial Sequence
  source: /note="Description of Artificial Sequence: Synthetic oligonucleotide"
cugcuagcuccaugcuugcc

SEQ ID NO: 1124 - RNA, 22 nt, Artificial Sequence
  source: /note="Description of Artificial Sequence: Synthetic oligonucleotide"
ccgacaaccaguauuugggccu

SEQ ID NO: 1125 - RNA, 20 nt, Artificial Sequence
  source: /note="Description of Artificial Sequence: Synthetic oligonucleotide"
ccgacaaccaguauuugggc

SEQ ID NO: 1126 - RNA, 19 nt, Artificial Sequence
  source: /note="Description of Artificial Sequence: Synthetic oligonucleotide"
ccgacaaccaguauuuggg

SEQ ID NO: 1127 - RNA, 20 nt, Artificial Sequence
  source: /note="Description of Artificial Sequence: Synthetic oligonucleotide"
cgacaaccaguauuugggcc

SEQ ID NO: 1128 - RNA, 19 nt, Artificial Sequence
  source: /note="Description of Artificial Sequence: Synthetic oligonucleotide"
cgacaaccaguauuugggc

SEQ ID NO: 1129 - RNA, 22 nt, Artificial Sequence
  source: /note="Description of Artificial Sequence: Synthetic oligonucleotide"
gcaauucagucucguuguaccu

SEQ ID NO: 1130 - RNA, 20 nt, Artificial Sequence
  source: /note="Description of Artificial Sequence: Synthetic oligonucleotide"
gcaauucagucucguuguac

SEQ ID NO: 1131 - RNA, 19 nt, Artificial Sequence
  source: /note="Description of Artificial Sequence: Synthetic oligonucleotide"
gcaauucagucucguugua

SEQ ID NO: 1132 - RNA, 20 nt, Artificial Sequence
  source: /note="Description of Artificial Sequence: Synthetic oligonucleotide"
caauucagucucguuguacc

SEQ ID NO: 1133 - RNA, 22 nt, Artificial Sequence
  source: /note="Description of Artificial Sequence: Synthetic oligonucleotide"
gcaauucagacucguuguaccu

SEQ ID NO: 1134 - RNA, 20 nt, Artificial Sequence
  source: /note="Description of Artificial Sequence: Synthetic oligonucleotide"
gcaauucagacucguuguac

SEQ ID NO: 1135 - RNA, 19 nt, Artificial Sequence
  source: /note="Description of Artificial Sequence: Synthetic oligonucleotide"
gcaauucagacucguugua

SEQ ID NO: 1136 - RNA, 20 nt, Artificial Sequence
  source: /note="Description of Artificial Sequence: Synthetic oligonucleotide"
caauucagacucguuguacc

SEQ ID NO: 1137 - RNA, 22 nt, Artificial Sequence
  source: /note="Description of Artificial Sequence: Synthetic oligonucleotide"
agcaauucagucucguuguacc

SEQ ID NO: 1138 - RNA, 21 nt, Artificial Sequence
  source: /note="Description of Artificial Sequence: Synthetic oligonucleotide"
agcaauucagucucguuguac

SEQ ID NO: 1139 - RNA, 21 nt, Artificial Sequence
  source: /note="Description of Artificial Sequence: Synthetic oligonucleotide"
agguuuaugaacugacguuac

SEQ ID NO: 1140 - RNA, 22 nt, Artificial Sequence
  source: /note="Description of Artificial Sequence: Synthetic oligonucleotide"
agguuuaugaacugacguuacc

SEQ ID NO: 1141 - RNA, 21 nt, Artificial Sequence
  source: /note="Description of Artificial Sequence: Synthetic oligonucleotide"
accacaauguugugacuggac

SEQ ID NO: 1142 - RNA, 22 nt, Artificial Sequence
  source: /note="Description of Artificial Sequence: Synthetic oligonucleotide"
accacaauguugugacuggacc

SEQ ID NO: 1143 - RNA, 23 nt, Artificial Sequence
  source: /note="Description of Artificial Sequence: Synthetic oligonucleotide"
ccacaauguugugacuggaccgu

SEQ ID NO: 1144 - RNA, 22 nt, Artificial Sequence
  source: /note="Description of Artificial Sequence: Synthetic oligonucleotide"
ccacaauguugugacuggaccg

SEQ ID NO: 1145 - RNA, 20 nt, Artificial Sequence
  source: /note="Description of Artificial Sequence: Synthetic oligonucleotide"
ccacaauguugugacuggac

SEQ ID NO: 1146 - RNA, 20 nt, Artificial Sequence
  source: /note="Description of Artificial Sequence: Synthetic oligonucleotide"
cacaauguugugacuggacc

SEQ ID NO: 1147 - RNA, 22 nt, Artificial Sequence
  source: /note="Description of Artificial Sequence: Synthetic oligonucleotide"
accugcuagcuccaugcuuccc

SEQ ID NO: 1148 - RNA, 21 nt, Artificial Sequence
  source: /note="Description of Artificial Sequence: Synthetic oligonucleotide"
accugcuagcuccaugcuucc

SEQ ID NO: 1149 - RNA, 20 nt, Artificial Sequence
  source: /note="Description of Artificial Sequence: Synthetic oligonucleotide"
accugcuagcuccaugcuuc

SEQ ID NO: 1150 - RNA, 20 nt, Artificial Sequence
  source: /note="Description of Artificial Sequence: Synthetic oligonucleotide"
ccugcuagcuccaugcuucc

SEQ ID NO: 1151 - RNA, 19 nt, Artificial Sequence
  source: /note="Description of Artificial Sequence: Synthetic oligonucleotide"
ccugcuagcuccaugcuuc

SEQ ID NO: 1152 - RNA, 20 nt, Artificial Sequence
  source: /note="Description of Artificial Sequence: Synthetic oligonucleotide"
cugcuagcuccaugcuuccc

SEQ ID NO: 1153 - RNA, 19 nt, Artificial Sequence
  source: /note="Description of Artificial Sequence: Synthetic oligonucleotide"
cugcuagcuccaugcuucc

SEQ ID NO: 1154 - RNA, 22 nt, Artificial Sequence
  source: /note="Description of Artificial Sequence: Synthetic oligonucleotide"
accgacaaccaguauuuggacc

SEQ ID NO: 1155 - RNA, 21 nt, Artificial Sequence
  source: /note="Description of Artificial Sequence: Synthetic oligonucleotide"
accgacaaccaguauuuggac

SEQ ID NO: 1156 - RNA, 23 nt, Artificial Sequence
  source: /note="Description of Artificial Sequence: Synthetic oligonucleotide"
ccgacaaccaguauuuggaccgu

SEQ ID NO: 1157 - RNA, 23 nt, Artificial Sequence
  source: /note="Description of Artificial Sequence: Synthetic oligonucleotide"
ccgacaaccaguauuuggaccgu

SEQ ID NO: 1158 - RNA, 20 nt, Artificial Sequence
  source: /note="Description of Artificial Sequence: Synthetic oligonucleotide"
ccgacaaccaguauuuggac

SEQ ID NO: 1159 - RNA, 20 nt, Artificial Sequence
  source: /note="Description of Artificial Sequence: Synthetic oligonucleotide"
cgacaaccaguauuuggacc

SEQ ID NO: 1160 - RNA, 21 nt, Artificial Sequence
  source: /note="Description of Artificial Sequence: Synthetic oligonucleotide"
ccugcuagcaccgugcuuacc

SEQ ID NO: 1161 - DNA, 54 bp, Artificial Sequence
  source: /note="Description of Artificial Sequence: Synthetic oligonucleotide"
gtgctgggcggggggcggcgggccctcccgcagaacaccatgcgctcttcggaa

SEQ ID NO: 1162 - DNA, 100 bp, Artificial Sequence
  source: /note="Description of Artificial Sequence: Synthetic polynucleotide"
gaagcaaagaaggggcagagggagcccgtgagctgagtgggccagggactgggagaaggagtgaggaggcagggccggcatgcctctgctgctggccaga

SEQ ID NO: 1163 - DNA, 54 bp, Artificial Sequence
  source: /note="Description of Artificial Sequence: Synthetic oligonucleotide"
gtgctgggcggggggcggcgggccctcccgcagaacaccatgcgctccacggaa

SEQ ID NO: 1164 - DNA, 35 bp, Artificial Sequence
  source: /note="Description of Artificial Sequence: Synthetic oligonucleotide"
gggccctcccgcagaacaccatgcgctccacggaa

SEQ ID NO: 1165 - DNA, 30 bp, Artificial Sequence
  source: /note="Description of Artificial Sequence: Synthetic oligonucleotide"
ctcccgcagaacaccatgcgctccacggaa

SEQ ID NO: 1166 - DNA, 55 bp, Artificial Sequence
  source: /note="Description of Artificial Sequence: Synthetic oligonucleotide"
gtgctgggcggggggcggcgggccctcccgcagaacaccatgcgctccacggaag

SEQ ID NO: 1167 - DNA, 54 bp, Artificial Sequence
  source: /note="Description of Artificial Sequence: Synthetic oligonucleotide"
gtgctgggcggggggcggcgggccctcccgcagaacaccatgcgctcctcggaa

SEQ ID NO: 1168 - DNA, 10 bp, Artificial Sequence
  source: /note="Description of Artificial Sequence: Synthetic oligonucleotide"
tgtgacctgg

SEQ ID NO: 1169 - DNA, 10 bp, Artificial Sequence
  source: /note="Description of Artificial Sequence: Synthetic oligonucleotide"
tgtgatttgg

SEQ ID NO: 1170 - DNA, 18 bp, Artificial Sequence
  source: /note="Description of Artificial Sequence: Synthetic oligonucleotide"
gtctgcacctgtcactag

SEQ ID NO: 1171 - DNA, 10 bp, Artificial Sequence
  source: /note="Description of Artificial Sequence: Synthetic oligonucleotide"
gtgacccaag

SEQ ID NO: 1172 - DNA, 15 bp, Artificial Sequence
  source: /note="Description of Artificial Sequence: Synthetic oligonucleotide"
gtggccactgagaag

SEQ ID NO: 1173 - DNA, 10 bp, Artificial Sequence
  source: /note="Description of Artificial Sequence: Synthetic oligonucleotide"
gtgacccaat

SEQ ID NO: 1174 - DNA, 10 bp, Artificial Sequence
  source: /note="Description of Artificial Sequence: Synthetic oligonucleotide"
gtgacccaac

SEQ ID NO: 1175 - DNA, 15 bp, Artificial Sequence
  source: /note="Description of Artificial Sequence: Synthetic oligonucleotide"
gtggccactgagaaa

SEQ ID NO: 1176 - protein, 7 aa, Artificial Sequence
  source: /note="Description of Artificial Sequence: Synthetic peptide"
QAVRTSL

SEQ ID NO: 1177 - protein, 7 aa, Artificial Sequence
  source: /note="Description of Artificial Sequence: Synthetic peptide"
LAKERLS

SEQ ID NO: 1178 - DNA, 52 bp, Artificial Sequence
  source: /note="Description of Artificial Sequence: Synthetic oligonucleotide"
ctgaggagcgccttgacagcagccatgggagggccgccccctacctcagtga

SEQ ID NO: 1179 - DNA, 52 bp, Artificial Sequence
  source: /note="Description of Artificial Sequence: Synthetic oligonucleotide"
ctgtggagcgccttgacagcagccatgggagggccgccccctacctcagtga

SEQ ID NO: 1180 - DNA, 100 bp, Artificial Sequence
  source: /note="Description of Artificial Sequence: Synthetic polynucleotide"
tggccgtgtagtgctacccagcgctggctgcctcctcagcattgcaattcctctcccatctgggcaccagtcagctaccctggtgggaatctgggtagcc

SEQ ID NO: 1181 - DNA, 35 bp, Artificial Sequence
  source: /note="Description of Artificial Sequence: Synthetic oligonucleotide"
ctgaggagcgccttgacagcagccatgggagggcc

SEQ ID NO: 1182 - DNA, 52 bp, Artificial Sequence
  source: /note="Description of Artificial Sequence: Synthetic oligonucleotide"
ctgcggagcgccttgacagcagccatgggagggccgccccctacctcagtga

SEQ ID NO: 1183 - DNA, 158 bp, Artificial Sequence
  source: /note="Description of Artificial Sequence: Synthetic polynucleotide"
gtgctgggcggggggcggcgggccctcccgcagaacaccatgcgctcttcggaatccaggtttatgaactgaccctgtgacctggttcagttcataaacctggattctgaggagcgccttgacagcagccatgggagggccgccccctacctcagtga

SEQ ID NO: 1184 - DNA, 158 bp, Artificial Sequence
  source: /note="Description of Artificial Sequence: Synthetic polynucleotide"
gtgctgggcggggggcggcgggccctcccgcagaacaccatgcgctcttcggaatccaggtttatgaactgagcctgtgacctggttcagttcataaacctggattctgaggagcgccttgacagcagccatgggagggccgccccctacctcagtga

SEQ ID NO: 1185 - DNA, 158 bp, Artificial Sequence
  source: /note="Description of Artificial Sequence: Synthetic polynucleotide"
gtgctgggcggggggcggcgggccctcccgcagaacaccatgcgctcttcggaatccaggtttatgaactgaacctgtgatttggttcagttcataaacctggattctgaggagcgccttgacagcagccatgggagggccgccccctacctcagtga

SEQ ID NO: 1186 - DNA, 158 bp, Artificial Sequence
  source: /note="Description of Artificial Sequence: Synthetic polynucleotide"
gtgctgggcggggggcggcgggccctcccgcagaacaccatgcgctcttcggaatccaggtttttgaactgaacctgtgacctggttcagttcataaacctggattctgtggagcgccttgacagcagccatgggagggccgccccctacctcagtga

SEQ ID NO: 1187 - DNA, 158 bp, Artificial Sequence
  source: /note="Description of Artificial Sequence: Synthetic polynucleotide"
gtgctgggcggggggcggcgggccctcccgcagaacaccatgcgctcttcggaatccaggtttatgaactgaacctgtgacctggttcagttcataaacctggattctgtggagcgccttgacagcagccatgggagggccgccccctacctcagtga

SEQ ID NO: 1188 - DNA, 260 bp, Artificial Sequence
  source: /note="Description of Artificial Sequence: Synthetic polynucleotide"
gaagcaaagaaggggcagagggagcccgtgagctgagtgggccagggactgggagaaggagtgaggaggcagggccggcatgcctctgctgctggccagatccaggtttatgaactgaaccgtctgcacctgtcactagtgtcggtaccgtctaacactttggccgtgtagtgctacccagcgctggctgcctcctcagcattgcaattcctctcccatctgggcaccagtcagctaccctggtgggaatctgggtagcc

SEQ ID NO: 1189 - DNA, 158 bp, Artificial Sequence
  source: /note="Description of Artificial Sequence: Synthetic polynucleotide"
gtgctgggcggggggcggcgggccctcccgcagaacaccatgcgctcttcggaaggtttatgaactgacgttccctgtgacctggtaacgtcagttcataaaccttctgaggagcgccttgacagcagccatgggagggccgccccctacctcagtga

SEQ ID NO: 1190 - DNA, 158 bp, Artificial Sequence
  source: /note="Description of Artificial Sequence: Synthetic polynucleotide"
gtgctgggcggggggcggcgggccctcccgcagaacaccatgcgctcttcggaaggtttatgaactgacgttgcctgtgacctggtaacgtcagttcataaaccttctgaggagcgccttgacagcagccatgggagggccgccccctacctcagtga

SEQ ID NO: 1191 - DNA, 158 bp, Artificial Sequence
  source: /note="Description of Artificial Sequence: Synthetic polynucleotide"
gtgctgggcggggggcggcgggccctcccgcagaacaccatgcgctcttcggaaggtttatgaactgacgttacctgtgatttggtaacgtcagttcataaaccttctgaggagcgccttgacagcagccatgggagggccgccccctacctcagtga

SEQ ID NO: 1192 - DNA, 158 bp, Artificial Sequence
  source: /note="Description of Artificial Sequence: Synthetic polynucleotide"
gtgctgggcggggggcggcgggccctcccgcagaacaccatgcgctcttcggaaggtttatgatctgacgttacctgtgacctggtaacgtcagttcataaaccttctgtggagcgccttgacagcagccatgggagggccgccccctacctcagtga

SEQ ID NO: 1193 - DNA, 158 bp, Artificial Sequence
  source: /note="Description of Artificial Sequence: Synthetic polynucleotide"
gtgctgggcggggggcggcgggccctcccgcagaacaccatgcgctcttcggaaggtttatgaactgacgttacctgtgacctggtaacgtcagttcataaaccttctgtggagcgccttgacagcagccatgggagggccgccccctacctcagtga

SEQ ID NO: 1194 - DNA, 260 bp, Artificial Sequence
  source: /note="Description of Artificial Sequence: Synthetic polynucleotide"
gaagcaaagaaggggcagagggagcccgtgagctgagtgggccagggactgggagaaggagtgaggaggcagggccggcatgcctctgctgctggccagaggtttatgaactgacgttaccgtctgcacctgtcactagtaacgtcagttcataaacctttggccgtgtagtgctacccagcgctggctgcctcctcagcattgcaattcctctcccatctgggcaccagtcagctaccctggtgggaatctgggtagcc

SEQ ID NO: 1195 - DNA, 158 bp, Artificial Sequence
  source: /note="Description of Artificial Sequence: Synthetic polynucleotide"
gtgctgggcggggggcggcgggccctcccgcagaacaccatgcgctcttcggaagtttatgaactgatcttaccctgtgacctggttaacgtcagttcataaacttctgaggagcgccttgacagcagccatgggagggccgccccctacctcagtga

SEQ ID NO: 1196 - DNA, 158 bp, Artificial Sequence
  source: /note="Description of Artificial Sequence: Synthetic polynucleotide"
gtgctgggcggggggcggcgggccctcccgcagaacaccatgcgctcttcggaagtttatgaactgatcttagcctgtgacctggttaacgtcagttcataaacttctgaggagcgccttgacagcagccatgggagggccgccccctacctcagtga

SEQ ID NO: 1197 - DNA, 158 bp, Artificial Sequence
  source: /note="Description of Artificial Sequence: Synthetic polynucleotide"
gtgctgggcggggggcggcgggccctcccgcagaacaccatgcgctcttcggaagtttatgaactgatcttaccctgtgatttggttaacgtcagttcataaacttctgaggagcgccttgacagcagccatgggagggccgccccctacctcagtga

SEQ ID NO: 1198 - DNA, 158 bp, Artificial Sequence
  source: /note="Description of Artificial Sequence: Synthetic polynucleotide"
gtgctgggcggggggcggcgggccctcccgcagaacaccatgcgctcttcggaagtttatgaagtgatcttaacctgtgacctggttaacgtcagttcataaacttctgtggagcgccttgacagcagccatgggagggccgccccctacctcagtga

SEQ ID NO: 1199 - DNA, 158 bp, Artificial Sequence
  source: /note="Description of Artificial Sequence: Synthetic polynucleotide"
gtgctgggcggggggcggcgggccctcccgcagaacaccatgcgctcttcggaagtttatgaactgatcttaacctgtgacctggttaacgtcagttcataaacttctgtggagcgccttgacagcagccatgggagggccgccccctacctcagtga

SEQ ID NO: 1200 - DNA, 260 bp, Artificial Sequence
  source: /note="Description of Artificial Sequence: Synthetic polynucleotide"
gaagcaaagaaggggcagagggagcccgtgagctgagtgggccagggactgggagaaggagtgaggaggcagggccggcatgcctctgctgctggccagagtttatgaactgatcttacccgtctgcacctgtcactagttaacgtcagttcataaactttggccgtgtagtgctacccagcgctggctgcctcctcagcattgcaattcctctcccatctgggcaccagtcagctaccctggtgggaatctgggtagcc

SEQ ID NO: 1201 - DNA, 158 bp, Artificial Sequence
  source: /note="Description of Artificial Sequence: Synthetic polynucleotide"
gtgctgggcggggggcggcgggccctcccgcagaacaccatgcgctcttcggaagtttatgaactgatcttgccctgtgacctggttaacgtcagttcataaacttctgaggagcgccttgacagcagccatgggagggccgccccctacctcagtga

SEQ ID NO: 1202 - DNA, 158 bp, Artificial Sequence
  source: /note="Description of Artificial Sequence: Synthetic polynucleotide"
gtgctgggcggggggcggcgggccctcccgcagaacaccatgcgctcttcggaagtttatgaactgatcttggcctgtgacctggttaacgtcagttcataaacttctgaggagcgccttgacagcagccatgggagggccgccccctacctcagtga

SEQ ID NO: 1203 - DNA, 158 bp, Artificial Sequence
  source: /note="Description of Artificial Sequence: Synthetic polynucleotide"
gtgctgggcggggggcggcgggccctcccgcagaacaccatgcgctcttcggaagtttatgaactgatcttgccctgtgatttggttaacgtcagttcataaacttctgaggagcgccttgacagcagccatgggagggccgccccctacctcagtga

SEQ ID NO: 1204 - DNA, 158 bp, Artificial Sequence
  source: /note="Description of Artificial Sequence: Synthetic polynucleotide"
gtgctgggcggggggcggcgggccctcccgcagaacaccatgcgctcttcggaagtttatgaactgatcttgacctgtgacctggttaacgtcagttcataaacttctgtggagcgccttgacagcagccatgggagggccgccccctacctcagtga

SEQ ID NO: 1205 - DNA, 260 bp, Artificial Sequence
  source: /note="Description of Artificial Sequence: Synthetic polynucleotide"
gaagcaaagaaggggcagagggagcccgtgagctgagtgggccagggactgggagaaggagtgaggaggcagggccggcatgcctctgctgctggccagagtttatgaactgatcttgcccgtctgcacctgtcactagttaacgtcagttcataaactttggccgtgtagtgctacccagcgctggctgcctcctcagcattgcaattcctctcccatctgggcaccagtcagctaccctggtgggaatctgggtagcc

SEQ ID NO: 1206 - DNA, 158 bp, Artificial Sequence
  source: /note="Description of Artificial Sequence: Synthetic polynucleotide"
gtgctgggcggggggcggcgggccctcccgcagaacaccatgcgctcttcggaaccacaatgttgtgactggccctgtgacctggtccggtcacaacattgtggttctgaggagcgccttgacagcagccatgggagggccgccccctacctcagtga

SEQ ID NO: 1207 - DNA, 158 bp, Artificial Sequence
  source: /note="Description of Artificial Sequence: Synthetic polynucleotide"
gtgctgggcggggggcggcgggccctcccgcagaacaccatgcgctcttcggaaccacaatgttgtgactgggcctgtgacctggtccggtcacaacattgtggttctgaggagcgccttgacagcagccatgggagggccgccccctacctcagtga

SEQ ID NO: 1208 - DNA, 158 bp, Artificial Sequence
  source: /note="Description of Artificial Sequence: Synthetic polynucleotide"
gtgctgggcggggggcggcgggccctcccgcagaacaccatgcgctcttcggaaccacaatgttgtgactggacctgtgatttggtccggtcacaacattgtggttctgaggagcgccttgacagcagccatgggagggccgccccctacctcagtga

SEQ ID NO: 1209 - DNA, 158 bp, Artificial Sequence
  source: /note="Description of Artificial Sequence: Synthetic polynucleotide"
gtgctgggcggggggcggcgggccctcccgcagaacaccatgcgctcttcggaaccacaatgtagtgactggacctgtgacctggtccggtcacaacattgtggttctgtggagcgccttgacagcagccatgggagggccgccccctacctcagtga

SEQ ID NO: 1210 - DNA, 158 bp, Artificial Sequence
  source: /note="Description of Artificial Sequence: Synthetic polynucleotide"
gtgctgggcggggggcggcgggccctcccgcagaacaccatgcgctcttcggaaccacaatgttgtgactggacctgtgacctggtccggtcacaacattgtggttctgtggagcgccttgacagcagccatgggagggccgccccctacctcagtga

SEQ ID NO: 1211 - DNA, 260 bp, Artificial Sequence
  source: /note="Description of Artificial Sequence: Synthetic polynucleotide"
gaagcaaagaaggggcagagggagcccgtgagctgagtgggccagggactgggagaaggagtgaggaggcagggccggcatgcctctgctgctggccagaccacaatgttgtgactggaccgtctgcacctgtcactagtccggtcacaacattgtggtttggccgtgtagtgctacccagcgctggctgcctcctcagcattgcaattcctctcccatctgggcaccagtcagctaccctggtgggaatctgggtagcc

SEQ ID NO: 1212 - DNA, 158 bp, Artificial Sequence
  source: /note="Description of Artificial Sequence: Synthetic polynucleotide"
gtgctgggcggggggcggcgggccctcccgcagaacaccatgcgctcttcggaagtgttagacggtactgatccctgtgacctggtgtcggtaccgtctaacacttctgaggagcgccttgacagcagccatgggagggccgccccctacctcagtga

SEQ ID NO: 1213 - DNA, 158 bp, Artificial Sequence
  source: /note="Description of Artificial Sequence: Synthetic polynucleotide"
gtgctgggcggggggcggcgggccctcccgcagaacaccatgcgctcttcggaagtgttagacggtactgatgcctgtgacctggtgtcggtaccgtctaacacttctgaggagcgccttgacagcagccatgggagggccgccccctacctcagtga

SEQ ID NO: 1214 - DNA, 158 bp, Artificial Sequence
  source: /note="Description of Artificial Sequence: Synthetic polynucleotide"
gtgctgggcggggggcggcgggccctcccgcagaacaccatgcgctcttcggaagtgttagacggtactgatccctgtgatttggtgtcggtaccgtctaacacttctgaggagcgccttgacagcagccatgggagggccgccccctacctcagtga

SEQ ID NO: 1215 - DNA, 158 bp, Artificial Sequence
  source: /note="Description of Artificial Sequence: Synthetic polynucleotide"
gtgctgggcggggggcggcgggccctcccgcagaacaccatgcgctcttcggaagtgttagaccgtactgatacctgtgacctggtgtcggtaccgtctaacacttctgtggagcgccttgacagcagccatgggagggccgccccctacctcagtga

SEQ ID NO: 1216 - DNA, 158 bp, Artificial Sequence
  source: /note="Description of Artificial Sequence: Synthetic polynucleotide"
gtgctgggcggggggcggcgggccctcccgcagaacaccatgcgctcttcggaagtgttagacggtactgatacctgtgacctggtgtcggtaccgtctaacacttctgtggagcgccttgacagcagccatgggagggccgccccctacctcagtga

SEQ ID NO: 1217 - DNA, 260 bp, Artificial Sequence
  source: /note="Description of Artificial Sequence: Synthetic polynucleotide"
gaagcaaagaaggggcagagggagcccgtgagctgagtgggccagggactgggagaaggagtgaggaggcagggccggcatgcctctgctgctggccagagtgttagacggtactgatcccgtctgcacctgtcactagtgtcggtaccgtctaacactttggccgtgtagtgctacccagcgctggctgcctcctcagcattgcaattcctctcccatctgggcaccagtcagctaccctggtgggaatctgggtagcc

SEQ ID NO: 1218 - DNA, 158 bp, Artificial Sequence
  source: /note="Description of Artificial Sequence: Synthetic polynucleotide"
gtgctgggcggggggcggcgggccctcccgcagaacaccatgcgctcttcggaaccgacaaccagtatttggccctgtgacctggtccaaatactggttgtcggttctgaggagcgccttgacagcagccatgggagggccgccccctacctcagtga

SEQ ID NO: 1219 - DNA, 158 bp, Artificial Sequence
  source: /note="Description of Artificial Sequence: Synthetic polynucleotide"
gtgctgggcggggggcggcgggccctcccgcagaacaccatgcgctcttcggaaccgacaaccagtatttgggcctgtgacctggtccaaatactggttgtcggttctgaggagcgccttgacagcagccatgggagggccgccccctacctcagtga

SEQ ID NO: 1220 - DNA, 158 bp, Artificial Sequence
  source: /note="Description of Artificial Sequence: Synthetic polynucleotide"
gtgctgggcggggggcggcgggccctcccgcagaacaccatgcgctcttcggaaccgacaaccagtatttggacctgtgatttggtccaaatactggttgtcggttctgaggagcgccttgacagcagccatgggagggccgccccctacctcagtga

SEQ ID NO: 1221 - DNA, 158 bp, Artificial Sequence
  source: /note="Description of Artificial Sequence: Synthetic polynucleotide"
gtgctgggcggggggcggcgggccctcccgcagaacaccatgcgctcttcggaaccgacaacctgtatttggacctgtgacctggtccaaatactggttgtcggttctgtggagcgccttgacagcagccatgggagggccgccccctacctcagtga

SEQ ID NO: 1222 - DNA, 158 bp, Artificial Sequence
  source: /note="Description of Artificial Sequence: Synthetic polynucleotide"
gtgctgggcggggggcggcgggccctcccgcagaacaccatgcgctcttcggaaccgacaaccagtatttggacctgtgacctggtccaaatactggttgtcggttctgtggagcgccttgacagcagccatgggagggccgccccctacctcagtga

SEQ ID NO: 1223 - DNA, 260 bp, Artificial Sequence
  source: /note="Description of Artificial Sequence: Synthetic polynucleotide"
gaagcaaagaaggggcagagggagcccgtgagctgagtgggccagggactgggagaaggagtgaggaggcagggccggcatgcctctgctgctggccagaccgacaaccagtatttggaccgtctgcacctgtcactagtccaaatactggttgtcggtttggccgtgtagtgctacccagcgctggctgcctcctcagcattgcaattcctctcccatctgggcaccagtcagctaccctggtgggaatctgggtagcc

SEQ ID NO: 1224 - DNA, 158 bp, Artificial Sequence
  source: /note="Description of Artificial Sequence: Synthetic polynucleotide"
gtgctgggcggggggcggcgggccctcccgcagaacaccatgcgctcttcggaagtcacaaagaaccgtgtaccctgtgacctggttgcacggttctttgtgacttctgaggagcgccttgacagcagccatgggagggccgccccctacctcagtga

SEQ ID NO: 1225 - DNA, 158 bp, Artificial Sequence
  source: /note="Description of Artificial Sequence: Synthetic polynucleotide"
gtgctgggcggggggcggcgggccctcccgcagaacaccatgcgctcttcggaagtcacaaagaaccgtgtagcctgtgacctggttgcacggttctttgtgacttctgaggagcgccttgacagcagccatgggagggccgccccctacctcagtga

SEQ ID NO: 1226 - DNA, 158 bp, Artificial Sequence
  source: /note="Description of Artificial Sequence: Synthetic polynucleotide"
gtgctgggcggggggcggcgggccctcccgcagaacaccatgcgctcttcggaagtcacaaagaaccgtgtaacctgtgatttggttgcacggttctttgtgacttctgaggagcgccttgacagcagccatgggagggccgccccctacctcagtga

SEQ ID NO: 1227 - DNA, 158 bp, Artificial Sequence
  source: /note="Description of Artificial Sequence: Synthetic polynucleotide"
gtgctgggcggggggcggcgggccctcccgcagaacaccatgcgctcttcggaagtcacaaagtaccgtgtaacctgtgacctggttgcacggttctttgtgacttctgtggagcgccttgacagcagccatgggagggccgccccctacctcagtga

SEQ ID NO: 1228 - DNA, 158 bp, Artificial Sequence
  source: /note="Description of Artificial Sequence: Synthetic polynucleotide"
gtgctgggcggggggcggcgggccctcccgcagaacaccatgcgctcttcggaagtcacaaagaaccgtgtaacctgtgacctggttgcacggttctttgtgacttctgtggagcgccttgacagcagccatgggagggccgccccctacctcagtga

SEQ ID NO: 1229 - DNA, 260 bp, Artificial Sequence
  source: /note="Description of Artificial Sequence: Synthetic polynucleotide"
gaagcaaagaaggggcagagggagcccgtgagctgagtgggccagggactgggagaaggagtgaggaggcagggccggcatgcctctgctgctggccagagtcacaaagaaccgtgtaaccgtctgcacctgtcactagttgcacggttctttgtgactttggccgtgtagtgctacccagcgctggctgcctcctcagcattgcaattcctctcccatctgggcaccagtcagctaccctggtgggaatctgggtagcc

SEQ ID NO: 1230 - DNA, 158 bp, Artificial Sequence
  source: /note="Description of Artificial Sequence: Synthetic polynucleotide"
gtgctgggcggggggcggcgggccctcccgcagaacaccatgcgctcttcggaatgaacctcttgttataaaccctgtgacctggttttataacaagaggttcattctgaggagcgccttgacagcagccatgggagggccgccccctacctcagtga

SEQ ID NO: 1231 - DNA, 158 bp, Artificial Sequence
  source: /note="Description of Artificial Sequence: Synthetic polynucleotide"
gtgctgggcggggggcggcgggccctcccgcagaacaccatgcgctcttcggaatgaacctcttgttataaagcctgtgacctggttttataacaagaggttcattctgaggagcgccttgacagcagccatgggagggccgccccctacctcagtga

SEQ ID NO: 1232 - DNA, 158 bp, Artificial Sequence
  source: /note="Description of Artificial Sequence: Synthetic polynucleotide"
gtgctgggcggggggcggcgggccctcccgcagaacaccatgcgctcttcggaatgaacctcttgttataaaacctgtgatttggttttataacaagaggttcattctgaggagcgccttgacagcagccatgggagggccgccccctacctcagtga

SEQ ID NO: 1233 - DNA, 158 bp, Artificial Sequence
  source: /note="Description of Artificial Sequence: Synthetic polynucleotide"
gtgctgggcggggggcggcgggccctcccgcagaacaccatgcgctcttcggaatgaacctctagttataaaacctgtgacctggttttataacaagaggttcattctgtggagcgccttgacagcagccatgggagggccgccccctacctcagtga

SEQ ID NO: 1234 - DNA, 158 bp, Artificial Sequence
  source: /note="Description of Artificial Sequence: Synthetic polynucleotide"
gtgctgggcggggggcggcgggccctcccgcagaacaccatgcgctcttcggaatgaacctcttgttataaaacctgtgacctggttttataacaagaggttcattctgtggagcgccttgacagcagccatgggagggccgccccctacctcagtga

SEQ ID NO: 1235 - DNA, 260 bp, Artificial Sequence
  source: /note="Description of Artificial Sequence: Synthetic polynucleotide"
gaagcaaagaaggggcagagggagcccgtgagctgagtgggccagggactgggagaaggagtgaggaggcagggccggcatgcctctgctgctggccagatgaacctcttgttataaaaccgtctgcacctgtcactagttttataacaagaggttcatttggccgtgtagtgctacccagcgctggctgcctcctcagcattgcaattcctctcccatctgggcaccagtcagctaccctggtgggaatctgggtagcc

SEQ ID NO: 1236 - DNA, 158 bp, Artificial Sequence
  source: /note="Description of Artificial Sequence: Synthetic polynucleotide"
gtgctgggcggggggcggcgggccctcccgcagaacaccatgcgctcttcggaagatcattggaattcctaatcctgtgacctggtttaggaattccaatgatcttctgaggagcgccttgacagcagccatgggagggccgccccctacctcagtga

SEQ ID NO: 1237 - DNA, 158 bp, Artificial Sequence
  source: /note="Description of Artificial Sequence: Synthetic polynucleotide"
gtgctgggcggggggcggcgggccctcccgcagaacaccatgcgctcttcggaagatcattggaattcctaagcctgtgacctggtttaggaattccaatgatcttctgaggagcgccttgacagcagccatgggagggccgccccctacctcagtga

SEQ ID NO: 1238 - DNA, 158 bp, Artificial Sequence
  source: /note="Description of Artificial Sequence: Synthetic polynucleotide"
gtgctgggcggggggcggcgggccctcccgcagaacaccatgcgctcttcggaagatcattggaattcctaaacctgtgatttggtttaggaattccaatgatcttctgaggagcgccttgacagcagccatgggagggccgccccctacctcagtga

SEQ ID NO: 1239 - DNA, 158 bp, Artificial Sequence
  source: /note="Description of Artificial Sequence: Synthetic polynucleotide"
gtgctgggcggggggcggcgggccctcccgcagaacaccatgcgctcttcggaagatcattggtattcctaaacctgtgacctggtttaggaattccaatgatcttctgtggagcgccttgacagcagccatgggagggccgccccctacctcagtga

SEQ ID NO: 1240 - DNA, 158 bp, Artificial Sequence
  source: /note="Description of Artificial Sequence: Synthetic polynucleotide"
gtgctgggcggggggcggcgggccctcccgcagaacaccatgcgctcttcggaagatcattggaattcctaaacctgtgacctggtttaggaattccaatgatcttctgtggagcgccttgacagcagccatgggagggccgccccctacctcagtga

SEQ ID NO: 1241 - DNA, 260 bp, Artificial Sequence
  source: /note="Description of Artificial Sequence: Synthetic polynucleotide"
gaagcaaagaaggggcagagggagcccgtgagctgagtgggccagggactgggagaaggagtgaggaggcagggccggcatgcctctgctgctggccagagatcattggaattcctaaaccgtctgcacctgtcactagtttaggaattccaatgatctttggccgtgtagtgctacccagcgctggctgcctcctcagcattgcaattcctctcccatctgggcaccagtcagctaccctggtgggaatctgggtagcc

SEQ ID NO: 1242 - DNA, 158 bp, Artificial Sequence
  source: /note="Description of Artificial Sequence: Synthetic polynucleotide"
gtgctgggcggggggcggcgggccctcccgcagaacaccatgcgctcttcggaacattggaattcctaaaattcctgtgacctggtattttaggaattccaatgttctgaggagcgccttgacagcagccatgggagggccgccccctacctcagtga

SEQ ID NO: 1243 - DNA, 158 bp, Artificial Sequence
  source: /note="Description of Artificial Sequence: Synthetic polynucleotide"
gtgctgggcggggggcggcgggccctcccgcagaacaccatgcgctcttcggaacattggaattcctaaaatgcctgtgacctggtattttaggaattccaatgttctgaggagcgccttgacagcagccatgggagggccgccccctacctcagtga

SEQ ID NO: 1244 - DNA, 158 bp, Artificial Sequence
  source: /note="Description of Artificial Sequence: Synthetic polynucleotide"
gtgctgggcggggggcggcgggccctcccgcagaacaccatgcgctcttcggaacattggaattcctaaaatacctgtgatttggtattttaggaattccaatgttctgaggagcgccttgacagcagccatgggagggccgccccctacctcagtga

SEQ ID NO: 1245 - DNA, 158 bp, Artificial Sequence
  source: /note="Description of Artificial Sequence: Synthetic polynucleotide"
gtgctgggcggggggcggcgggccctcccgcagaacaccatgcgctcttcggaacattggaatacctaaaatacctgtgacctggtattttaggaattccaatgttctgtggagcgccttgacagcagccatgggagggccgccccctacctcagtga

SEQ ID NO: 1246 - DNA, 158 bp, Artificial Sequence
  source: /note="Description of Artificial Sequence: Synthetic polynucleotide"
gtgctgggcggggggcggcgggccctcccgcagaacaccatgcgctcttcggaacattggaattcctaaaatacctgtgacctggtattttaggaattccaatgttctgtggagcgccttgacagcagccatgggagggccgccccctacctcagtga

SEQ ID NO: 1247 - DNA, 260 bp, Artificial Sequence
  source: /note="Description of Artificial Sequence: Synthetic polynucleotide"
gaagcaaagaaggggcagagggagcccgtgagctgagtgggccagggactgggagaaggagtgaggaggcagggccggcatgcctctgctgctggccagacattggaattcctaaaataccgtctgcacctgtcactagtattttaggaattccaatgtttggccgtgtagtgctacccagcgctggctgcctcctcagcattgcaattcctctcccatctgggcaccagtcagctaccctggtgggaatctgggtagcc

SEQ ID NO: 1248 - DNA, 158 bp, Artificial Sequence
  source: /note="Description of Artificial Sequence: Synthetic polynucleotide"
gtgctgggcggggggcggcgggccctcccgcagaacaccatgcgctcttcggaagcaattcagtctcgttgtccctgtgacctggtacaacgagactgaattgcttctgaggagcgccttgacagcagccatgggagggccgccccctacctcagtga

SEQ ID NO: 1249 - DNA, 158 bp, Artificial Sequence
  source: /note="Description of Artificial Sequence: Synthetic polynucleotide"
gtgctgggcggggggcggcgggccctcccgcagaacaccatgcgctcttcggaagcaattcagtctcgttgtgcctgtgacctggtacaacgagactgaattgcttctgaggagcgccttgacagcagccatgggagggccgccccctacctcagtga

SEQ ID NO: 1250 - DNA, 158 bp, Artificial Sequence
  source: /note="Description of Artificial Sequence: Synthetic polynucleotide"
gtgctgggcggggggcggcgggccctcccgcagaacaccatgcgctcttcggaagcaattcagtctcgttgtacctgtgatttggtacaacgagactgaattgcttctgaggagcgccttgacagcagccatgggagggccgccccctacctcagtga

SEQ ID NO: 1251 - DNA, 158 bp, Artificial Sequence
  source: /note="Description of Artificial Sequence: Synthetic polynucleotide"
gtgctgggcggggggcggcgggccctcccgcagaacaccatgcgctcttcggaagcaattcagactcgttgtacctgtgacctggtacaacgagactgaattgcttctgtggagcgccttgacagcagccatgggagggccgccccctacctcagtga

SEQ ID NO: 1252 - DNA, 158 bp, Artificial Sequence
  source: /note="Description of Artificial Sequence: Synthetic polynucleotide"
gtgctgggcggggggcggcgggccctcccgcagaacaccatgcgctcttcggaagcaattcagtctcgttgtacctgtgacctggtacaacgagactgaattgcttctgtggagcgccttgacagcagccatgggagggccgccccctacctcagtga

SEQ ID NO: 1253 - DNA, 260 bp, Artificial Sequence
  source: /note="Description of Artificial Sequence: Synthetic polynucleotide"
gaagcaaagaaggggcagagggagcccgtgagctgagtgggccagggactgggagaaggagtgaggaggcagggccggcatgcctctgctgctggccagagcaattcagtctcgttgtaccgtctgcacctgtcactagtacaacgagactgaattgctttggccgtgtagtgctacccagcgctggctgcctcctcagcattgcaattcctctcccatctgggcaccagtcagctaccctggtgggaatctgggtagcc

SEQ ID NO: 1254 - DNA, 158 bp, Artificial Sequence
  source: /note="Description of Artificial Sequence: Synthetic polynucleotide"
gtgctgggcggggggcggcgggccctcccgcagaacaccatgcgctcttcggaacctgctagctccatgcttccctgtgacctggtaagcatggagctagcaggttctgaggagcgccttgacagcagccatgggagggccgccccctacctcagtga

SEQ ID NO: 1255 - DNA, 158 bp, Artificial Sequence
  source: /note="Description of Artificial Sequence: Synthetic polynucleotide"
gtgctgggcggggggcggcgggccctcccgcagaacaccatgcgctcttcggaacctgctagctccatgcttgcctgtgacctggtaagcatggagctagcaggttctgaggagcgccttgacagcagccatgggagggccgccccctacctcagtga

SEQ ID NO: 1256 - DNA, 158 bp, Artificial Sequence
  source: /note="Description of Artificial Sequence: Synthetic polynucleotide"
gtgctgggcggggggcggcgggccctcccgcagaacaccatgcgctcttcggaacctgctagctccatgcttccctgtgatttggtaagcatggagctagcaggttctgaggagcgccttgacagcagccatgggagggccgccccctacctcagtga

SEQ ID NO: 1257 - DNA, 158 bp, Artificial Sequence
  source: /note="Description of Artificial Sequence: Synthetic polynucleotide"
gtgctgggcggggggcggcgggccctcccgcagaacaccatgcgctcttcggaacctgctagcaccatgcttacctgtgacctggtaagcatggagctagcaggttctgtggagcgccttgacagcagccatgggagggccgccccctacctcagtga

SEQ ID NO: 1258 - DNA, 158 bp, Artificial Sequence
  source: /note="Description of Artificial Sequence: Synthetic polynucleotide"
gtgctgggcggggggcggcgggccctcccgcagaacaccatgcgctcttcggaacctgctagctccatgcttacctgtgacctggtaagcatggagctagcaggttctgtggagcgccttgacagcagccatgggagggccgccccctacctcagtga

SEQ ID NO: 1259 - DNA, 260 bp, Artificial Sequence
  source: /note="Description of Artificial Sequence: Synthetic polynucleotide"
gaagcaaagaaggggcagagggagcccgtgagctgagtgggccagggactgggagaaggagtgaggaggcagggccggcatgcctctgctgctggccagacctgctagctccatgcttcccgtctgcacctgtcactagtaagcatggagctagcaggtttggccgtgtagtgctacccagcgctggctgcctcctcagcattgcaattcctctcccatctgggcaccagtcagctaccctggtgggaatctgggtagcc

SEQ ID NO: 1260 - DNA, 158 bp, Artificial Sequence
  source: /note="Description of Artificial Sequence: Synthetic polynucleotide"
gtgctgggcggggggcggcgggccctcccgcagaacaccatgcgctcttcggaacctgctagctccatgcttgctgtgacccaagtaagcatggagctagcaggttctgaggagcgccttgacagcagccatgggagggccgccccctacctcagtga

SEQ ID NO: 1261 - DNA, 158 bp, Artificial Sequence
  source: /note="Description of Artificial Sequence: Synthetic polynucleotide"
gtgctgggcggggggcggcgggccctcccgcagaacaccatgcgctccacggaacctgctagctccatgcttgctgtgacccaagtaagcatggagctagcaggttctgaggagcgccttgacagcagccatgggagggccgccccctacctcagtga

SEQ ID NO: 1262 - DNA, 163 bp, Artificial Sequence
  source: /note="Description of Artificial Sequence: Synthetic polynucleotide"
gtgctgggcggggggcggcgggccctcccgcagaacaccatgcgctccacggaacctgctagctccatgcttgctgtggccactgagaagtaagcatggagctagcaggttctgaggagcgccttgacagcagccatgggagggccgccccctacctcagtga

SEQ ID NO: 1263 - DNA, 122 bp, Artificial Sequence
  source: /note="Description of Artificial Sequence: Synthetic polynucleotide"
gggccctcccgcagaacaccatgcgctccacggaacctgctagctccatgcttgctgtgacccaagtaagcatggagctagcaggttctgaggagcgccttgacagcagccatgggagggcc

SEQ ID NO: 1264 - DNA, 117 bp, Artificial Sequence
  source: /note="Description of Artificial Sequence: Synthetic polynucleotide"
ctcccgcagaacaccatgcgctccacggaacctgctagctccatgcttgctgtgacccaagtaagcatggagctagcaggttctgaggagcgccttgacagcagccatgggagggcc

SEQ ID NO: 1265 - DNA, 160 bp, Artificial Sequence
  source: /note="Description of Artificial Sequence: Synthetic polynucleotide"
gtgctgggcggggggcggcgggccctcccgcagaacaccatgcgctccacggaagcctgctagctccatgcttgctgtgacccaagtaagcatggagctagcaggcttctgaggagcgccttgacagcagccatgggagggccgccccctacctcagtga

SEQ ID NO: 1266 - DNA, 158 bp, Artificial Sequence
  source: /note="Description of Artificial Sequence: Synthetic polynucleotide"
gtgctgggcggggggcggcgggccctcccgcagaacaccatgcgctccacggaacctgctagctccatgcttgatgtgacccaattaagcatggagctagcaggttctgaggagcgccttgacagcagccatgggagggccgccccctacctcagtga

SEQ ID NO: 1267 - DNA, 158 bp, Artificial Sequence
  source: /note="Description of Artificial Sequence: Synthetic polynucleotide"
gtgctgggcggggggcggcgggccctcccgcagaacaccatgcgctcctcggaacctgctagctccatgcttgctgtgacccaagtaagcatggagctagcaggttctgcggagcgccttgacagcagccatgggagggccgccccctacctcagtga

SEQ ID NO: 1268 - DNA, 158 bp, Artificial Sequence; identical to SEQ ID NO: 1242
  source: /note="Description of Artificial Sequence: Synthetic polynucleotide"

SEQ ID NO: 1269 - DNA, 158 bp, Artificial Sequence; identical to SEQ ID NO: 1236
  source: /note="Description of Artificial Sequence: Synthetic polynucleotide"

SEQ ID NO: 1270 - DNA, 158 bp, Artificial Sequence; identical to SEQ ID NO: 1243
  source: /note="Description of Artificial Sequence: Synthetic polynucleotide"

SEQ ID NO: 1271 - DNA, 158 bp, Artificial Sequence; identical to SEQ ID NO: 1237
  source: /note="Description of Artificial Sequence: Synthetic polynucleotide"

SEQ ID NO: 1272 - DNA, 158 bp, Artificial Sequence; identical to SEQ ID NO: 1244
  source: /note="Description of Artificial Sequence: Synthetic polynucleotide"

SEQ ID NO: 1273 - DNA, 158 bp, Artificial Sequence; identical to SEQ ID NO: 1238
  source: /note="Description of Artificial Sequence: Synthetic polynucleotide"

SEQ ID NO: 1274 - DNA, 158 bp, Artificial Sequence; identical to SEQ ID NO: 1245
  source: /note="Description of Artificial Sequence: Synthetic polynucleotide"

SEQ ID NO: 1275 - DNA, 158 bp, Artificial Sequence; identical to SEQ ID NO: 1239
  source: /note="Description of Artificial Sequence: Synthetic polynucleotide"

SEQ ID NO: 1276 - DNA, 158 bp, Artificial Sequence; identical to SEQ ID NO: 1246
  source: /note="Description of Artificial Sequence: Synthetic polynucleotide"

SEQ ID NO: 1277 - DNA, 158 bp, Artificial Sequence; identical to SEQ ID NO: 1240
  source: /note="Description of Artificial Sequence: Synthetic polynucleotide"

SEQ ID NO: 1278 - DNA, 260 bp, Artificial Sequence; identical to SEQ ID NO: 1247
  source: /note="Description of Artificial Sequence: Synthetic polynucleotide"

SEQ ID NO: 1279 - DNA, 260 bp, Artificial Sequence; identical to SEQ ID NO: 1241
  source: /note="Description of Artificial Sequence: Synthetic polynucleotide"

SEQ ID NO: 1280 - DNA, 21 bp, Artificial Sequence
  source: /note="Description of Artificial Sequence: Synthetic oligonucleotide"
gtttatgaactgatcttaccc

SEQ ID NO: 1281 - DNA, 21 bp, Artificial Sequence
  source: /note="Description of Artificial Sequence: Synthetic oligonucleotide"
gtgttagacggtactgatccc

SEQ ID NO: 1282 - DNA, 21 bp, Artificial Sequence
  source: /note="Description of Artificial Sequence: Synthetic oligonucleotide"
cctgctagctccatgcttccc

SEQ ID NO: 1283 - DNA, 21 bp, Artificial Sequence
  source: /note="Description of Artificial Sequence: Synthetic oligonucleotide"
gtttatgaactgatcttagcc

SEQ ID NO: 1284 - DNA, 21 bp, Artificial Sequence
  source: /note="Description of Artificial Sequence: Synthetic oligonucleotide"
gtgttagacggtactgatgcc

SEQ ID NO: 1285 - DNA, 21 bp, Artificial Sequence
  source: /note="Description of Artificial Sequence: Synthetic oligonucleotide"
cctgctagctccatgcttgcc

SEQ ID NO: 1286 - DNA, 21 bp, Artificial Sequence
  source: /note="Description of Artificial Sequence: Synthetic oligonucleotide"
gtttatgaagtgatcttaacc

SEQ ID NO: 1287 - DNA, 21 bp, Artificial Sequence
  source: /note="Description of Artificial Sequence: Synthetic oligonucleotide"
gtgttagaccgtactgatacc

SEQ ID NO: 1288 - DNA, 21 bp, Artificial Sequence
  source: /note="Description of Artificial Sequence: Synthetic oligonucleotide"
cctgctagcaccatgcttacc

SEQ ID NO: 1289 - DNA, 21 bp, Artificial Sequence
  source: /note="Description of Artificial Sequence: Synthetic oligonucleotide"
gtttatgaactgatcttaacc

SEQ ID NO: 1290 - DNA, 21 bp, Artificial Sequence
  source: /note="Description of Artificial Sequence: Synthetic oligonucleotide"
gtgttagacggtactgatacc

SEQ ID NO: 1291 - DNA, 21 bp, Artificial Sequence
  source: /note="Description of Artificial Sequence: Synthetic oligonucleotide"
cctgctagctccatgcttacc

SEQ ID NO: 1292 - DNA, 21 bp, Artificial Sequence
  source: /note="Description of Artificial Sequence: Synthetic oligonucleotide"
gtttatgaactgatcttgccc

SEQ ID NO: 1293 - DNA, 21 bp, Artificial Sequence
  source: /note="Description of Artificial Sequence: Synthetic oligonucleotide"
gtttatgaactgatcttggcc

SEQ ID NO: 1294 - DNA, 21 bp, Artificial Sequence
  source: /note="Description of Artificial Sequence: Synthetic oligonucleotide"
gtttatgaactgatcttgacc

SEQ ID NO: 1295 - DNA, 21 bp, Artificial Sequence
  source: /note="Description of Artificial Sequence: Synthetic oligonucleotide"
gcaattcagtctcgttgtccc

SEQ ID NO: 1296 - DNA, 21 bp, Artificial Sequence
  source: /note="Description of Artificial Sequence: Synthetic oligonucleotide"
tccaggtttatgaactgaccc

SEQ ID NO: 1297 - DNA, 21 bp, Artificial Sequence
  source: /note="Description of Artificial Sequence: Synthetic oligonucleotide"
ggtttatgaactgacgttccc

SEQ ID NO: 1298 - DNA, 21 bp, Artificial Sequence
  source: /note="Description of Artificial Sequence: Synthetic oligonucleotide"
ccacaatgttgtgactggccc

SEQ ID NO: 1299 - DNA, 21 bp, Artificial Sequence
  source: /note="Description of Artificial Sequence: Synthetic oligonucleotide"
gtcacaaagaaccgtgtaccc

SEQ ID NO: 1300 - DNA, 21 bp, Artificial Sequence
  source: /note="Description of Artificial Sequence: Synthetic oligonucleotide"
tgaacctcttgttataaaccc

SEQ ID NO: 1301 - DNA, 21 bp, Artificial Sequence
  source: /note="Description of Artificial Sequence: Synthetic oligonucleotide"
ccgacaaccagtatttggccc

SEQ ID NO: 1302 - DNA, 21 bp, Artificial Sequence
  source: /note="Description of Artificial Sequence: Synthetic oligonucleotide"
gcaattcagtctcgttgtgcc

SEQ ID NO: 1303 - DNA, 21 bp, Artificial Sequence
  source: /note="Description of Artificial Sequence: Synthetic oligonucleotide"
tccaggtttatgaactgagcc

SEQ ID NO: 1304 - DNA, 21 bp, Artificial Sequence
  source: /note="Description of Artificial Sequence: Synthetic oligonucleotide"
ggtttatgaactgacgttgcc

SEQ ID NO: 1305 - DNA, 21 bp, Artificial Sequence
  source: /note="Description of Artificial Sequence: Synthetic oligonucleotide"
ccacaatgttgtgactgggcc

SEQ ID NO: 1306 - DNA, 21 bp, Artificial Sequence
  source: /note="Description of Artificial Sequence: Synthetic oligonucleotide"
gtcacaaagaaccgtgtagcc

SEQ ID NO: 1307 - DNA, 21 bp, Artificial Sequence
  source: /note="Description of Artificial Sequence: Synthetic oligonucleotide"
tgaacctcttgttataaagcc

SEQ ID NO: 1308 - DNA, 21 bp, Artificial Sequence
  source: /note="Description of Artificial Sequence: Synthetic oligonucleotide"
ccgacaaccagtatttgggcc

SEQ ID NO: 1309 - DNA, 21 bp, Artificial Sequence
  source: /note="Description of Artificial Sequence: Synthetic oligonucleotide"
gcaattcagtctcgttgtacc

SEQ ID NO: 1310 - DNA, 21 bp, Artificial Sequence
  source: /note="Description of Artificial Sequence: Synthetic oligonucleotide"
tccaggtttatgaactgaacc

SEQ ID NO: 1311 - DNA, 21 bp, Artificial Sequence
  source: /note="Description of Artificial Sequence: Synthetic oligonucleotide"
ggtttatgaactgacgttacc

SEQ ID NO: 1312 - DNA, 21 bp, Artificial Sequence
  source: /note="Description of Artificial Sequence: Synthetic oligonucleotide"
ccacaatgttgtgactggacc

SEQ ID NO: 1313 - DNA, 21 bp, Artificial Sequence
  source: /note="Description of Artificial Sequence: Synthetic oligonucleotide"
gtcacaaagaaccgtgtaacc

SEQ ID NO: 1314 - DNA, 21 bp, Artificial Sequence
  source: /note="Description of Artificial Sequence: Synthetic oligonucleotide"
tgaacctcttgttataaaacc

SEQ ID NO: 1315 - DNA, 21 bp, Artificial Sequence
  source: /note="Description of Artificial Sequence: Synthetic oligonucleotide"
ccgacaaccagtatttggacc

SEQ ID NO: 1316 - DNA, 21 bp, Artificial Sequence
  source: /note="Description of Artificial Sequence: Synthetic oligonucleotide"
gcaattcagactcgttgtacc

SEQ ID NO: 1317 - DNA, 21 bp, Artificial Sequence
  source: /note="Description of Artificial Sequence: Synthetic oligonucleotide"
tccaggtttttgaactgaacc

SEQ ID NO: 1318 - DNA, 21 bp, Artificial Sequence
  source: /note="Description of Artificial Sequence: Synthetic oligonucleotide"
ggtttatgatctgacgttacc

SEQ ID NO: 1319 - DNA, 21 bp, Artificial Sequence
  source: /note="Description of Artificial Sequence: Synthetic oligonucleotide"
ccacaatgtagtgactggacc

SEQ ID NO: 1320 - DNA, 21 bp, Artificial Sequence
  source: /note="Description of Artificial Sequence: Synthetic oligonucleotide"
gtcacaaagtaccgtgtaacc

SEQ ID NO: 1321 - DNA, 21 bp, Artificial Sequence
  source: /note="Description of Artificial Sequence: Synthetic oligonucleotide"
tgaacctctagttataaaacc

SEQ ID NO: 1322 - DNA, 21 bp, Artificial Sequence
  source: /note="Description of Artificial Sequence: Synthetic oligonucleotide"
ccgacaacctgtatttggacc

SEQ ID NO: 1323 - DNA, 21 bp, Artificial Sequence
  source: /note="Description of Artificial Sequence: Synthetic oligonucleotide"
cattggaattcctaaaattcc

SEQ ID NO: 1324 - DNA, 21 bp, Artificial Sequence
  source: /note="Description of Artificial Sequence: Synthetic oligonucleotide"
gatcattggaattcctaatcc

SEQ ID NO: 1325 - DNA, 21 bp, Artificial Sequence
  source: /note="Description of Artificial Sequence: Synthetic oligonucleotide"
cattggaattcctaaaatgcc

SEQ ID NO: 1326 - DNA, 21 bp, Artificial Sequence
  source: /note="Description of Artificial Sequence: Synthetic oligonucleotide"
gatcattggaattcctaagcc

SEQ ID NO: 1327 - DNA, 21 bp, Artificial Sequence
  source: /note="Description of Artificial Sequence: Synthetic oligonucleotide"
cattggaattcctaaaatacc

SEQ ID NO: 1328 - DNA, 21 bp, Artificial Sequence
  source: /note="Description of Artificial Sequence: Synthetic oligonucleotide"
gatcattggaattcctaaacc

SEQ ID NO: 1329 - DNA, 21 bp, Artificial Sequence
  source: /note="Description of Artificial Sequence: Synthetic oligonucleotide"
cattggaatacctaaaatacc

SEQ ID NO: 1330 - DNA, 21 bp, Artificial Sequence
  source: /note="Description of Artificial Sequence: Synthetic oligonucleotide"
gatcattggtattcctaaacc

SEQ ID NO: 1331 - DNA, 21 bp, Artificial Sequence
  source: /note="Description of Artificial Sequence: Synthetic oligonucleotide"
cctgctagctccatgcttgct

SEQ ID NO: 1332 - DNA, 21 bp, Artificial Sequence
  source: /note="Description of Artificial Sequence: Synthetic oligonucleotide"
cctgctagctccatgcttgat

SEQ ID NO: 1333 - DNA, 21 bp, Artificial Sequence
  source: /note="Description of Artificial Sequence: Synthetic oligonucleotide"
ttaacgtcagttcataaactt

SEQ ID NO: 1334 - DNA, 21 bp, Artificial Sequence
  source: /note="Description of Artificial Sequence: Synthetic oligonucleotide"
tgtcggtaccgtctaacactt

SEQ ID NO: 1335 - DNA, 21 bp, Artificial Sequence
  source: /note="Description of Artificial Sequence: Synthetic oligonucleotide"
taagcatggagctagcaggtt

SEQ ID NO: 1336 - DNA, 21 bp, Artificial Sequence
  source: /note="Description of Artificial Sequence: Synthetic oligonucleotide"
tacaacgagactgaattgctt

SEQ ID NO: 1337 - DNA, 21 bp, Artificial Sequence
  source: /note="Description of Artificial Sequence: Synthetic oligonucleotide"
ttcagttcataaacctggatt

SEQ ID NO: 1338 - DNA, 21 bp, Artificial Sequence
  source: /note="Description of Artificial Sequence: Synthetic oligonucleotide"
taacgtcagttcataaacctt

SEQ ID NO: 1339 - DNA, 21 bp, Artificial Sequence
  source: /note="Description of Artificial Sequence: Synthetic oligonucleotide"
tccggtcacaacattgtggtt

SEQ ID NO: 1340 - DNA, 21 bp, Artificial Sequence
  source: /note="Description of Artificial Sequence: Synthetic oligonucleotide"
ttgcacggttctttgtgactt

SEQ ID NO: 1341 - DNA, 21 bp, Artificial Sequence
  source: /note="Description of Artificial Sequence: Synthetic oligonucleotide"
ttttataacaagaggttcatt

SEQ ID NO: 1342 - DNA, 21 bp, Homo sapiens
tccaaatactggttgtcggtt

SEQ ID NO: 1343 - DNA, 21 bp, Artificial Sequence
  source: /note="Description of Artificial Sequence: Synthetic oligonucleotide"
tattttaggaattccaatgtt

SEQ ID NO: 1344 - DNA, 21 bp, Artificial Sequence
  source: /note="Description of Artificial Sequence: Synthetic oligonucleotide"
tttaggaattccaatgatctt

SEQ ID NO: 1345 - DNA, 22 bp, Artificial Sequence
  source: /note="Description of Artificial Sequence: Synthetic oligonucleotide"
taagcatggagctagcaggctt

SEQ ID NO: 1346 - DNA, 158 bp, Artificial Sequence
  source: /note="Description of Artificial Sequence: Synthetic polynucleotide"
gtgctgggcggggggcggcgggccctcccgcagaacaccatgcgctccacggaataagcatggagctagcagggtgtgacccaaccctgctagctccatgcttattctgaggagcgccttgacagcagccatgggagggccgccccctacctcagtga

SEQ ID NO: 1347 - DNA, 163 bp, Artificial Sequence
  source: /note="Description of Artificial Sequence: Synthetic polynucleotide"
gtgctgggcggggggcggcgggccctcccgcagaacaccatgcgctcctcggaataagcatggagctagcaggttgtggccactgagaaacctgctagctccatgcttgttctgcggagcgccttgacagcagccatgggagggccgccccctacctcagtga

SEQ ID NO: 1348 - DNA, 21 bp, Artificial Sequence
  source: /note="Description of Artificial Sequence: Synthetic oligonucleotide"
cctgctagctccatgcttatt

SEQ ID NO: 1349 - DNA, 21 bp, Artificial Sequence
  source: /note="Description of Artificial Sequence: Synthetic oligonucleotide"
cctgctagctccatgcttgtt

SEQ ID NO: 1350 - DNA, 21 bp, Artificial Sequence
  source: /note="Description of Artificial Sequence: Synthetic oligonucleotide"
taagcatggagctagcagggt

SEQ ID NO: 1351 - DNA, 21 bp, Artificial Sequence
  source: /note="Description of Artificial Sequence: Synthetic oligonucleotide"
taagcatggagctagcaggtt

SEQ ID NO: 1352 - DNA, 2301 bp, Artificial Sequence
  source: /note="Description of Artificial Sequence: Synthetic polynucleotide"
cctgcaggcagctgcgcgctcgctcgctcactgaggccgcccgggcaaagcccgggcgtcgggcgacctttggtcgcccggcctcagtgagcgagcgagcgcgcagagagggagtggccaactccatcactaggggttccttgtagttaatgattaacccgccatgctacttatctacgtagccatgcgtcgacataacgcgtcgacattgattattgactagttattaatagtaatcaattacggggtcattagttcatagcccatatatggagttccgcgttacataacttacggtaaatggcccgcctggctgaccgcccaacgacccccgcccattgacgtcaataatgacgtatgttcccatagtaacgccaatagggactttccattgacgtcaatgggtggagtatttacggtaaactgcccacttggcagtacatcaagtgtatcatatgccaagtacgccccctattgacgtcaatgacggtaaatggcccgcctggcattatgcccagtacatgaccttatgggactttcctacttggcagtacatctacgtattagtcatcgctattaccatgtcgaggccacgttctgcttcactctccccatctcccccccctccccacccccaattttgtatttatttattttttaattattttgtgcagcgatgggggcggggggggggggcgcgcgccaggcggggcggggcggggcgaggggcggggcggggcgaggcggagaggtgcggcggcagccaatcagagcggcgcgctccgaaagtttccttttatggcgaggcggcggcggcggcggccctataaaaagcgaagcgcgcggcgggcgggagcaagcttgaactgaaaaaccagaaagttaactggtaagtttagtctttttgtcttttatttcaggtcccggatccggtggtggtgcaaatcaaagaactgctcctcagtggatgttgcctttacttctaggcctgtacggaagtgttacttctgctctaaaagctgcggaattgtacccgcggccgatccaccggtgtgctgggcggggggcggcgggccctcccgcagaacaccatgcgctccacggaacctgctagctccatgcttgctgtggccactgagaagtaagcatggagctagcaggttctgaggagcgccttgacagcagccatgggagggccgccccctacctcagtgactcgaggacggggtgaactacgcctgaggatccgatctttttccctctgccaaaaattatggggacatcatgaagccccttgagcatctgacttctggctaataaaggaaatttattttcattgcaatagtgtgttggaattttttgtgtctctcactcgactagatttaaataattcgcccttgggcctaggcaattggatccgccggcagagaaaacatcccagggatttacagatcacatgcaggcagggaccagctcaacccttctttaatgtcatccagggagggggccagggatggaggggaggggttgaggagcgagaggcagttatttttgggtgggattcaccacttttcccatgaagaggggagacttggtattttgttcaatcattaagaagacaaagggtttgttgaacttgacctcgggggggatagacatgggtatggcctctaaaaacatggccccagcagcttcagtccctttctcgtcgatggtcagcacagccttatgcacggcctggaggggagagaagcagagacacgttgtaaggctgatcccaggcctcgagcaaggctcacgtggacacctcccaggaagcgctcactccccctggacggccctggccctgcacatcctctccctccctgtcacataggccttgctcctcctcaaggctttggctgatggggctggctcccctctgtccatcttcctgacaagcgcctctccccctgctcaggtgcacccacaactcagaacagggaagagcatcgtcactccacgtctgcctccagggctctctcctttctagtacacggcttgaagctccttgaggacacggaccctggcagtgaccttcacagtgcccagaccatttaaatatgtcgtgcatcgatgctacgtagataagtagcatggcgggttaatcattaactacagaggaacccctagtgatggagttggccactccctctctgcgcgctcgctcgctcactgaggccgggcgaccaaaggtcgcccgacgcccgggctttgcccgggcggcctcagtgagcgagcgagcgcgcagctgcctgcagg

SEQ ID NO: 1353 - DNA, 4608 bp, Artificial Sequence
  source: /note="Description of Artificial Sequence: Synthetic polynucleotide"
cctgcaggcagctgcgcgctcgctcgctcactgaggccgcccgggcaaagcccgggcgtcgggcgacctttggtcgcccggcctcagtgagcgagcgagcgcgcagagagggagtggccaactccatcactaggggttccttgtagttaatgattaacccgccatgctacttatctacgtagccatgcgtcgacataacgcgtcgacattgattattgactagttattaatagtaatcaattacggggtcattagttcatagcccatatatggagttccgcgttacataacttacggtaaatggcccgcctggctgaccgcccaacgacccccgcccattgacgtcaataatgacgtatgttcccatagtaacgccaatagggactttccattgacgtcaatgggtggagtatttacggtaaactgcccacttggcagtacatcaagtgtatcatatgccaagtacgccccctattgacgtcaatgacggtaaatggcccgcctggcattatgcccagtacatgaccttatgggactttcctacttggcagtacatctacgtattagtcatcgctattaccatgtcgaggccacgttctgcttcactctccccatctcccccccctccccacccccaattttgtatttatttattttttaattattttgtgcagcgatgggggcggggggggggggcgcgcgccaggcggggcggggcggggcgaggggcggggcggggcgaggcggagaggtgcggcggcagccaatcagagcggcgcgctccgaaagtttccttttatggcgaggcggcggcggcggcggccctataaaaagcgaagcgcgcggcgggcgggagcaagcttgaactgaaaaaccagaaagttaactggtaagtttagtctttttgtcttttatttcaggtcccggatccggtggtggtgcaaatcaaagaactgctcctcagtggatgttgcctttacttctaggcctgtacggaagtgttacttctgctctaaaagctgcggaattgtacccgcggccgatccaccggtgtgctgggcggggggcggcgggccctcccgcagaacaccatgcgctccacggaacctgctagctccatgcttgctgtggccactgagaagtaagcatggagctagcaggttctgaggagcgccttgacagcagccatgggagggccgccccctacctcagtgactcgaggacggggtgaactacgcctgaggatccgatctttttccctctgccaaaaattatggggacatcatgaagccccttgagcatctgacttctggctaataaaggaaatttattttcattgcaatagtgtgttggaattttttgtgtctctcactcgactagatttaaataattcgcccttgggcctaggcaattggatccgccggcagagaaaacatcccagggatttacagatcacatgcaggcagggaccagctcaacccttctttaatgtcatccagggagggggccagggatggaggggaggggttgaggagcgagaggcagttatttttgggtgggattcaccacttttcccatgaagaggggagacttggtattttgttcaatcattaagaagacaaagggtttgttgaacttgacctcgggggggatagacatgggtatggcctctaaaaacatggccccagcagcttcagtccctttctcgtcgatggtcagcacagccttatgcacggcctggaggggagagaagcagagacacgttgtaaggctgatcccaggcctcgagcaaggctcacgtggacacctcccaggaagcgctcactccccctggacggccctggccctgcacatcctctccctccctgtcacataggccttgctcctcctcaaggctttggctgatggggctggctcccctctgtccatcttcctgacaagcgcctctccccctgctcaggtgcacccacaactcagaacagggaagagcatcgtcactccacgtctgcctccagggctctctcctttctagtacacggcttgaagctccttgaggacacggaccctggcagtgaccttcacagtgcccagaccccaagataatgcagccattcatggaactgcaggttgttcattggtcgcctttagttttccaaaataagtgtcactttagctgaaatcattcattaattcagacaccaaatctcacagatcgaaggagtcagaaattcctttgaaacaacttagcccaaacctttctgtgtcagtatggataaatcaaggcccaatgtctagaaggtcttgggcaaagttgaaattcagggtcagtgacacaacctcaagggaggccccgaaagtgccagctgcacagcagcccctgcctggctttgctgtttgcccaccgtcccgtgtcagtgaatcacgggcatcttcaggagctcagcctgggtcttcatttgtttccctcggccccttcctcagcctcaggacagtgctgcagcccccacacattcttccctacagataccatggtgcaacaaggtcgtcagggtgatctcaccttggagagcttcaggggtgcctcctctgtgaccccggagaggtcagccccattgctgaagaccttagtgatgcccagttgacccaggacgctcttcagatcataggttccagtaatggacagtttgggtaaatgtaagctggcagacctgtcgtgcagaaaagaaattcaaggcatggcacagcattcctcttgttcttctgggacccaccacagtgcaagtgttttcttttctgattatttctgccacttactcctgtgtcctccacccacactaagatgggaactcggctttggtttgttctacttttagctcttctacattgagtcaaagaatgttaacatcgaatgaatcacaaaagcttgaaatgccacctcctctgatattctaggtgtcctggaagcctgtctcatcttgccctgtagtgttgggtcacctggcccccagcctgtaacatccccagggccctacacccagagaaacacggggctggtggcagtgcccagtgacaaccgtttagtggataagagaagagtgaccacaccaggctgagtgctcctctctggttttccatggggagacaatgccaccctgagcagggtctggtgtgagcggcagctggctctgggctctctgatccgttaccctctcagcctctttgttctttctcaacccctggagcagagacctcaggaggtgctggcatggaacagagaaattccagcctcgattcctattatgaacccgacaccttttgtattttcatcttggttttacagtgtacaaaacgaactagatcagcagggcatgggcataatcacgaatgcacacacatacactaatgtgtggctcatgtttaagtatcacttactacaggacacccaatctaacagcaccgataaagtgacagagaaacgcaagccttctgcgaacatggcctggctgttccaattccgaaccttgcttttctgggccttgccacacaggctcttcccccgtccccccagggacattctacccttgaactccacactccactgctgcctttgccaggaagcccatctgttcctttttggttctgccagaacgtgtggtggtgctgctgtccctgccttgggcactggatattgggaagggacagtgtccacactggagtgggaagttcccagggacgagacctttacctcctcaccctgggtactgttctcctcatggagcatggacggcgctgcctgaactcagtggtggcctcattctggaagccaagtttatacagagtagcagtgacccagggatgtggggttcaccctcctcagccctctggccagtcctgatgggcctcagtcccaacatggctaagaggtgtgggcagcttcttggtcaccctcaggttggggaatcaccttctgtcttcattttccaggaacttggtgatgatatcgtgggtgagttcatttaccaggtgctgtagtttcccctcatcaggcaggaagaagatggcggtggcattgcccaggtatttcatcagcagcacccagctggacagcttcttacagtgctggatgttaaacatgcctaaacgcttcatcataggcaccttcacggtggtcacctggtccacgtggaagtcctcttcctcggtgtccttgacttcaaagggtctctcccatttgcctggagagaggggaaggtgggcatcaccaggggtgagtgaaggtttggaagagtgtagcagaataagaaaccatgagtcccctccctgagaagccctgagcccccttgacgacacacatccctcgaggctcagcttcatcatctgtaaaaggtgctgaaactgaccatttaaatatgtcgtgcatcgatgctacgtagataagtagcatggcgggttaatcattaactacagaggaacccctagtgatggagttggccactccctctctgcgcgctcgctcgctcactgaggccgggcgaccaaaggtcgcccgacgcccgggctttgcccgggcggcctcagtgagcgagcgagcgcgcagctgcctgcagg

SEQ ID NO: 1354 - DNA, 2296 bp, Artificial Sequence
  source: /note="Description of Artificial Sequence: Synthetic polynucleotide"
cctgcaggcagctgcgcgctcgctcgctcactgaggccgcccgggcaaagcccgggcgtcgggcgacctttggtcgcccggcctcagtgagcgagcgagcgcgcagagagggagtggccaactccatcactaggggttccttgtagttaatgattaacccgccatgctacttatctacgtagccatgcgtcgacataacgcgtcgacattgattattgactagttattaatagtaatcaattacggggtcattagttcatagcccatatatggagttccgcgttacataacttacggtaaatggcccgcctggctgaccgcccaacgacccccgcccattgacgtcaataatgacgtatgttcccatagtaacgccaatagggactttccattgacgtcaatgggtggagtatttacggtaaactgcccacttggcagtacatcaagtgtatcatatgccaagtacgccccctattgacgtcaatgacggtaaatggcccgcctggcattatgcccagtacatgaccttatgggactttcctacttggcagtacatctacgtattagtcatcgctattaccatgtcgaggccacgttctgcttcactctccccatctcccccccctccccacccccaattttgtatttatttattttttaattattttgtgcagcgatgggggcggggggggggggcgcgcgccaggcggggcggggcggggcgaggggcggggcggggcgaggcggagaggtgcggcggcagccaatcagagcggcgcgctccgaaagtttccttttatggcgaggcggcggcggcggcggccctataaaaagcgaagcgcgcggcgggcgggagcaagcttgaactgaaaaaccagaaagttaactggtaagtttagtctttttgtcttttatttcaggtcccggatccggtggtggtgcaaatcaaagaactgctcctcagtggatgttgcctttacttctaggcctgtacggaagtgttacttctgctctaaaagctgcggaattgtacccgcggccgatccaccggtgtgctgggcggggggcggcgggccctcccgcagaacaccatgcgctcttcggaagcaattcagtctcgttgtacctgtgatttggtacaacgagactgaattgcttctgaggagcgccttgacagcagccatgggagggccgccccctacctcagtgactcgaggacggggtgaactacgcctgaggatccgatctttttccctctgccaaaaattatggggacatcatgaagccccttgagcatctgacttctggctaataaaggaaatttattttcattgcaatagtgtgttggaattttttgtgtctctcactcgactagatttaaataattcgcccttgggcctaggcaattggatccgccggcagagaaaacatcccagggatttacagatcacatgcaggcagggaccagctcaacccttctttaatgtcatccagggagggggccagggatggaggggaggggttgaggagcgagaggcagttatttttgggtgggattcaccacttttcccatgaagaggggagacttggtattttgttcaatcattaagaagacaaagggtttgttgaacttgacctcgggggggatagacatgggtatggcctctaaaaacatggccccagcagcttcagtccctttctcgtcgatggtcagcacagccttatgcacggcctggaggggagagaagcagagacacgttgtaaggctgatcccaggcctcgagcaaggctcacgtggacacctcccaggaagcgctcactccccctggacggccctggccctgcacatcctctccctccctgtcacataggccttgctcctcctcaaggctttggctgatggggctggctcccctctgtccatcttcctgacaagcgcctctccccctgctcaggtgcacccacaactcagaacagggaagagcatcgtcactccacgtctgcctccagggctctctcctttctagtacacggcttgaagctccttgaggacacggaccctggcagtgaccttcacagtgcccagaccatttaaatatgtcgtgcatcgatgctacgtagataagtagcatggcgggttaatcattaactacagaggaacccctagtgatggagttggccactccctctctgcgcgctcgctcgctcactgaggccgggcgaccaaaggtcgcccgacgcccgggctttgcccgggcggcctcagtgagcgagcgagcgcgcagctgcctgcagg

SEQ ID NO: 1355 - DNA, 2301 bp, Artificial Sequence
  source: /note="Description of Artificial Sequence: Synthetic polynucleotide"
cctgcaggcagctgcgcgctcgctcgctcactgaggccgcccgggcaaagcccgggcgtcgggcgacctttggtcgcccggcctcagtgagcgagcgagcgcgcagagagggagtggccaactccatcactaggggttccttgtagttaatgattaacccgccatgctacttatctacgtagccatgcgtcgacataacgcgtcgacattgattattgactagttattaatagtaatcaattacggggtcattagttcatagcccatatatggagttccgcgttacataacttacggtaaatggcccgcctggctgaccgcccaacgacccccgcccattgacgtcaataatgacgtatgttcccatagtaacgccaatagggactttccattgacgtcaatgggtggagtatttacggtaaactgcccacttggcagtacatcaagtgtatcatatgccaagtacgccccctattgacgtcaatgacggtaaatggcccgcctggcattatgcccagtacatgaccttatgggactttcctacttggcagtacatctacgtattagtcatcgctattaccatgtcgaggccacgttctgcttcactctccccatctcccccccctccccacccccaattttgtatttatttattttttaattattttgtgcagcgatgggggcggggggggggggcgcgcgccaggcggggcggggcggggcgaggggcggggcggggcgaggcggagaggtgcggcggcagccaatcagagcggcgcgctccgaaagtttccttttatggcgaggcggcggcggcggcggccctataaaaagcgaagcgcgcggcgggcgggagcaagcttgaactgaaaaaccagaaagttaactggtaagtttagtctttttgtcttttatttcaggtcccggatccggtggtggtgcaaatcaaagaactgctcctcagtggatgttgcctttacttctaggcctgtacggaagtgttacttctgctctaaaagctgcggaattgtacccgcggccgatccaccggtgtgctgggcggggggcggcgggccctcccgcagaacaccatgcgctcctcggaataagcatggagctagcaggttgtggccactgagaaacctgctagctccatgcttgttctgcggagcgccttgacagcagccatgggagggccgccccctacctcagtgactcgaggacggggtgaactacgcctgaggatccgatctttttccctctgccaaaaattatggggacatcatgaagccccttgagcatctgacttctggctaataaaggaaatttattttcattgcaatagtgtgttggaattttttgtgtctctcactcgactagatttaaataattcgcccttgggcctaggcaattggatccgccggcagagaaaacatcccagggatttacagatcacatgcaggcagggaccagctcaacccttctttaatgtcatccagggagggggccagggatggaggggaggggttgaggagcgagaggcagttatttttgggtgggattcaccacttttcccatgaagaggggagacttggtattttgttcaatcattaagaagacaaagggtttgttgaacttgacctcgggggggatagacatgggtatggcctctaaaaacatggccccagcagcttcagtccctttctcgtcgatggtcagcacagccttatgcacggcctggaggggagagaagcagagacacgttgtaaggctgatcccaggcctcgagcaaggctcacgtggacacctcccaggaagcgctcactccccctggacggccctggccctgcacatcctctccctccctgtcacataggccttgctcctcctcaaggctttggctgatggggctggctcccctctgtccatcttcctgacaagcgcctctccccctgctcaggtgcacccacaactcagaacagggaagagcatcgtcactccacgtctgcctccagggctctctcctttctagtacacggcttgaagctccttgaggacacggaccctggcagtgaccttcacagtgcccagaccatttaaatatgtcgtgcatcgatgctacgtagataagtagcatggcgggttaatcattaactacagaggaacccctagtgatggagttggccactccctctctgcgcgctcgctcgctcactgaggccgggcgaccaaaggtcgcccgacgcccgggctttgcccgggcggcctcagtgagcgagcgagcgcgcagctgcctgcagg

SEQ ID NO: 1356 - DNA, 4606 bp, Artificial Sequence
  source: /note="Description of Artificial Sequence: Synthetic polynucleotide"
cctgcaggcagctgcgcgctcgctcgctcactgaggccgcccgggcaaagcccgggcgtcgggcgacctttggtcgcccggcctcagtgagcgagcgagcgcgcagagagggagtggccaactccatcactaggggttccttgtagttaatgattaacccgccatgctacttatctacgtagccatgcgtcgacataacgcgtaattcgcccttgggcctaggcaattggatccgccggcagagaaaacatcccagggatttacagatcacatgcaggcagggaccagctcaacccttctttaatgtcatccagggagggggccagggatggaggggaggggttgaggagcgagaggcagttatttttgggtgggattcaccacttttcccatgaagaggggagacttggtattttgttcaatcattaagaagacaaagggtttgttgaacttgacctcgggggggatagacatgggtatggcctctaaaaacatggccccagcagcttcagtccctttctcgtcgatggtcagcacagccttatgcacggcctggaggggagagaagcagagacacgttgtaaggctgatcccaggcctcgagcaaggctcacgtggacacctcccaggaagcgctcactccccctggacggccctggccctgcacatcctctccctccctgtcacataggccttgctcctcctcaaggctttggctgatggggctggctcccctctgtccatcttcctgacaagcgcctctccccctgctcaggtgcacccacaactcagaacagggaagagcatcgtcactccacgtctgcctccagggctctctcctttctagtacacggcttgaagctccttgaggacacggaccctggcagtgaccttcacagtgcccagaccccaagataatgcagccattcatggaactgcaggttgttcattggtcgcctttagttttccaaaataagtgtcactttagctgaaatcattcattaattcagacaccaaatctcacagatcgaaggagtcagaaattcctttgaaacaacttagcccaaacctttctgtgtcagtatggataaatcaaggcccaatgtctagaaggtcttgggcaaagttgaaattcagggtcagtgacacaacctcaagggaggccccgaaagtgccagctgcacagcagcccctgcctggctttgctgtttgcccaccgtcccgtgtcagtgaatcacgggcatcttcaggagctcagcctgggtcttcatttgtttccctcggccccttcctcagcctcaggacagtgctgcagcccccacacattcttccctacagataccatggtgcaacaaggtcgtcagggtgatctcaccttggagagcttcaggggtgcctcctctgtgaccccggagaggtcagccccattgctgaagaccttagtgatgcccagttgacccaggacgctcttcagatcataggttccagtaatggacagtttgggtaaatgtaagctggcagacctgtcgtgcagaaaagaaattcaaggcatggcacagcattcctcttgttcttctgggacccaccacagtgcaagtgttttcttttctgattatttctgccacttactcctgtgtcctccacccacactaagatgggaactcggctttggtttgttctacttttagctcttctacattgagtcaaagaatgttaacatcgaatgaatcacaaaagcttgaaatgccacctcctctgatattctaggtgtcctggaagcctgtctcatcttgccctgtagtgttgggtcacctggcccccagcctgtaacatccccagggccctacacccagagaaacacggggctggtggcagtgcccagtgacaaccgtttagtggataagagaagagtgaccacaccaggctgagtgctcctctctggttttccatggggagacaatgccaccctgagcagggtctggtgtgagcggcagctggctctgggctctctgatccgttaccctctcagcctctttgttctttctcaacccctggagcagagacctcaggaggtgctggcatggaacagagaaattccagcctcgattcctattatgaacccgacaccttttgtattttcatcttggttttacagtgtacaaaacgaactagatcagcagggcatgggcataatcacgaatgcacacacatacactaatgtgtggctcatgtttaagtatcacttactacaggacacccaatctaacagcaccgataaagtgacagagaaacgcaagccttctgcgaacatggcctggctgttccaattccgaaccttgcttttctgggccttgccacacaggctcttcccccgtccccccagggacattctacccttgaactccacactccactgctgcctttgccaggaagcccatctgttcctttttggttctgccagaacgtgtggtggtgctgctgtccctgccttgggcactggatattgggaagggacagtgtccacactggagtgggaagttcccagggacgagacctttacctcctcaccctgggtactgttctcctcatggagcatggacggcgctgcctgaactcagtggtggcctcattctggaagccaagtttatacagagtagcagtgacccagggatgtggggttcaccctcctcagccctctggccagtcctgatgggcctcagtcccaacatggctaagaggtgtgggcagcttcttggtcaccctcaggttggggaatcaccttctgtcttcattttccaggaacttggtgatgatatcgtgggtgagttcatttaccaggtgctgtagtttcccctcatcaggcaggaagaagatggcggtggcattgcccaggtatttcatcagcagcacccagctggacagcttcttacagtgctggatgttaaacatgcctaaacgcttcatcataggcaccttcacggtggtcacctggtccacgtggaagtcctcttcctcggtgtccttgacttcaaagggtctctcccatttgcctggagagaggggaaggtgggcatcaccaggggtgagtgaaggtttggaagagtgtagcagaataagaaaccatgagtcccctccctgagaagccctgagcccccttgacgacacacatccctcgaggctcagcttcatcatctgtaaaaggtgctgaaactgaccacgcgtcgacattgattattgactagttattaatagtaatcaattacggggtcattagttcatagcccatatatggagttccgcgttacataacttacggtaaatggcccgcctggctgaccgcccaacgacccccgcccattgacgtcaataatgacgtatgttcccatagtaacgccaatagggactttccattgacgtcaatgggtggagtatttacggtaaactgcccacttggcagtacatcaagtgtatcatatgccaagtacgccccctattgacgtcaatgacggtaaatggcccgcctggcattatgcccagtacatgaccttatgggactttcctacttggcagtacatctacgtattagtcatcgctattaccatgtcgaggccacgttctgcttcactctccccatctcccccccctccccacccccaattttgtatttatttattttttaattattttgtgcagcgatgggggcggggggggggggcgcgcgccaggcggggcggggcggggcgaggggcggggcggggcgaggcggagaggtgcggcggcagccaatcagagcggcgcgctccgaaagtttccttttatggcgaggcggcggcggcggcggccctataaaaagcgaagcgcgcggcgggcgggagcaagcttgaactgaaaaaccagaaagttaactggtaagtttagtctttttgtcttttatttcaggtcccggatccggtggtggtgcaaatcaaagaactgctcctcagtggatgttgcctttacttctaggcctgtacggaagtgttacttctgctctaaaagctgcggaattgtacccgcggccgatccaccggtgtgctgggcggggggcggcgggccctcccgcagaacaccatgcgctccacggaacctgctagctccatgcttgctgtggccactgagaagtaagcatggagctagcaggttctgaggagcgccttgacagcagccatgggagggccgccccctacctcagtgactcgaggacggggtgaactacgcctgaggatccgatctttttccctctgccaaaaattatggggacatcatgaagccccttgagcatctgacttctggctaataaaggaaatttattttcattgcaatagtgtgttggaattttttgtgtctctcactcgactagatttaaatatgtcgtgcatcgatgctacgtagataagtagcatggcgggttaatcattaactacagaggaacccctagtgatggagttggccactccctctctgcgcgctcgctcgctcactgaggccgggcgaccaaaggtcgcccgacgcccgggctttgcccgggcggcctcagtgagcgagcgagcgcgcagctgcctgcagg

SEQ ID NO: 1357 - DNA, 2299 bp, Artificial Sequence
  source: /note="Description of Artificial Sequence: Synthetic polynucleotide"
cctgcaggcagctgcgcgctcgctcgctcactgaggccgcccgggcaaagcccgggcgtcgggcgacctttggtcgcccggcctcagtgagcgagcgagcgcgcagagagggagtggccaactccatcactaggggttccttgtagttaatgattaacccgccatgctacttatctacgtagccatgcgtcgacataacgcgtaattcgcccttgggcctaggcaattggatccgccggcagagaaaacatcccagggatttacagatcacatgcaggcagggaccagctcaacccttctttaatgtcatccagggagggggccagggatggaggggaggggttgaggagcgagaggcagttatttttgggtgggattcaccacttttcccatgaagaggggagacttggtattttgttcaatcattaagaagacaaagggtttgttgaacttgacctcgggggggatagacatgggtatggcctctaaaaacatggccccagcagcttcagtccctttctcgtcgatggtcagcacagccttatgcacggcctggaggggagagaagcagagacacgttgtaaggctgatcccaggcctcgagcaaggctcacgtggacacctcccaggaagcgctcactccccctggacggccctggccctgcacatcctctccctccctgtcacataggccttgctcctcctcaaggctttggctgatggggctggctcccctctgtccatcttcctgacaagcgcctctccccctgctcaggtgcacccacaactcagaacagggaagagcatcgtcactccacgtctgcctccagggctctctcctttctagtacacggcttgaagctccttgaggacacggaccctggcagtgaccttcacagtgcccagaccacgcgtcgacattgattattgactagttattaatagtaatcaattacggggtcattagttcatagcccatatatggagttccgcgttacataacttacggtaaatggcccgcctggctgaccgcccaacgacccccgcccattgacgtcaataatgacgtatgttcccatagtaacgccaatagggactttccattgacgtcaatgggtggagtatttacggtaaactgcccacttggcagtacatcaagtgtatcatatgccaagtacgccccctattgacgtcaatgacggtaaatggcccgcctggcattatgcccagtacatgaccttatgggactttcctacttggcagtacatctacgtattagtcatcgctattaccatgtcgaggccacgttctgcttcactctccccatctcccccccctccccacccccaattttgtatttatttattttttaattattttgtgcagcgatgggggcggggggggggggcgcgcgccaggcggggcggggcggggcgaggggcggggcggggcgaggcggagaggtgcggcggcagccaatcagagcggcgcgctccgaaagtttccttttatggcgaggcggcggcggcggcggccctataaaaagcgaagcgcgcggcgggcgggagcaagcttgaactgaaaaaccagaaagttaactggtaagtttagtctttttgtcttttatttcaggtcccggatccggtggtggtgcaaatcaaagaactgctcctcagtggatgttgcctttacttctaggcctgtacggaagtgttacttctgctctaaaagctgcggaattgtacccgcggccgatccaccggtgtgctgggcggggggcggcgggccctcccgcagaacaccatgcgctccacggaacctgctagctccatgcttgctgtggccactgagaagtaagcatggagctagcaggttctgaggagcgccttgacagcagccatgggagggccgccccctacctcagtgactcgaggacggggtgaactacgcctgaggatccgatctttttccctctgccaaaaattatggggacatcatgaagccccttgagcatctgacttctggctaataaaggaaatttattttcattgcaatagtgtgttggaattttttgtgtctctcactcgactagatttaaatatgtcgtgcatcgatgctacgtagataagtagcatggcgggttaatcattaactacagaggaacccctagtgatggagttggccactccctctctgcgcgctcgctcgctcactgaggccgggcgaccaaaggtcgcccgacgcccgggctttgcccgggcggcctcagtgagcgagcgagcgcgcagctgcctgcagg

SEQ ID NO: 1358 - DNA, 2294 bp, Artificial Sequence
  source: /note="Description of Artificial Sequence: Synthetic polynucleotide"
cctgcaggcagctgcgcgctcgctcgctcactgaggccgcccgggcaaagcccgggcgtcgggcgacctttggtcgcccggcctcagtgagcgagcgagcgcgcagagagggagtggccaactccatcactaggggttccttgtagttaatgattaacccgccatgctacttatctacgtagccatgcgtcgacataacgcgtaattcgcccttgggcctaggcaattggatccgccggcagagaaaacatcccagggatttacagatcacatgcaggcagggaccagctcaacccttctttaatgtcatccagggagggggccagggatggaggggaggggttgaggagcgagaggcagttatttttgggtgggattcaccacttttcccatgaagaggggagacttggtattttgttcaatcattaagaagacaaagggtttgttgaacttgacctcgggggggatagacatgggtatggcctctaaaaacatggccccagcagcttcagtccctttctcgtcgatggtcagcacagccttatgcacggcctggaggggagagaagcagagacacgttgtaaggctgatcccaggcctcgagcaaggctcacgtggacacctcccaggaagcgctcactccccctggacggccctggccctgcacatcctctccctccctgtcacataggccttgctcctcctcaaggctttggctgatggggctggctcccctctgtccatcttcctgacaagcgcctctccccctgctcaggtgcacccacaactcagaacagggaagagcatcgtcactccacgtctgcctccagggctctctcctttctagtacacggcttgaagctccttgaggacacggaccctggcagtgaccttcacagtgcccagaccacgcgtcgacattgattattgactagttattaatagtaatcaattacggggtcattagttcatagcccatatatggagttccgcgttacataacttacggtaaatggcccgcctggctgaccgcccaacgacccccgcccattgacgtcaataatgacgtatgttcccatagtaacgccaatagggactttccattgacgtcaatgggtggagtatttacggtaaactgcccacttggcagtacatcaagtgtatcatatgccaagtacgccccctattgacgtcaatgacggtaaatggcccgcctggcattatgcccagtacatgaccttatgggactttcctacttggcagtacatctacgtattagtcatcgctattaccatgtcgaggccacgttctgcttcactctccccatctcccccccctccccacccccaattttgtatttatttattttttaattattttgtgcagcgatgggggcggggggggggggcgcgcgccaggcggggcggggcggggcgaggggcggggcggggcgaggcggagaggtgcggcggcagccaatcagagcggcgcgctccgaaagtttccttttatggcgaggcggcggcggcggcggccctataaaaagcgaagcgcgcggcgggcgggagcaagcttgaactgaaaaaccagaaagttaactggtaagtttagtctttttgtcttttatttcaggtcccggatccggtggtggtgcaaatcaaagaactgctcctcagtggatgttgcctttacttctaggcctgtacggaagtgttacttctgctctaaaagctgcggaattgtacccgcggccgatccaccggtgtgctgggcggggggcggcgggccctcccgcagaacaccatgcgctcttcggaagcaattcagtctcgttgtacctgtgatttggtacaacgagactgaattgcttctgaggagcgccttgacagcagccatgggagggccgccccctacctcagtgactcgaggacggggtgaactacgcctgaggatccgatctttttccctctgccaaaaattatggggacatcatgaagccccttgagcatctgacttctggctaataaaggaaatttattttcattgcaatagtgtgttggaattttttgtgtctctcactcgactagatttaaatatgtcgtgcatcgatgctacgtagataagtagcatggcgggttaatcattaactacagaggaacccctagtgatggagttggccactccctctctgcgcgctcgctcgctcactgaggccgggcgaccaaaggtcgcccgacgcccgggctttgcccgggcggcctcagtgagcgagcgagcgcgcagctgcctgcagg

SEQ ID NO: 1359 - DNA, 2299 bp, Artificial Sequence
  source: /note="Description of Artificial Sequence: Synthetic polynucleotide"
cctgcaggcagctgcgcgctcgctcgctcactgaggccgcccgggcaaagcccgggcgtcgggcgacctttggtcgcccggcctcagtgagcgagcgagcgcgcagagagggagtggccaactccatcactaggggttccttgtagttaatgattaacccgccatgctacttatctacgtagccatgcgtcgacataacgcgtaattcgcccttgggcctaggcaattggatccgccggcagagaaaacatcccagggatttacagatcacatgcaggcagggaccagctcaacccttctttaatgtcatccagggagggggccagggatggaggggaggggttgaggagcgagaggcagttatttttgggtgggattcaccacttttcccatgaagaggggagacttggtattttgttcaatcattaagaagacaaagggtttgttgaacttgacctcgggggggatagacatgggtatggcctctaaaaacatggccccagcagcttcagtccctttctcgtcgatggtcagcacagccttatgcacggcctggaggggagagaagcagagacacgttgtaaggctgatcccaggcctcgagcaaggctcacgtggacacctcccaggaagcgctcactccccctggacggccctggccctgcacatcctctccctccctgtcacataggccttgctcctcctcaaggctttggctgatggggctggctcccctctgtccatcttcctgacaagcgcctctccccctgctcaggtgcacccacaactcagaacagggaagagcatcgtcactccacgtctgcctccagggctctctcctttctagtacacggcttgaagctccttgaggacacggaccctggcagtgaccttcacagtgcccagaccacgcgtcgacattgattattgactagttattaatagtaatcaattacggggtcattagttcatagcccatatatggagttccgcgttacataacttacggtaaatggcccgcctggctgaccgcccaacgacccccgcccattgacgtcaataatgacgtatgttcccatagtaacgccaatagggactttccattgacgtcaatgggtggagtatttacggtaaactgcccacttggcagtacatcaagtgtatcatatgccaagtacgccccctattgacgtcaatgacggtaaatggcccgcctggcattatgcccagtacatgaccttatgggactttcctacttggcagtacatctacgtattagtcatcgctattaccatgtcgaggccacgttctgcttcactctccccatctcccccccctccccacccccaattttgtatttatttattttttaattattttgtgcagcgatgggggcggggggggggggcgcgcgccaggcggggcggggcggggcgaggggcggggcggggcgaggcggagaggtgcggcggcagccaatcagagcggcgcgctccgaaagtttccttttatggcgaggcggcggcggcggcggccctataaaaagcgaagcgcgcggcgggcgggagcaagcttgaactgaaaaaccagaaagttaactggtaagtttagtctttttgtcttttatttcaggtcccggatccggtggtggtgcaaatcaaagaactgctcctcagtggatgttgcctttacttctaggcctgtacggaagtgttacttctgctctaaaagctgcggaattgtacccgcggccgatccaccggtgtgctgggcggggggcggcgggccctcccgcagaacaccatgcgctcctcggaataagcatggagctagcaggttgtggccactgagaaacctgctagctccatgcttgttctgcggagcgccttgacagcagccatgggagggccgccccctacctcagtgactcgaggacggggtgaactacgcctgaggatccgatctttttccctctgccaaaaattatggggacatcatgaagccccttgagcatctgacttctggctaataaaggaaatttattttcattgcaatagtgtgttggaattttttgtgtctctcactcgactagatttaaatatgtcgtgcatcgatgctacgtagataagtagcatggcgggttaatcattaactacagaggaacccctagtgatggagttggccactccctctctgcgcgctcgctcgctcactgaggccgggcgaccaaaggtcgcccgacgcccgggctttgcccgggcggcctcagtgagcgagcgagcgcgcagctgcctgcagg

SEQ ID NO: 1360 - DNA, 4618 bp, Artificial Sequence
  source: /note="Description of Artificial Sequence: Synthetic polynucleotide"
cctgcaggcagctgcgcgctcgctcgctcactgaggccgcccgggcaaagcccgggcgtcgggcgacctttggtcgcccggcctcagtgagcgagcgagcgcgcagagagggagtggccaactccatcactaggggttccttgtagttaatgattaacccgccatgctacttatctacgtagccatgcgtcgacataacgcgtaattcgcccttgggcctaggcaattggatccgccggcagagaaaacatcccagggatttacagatcacatgcaggcagggaccagctcaacccttctttaatgtcatccagggagggggccagggatggaggggaggggttgaggagcgagaggcagttatttttgggtgggattcaccacttttcccatgaagaggggagacttggtattttgttcaatcattaagaagacaaagggtttgttgaacttgacctcgggggggatagacatgggtatggcctctaaaaacatggccccagcagcttcagtccctttctcgtcgatggtcagcacagccttatgcacggcctggaggggagagaagcagagacacgttgtaaggctgatcccaggcctcgagcaaggctcacgtggacacctcccaggaagcgctcactccccctggacggccctggccctgcacatcctctccctccctgtcacataggccttgctcctcctcaaggctttggctgatggggctggctcccctctgtccatcttcctgacaagcgcctctccccctgctcaggtgcacccacaactcagaacagggaagagcatcgtcactccacgtctgcctccagggctctctcctttctagtacacggcttgaagctccttgaggacacggaccctggcagtgaccttcacagtgcccagaccccaagataatgcagccattcatggaactgcagttgttcattggtcgcctttagttttccaaaataagtgtcatctttagctgaaatcattcattaattcagacaccaaatctcacagatcgaaggagtcagaaattcctttgaaacaacttagcccaaacctttctgtgtcagtatggataaatcaaggcccaatgtctagaaggtcttgggcaaagttgaaattcagggtcagtgacacaacctcaagggaggccccgaaagtgccagctgcacagcagtcccctgcctggctttgctgtttgaccacgtcccgtgtcagtgaatcacgggcatcttcaggagctcagcctgggtcttcatttgtttccctcggccccttcctcagcctcaggacagagctgcagcccccacacattcttccctacagataccatggtgcaacaaggtcgtcagggtgatctcaccttggagagcttcaggggtgcctcctctgtgaccccggagaggtcagccccattgctgaagaccttagtgatgcccagttgacccaggacgctcttcagatcataggttccagtaatggacagtttgggtaaatgtaagctggcagacctgtcgtgcagaaaagaaattcaaggcatggcacagcattcctcttgttcttctgggacccaccacagtgcaagtgttttcttttctgattatttctgccacttactcctgtgtcctccacccacactaagatgggaactcggctttggtttgttctacttttagctcttctacattgagtcaaagacgcgtcgacattgattattgactagttattaatagtaatcaattacggggtcattagttcatagcccatatatggagttccgcgttacataacttacggtaaatggcccgcctggctgaccgcccaacgacccccgcccattgacgtcaataatgacgtatgttcccatagtaacgccaatagggactttccattgacgtcaatgggtggagtatttacggtaaactgcccacttggcagtacatcaagtgtatcatatgccaagtacgccccctattgacgtcaatgacggtaaatggcccgcctggcattatgcccagtacatgaccttatgggactttcctacttggcagtacatctacgtattagtcatcgctattaccatgtcgaggccacgttctgcttcactctccccatctcccccccctccccacccccaattttgtatttatttattttttaattattttgtgcagcgatgggggcggggggggggggcgcgcgccaggcggggcggggcggggcgaggggcggggcggggcgaggcggagaggtgcggcggcagccaatcagagcggcgcgctccgaaagtttccttttatggcgaggcggcggcggcggcggccctataaaaagcgaagcgcgcggcgggcgggagcaagcttgaactgaaaaaccagaaagttaactggtaagtttagtctttttgtcttttatttcaggtcccggatccggtggtggtgcaaatcaaagaactgctcctcagtggatgttgcctttacttctaggcctgtacggaagtgttacttctgctctaaaagctgcggaattgtacccgcggccgatccaccggtgtgctgggcggggggcggcgggccctcccgcagaacaccatgcgctccacggaacctgctagctccatgcttgctgtggccactgagaagtaagcatggagctagcaggttctgaggagcgccttgacagcagccatgggagggccgccccctacctcagtgactcgaggacggggtgaactacgcctgaggatccgatctttttccctctgccaaaaattatggggacatcatgaagccccttgagcatctgacttctggctaataaaggaaatttattttcattgcaatagtgtgttggaattttttgtgtctctcactcgactagatttaaataatgttaacatcgaatgaatcacaaaagcttgaaatgccacctcctctgatattctaggtgtcctggaagcctgtctcatcttgccctgtagtgttgggtcacctggcccccagcctgtaacatccccagggccctacacccagagaaacacggggctggtggcagtgcccagtgacaaccgtttagtggataagagaagagtgaccacaccaggctgagtgctcctctctggttttccatggggagacaatgccaccctgagcagggtctggtgtgagcgggcagcttggctctgggctctctgatccgttaccctctcagcctctttgttctttctcaacccctggagcagagacctcaggaggtgctggcatggaacagagaaattccagcctcgattcctattatgaacccgacaccttttgtattttcatcttggttttacagtgtacaaaacgaactagatcagcagggcatgggcataatcacgaatgcacacacatacactaatgtgtggctcatgtttaagtatcacttactacaggacacccaatctaacagcaccgataaagtgacagagaaacgcaagccttctgcgaacatggcctggctgttccaattccgaaccttgcttttctgggccttgccacacaggctcttcccccgtccccccagggacattctacccttgaactccacactccactgctgcctttgccaggaagcccatctgttcctttttggttctgccagaacgtgtggtggtgctgctgtccctgccctgggcactggatattgggaagggacagtgtccacactggagtgggaagtccccagggacgagacctttacctcctcacccctgggtactgtcctcctcatggagcatggatggcgctgcctgaactcagtggtggcctcattctggaagccaagtttatacagagtagcagtgacccagggatgtggggttcaccctcctcagccctctggccagtcctgatgggcctcagtcccaacatggctaagaggtgtgggcagcttcttggtcaccctcaggttggggaatcaccttctgtcttcattttccaggaacttggtgatgatatcgtgggtgagttcattttccaggtgctgtagtttcccctcatcaggcaggaagaagatggcggtggcattgcccaggtatttcatcagcagcacccagctggacagcttcttacagtgctggatgttaaacatgcctaaacgcttcatcataggcaccttcacggtggtcacctggtccacgtggaagtcctcttcctcggtgtccttgacttcaaagggtctctcccatttgcctggagagaggggaaggtgggcatcaccaggggtgagtgaaggtttggaagagtgtagcagaataaagaaaccatgagtcccctccctgagaagccctgagcccccttgacgacacacatccctcgaggctcagcttcatcatctgtaaaaggtgctgaaactgaccatttaaatatgtcgtgcatcgatgctacgtagataagtagcatggcgggttaatcattaactacagaggaacccctagtgatggagttggccactccctctctgcgcgctcgctcgctcactgaggccgggcgaccaaaggtcgcccgacgcccgggctttgcccgggcggcctcagtgagcgagcgagcgcgcagctgcctgcagg

SEQ ID NO: 1361 - DNA, 2307 bp, Artificial Sequence
  source: /note="Description of Artificial Sequence: Synthetic polynucleotide"
cctgcaggcagctgcgcgctcgctcgctcactgaggccgcccgggcaaagcccgggcgtcgggcgacctttggtcgcccggcctcagtgagcgagcgagcgcgcagagagggagtggccaactccatcactaggggttccttgtagttaatgattaacccgccatgctacttatctacgtagccatgcgtcgacataacgcgtaattcgcccttgggcctaggcaattggatccgccggcagagaaaacatcccagggatttacagatcacatgcaggcagggaccagctcaacccttctttaatgtcatccagggagggggccagggatggaggggaggggttgaggagcgagaggcagttatttttgggtgggattcaccacttttcccatgaagaggggagacttggtattttgttcaatcattaagaagacaaagggtttgttgaacttgacctcgggggggatagacatgggtatggcctctaaaaacatggccccagcagcttcagtccctttctcgtcgatggtcagcacagccttatgcacggcctggagggacgcgtcgacattgattattgactagttattaatagtaatcaattacggggtcattagttcatagcccatatatggagttccgcgttacataacttacggtaaatggcccgcctggctgaccgcccaacgacccccgcccattgacgtcaataatgacgtatgttcccatagtaacgccaatagggactttccattgacgtcaatgggtggagtatttacggtaaactgcccacttggcagtacatcaagtgtatcatatgccaagtacgccccctattgacgtcaatgacggtaaatggcccgcctggcattatgcccagtacatgaccttatgggactttcctacttggcagtacatctacgtattagtcatcgctattaccatgtcgaggccacgttctgcttcactctccccatctcccccccctccccacccccaattttgtatttatttattttttaattattttgtgcagcgatgggggcggggggggggggcgcgcgccaggcggggcggggcggggcgaggggcggggcggggcgaggcggagaggtgcggcggcagccaatcagagcggcgcgctccgaaagtttccttttatggcgaggcggcggcggcggcggccctataaaaagcgaagcgcgcggcgggcgggagcaagcttgaactgaaaaaccagaaagttaactggtaagtttagtctttttgtcttttatttcaggtcccggatccggtggtggtgcaaatcaaagaactgctcctcagtggatgttgcctttacttctaggcctgtacggaagtgttacttctgctctaaaagctgcggaattgtacccgcggccgatccaccggtgtgctgggcggggggcggcgggccctcccgcagaacaccatgcgctccacggaacctgctagctccatgcttgctgtggccactgagaagtaagcatggagctagcaggttctgaggagcgccttgacagcagccatgggagggccgccccctacctcagtgactcgaggacggggtgaactacgcctgaggatccgatctttttccctctgccaaaaattatggggacatcatgaagccccttgagcatctgacttctggctaataaaggaaatttattttcattgcaatagtgtgttggaattttttgtgtctctcactcgactagatttaaatgagagaagcagagacacgttgtaaggctgatcccaggcctcgagcaaggctcacgtggacacctcccaggaagcgctcactccccctggacggccctggccctgcacatcctctccctccctgtcacataggccttgctcctcctcaaggctttggctgatggggctggctcccctctgtccatcttcctgacaagcgcctctccccctgctcaggtgcacccacaactcagaacagggaagagcatcgtcactccacgtctgcctccagggctctctcctttctagtacacggcttgaagctccttgaggacacggaccctggcagtgaccttcacagtgcccagaccatttaaatatgtcgtgcatcgatgctacgtagataagtagcatggcgggttaatcattaactacagaggaacccctagtgatggagttggccactccctctctgcgcgctcgctcgctcactgaggccgggcgaccaaaggtcgcccgacgcccgggctttgcccgggcggcctcagtgagcgagcgagcgcgcagctgcctgcagg

SEQ ID NO: 1362 - DNA, 2302 bp, Artificial Sequence
  source: /note="Description of Artificial Sequence: Synthetic polynucleotide"
cctgcaggcagctgcgcgctcgctcgctcactgaggccgcccgggcaaagcccgggcgtcgggcgacctttggtcgcccggcctcagtgagcgagcgagcgcgcagagagggagtggccaactccatcactaggggttccttgtagttaatgattaacccgccatgctacttatctacgtagccatgcgtcgacataacgcgtaattcgcccttgggcctaggcaattggatccgccggcagagaaaacatcccagggatttacagatcacatgcaggcagggaccagctcaacccttctttaatgtcatccagggagggggccagggatggaggggaggggttgaggagcgagaggcagttatttttgggtgggattcaccacttttcccatgaagaggggagacttggtattttgttcaatcattaagaagacaaagggtttgttgaacttgacctcgggggggatagacatgggtatggcctctaaaaacatggccccagcagcttcagtccctttctcgtcgatggtcagcacagccttatgcacggcctggagggacgcgtcgacattgattattgactagttattaatagtaatcaattacggggtcattagttcatagcccatatatggagttccgcgttacataacttacggtaaatggcccgcctggctgaccgcccaacgacccccgcccattgacgtcaataatgacgtatgttcccatagtaacgccaatagggactttccattgacgtcaatgggtggagtatttacggtaaactgcccacttggcagtacatcaagtgtatcatatgccaagtacgccccctattgacgtcaatgacggtaaatggcccgcctggcattatgcccagtacatgaccttatgggactttcctacttggcagtacatctacgtattagtcatcgctattaccatgtcgaggccacgttctgcttcactctccccatctcccccccctccccacccccaattttgtatttatttattttttaattattttgtgcagcgatgggggcggggggggggggcgcgcgccaggcggggcggggcggggcgaggggcggggcggggcgaggcggagaggtgcggcggcagccaatcagagcggcgcgctccgaaagtttccttttatggcgaggcggcggcggcggcggccctataaaaagcgaagcgcgcggcgggcgggagcaagcttgaactgaaaaaccagaaagttaactggtaagtttagtctttttgtcttttatttcaggtcccggatccggtggtggtgcaaatcaaagaactgctcctcagtggatgttgcctttacttctaggcctgtacggaagtgttacttctgctctaaaagctgcggaattgtacccgcggccgatccaccggtgtgctgggcggggggcggcgggccctcccgcagaacaccatgcgctcttcggaagcaattcagtctcgttgtacctgtgatttggtacaacgagactgaattgcttctgaggagcgccttgacagcagccatgggagggccgccccctacctcagtgactcgaggacggggtgaactacgcctgaggatccgatctttttccctctgccaaaaattatggggacatcatgaagccccttgagcatctgacttctggctaataaaggaaatttattttcattgcaatagtgtgttggaattttttgtgtctctcactcgactagatttaaatgagagaagcagagacacgttgtaaggctgatcccaggcctcgagcaaggctcacgtggacacctcccaggaagcgctcactccccctggacggccctggccctgcacatcctctccctccctgtcacataggccttgctcctcctcaaggctttggctgatggggctggctcccctctgtccatcttcctgacaagcgcctctccccctgctcaggtgcacccacaactcagaacagggaagagcatcgtcactccacgtctgcctccagggctctctcctttctagtacacggcttgaagctccttgaggacacggaccctggcagtgaccttcacagtgcccagaccatttaaatatgtcgtgcatcgatgctacgtagataagtagcatggcgggttaatcattaactacagaggaacccctagtgatggagttggccactccctctctgcgcgctcgctcgctcactgaggccgggcgaccaaaggtcgcccgacgcccgggctttgcccgggcggcctcagtgagcgagcgagcgcgcagctgcctgcagg

SEQ ID NO: 1363 - DNA, 2307 bp, Artificial Sequence
  source: /note="Description of Artificial Sequence: Synthetic polynucleotide"
cctgcaggcagctgcgcgctcgctcgctcactgaggccgcccgggcaaagcccgggcgtcgggcgacctttggtcgcccggcctcagtgagcgagcgagcgcgcagagagggagtggccaactccatcactaggggttccttgtagttaatgattaacccgccatgctacttatctacgtagccatgcgtcgacataacgcgtaattcgcccttgggcctaggcaattggatccgccggcagagaaaacatcccagggatttacagatcacatgcaggcagggaccagctcaacccttctttaatgtcatccagggagggggccagggatggaggggaggggttgaggagcgagaggcagttatttttgggtgggattcaccacttttcccatgaagaggggagacttggtattttgttcaatcattaagaagacaaagggtttgttgaacttgacctcgggggggatagacatgggtatggcctctaaaaacatggccccagcagcttcagtccctttctcgtcgatggtcagcacagccttatgcacggcctggagggacgcgtcgacattgattattgactagttattaatagtaatcaattacggggtcattagttcatagcccatatatggagttccgcgttacataacttacggtaaatggcccgcctggctgaccgcccaacgacccccgcccattgacgtcaataatgacgtatgttcccatagtaacgccaatagggactttccattgacgtcaatgggtggagtatttacggtaaactgcccacttggcagtacatcaagtgtatcatatgccaagtacgccccctattgacgtcaatgacggtaaatggcccgcctggcattatgcccagtacatgaccttatgggactttcctacttggcagtacatctacgtattagtcatcgctattaccatgtcgaggccacgttctgcttcactctccccatctcccccccctccccacccccaattttgtatttatttattttttaattattttgtgcagcgatgggggcggggggggggggcgcgcgccaggcggggcggggcggggcgaggggcggggcggggcgaggcggagaggtgcggcggcagccaatcagagcggcgcgctccgaaagtttccttttatggcgaggcggcggcggcggcggccctataaaaagcgaagcgcgcggcgggcgggagcaagcttgaactgaaaaaccagaaagttaactggtaagtttagtctttttgtcttttatttcaggtcccggatccggtggtggtgcaaatcaaagaactgctcctcagtggatgttgcctttacttctaggcctgtacggaagtgttacttctgctctaaaagctgcggaattgtacccgcggccgatccaccggtgtgctgggcggggggcggcgggccctcccgcagaacaccatgcgctcctcggaataagcatggagctagcaggttgtggccactgagaaacctgctagctccatgcttgttctgcggagcgccttgacagcagccatgggagggccgccccctacctcagtgactcgaggacggggtgaactacgcctgaggatccgatctttttccctctgccaaaaattatggggacatcatgaagccccttgagcatctgacttctggctaataaaggaaatttattttcattgcaatagtgtgttggaattttttgtgtctctcactcgactagatttaaatgagagaagcagagacacgttgtaaggctgatcccaggcctcgagcaaggctcacgtggacacctcccaggaagcgctcactccccctggacggccctggccctgcacatcctctccctccctgtcacataggccttgctcctcctcaaggctttggctgatggggctggctcccctctgtccatcttcctgacaagcgcctctccccctgctcaggtgcacccacaactcagaacagggaagagcatcgtcactccacgtctgcctccagggctctctcctttctagtacacggcttgaagctccttgaggacacggaccctggcagtgaccttcacagtgcccagaccatttaaatatgtcgtgcatcgatgctacgtagataagtagcatggcgggttaatcattaactacagaggaacccctagtgatggagttggccactccctctctgcgcgctcgctcgctcactgaggccgggcgaccaaaggtcgcccgacgcccgggctttgcccgggcggcctcagtgagcgagcgagcgcgcagctgcctgcagg

SEQ ID NO: 1364 - DNA, 1587 bp, Artificial Sequence
  source: /note="Description of Artificial Sequence: Synthetic polynucleotide"
cctgcaggcagctgcgcgctcgctcgctcactgaggccgcccgggcaaagcccgggcgtcgggcgacctttggtcgcccggcctcagtgagcgagcgagcgcgcagagagggagtggccaactccatcactaggggttccttgtagttaatgattaacccgccatgctacttatctacgtagccatgcgtcgacataacgcgtcgacattgattattgactagttattaatagtaatcaattacggggtcattagttcatagcccatatatggagttccgcgttacataacttacggtaaatggcccgcctggctgaccgcccaacgacccccgcccattgacgtcaataatgacgtatgttcccatagtaacgccaatagggactttccattgacgtcaatgggtggagtatttacggtaaactgcccacttggcagtacatcaagtgtatcatatgccaagtacgccccctattgacgtcaatgacggtaaatggcccgcctggcattatgcccagtacatgaccttatgggactttcctacttggcagtacatctacgtattagtcatcgctattaccatgtcgaggccacgttctgcttcactctccccatctcccccccctccccacccccaattttgtatttatttattttttaattattttgtgcagcgatgggggcggggggggggggcgcgcgccaggcggggcggggcggggcgaggggcggggcggggcgaggcggagaggtgcggcggcagccaatcagagcggcgcgctccgaaagtttccttttatggcgaggcggcggcggcggcggccctataaaaagcgaagcgcgcggcgggcgggagcaagcttgaactgaaaaaccagaaagttaactggtaagtttagtctttttgtcttttatttcaggtcccggatccggtggtggtgcaaatcaaagaactgctcctcagtggatgttgcctttacttctaggcctgtacggaagtgttacttctgctctaaaagctgcggaattgtacccgcggccgatccaccggtgtgctgggcggggggcggcgggccctcccgcagaacaccatgcgctccacggaacctgctagctccatgcttgctgtggccactgagaagtaagcatggagctagcaggttctgaggagcgccttgacagcagccatgggagggccgccccctacctcagtgactcgaggacggggtgaactacgcctgaggatccgatctttttccctctgccaaaaattatggggacatcatgaagccccttgagcatctgacttctggctaataaaggaaatttattttcattgcaatagtgtgttggaattttttgtgtctctcactcgactagatttaaatatgtcgtgcatcgatgctacgtagataagtagcatggcgggttaatcattaactacagaggaacccctagtgatggagttggccactccctctctgcgcgctcgctcgctcactgaggccgggcgaccaaaggtcgcccgacgcccgggctttgcccgggcggcctcagtgagcgagcgagcgcgcagctgcctgcagg

SEQ ID NO: 1365 - DNA, 1582 bp, Artificial Sequence
  source: /note="Description of Artificial Sequence: Synthetic polynucleotide"
cctgcaggcagctgcgcgctcgctcgctcactgaggccgcccgggcaaagcccgggcgtcgggcgacctttggtcgcccggcctcagtgagcgagcgagcgcgcagagagggagtggccaactccatcactaggggttccttgtagttaatgattaacccgccatgctacttatctacgtagccatgcgtcgacataacgcgtcgacattgattattgactagttattaatagtaatcaattacggggtcattagttcatagcccatatatggagttccgcgttacataacttacggtaaatggcccgcctggctgaccgcccaacgacccccgcccattgacgtcaataatgacgtatgttcccatagtaacgccaatagggactttccattgacgtcaatgggtggagtatttacggtaaactgcccacttggcagtacatcaagtgtatcatatgccaagtacgccccctattgacgtcaatgacggtaaatggcccgcctggcattatgcccagtacatgaccttatgggactttcctacttggcagtacatctacgtattagtcatcgctattaccatgtcgaggccacgttctgcttcactctccccatctcccccccctccccacccccaattttgtatttatttattttttaattattttgtgcagcgatgggggcggggggggggggcgcgcgccaggcggggcggggcggggcgaggggcggggcggggcgaggcggagaggtgcggcggcagccaatcagagcggcgcgctccgaaagtttccttttatggcgaggcggcggcggcggcggccctataaaaagcgaagcgcgcggcgggcgggagcaagcttgaactgaaaaaccagaaagttaactggtaagtttagtctttttgtcttttatttcaggtcccggatccggtggtggtgcaaatcaaagaactgctcctcagtggatgttgcctttacttctaggcctgtacggaagtgttacttctgctctaaaagctgcggaattgtacccgcggccgatccaccggtgtgctgggcggggggcggcgggccctcccgcagaacaccatgcgctcttcggaagcaattcagtctcgttgtgcctgtgacctggtacaacgagactgaattgcttctgaggagcgccttgacagcagccatgggagggccgccccctacctcagtgactcgaggacggggtgaactacgcctgaggatccgatctttttccctctgccaaaaattatggggacatcatgaagccccttgagcatctgacttctggctaataaaggaaatttattttcattgcaatagtgtgttggaattttttgtgtctctcactcgactagatttaaatatgtcgtgcatcgatgctacgtagataagtagcatggcgggttaatcattaactacagaggaacccctagtgatggagttggccactccctctctgcgcgctcgctcgctcactgaggccgggcgaccaaaggtcgcccgacgcccgggctttgcccgggcggcctcagtgagcgagcgagcgcgcagctgcctgcagg

SEQ ID NO: 1366 - DNA, 1584 bp, Artificial Sequence
  source: /note="Description of Artificial Sequence: Synthetic polynucleotide"
ctgcgcgctcgctcgctcactgaggccgcccgggcaaagcccgggcgtcgggcgacctttggtcgcccggcctcagtgagcgagcgagcgcgcagagagggagtgtagccatgctctaggaagatcaattcaattcacgcgtcgacattgattattgactagttattaatagtaatcaattacggggtcattagttcatagcccatatatggagttccgcgttacataacttacggtaaatggcccgcctggctgaccgcccaacgacccccgcccattgacgtcaataatgacgtatgttcccatagtaacgccaatagggactttccattgacgtcaatgggtggagtatttacggtaaactgcccacttggcagtacatcaagtgtatcatatgccaagtacgccccctattgacgtcaatgacggtaaatggcccgcctggcattatgcccagtacatgaccttatgggactttcctacttggcagtacatctacgtattagtcatcgctattaccatgtcgaggccacgttctgcttcactctccccatctcccccccctccccacccccaattttgtatttatttattttttaattattttgtgcagcgatgggggcggggggggggggcgcgcgccaggcggggcggggcggggcgaggggcggggcggggcgaggcggagaggtgcggcggcagccaatcagagcggcgcgctccgaaagtttccttttatggcgaggcggcggcggcggcggccctataaaaagcgaagcgcgcggcgggcgggagcaagcttgaactgaaaaaccagaaagttaactggtaagtttagtctttttgtcttttatttcaggtcccggatccggtggtggtgcaaatcaaagaactgctcctcagtggatgttgcctttacttctaggcctgtacggaagtgttacttctgctctaaaagctgcggaattgtacccgcggccgatccaccggtgaagcaaagaaggggcagagggagcccgtgagctgagtgggccagggactgggagaaggagtgaggaggcagggccggcatgcctctgctgctggccagacctgctagctccatgcttcccgtctgcacctgtcactagtaagcatggagctagcaggtttggccgtgtagtgctacccagcgctggctgcctcctcagcattgcaattcctctcccatctgggcaccagtcagctaccctggtgggaatctgggtagccctcgaggacggggtgaactacgcctgaggatccgatctttttccctctgccaaaaattatggggacatcatgaagccccttgagcatctgacttctggctaataaaggaaatttattttcattgcaatagtgtgttggaattttttgtgtctctcactcggcctaggtagataagtagcatggcgggttaatcattaactacaaggaacccctagtgatggagttggccactccctctctgcgcgctcgctcgctcactgaggccgggcgaccaaaggtcgcccgacgcccgggctttgcccgggcggcctcagtgagcgagcgagcgcgcag

SEQ ID NO: 1367 - DNA, 1482 bp, Artificial Sequence
  source: /note="Description of Artificial Sequence: Synthetic polynucleotide"
ctgcgcgctcgctcgctcactgaggccgcccgggcaaagcccgggcgtcgggcgacctttggtcgcccggcctcagtgagcgagcgagcgcgcagagagggagtgtagccatgctctaggaagatcaattcaattcacgcgtcgacattgattattgactagttattaatagtaatcaattacggggtcattagttcatagcccatatatggagttccgcgttacataacttacggtaaatggcccgcctggctgaccgcccaacgacccccgcccattgacgtcaataatgacgtatgttcccatagtaacgccaatagggactttccattgacgtcaatgggtggagtatttacggtaaactgcccacttggcagtacatcaagtgtatcatatgccaagtacgccccctattgacgtcaatgacggtaaatggcccgcctggcattatgcccagtacatgaccttatgggactttcctacttggcagtacatctacgtattagtcatcgctattaccatgtcgaggccacgttctgcttcactctccccatctcccccccctccccacccccaattttgtatttatttattttttaattattttgtgcagcgatgggggcggggggggggggcgcgcgccaggcggggcggggcggggcgaggggcggggcggggcgaggcggagaggtgcggcggcagccaatcagagcggcgcgctccgaaagtttccttttatggcgaggcggcggcggcggcggccctataaaaagcgaagcgcgcggcgggcgggagcaagcttgaactgaaaaaccagaaagttaactggtaagtttagtctttttgtcttttatttcaggtcccggatccggtggtggtgcaaatcaaagaactgctcctcagtggatgttgcctttacttctaggcctgtacggaagtgttacttctgctctaaaagctgcggaattgtacccgcggccgatccaccggtgtgctgggcggggggcggcgggccctcccgcagaacaccatgcgctcttcggaagcaattcagtctcgttgtgcctgtgacctggtacaacgagactgaattgcttctgaggagcgccttgacagcagccatgggagggccgccccctacctcagtgactcgaggacggggtgaactacgcctgaggatccgatctttttccctctgccaaaaattatggggacatcatgaagccccttgagcatctgacttctggctaataaaggaaatttattttcattgcaatagtgtgttggaattttttgtgtctctcactcggcctaggtagataagtagcatggcgggttaatcattaactacaaggaacccctagtgatggagttggccactccctctctgcgcgctcgctcgctcactgaggccgggcgaccaaaggtcgcccgacgcccgggctttgcccgggcggcctcagtgagcgagcgagcgcgcag

SEQ ID NO: 1368 - DNA, 4606 bp, Artificial Sequence
  source: /note="Description of Artificial Sequence: Synthetic polynucleotide"
cctgcaggcagctgcgcgctcgctcgctcactgaggccgcccgggcaaagcccgggcgtcgggcgacctttggtcgcccggcctcagtgagcgagcgagcgcgcagagagggagtggccaactccatcactaggggttccttgtagttaatgattaacccgccatgctacttatctacgtagccatgcgtcgacataacgcgtatatctagacgttacataacttacggtaaatggcccgcctggctgaccgcccaacgacccccgcccattgacgtcaataatgacgtatgttcccatagtaacgccaatagggactttccattgacgtcaatgggtggagtatttacggtaaactgcccacttggcagtacatcaagtgtatcatatgccaagtacgccccctattgacgtcaatgacggtaaatggcccgcctggcattatgcccagtacatgaccttatgggactttcctacttggcagtacatctagtattagtcatcgctattaccatggtgatgcggttttggcagtacatcaatgggcgtggatagcggtttgactcacggggatttccaagtctccaccccattgacgtcaatgggagtttgttttggcaccaaaatcaacgggactttccaaaatgtcgtaacaactccgccccattgacgcaaatgggcggtaggcgtgtacggtgggaggtctatataagcagagctcgtttagtgaaccgtcagatcgcctggagacgccatccacgctgttttgacctccatagaagacaccgggaccgatccagcctccgcggattcgaatcccggccgggaacggtgcattggaacgcggattccccgtgccaagagtgacgtaagtaccgcctatagagtctataggcccacaaaaaatgctttcttcttttaatatacttttttgtttatcttatttctaatactttccctaatctctttctttcagggcaataatgatacaatgtatcatgcctctttgcaccattctaaagaataacagtgataatttctgggttaaggcaatagcaatatttctgcatataaatatttctgcatataaattgtaactgatgtaagaggtttcatattgctaatagcagctacaatccagctaccattctgcttttattttatggttgggataaggctggattattctgagtccaagctaggcccttttgctaatcatgttcatacctcttatcttcctcccacagctcctgggcaacgtgctggtctgtgtgctggcccatcactttggcaaagaattgggattcgaacatcgattgaattccccggggatccaccgtgctgggcggggggcggcgggccctcccgcagaacaccatgcgctccacggaacctgctagctccatgcttgctgtggccactgagaagtaagcatggagctagcaggttctgaggagcgccttgacagcagccatgggagggccgccccctacctcagtgactcgagagatctacgggtggcatccctgtgacccctccccagtgcctctcctggccctggaagttgccactccagtgcccaccagccttgtcctaataaaattaagttgcatcattttgtctgactaggtgtccttctataatattatggggtggaggggggtggtatggagcaaggggcaagttgggaagacaacctgtagggcctgcggggtctattgggaaccaagctggagtgcagtggcacaatcttggctcactgcaatctccgcctcctgggttcaagcgattctcctgcctcagcctcccgagttgttgggattccaggcatgcatgaccaggctcagctaatttttgtttttttggtagagacggggtttcaccatattggccaggctggtctccaactcctaatctcaggtgatctacccaccttggcctcccaaattgctgggattacaggcgtgaaccactgctcccttccctgtccttactagatttaaataattcgcccttgggcctaggcaattggatccgccggcagagaaaacatcccagggatttacagatcacatgcaggcagggaccagctcaacccttctttaatgtcatccagggagggggccagggatggaggggaggggttgaggagcgagaggcagttatttttgggtgggattcaccacttttcccatgaagaggggagacttggtattttgttcaatcattaagaagacaaagggtttgttgaacttgacctcgggggggatagacatgggtatggcctctaaaaacatggccccagcagcttcagtccctttctcgtcgatggtcagcacagccttatgcacggcctggaggggagagaagcagagacacgttgtaaggctgatcccaggcctcgagcaaggctcacgtggacacctcccaggaagcgctcactccccctggacggccctggccctgcacatcctctccctccctgtcacataggccttgctcctcctcaaggctttggctgatggggctggctcccctctgtccatcttcctgacaagcgcctctccccctgctcaggtgcacccacaactcagaacagggaagagcatcgtcactccacgtctgcctccagggctctctcctttctagtacacggcttgaagctccttgaggacacggaccctggcagtgaccttcacagtgcccagaccccaagataatgcagccattcatggaactgcaggttgttcattggtcgcctttagttttccaaaataagtgtcactttagctgaaatcattcattaattcagacaccaaatctcacagatcgaaggagtcagaaattcctttgaaacaacttagcccaaacctttctgtgtcagtatggataaatcaaggcccaatgtctagaaggtcttgggcaaagttgaaattcagggtcagtgacacaacctcaagggaggccccgaaagtgccagctgcacagcagcccctgcctggctttgctgtttgcccaccgtcccgtgtcagtgaatcacgggcatcttcaggagctcagcctgggtcttcatttgtttccctcggccccttcctcagcctcaggacagtgctgcagcccccacacattcttccctacagataccatggtgcaacaaggtcgtcagggtgatctcaccttggagagcttcaggggtgcctcctctgtgaccccggagaggtcagccccattgctgaagaccttagtgatgcccagttgacccaggacgctcttcagatcataggttccagtaatggacagtttgggtaaatgtaagctggcagacctgtcgtgcagaaaagaaattcaaggcatggcacagcattcctcttgttcttctgggacccaccacagtgcaagtgttttcttttctgattatttctgccacttactcctgtgtcctccacccacactaagatgggaactcggctttggtttgttctacttttagctcttctacattgagtcaaagaatgttaacatcgaatgaatcacaaaagcttgaaatgccacctcctctgatattctaggtgtcctggaagcctgtctcatcttgccctgtagtgttgggtcacctggcccccagcctgtaacatccccagggccctacacccagagaaacacggggctggtggcagtgcccagtgacaaccgtttagtggataagagaagagtgaccacaccaggctgagtgctcctctctggttttccatggggagacaatgccaccctgagcagggtctggtgtgagcggcagctggctctgggctctctgatccgttaccctctcagcctctttgttctttctcaacccctggagcagagacctcaggaggtgctggcatggaacagagaaattccagcctcgattcctattatgaacccgacaccttttgtattttcatcttggttttacagtgtacaaaacgaactagatcagcagggcatgggcataatcacgaatgcacacacatacactaatgtgtggctcatgtttaagtatcacttactacaggacacccaatctaacagcaccgataaagtgacagagaaacgcaagccttctgcgaacatggcctggctgttccaattccgaaccttgcttttctgggccttgccacacaggctcttcccccgtccccccagggacattctacccttgaactccacactccactgctgcctttgccaggaagcccatctgttcctttttggttctgccagaacgtgtggtggtgctgctgtccctgccttgggcactggatattgggaagggacagtgtccacactggagtgggaagttcccagggacgagacctttacctcctcaccctgggtactgttctcctcatggagcatggatttaaatatgtcgtgcatcgatgctacgtagataagtagcatggcgggttaatcattaactacagaggaacccctagtgatggagttggccactccctctctgcgcgctcgctcgctcactgaggccgggcgaccaaaggtcgcccgacgcccgggctttgcccgggcggcctcagtgagcgagcgagcgcgcagctgcctgcagg

SEQ ID NO: 1369 - DNA, 2308 bp, Artificial Sequence
  source: /note="Description of Artificial Sequence: Synthetic polynucleotide"
cctgcaggcagctgcgcgctcgctcgctcactgaggccgcccgggcaaagcccgggcgtcgggcgacctttggtcgcccggcctcagtgagcgagcgagcgcgcagagagggagtggccaactccatcactaggggttccttgtagttaatgattaacccgccatgctacttatctacgtagccatgcgtcgacataacgcgtatatctagacgttacataacttacggtaaatggcccgcctggctgaccgcccaacgacccccgcccattgacgtcaataatgacgtatgttcccatagtaacgccaatagggactttccattgacgtcaatgggtggagtatttacggtaaactgcccacttggcagtacatcaagtgtatcatatgccaagtacgccccctattgacgtcaatgacggtaaatggcccgcctggcattatgcccagtacatgaccttatgggactttcctacttggcagtacatctagtattagtcatcgctattaccatggtgatgcggttttggcagtacatcaatgggcgtggatagcggtttgactcacggggatttccaagtctccaccccattgacgtcaatgggagtttgttttggcaccaaaatcaacgggactttccaaaatgtcgtaacaactccgccccattgacgcaaatgggcggtaggcgtgtacggtgggaggtctatataagcagagctcgtttagtgaaccgtcagatcgcctggagacgccatccacgctgttttgacctccatagaagacaccgggaccgatccagcctccgcggattcgaatcccggccgggaacggtgcattggaacgcggattccccgtgccaagagtgacgtaagtaccgcctatagagtctataggcccacaaaaaatgctttcttcttttaatatacttttttgtttatcttatttctaatactttccctaatctctttctttcagggcaataatgatacaatgtatcatgcctctttgcaccattctaaagaataacagtgataatttctgggttaaggcaatagcaatatttctgcatataaatatttctgcatataaattgtaactgatgtaagaggtttcatattgctaatagcagctacaatccagctaccattctgcttttattttatggttgggataaggctggattattctgagtccaagctaggcccttttgctaatcatgttcatacctcttatcttcctcccacagctcctgggcaacgtgctggtctgtgtgctggcccatcactttggcaaagaattgggattcgaacatcgattgaattccccggggatccaccgtgctgggcggggggcggcgggccctcccgcagaacaccatgcgctccacggaacctgctagctccatgcttgctgtggccactgagaagtaagcatggagctagcaggttctgaggagcgccttgacagcagccatgggagggccgccccctacctcagtgactcgagagatctacgggtggcatccctgtgacccctccccagtgcctctcctggccctggaagttgccactccagtgcccaccagccttgtcctaataaaattaagttgcatcattttgtctgactaggtgtccttctataatattatggggtggaggggggtggtatggagcaaggggcaagttgggaagacaacctgtagggcctgcggggtctattgggaaccaagctggagtgcagtggcacaatcttggctcactgcaatctccgcctcctgggttcaagcgattctcctgcctcagcctcccgagttgttgggattccaggcatgcatgaccaggctcagctaatttttgtttttttggtagagacggggtttcaccatattggccaggctggtctccaactcctaatctcaggtgatctacccaccttggcctcccaaattgctgggattacaggcgtgaaccactgctcccttccctgtccttactagatttaaataattcgcccttgggcctaggcaattggatccgccggcagagaaaacatcccagggatttacagatcacatgcaggcagggaccagctcaacccttctatttaaatatgtcgtgcatcgatgctacgtagataagtagcatggcgggttaatcattaactacagaggaacccctagtgatggagttggccactccctctctgcgcgctcgctcgctcactgaggccgggcgaccaaaggtcgcccgacgcccgggctttgcccgggcggcctcagtgagcgagcgagcgcgcagctgcctgcagg

SEQ ID NO: 1370 - DNA, 4608 bp, Artificial Sequence
  source: /note="Description of Artificial Sequence: Synthetic polynucleotide"
cctgcaggcagctgcgcgctcgctcgctcactgaggccgcccgggcaaagcccgggcgtcgggcgacctttggtcgcccggcctcagtgagcgagcgagcgcgcagagagggagtggccaactccatcactaggggttccttgtagttaatgattaacccgccatgctacttatctacgtagccatgcgtcgacataacgcgtaattcgcccttgggcctaggcaattggatccgccggcagagaaaacatcccagggatttacagatcacatgcaggcagggaccagctcaacccttctttaatgtcatccagggagggggccagggatggaggggaggggttgaggagcgagaggcagttatttttgggtgggattcaccacttttcccatgaagaggggagacttggtattttgttcaatcattaagaagacaaagggtttgttgaacttgacctcgggggggatagacatgggtatggcctctaaaaacatggccccagcagcttcagtccctttctcgtcgatggtcagcacagccttatgcacggcctggaggggagagaagcagagacacgttgtaaggctgatcccaggcctcgagcaaggctcacgtggacacctcccaggaagcgctcactccccctggacggccctggccctgcacatcctctccctccctgtcacataggccttgctcctcctcaaggctttggctgatggggctggctcccctctgtccatcttcctgacaagcgcctctccccctgctcaggtgcacccacaactcagaacagggaagagcatcgtcactccacgtctgcctccagggctctctcctttctagtacacggcttgaagctccttgaggacacggaccctggcagtgaccttcacagtgcccagaccccaagataatgcagccattcatggaactgcagttgttcattggtcgcctttagttttccaaaataagtgtcatctttagctgaaatcattcattaattcagacaccaaatctcacagatcgaaggagtcagaaattcctttgaaacaacttagcccaaacctttctgtgtcagtatggataaatcaaggcccaatgtctagaaggtcttgggcaaagttgaaattcagggtcagtgacacaacctcaagggaggccccgaaagtgccagctgcacagcagtcccctgcctggctttgctgtttgaccacgtcccgtgtcagtgaatcacgggcatcttcaggagctcagcctgggtcttcatttgtttccctcggccccttcctcagcctcaggacagagctgcagcccccacacattcttccctacagataccagggtgcaacaaggtcgtcagggtgatctcaccttggagagcttcaggggtgcctcctctgtgaccccggagaggtcagccccattgctgaagaccttagtgatgcccagttgacccaggacgctcttcagatcataggttccagtaatggacagtttgggtaaatgtaagctggcagacctgtcgtgcagaaaagaaattcaaggcatggcacagcattcctcttgttcttctgggacccaccacagtgcaagtgttttcttttctgattatttctgccacttactcctgtgtcctccacccacactaagatgggaactcggctttggtttgttctacttttagctcttctacattgagtcaaagaatgttaacatcgaatgaatcacaaaagcttgaaatgccacctcctctgatattctaggtgtcctggaagcctgtctcatcttgccctgtagtgttgggtcacctggcccccagcctgtaacatccccagggccctacacccagagaaacacggggctggtggcagtgcccagtgacaaccgtttagtggataagagaagagtgaccacaccaggctgagtgctcctctctggttttccatgggggagacaatgccaccctgagcagggtctggtgtgagcgggcagcttggctctgggctctctgatccgttaccctctcagcctctttgttctttctcaacccctggagcagagacctcaggaggtgctggcatggaacagagaaattccagcctcgattcctattatgaacccgacaccttttgtattttcatcttggttttacagtgtacaaaacgaactagatcagcagggcatgggcataatcacgaatgcacacacatacactaatgtgtggctcatgtttaagtatcacttactacaggacacccaatctaacagcaccgataaagtgacagagaaacgcaagccttctgcgaacatggcctggctgttccaattccgaaccttgcttttctgggccttgccacacaggctcttcccccgtccccccagggacattctacccttgaactccacactccactgctgcctttgccaggaagcccatctgttcctttttggttctgccagaacgtgtggtggtgctgctgtccctgccctgggcactggatattgggaagggacagtgtccacactggagtgggaagtccccagggacgagacctttacctcctcacccctgggtactgttctcctcatggagcatggacgcgtatatctagacgttacataacttacggtaaatggcccgcctggctgaccgcccaacgacccccgcccattgacgtcaataatgacgtatgttcccatagtaacgccaatagggactttccattgacgtcaatgggtggagtatttacggtaaactgcccacttggcagtacatcaagtgtatcatatgccaagtacgccccctattgacgtcaatgacggtaaatggcccgcctggcattatgcccagtacatgaccttatgggactttcctacttggcagtacatctagtattagtcatcgctattaccatggtgatgcggttttggcagtacatcaatgggcgtggatagcggtttgactcacggggatttccaagtctccaccccattgacgtcaatgggagtttgttttggcaccaaaatcaacgggactttccaaaatgtcgtaacaactccgccccattgacgcaaatgggcggtaggcgtgtacggtgggaggtctatataagcagagctcgtttagtgaaccgtcagatcgcctggagacgccatccacgctgttttgacctccatagaagacaccgggaccgatccagcctccgcggattcgaatcccggccgggaacggtgcattggaacgcggattccccgtgccaagagtgacgtaagtaccgcctatagagtctataggcccacaaaaaatgctttcttcttttaatatacttttttgtttatcttatttctaatactttccctaatctctttctttcagggcaataatgatacaatgtatcatgcctctttgcaccattctaaagaataacagtgataatttctgggttaaggcaatagcaatatttctgcatataaatatttctgcatataaattgtaactgatgtaagaggtttcatattgctaatagcagctacaatccagctaccattctgcttttattttatggttgggataaggctggattattctgagtccaagctaggcccttttgctaatcatgttcatacctcttatcttcctcccacagctcctgggcaacgtgctggtctgtgtgctggcccatcactttggcaaagaattgggattcgaacatcgattgaattccccggggatccaccgtgctgggcggggggcggcgggccctcccgcagaacaccatgcgctccacggaacctgctagctccatgcttgctgtggccactgagaagtaagcatggagctagcaggttctgaggagcgccttgacagcagccatgggagggccgccccctacctcagtgactcgagagatctacgggtggcatccctgtgacccctccccagtgcctctcctggccctggaagttgccactccagtgcccaccagccttgtcctaataaaattaagttgcatcattttgtctgactaggtgtccttctataatattatggggtggaggggggtggtatggagcaaggggcaagttgggaagacaacctgtagggcctgcggggtctattgggaaccaagctggagtgcagtggcacaatcttggctcactgcaatctccgcctcctgggttcaagcgattctcctgcctcagcctcccgagttgttgggattccaggcatgcatgaccaggctcagctaatttttgtttttttggtagagacggggtttcaccatattggccaggctggtctccaactcctaatctcaggtgatctacccaccttggcctcccaaattgctgggattacaggcgtgaaccactgctcccttccctgtccttactagatttaaatatgtcgtgcatcgatgctacgtagataagtagcatggcgggttaatcattaactacagaggaacccctagtgatggagttggccactccctctctgcgcgctcgctcgctcactgaggccgggcgaccaaaggtcgcccgacgcccgggctttgcccgggcggcctcagtgagcgagcgagcgcgcagctgcctgcagg

SEQ ID NO: 1371 - DNA, 2306 bp, Artificial Sequence
  source: /note="Description of Artificial Sequence: Synthetic polynucleotide"
cctgcaggcagctgcgcgctcgctcgctcactgaggccgcccgggcaaagcccgggcgtcgggcgacctttggtcgcccggcctcagtgagcgagcgagcgcgcagagagggagtggccaactccatcactaggggttccttgtagttaatgattaacccgccatgctacttatctacgtagccatgcgtcgacataacgcgtaattcgcccttgggcctaggcaattggatccgccggcagagaaaacatcccagggatttacagatcacatgcaggcagggaccagctcaacccttctacgcgtatatctagacgttacataacttacggtaaatggcccgcctggctgaccgcccaacgacccccgcccattgacgtcaataatgacgtatgttcccatagtaacgccaatagggactttccattgacgtcaatgggtggagtatttacggtaaactgcccacttggcagtacatcaagtgtatcatatgccaagtacgccccctattgacgtcaatgacggtaaatggcccgcctggcattatgcccagtacatgaccttatgggactttcctacttggcagtacatctagtattagtcatcgctattaccatggtgatgcggttttggcagtacatcaatgggcgtggatagcggtttgactcacggggatttccaagtctccaccccattgacgtcaatgggagtttgttttggcaccaaaatcaacgggactttccaaaatgtcgtaacaactccgccccattgacgcaaatgggcggtaggcgtgtacggtgggaggtctatataagcagagctcgtttagtgaaccgtcagatcgcctggagacgccatccacgctgttttgacctccatagaagacaccgggaccgatccagcctccgcggattcgaatcccggccgggaacggtgcattggaacgcggattccccgtgccaagagtgacgtaagtaccgcctatagagtctataggcccacaaaaaatgctttcttcttttaatatacttttttgtttatcttatttctaatactttccctaatctctttctttcagggcaataatgatacaatgtatcatgcctctttgcaccattctaaagaataacagtgataatttctgggttaaggcaatagcaatatttctgcatataaatatttctgcatataaattgtaactgatgtaagaggtttcatattgctaatagcagctacaatccagctaccattctgcttttattttatggttgggataaggctggattattctgagtccaagctaggcccttttgctaatcatgttcatacctcttatcttcctcccacagctcctgggcaacgtgctggtctgtgtgctggcccatcactttggcaaagaattgggattcgaacatcgattgaattccccggggatccaccgtgctgggcggggggcggcgggccctcccgcagaacaccatgcgctccacggaacctgctagctccatgcttgctgtggccactgagaagtaagcatggagctagcaggttctgaggagcgccttgacagcagccatgggagggccgccccctacctcagtgactcgagagatctacgggtggcatccctgtgacccctccccagtgcctctcctggccctggaagttgccactccagtgcccaccagccttgtcctaataaaattaagttgcatcattttgtctgactaggtgtccttctataatattatggggtggaggggggtggtatggagcaaggggcaagttgggaagacaacctgtagggcctgcggggtctattgggaaccaagctggagtgcagtggcacaatcttggctcactgcaatctccgcctcctgggttcaagcgattctcctgcctcagcctcccgagttgttgggattccaggcatgcatgaccaggctcagctaatttttgtttttttggtagagacggggtttcaccatattggccaggctggtctccaactcctaatctcaggtgatctacccaccttggcctcccaaattgctgggattacaggcgtgaaccactgctcccttccctgtccttactagatttaaatatgtcgtgcatcgatgctacgtagataagtagcatggcgggttaatcattaactacagaggaacccctagtgatggagttggccactccctctctgcgcgctcgctcgctcactgaggccgggcgaccaaaggtcgcccgacgcccgggctttgcccgggcggcctcagtgagcgagcgagcgcgcagctgcctgcagg

SEQ ID NO: 1372 - DNA, 4598 bp, Artificial Sequence
  source: /note="Description of Artificial Sequence: Synthetic polynucleotide"
cctgcaggcagctgcgcgctcgctcgctcactgaggccgcccgggcaaagcccgggcgtcgggcgacctttggtcgcccggcctcagtgagcgagcgagcgcgcagagagggagtggccaactccatcactaggggttccttgtagttaatgattaacccgccatgctacttatctacgtagccatgcgtcgacataacgcgtatatctagacgttacataacttacggtaaatggcccgcctggctgaccgcccaacgacccccgcccattgacgtcaataatgacgtatgttcccatagtaacgccaatagggactttccattgacgtcaatgggtggagtatttacggtaaactgcccacttggcagtacatcaagtgtatcatatgccaagtacgccccctattgacgtcaatgacggtaaatggcccgcctggcattatgcccagtacatgaccttatgggactttcctacttggcagtacatctagtattagtcatcgctattaccatggtgatgcggttttggcagtacatcaatgggcgtggatagcggtttgactcacggggatttccaagtctccaccccattgacgtcaatgggagtttgttttggcaccaaaatcaacgggactttccaaaatgtcgtaacaactccgccccattgacgcaaatgggcggtaggcgtgtacggtgggaggtctatataagcagagctcgtttagtgaaccgtcagatcgcctggagacgccatccacgctgttttgacctccatagaagacaccgggaccgatccagcctccgcggattcgaatcccggccgggaacggtgcattggaacgcggattccccgtgccaagagtgacgtaagtaccgcctatagagtctataggcccacaattcgcccttgggcctaggcaattggatccgccggcagagaaaacatcccagggatttacagatcacatgcaggcagggaccagctcaacccttctttaatgtcatccagggagggggccagggatggaggggaggggttgaggagcgagaggcagttatttttgggtgggattcaccacttttcccatgaagaggggagacttggtattttgttcaatcattaagaagacaaagggtttgttgaacttgacctcgggggggatagacatgggtatggcctctaaaaacatggccccagcagcttcagtccctttctcgtcgatggtcagcacagccttatgcacggcctggaggggagagaagcagagacacgttgtaaggctgatcccaggcctcgagcaaggctcacgtggacacctcccaggaagcgctcactccccctggacggccctggccctgcacatcctctccctccctgtcacataggccttgctcctcctcaaggctttggctgatggggctggctcccctctgtccatcttcctgacaagcgcctctccccctgctcaggtgcacccacaactcagaacagggaagagcatcgtcactccacgtctgcctccagggctctctcctttctagtacacggcttgaagctccttgaggacacggaccctggcagtgaccttcacagtgcccagaccccaagataatgcagccattcatggaactgcaggttgttcattggtcgcctttagttttccaaaataagtgtcactttagctgaaatcattcattaattcagacaccaaatctcacagatcgaaggagtcagaaattcctttgaaacaacttagcccaaacctttctgtgtcagtatggataaatcaaggcccaatgtctagaaggtcttgggcaaagttgaaattcagggtcagtgacacaacctcaagggaggccccgaaagtgccagctgcacagcagcccctgcctggctttgctgtttgcccaccgtcccgtgtcagtgaatcacgggcatcttcaggagctcagcctgggtcttcatttgtttccctcggccccttcctcagcctcaggacagtgctgcagcccccacacattcttccctacagataccatggtgcaacaaggtcgtcagggtgatctcaccttggagagcttcaggggtgcctcctctgtgaccccggagaggtcagccccattgctgaagaccttagtgatgcccagttgacccaggacgctcttcagatcataggttccagtaatggacagtttgggtaaatgtaagctggcagacctgtcgtgcagaaaagaaattcaaggcatggcacagcattcctcttgttcttctgggacccaccacagtgcaagtgttttcttttctgattatttctgccacttactcctgtgtcctccacccacactaagatgggaactcggctttggtttgttctacttttagctcttctacattgagtcaaagaatgttaacatcgaatgaatcacaaaagcttgaaatgccacctcctctgatattctaggtgtcctggaagcctgtctcatcttgccctgtagtgttgggtcacctggcccccagcctgtaacatccccagggccctacacccagagaaacacggggctggtggcagtgcccagtgacaaccgtttagtggataagagaagagtgaccacaccaggctgagtgctcctctctggttttccatggggagacaatgccaccctgagcagggtctggtgtgagcggcagctggctctgggctctctgatccgttaccctctcagcctctttgttctttctcaacccctggagcagagacctcaggaggtgctggcatggaacagagaaattccagcctcgattcctattatgaacccgacaccttttgtattttcatcttggttttacagtgtacaaaacgaactagatcagcagggcatgggcataatcacgaatgcacacacatacactaatgtgtggctcatgtttaagtatcacttactacaggacacccaatctaacagcaccgataaagtgacagagaaacgcaagccttctgcgaacatggcctggctgttccaattccgaaccttgcttttctgggccttgccacacaggctcttcccccgtccccccagggacattctacccttgaactccacactccactgctgcctttgccaggaagcccatctgttcctttttggttctgccagaacgtgtggtggtgctgctgtccctgccttgggcactggatattgggaagggacagtgtccacactggagtgggaagttcccagggacgagacctttacctcctcaccctgggtactgttctcctcatggagcatggaaaaaatgctttcttcttttaatatacttttttgtttatcttatttctaatactttccctaatctctttctttcagggcaataatgatacaatgtatcatgcctctttgcaccattctaaagaataacagtgataatttctgggttaaggcaatagcaatatttctgcatataaatatttctgcatataaattgtaactgatgtaagaggtttcatattgctaatagcagctacaatccagctaccattctgcttttattttatggttgggataaggctggattattctgagtccaagctaggcccttttgctaatcatgttcatacctcttatcttcctcccacagctcctgggcaacgtgctggtctgtgtgctggcccatcactttggcaaagaattgggattcgaacatcgattgaattccccggggatccaccgtgctgggcggggggcggcgggccctcccgcagaacaccatgcgctccacggaacctgctagctccatgcttgctgtggccactgagaagtaagcatggagctagcaggttctgaggagcgccttgacagcagccatgggagggccgccccctacctcagtgactcgagagatctacgggtggcatccctgtgacccctccccagtgcctctcctggccctggaagttgccactccagtgcccaccagccttgtcctaataaaattaagttgcatcattttgtctgactaggtgtccttctataatattatggggtggaggggggtggtatggagcaaggggcaagttgggaagacaacctgtagggcctgcggggtctattgggaaccaagctggagtgcagtggcacaatcttggctcactgcaatctccgcctcctgggttcaagcgattctcctgcctcagcctcccgagttgttgggattccaggcatgcatgaccaggctcagctaatttttgtttttttggtagagacggggtttcaccatattggccaggctggtctccaactcctaatctcaggtgatctacccaccttggcctcccaaattgctgggattacaggcgtgaaccactgctcccttccctgtccttactagatttaaatatgtcgtgcatcgatgctacgtagataagtagcatggcgggttaatcattaactacagaggaacccctagtgatggagttggccactccctctctgcgcgctcgctcgctcactgaggccgggcgaccaaaggtcgcccgacgcccgggctttgcccgggcggcctcagtgagcgagcgagcgcgcagctgcctgcagg

SEQ ID NO: 1373 - DNA, 2300 bp, Artificial Sequence
  source: /note="Description of Artificial Sequence: Synthetic polynucleotide"
cctgcaggcagctgcgcgctcgctcgctcactgaggccgcccgggcaaagcccgggcgtcgggcgacctttggtcgcccggcctcagtgagcgagcgagcgcgcagagagggagtggccaactccatcactaggggttccttgtagttaatgattaacccgccatgctacttatctacgtagccatgcgtcgacataacgcgtatatctagacgttacataacttacggtaaatggcccgcctggctgaccgcccaacgacccccgcccattgacgtcaataatgacgtatgttcccatagtaacgccaatagggactttccattgacgtcaatgggtggagtatttacggtaaactgcccacttggcagtacatcaagtgtatcatatgccaagtacgccccctattgacgtcaatgacggtaaatggcccgcctggcattatgcccagtacatgaccttatgggactttcctacttggcagtacatctagtattagtcatcgctattaccatggtgatgcggttttggcagtacatcaatgggcgtggatagcggtttgactcacggggatttccaagtctccaccccattgacgtcaatgggagtttgttttggcaccaaaatcaacgggactttccaaaatgtcgtaacaactccgccccattgacgcaaatgggcggtaggcgtgtacggtgggaggtctatataagcagagctcgtttagtgaaccgtcagatcgcctggagacgccatccacgctgttttgacctccatagaagacaccgggaccgatccagcctccgcggattcgaatcccggccgggaacggtgcattggaacgcggattccccgtgccaagagtgacgtaagtaccgcctatagagtctataggcccacaattcgcccttgggcctaggcaattggatccgccggcagagaaaacatcccagggatttacagatcacatgcaggcagggaccagctcaacccttctaaaaaatgctttcttcttttaatatacttttttgtttatcttatttctaatactttccctaatctctttctttcagggcaataatgatacaatgtatcatgcctctttgcaccattctaaagaataacagtgataatttctgggttaaggcaatagcaatatttctgcatataaatatttctgcatataaattgtaactgatgtaagaggtttcatattgctaatagcagctacaatccagctaccattctgcttttattttatggttgggataaggctggattattctgagtccaagctaggcccttttgctaatcatgttcatacctcttatcttcctcccacagctcctgggcaacgtgctggtctgtgtgctggcccatcactttggcaaagaattgggattcgaacatcgattgaattccccggggatccaccgtgctgggcggggggcggcgggccctcccgcagaacaccatgcgctccacggaacctgctagctccatgcttgctgtggccactgagaagtaagcatggagctagcaggttctgaggagcgccttgacagcagccatgggagggccgccccctacctcagtgactcgagagatctacgggtggcatccctgtgacccctccccagtgcctctcctggccctggaagttgccactccagtgcccaccagccttgtcctaataaaattaagttgcatcattttgtctgactaggtgtccttctataatattatggggtggaggggggtggtatggagcaaggggcaagttgggaagacaacctgtagggcctgcggggtctattgggaaccaagctggagtgcagtggcacaatcttggctcactgcaatctccgcctcctgggttcaagcgattctcctgcctcagcctcccgagttgttgggattccaggcatgcatgaccaggctcagctaatttttgtttttttggtagagacggggtttcaccatattggccaggctggtctccaactcctaatctcaggtgatctacccaccttggcctcccaaattgctgggattacaggcgtgaaccactgctcccttccctgtccttactagatttaaatatgtcgtgcatcgatgctacgtagataagtagcatggcgggttaatcattaactacagaggaacccctagtgatggagttggccactccctctctgcgcgctcgctcgctcactgaggccgggcgaccaaaggtcgcccgacgcccgggctttgcccgggcggcctcagtgagcgagcgagcgcgcagctgcctgcagg

SEQ ID NO: 1374 - DNA, 4615 bp, Artificial Sequence
  source: /note="Description of Artificial Sequence: Synthetic polynucleotide"
cctgcaggcagctgcgcgctcgctcgctcactgaggccgcccgggcaaagcccgggcgtcgggcgacctttggtcgcccggcctcagtgagcgagcgagcgcgcagagagggagtggccaactccatcactaggggttccttgtagttaatgattaacccgccatgctacttatctacgtagccatgcgtcgacataacgcgtaattcgcccttgggcctaggcaattggatccgccggcagagaaaacatcccagggatttacagatcacatgcaggcagggaccagctcaacccttctttaatgtcatccagggagggggccagggatggaggggaggggttgaggagcgagaggcagttatttttgggtgggattcaccacttttcccatgaagaggggagacttggtattttgttcaatcattaagaagacaaagggtttgttgaacttgacctcgggggggatagacatgggtatggcctctaaaaacatggccccagcagcttcagtccctttctcgtcgatggtcagcacagccttatgcacggcctggaggggagagaagcagagacacgttgtaaggctgatcccaggcctcgagcaaggctcacgtggacacctcccaggaagcgctcactccccctggacggccctggccctgcacatcctctccctccctgtcacataggccttgctcctcctcaaggctttggctgatggggctggctcccctctgtccatcttcctgacaagcgcctctccccctgctcaggtgcacccacaactcagaacagggaagagcatcgtcactccacgtctgcctccagggctctctcctttctagtacacggcttgaagctccttgaggacacggaccctggcagtgaccttcacagtgcccagaccccaagataatgcagccattcatggaactgcagttgttcattggtcgcctttagttttccaaaataagtgtcatctttagctgaaatcattcattaattcagacaccaaatctcacagatcgaaggagtcagaaattcctttgaaacaacttagcccaaacctttctgtgtcagtatggataaatcaaggcccaatgtctagaaggtcttgggcaaagttgaaattcagggtcagtgacacaacctcaagggaggccccgaaagtgccagctgcacagcagtcccctgcctggctttgctgtttgaccacgtcccgtgtcagtgaatcacgggcatcttcaggagctcagcctgggtcttcatttgtttccctcggccccttcctcagcctcaggacagagctgcagcccccacacattcttccctacagataccagggtgcaacaaggtcgtcagggtgatctcaccttggagagcttcaggggtgcctccacgcgtatatctagacgttacataacttacggtaaatggcccgcctggctgaccgcccaacgacccccgcccattgacgtcaataatgacgtatgttcccatagtaacgccaatagggactttccattgacgtcaatgggtggagtatttacggtaaactgcccacttggcagtacatcaagtgtatcatatgccaagtacgccccctattgacgtcaatgacggtaaatggcccgcctggcattatgcccagtacatgaccttatgggactttcctacttggcagtacatctagtattagtcatcgctattaccatggtgatgcggttttggcagtacatcaatgggcgtggatagcggtttgactcacggggatttccaagtctccaccccattgacgtcaatgggagtttgttttggcaccaaaatcaacgggactttccaaaatgtcgtaacaactccgccccattgacgcaaatgggcggtaggcgtgtacggtgggaggtctatataagcagagctcgtttagtgaaccgtcagatcgcctggagacgccatccacgctgttttgacctccatagaagacaccgggaccgatccagcctccgcggattcgaatcccggccgggaacggtgcattggaacgcggattccccgtgccaagagtgacgtaagtaccgcctatagagtctataggcccacaaaaaatgctttcttcttttaatatacttttttgtttatcttatttctaatactttccctaatctctttctttcagggcaataatgatacaatgtatcatgcctctttgcaccattctaaagaataacagtgataatttctgggttaaggcaatagcaatatttctgcatataaatatttctgcatataaattgtaactgatgtaagaggtttcatattgctaatagcagctacaatccagctaccattctgcttttattttatggttgggataaggctggattattctgagtccaagctaggcccttttgctaatcatgttcatacctcttatcttcctcccacagctcctgggcaacgtgctggtctgtgtgctggcccatcactttggcaaagaattgggattcgaacatcgattgaattccccggggatccaccgtgctgggcggggggcggcgggccctcccgcagaacaccatgcgctccacggaacctgctagctccatgcttgctgtggccactgagaagtaagcatggagctagcaggttctgaggagcgccttgacagcagccatgggagggccgccccctacctcagtgactcgagagatctacgggtggcatccctgtgacccctccccagtgcctctcctggccctggaagttgccactccagtgcccaccagccttgtcctaataaaattaagttgcatcattttgtctgactaggtgtccttctataatattatggggtggaggggggtggtatggagcaaggggcaagttgggaagacaacctgtagggcctgcggggtctattgggaaccaagctggagtgcagtggcacaatcttggctcactgcaatctccgcctcctgggttcaagcgattctcctgcctcagcctcccgagttgttgggattccaggcatgcatgaccaggctcagctaatttttgtttttttggtagagacggggtttcaccatattggccaggctggtctccaactcctaatctcaggtgatctacccaccttggcctcccaaattgctgggattacaggcgtgaaccactgctcccttccctgtccttactagatttaaattctgtgaccccggagaggtcagccccattgctgaagaccttagtgatgcccagttgacccaggacgctcttcagatcataggttccagtaatggacagtttgggtaaatgtaagctggcagacctgtcgtgcagaaaagaaattcaaggcatggcacagcattcctcttgttcttctgggacccaccacagtgcaagtgttttcttttctgattatttctgccacttactcctgtgtcctccacccacactaagatgggaactcggctttggtttgttctacttttagctcttctacattgagtcaaagaatgttaacatcgaatgaatcacaaaagcttgaaatgccacctcctctgatattctaggtgtcctggaagcctgtctcatcttgccctgtagtgttgggtcacctggcccccagcctgtaacatccccagggccctacacccagagaaacacggggctggtggcagtgcccagtgacaaccgtttagtggataagagaagagtgaccacaccaggctgagtgctcctctctggttttccatggggagacaatgccaccctgagcagggtctggtgtgagcgggcagcttggctctgggctctctgatccgttaccctctcagcctctttgttctttctcaacccctggagcagagacctcaggaggtgctggcatggaacagagaaattccagcctcgattcctattatgaacccgacaccttttgtattttcatcttggttttacagtgtacaaaacgaactagatcagcagggcatgggcataatcacgaatgcacacacatacactaatgtgtggctcatgtttaagtatcacttactacaggacacccaatctaacagcaccgataaagtgacagagaaacgcaagccttctgcgaacatggcctggctgttccaattccgaaccttgcttttctgggccttgccacacaggctcttcccccgtccccccagggacattctacccttgaactccacactccactgctgcctttgccaggaagcccatctgttcctttttggttctgccagaacgtgtggtggtgctgctgtccctgccctgggcactggatattgggaagggacagtgtccacactggagtgggaagtccccagggacgagacctttacctcctcacccctgggtactgttctcctcatggagcatggatttaaatatgtcgtgcatcgatgctacgtagataagtagcatggcgggttaatcattaactacagaggaacccctagtgatggagttggccactccctctctgcgcgctcgctcgctcactgaggccgggcgaccaaaggtcgcccgacgcccgggctttgcccgggcggcctcagtgagcgagcgagcgcgcagctgcctgcagg

SEQ ID NO: 1375 - DNA, 2314 bp, Artificial Sequence
  source: /note="Description of Artificial Sequence: Synthetic polynucleotide"
cctgcaggcagctgcgcgctcgctcgctcactgaggccgcccgggcaaagcccgggcgtcgggcgacctttggtcgcccggcctcagtgagcgagcgagcgcgcagagagggagtggccaactccatcactaggggttccttgtagttaatgattaacccgccatgctacttatctacgtagccatgcgtcgacataacgcgtaattcgcccttgggcctaggcaattggatccgccggcagagaaaacatcacgcgtatatctagacgttacataacttacggtaaatggcccgcctggctgaccgcccaacgacccccgcccattgacgtcaataatgacgtatgttcccatagtaacgccaatagggactttccattgacgtcaatgggtggagtatttacggtaaactgcccacttggcagtacatcaagtgtatcatatgccaagtacgccccctattgacgtcaatgacggtaaatggcccgcctggcattatgcccagtacatgaccttatgggactttcctacttggcagtacatctagtattagtcatcgctattaccatggtgatgcggttttggcagtacatcaatgggcgtggatagcggtttgactcacggggatttccaagtctccaccccattgacgtcaatgggagtttgttttggcaccaaaatcaacgggactttccaaaatgtcgtaacaactccgccccattgacgcaaatgggcggtaggcgtgtacggtgggaggtctatataagcagagctcgtttagtgaaccgtcagatcgcctggagacgccatccacgctgttttgacctccatagaagacaccgggaccgatccagcctccgcggattcgaatcccggccgggaacggtgcattggaacgcggattccccgtgccaagagtgacgtaagtaccgcctatagagtctataggcccacaaaaaatgctttcttcttttaatatacttttttgtttatcttatttctaatactttccctaatctctttctttcagggcaataatgatacaatgtatcatgcctctttgcaccattctaaagaataacagtgataatttctgggttaaggcaatagcaatatttctgcatataaatatttctgcatataaattgtaactgatgtaagaggtttcatattgctaatagcagctacaatccagctaccattctgcttttattttatggttgggataaggctggattattctgagtccaagctaggcccttttgctaatcatgttcatacctcttatcttcctcccacagctcctgggcaacgtgctggtctgtgtgctggcccatcactttggcaaagaattgggattcgaacatcgattgaattccccggggatccaccgtgctgggcggggggcggcgggccctcccgcagaacaccatgcgctccacggaacctgctagctccatgcttgctgtggccactgagaagtaagcatggagctagcaggttctgaggagcgccttgacagcagccatgggagggccgccccctacctcagtgactcgagagatctacgggtggcatccctgtgacccctccccagtgcctctcctggccctggaagttgccactccagtgcccaccagccttgtcctaataaaattaagttgcatcattttgtctgactaggtgtccttctataatattatggggtggaggggggtggtatggagcaaggggcaagttgggaagacaacctgtagggcctgcggggtctattgggaaccaagctggagtgcagtggcacaatcttggctcactgcaatctccgcctcctgggttcaagcgattctcctgcctcagcctcccgagttgttgggattccaggcatgcatgaccaggctcagctaatttttgtttttttggtagagacggggtttcaccatattggccaggctggtctccaactcctaatctcaggtgatctacccaccttggcctcccaaattgctgggattacaggcgtgaaccactgctcccttccctgtcctgactagatttaaatccagggatttacagatcacatgcaggcagggaccagctcaactcttctatttaaatatgtcgtgcatcgatgctacgtagataagtagcatggcgggttaatcattaactacagaggaacccctagtgatggagttggccactccctctctgcgcgctcgctcgctcactgaggccgggcgaccaaaggtcgcccgacgcccgggctttgcccgggcggcctcagtgagcgagcgagcgcgcagctgcctgcagg

SEQ ID NO: 1376 - DNA, 2198 bp, Artificial Sequence
  source: /note="Description of Artificial Sequence: Synthetic polynucleotide"
cctgcaggcagctgcgcgctcgctcgctcactgaggccgcccgggcaaagcccgggcgtcgggcgacctttggtcgcccggcctcagtgagcgagcgagcgcgcagagagggagtggccaactccatcactaggggttccttgtagttaatgattaacccgccatgctacttatctacgtatacatgcgtcgacataacgcgtatatctagacgttacataacttacggtaaatggcccgcctggctgaccgcccaacgacccccgcccattgacgtcaataatgacgtatgttcccatagtaacgccaatagggactttccattgacgtcaatgggtggagtatttacggtaaactgcccacttggcagtacatcaagtgtatcatatgccaagtacgccccctattgacgtcaatgacggtaaatggcccgcctggcattatgcccagtacatgaccttatgggactttcctacttggcagtacatctagtattagtcatcgctattaccatggtgatgcggttttggcagtacatcaatgggcgtggatagcggtttgactcacggggatttccaagtctccaccccattgacgtcaatgggagtttgttttggcaccaaaatcaacgggactttccaaaatgtcgtaacaactccgccccattgacgcaaatgggcggtaggcgtgtacggtgggaggtctatataagcagagctcgtttagtgaaccgtcagatcgcctggagacgccatccacgctgttttgacctccatagaagacaccgggaccgatccagcctccgcggattcgaatcccggccgggaacggtgcattggaacgcggattccccgtgccaagagtgacgtaagtaccgcctatagagtctataggcccacaaaaaatgctttcttcttttaatatacttttttgtttatcttatttctaatactttccctaatctctttctttcagggcaataatgatacaatgtatcatgcctctttgcaccattctaaagaataacagtgataatttctgggttaaggcaatagcaatatttctgcatataaatatttctgcatataaattgtaactgatgtaagaggtttcatattgctaatagcagctacaatccagctaccattctgcttttattttatggttgggataaggctggattattctgagtccaagctaggcccttttgctaatcatgttcatacctcttatcttcctcccacagctcctgggcaacgtgctggtctgtgtgctggcccatcactttggcaaagaattgggattcgaacatcgattgaattccccggggatccaccgtgctgggcggggggcggcgggccctcccgcagaacaccatgcgctcttcggaagcaattcagtctcgttgtgcctgtgacctggtacaacgagactgaattgcttctgaggagcgccttgacagcagccatgggagggccgccccctacctcagtgactcgagagatctacgggtggcatccctgtgacccctccccagtgcctctcctggccctggaagttgccactccagtgcccaccagccttgtcctaataaaattaagttgcatcattttgtctgactaggtgtccttctataatattatggggtggaggggggtggtatggagcaaggggcaagttgggaagacaacctgtagggcctgcggggtctattgggaaccaagctggagtgcagtggcacaatcttggctcactgcaatctccgcctcctgggttcaagcgattctcctgcctcagcctcccgagttgttgggattccaggcatgcatgaccaggctcagctaatttttgtttttttggtagagacggggtttcaccatattggccaggctggtctccaactcctaatctcaggtgatctacccaccttggcctcccaaattgctgggattacaggcgtgaaccactgctcccttccctgtccttactagatttaaatatgtcgtgcatcgatgctacgtagataagtagcatggcgggttaatcattaactacagaggaacccctagtgatggagttggccactccctctctgcgcgctcgctcgctcactgaggccgggcgaccaaaggtcgcccgacgcccgggctttgcccgggcggcctcagtgagcgagcgagcgcgcagctgcctgcagg

SEQ ID NO: 1377 - DNA, 2203 bp, Artificial Sequence
  source: /note="Description of Artificial Sequence: Synthetic polynucleotide"
cctgcaggcagctgcgcgctcgctcgctcactgaggccgcccgggcaaagcccgggcgtcgggcgacctttggtcgcccggcctcagtgagcgagcgagcgcgcagagagggagtggccaactccatcactaggggttccttgtagttaatgattaacccgccatgctacttatctacgtatacatgcgtcgacataacgcgtatatctagacgttacataacttacggtaaatggcccgcctggctgaccgcccaacgacccccgcccattgacgtcaataatgacgtatgttcccatagtaacgccaatagggactttccattgacgtcaatgggtggagtatttacggtaaactgcccacttggcagtacatcaagtgtatcatatgccaagtacgccccctattgacgtcaatgacggtaaatggcccgcctggcattatgcccagtacatgaccttatgggactttcctacttggcagtacatctagtattagtcatcgctattaccatggtgatgcggttttggcagtacatcaatgggcgtggatagcggtttgactcacggggatttccaagtctccaccccattgacgtcaatgggagtttgttttggcaccaaaatcaacgggactttccaaaatgtcgtaacaactccgccccattgacgcaaatgggcggtaggcgtgtacggtgggaggtctatataagcagagctcgtttagtgaaccgtcagatcgcctggagacgccatccacgctgttttgacctccatagaagacaccgggaccgatccagcctccgcggattcgaatcccggccgggaacggtgcattggaacgcggattccccgtgccaagagtgacgtaagtaccgcctatagagtctataggcccacaaaaaatgctttcttcttttaatatacttttttgtttatcttatttctaatactttccctaatctctttctttcagggcaataatgatacaatgtatcatgcctctttgcaccattctaaagaataacagtgataatttctgggttaaggcaatagcaatatttctgcatataaatatttctgcatataaattgtaactgatgtaagaggtttcatattgctaatagcagctacaatccagctaccattctgcttttattttatggttgggataaggctggattattctgagtccaagctaggcccttttgctaatcatgttcatacctcttatcttcctcccacagctcctgggcaacgtgctggtctgtgtgctggcccatcactttggcaaagaattgggattcgaacatcgattgaattccccggggatccaccgtgctgggcggggggcggcgggccctcccgcagaacaccatgcgctccacggaacctgctagctccatgcttgctgtggccactgagaagtaagcatggagctagcaggttctgaggagcgccttgacagcagccatgggagggccgccccctacctcagtgactcgagagatctacgggtggcatccctgtgacccctccccagtgcctctcctggccctggaagttgccactccagtgcccaccagccttgtcctaataaaattaagttgcatcattttgtctgactaggtgtccttctataatattatggggtggaggggggtggtatggagcaaggggcaagttgggaagacaacctgtagggcctgcggggtctattgggaaccaagctggagtgcagtggcacaatcttggctcactgcaatctccgcctcctgggttcaagcgattctcctgcctcagcctcccgagttgttgggattccaggcatgcatgaccaggctcagctaatttttgtttttttggtagagacggggtttcaccatattggccaggctggtctccaactcctaatctcaggtgatctacccaccttggcctcccaaattgctgggattacaggcgtgaaccactgctcccttccctgtccttactagatttaaatatgtcgtgcatcgatgctacgtagataagtagcatggcgggttaatcattaactacagaggaacccctagtgatggagttggccactccctctctgcgcgctcgctcgctcactgaggccgggcgaccaaaggtcgcccgacgcccgggctttgcccgggcggcctcagtgagcgagcgagcgcgcagctgcctgcagg

SEQ ID NO: 1378 - DNA, 844 bp, Artificial Sequence
  source: /note="Description of Artificial Sequence: Synthetic polynucleotide"
ctgcgcgctcgctcgctcactgaggccgcccgggcaaagcccgggcgtcgggcgacctttggtcgcccggcctcagtgagcgagcgagcgcgcagagagggagtgtagccatgctctaggaagatcaattcaattcacgcgttgacgtacgaaattcgaacgctgacgtcatcaacccgctccaaggaatcgcgggcccagtgtcactaggcgggaacacccagcgcgcgtgcgccctggcaggaagatggctgtgagggacagggagtggcgccctgcaatatttgcatgtcgctatgtgttctgggaaatcaccataaacgtgaaatgtctttggatttgggaatcttataagttctgtatgagaccacaccggtgaagcaaagaaggggcagagggagcccgtgagctgagtgggccagggactgggagaaggagtgaggaggcagggccggcatgcctctgctgctggccagacctgctagctccatgcttcccgtctgcacctgtcactagtaagcatggagctagcaggtttggccgtgtagtgctacccagcgctggctgcctcctcagcattgcaattcctctcccatctgggcaccagtcagctaccctggtgggaatctgggtagccctcgagatagcggccgcccccgagatctttttatgtacatctagataagtagcatggcgggttaatcattaactacaaggaacccctagtgatggagttggccactccctctctgcgcgctcgctcgctcactgaggccgggcgaccaaaggtcgcccgacgcccgggctttgcccgggcggcctcagtgagcgagcgagcgcgcag

SEQ ID NO: 1379 - DNA, 742 bp, Artificial Sequence
  source: /note="Description of Artificial Sequence: Synthetic polynucleotide"
ctgcgcgctcgctcgctcactgaggccgcccgggcaaagcccgggcgtcgggcgacctttggtcgcccggcctcagtgagcgagcgagcgcgcagagagggagtgtagccatgctctaggaagatcaattcaattcacgcgttgacgtacgaaattcgaacgctgacgtcatcaacccgctccaaggaatcgcgggcccagtgtcactaggcgggaacacccagcgcgcgtgcgccctggcaggaagatggctgtgagggacagggagtggcgccctgcaatatttgcatgtcgctatgtgttctgggaaatcaccataaacgtgaaatgtctttggatttgggaatcttataagttctgtatgagaccacaccggtgtgctgggcggggggcggcgggccctcccgcagaacaccatgcgctcttcggaagcaattcagtctcgttgtgcctgtgacctggtacaacgagactgaattgcttctgaggagcgccttgacagcagccatgggagggccgccccctacctcagtgactcgagatagcggccgcccccgagatctttttatgtacatctagataagtagcatggcgggttaatcattaactacaaggaacccctagtgatggagttggccactccctctctgcgcgctcgctcgctcactgaggccgggcgaccaaaggtcgcccgacgcccgggctttgcccgggcggcctcagtgagcgagcgagcgcgcag

SEQ ID NO: 1380 - DNA, 141 bp, Artificial Sequence
  source: /note="Description of Artificial Sequence: Synthetic polynucleotide"
cctgcaggcagctgcgcgctcgctcgctcactgaggccgcccgggcaaagcccgggcgtcgggcgacctttggtcgcccggcctcagtgagcgagcgagcgcgcagagagggagtggccaactccatcactaggggttcct

SEQ ID NO: 1381 - DNA, 105 bp, Artificial Sequence
  source: /note="Description of Artificial Sequence: Synthetic polynucleotide"
ctgcgcgctcgctcgctcactgaggccgcccgggcaaagcccgggcgtcgggcgacctttggtcgcccggcctcagtgagcgagcgagcgcgcagagagggagtg

SEQ ID NO: 1382 - DNA, 141 bp, Artificial Sequence
  source: /note="Description of Artificial Sequence: Synthetic polynucleotide"
aggaacccctagtgatggagttggccactccctctctgcgcgctcgctcgctcactgaggccgggcgaccaaaggtcgcccgacgcccgggctttgcccgggcggcctcagtgagcgagcgagcgcgcagctgcctgcagg

SEQ ID NO: 1383 - DNA, 130 bp, Artificial Sequence
  source: /note="Description of Artificial Sequence: Synthetic polynucleotide"
aggaacccctagtgatggagttggccactccctctctgcgcgctcgctcgctcactgaggccgggcgaccaaaggtcgcccgacgcccgggctttgcccgggcggcctcagtgagcgagcgagcgcgcag

SEQ ID NO: 1384 - DNA, 10 bp, Artificial Sequence
  source: /note="Description of Artificial Sequence: Synthetic oligonucleotide"
gtcgacataa

SEQ ID NO: 1385 - DNA, 121 bp, Artificial Sequence
  source: /note="Description of Artificial Sequence: Synthetic polynucleotide"
gtcgacataacgcgtaattcgcccttgggcctaggcaattggatccgccggcagagaaaacatcccagggatttacagatcacatgcaggcagggaccagctcaacccttctacgcgtata

SEQ ID NO: 1386 - DNA, 73 bp, Artificial Sequence
  source: /note="Description of Artificial Sequence: Synthetic oligonucleotide"
gtcgacataacgcgtaattcgcccttgggcctaggcaattggatccgccggcagagaaaacatcacgcgtata

SEQ ID NO: 1387 - DNA, 18 bp, Artificial Sequence
  source: /note="Description of Artificial Sequence: Synthetic oligonucleotide"
gtcgacataacgcgtata

SEQ ID NO: 1388 - DNA, 1482 bp, Artificial Sequence
  source: /note="Description of Artificial Sequence: Synthetic polynucleotide"
ctgcgcgctcgctcgctcactgaggccgcccgggcaaagcccgggcgtcgggcgacctttggtcgcccggcctcagtgagcgagcgagcgcgcagagagggagtgtagccatgctctaggaagatcaattcaattcacgcgtcgacattgattattgactagttattaatagtaatcaattacggggtcattagttcatagcccatatatggagttccgcgttacataacttacggtaaatggcccgcctggctgaccgcccaacgacccccgcccattgacgtcaataatgacgtatgttcccatagtaacgccaatagggactttccattgacgtcaatgggtggagtatttacggtaaactgcccacttggcagtacatcaagtgtatcatatgccaagtacgccccctattgacgtcaatgacggtaaatggcccgcctggcattatgcccagtacatgaccttatgggactttcctacttggcagtacatctacgtattagtcatcgctattaccatgtcgaggccacgttctgcttcactctccccatctcccccccctccccacccccaattttgtatttatttattttttaattattttgtgcagcgatgggggcggggggggggggcgcgcgccaggcggggcggggcggggcgaggggcggggcggggcgaggcggagaggtgcggcggcagccaatcagagcggcgcgctccgaaagtttccttttatggcgaggcggcggcggcggcggccctataaaaagcgaagcgcgcggcgggcgggagcaagcttgaactgaaaaaccagaaagttaactggtaagtttagtctttttgtcttttatttcaggtcccggatccggtggtggtgcaaatcaaagaactgctcctcagtggatgttgcctttacttctaggcctgtacggaagtgttacttctgctctaaaagctgcggaattgtacccgcggccgatccaccggtgtgctgggcggggggcggcgggccctcccgcagaacaccatgcgctcttcggaacctgctagctccatgcttgcctgtgacctggtaagcatggagctagcaggttctgaggagcgccttgacagcagccatgggagggccgccccctacctcagtgactcgaggacggggtgaactacgcctgaggatccgatctttttccctctgccaaaaattatggggacatcatgaagccccttgagcatctgacttctggctaataaaggaaatttattttcattgcaatagtgtgttggaattttttgtgtctctcactcggcctaggtagataagtagcatggcgggttaatcattaactacaaggaacccctagtgatggagttggccactccctctctgcgcgctcgctcgctcactgaggccgggcgaccaaaggtcgcccgacgcccgggctttgcccgggcggcctcagtgagcgagcgagcgcgcag

SEQ ID NO: 1389 - DNA, 14 bp, Artificial Sequence
  source: /note="Description of Artificial Sequence: Synthetic oligonucleotide"
ctcgagagatctac

SEQ ID NO: 1390-1407 - skipped (18 entries)

SEQ ID NO: 1408 - DNA, 382 bp, Artificial Sequence
  source: /note="Description of Artificial Sequence: Synthetic polynucleotide"
cgcgtcgacattgattattgactagttattaatagtaatcaattacggggtcattagttcatagcccatatatggagttccgcgttacataacttacggtaaatggcccgcctggctgaccgcccaacgacccccgcccattgacgtcaataatgacgtatgttcccatagtaacgccaatagggactttccattgacgtcaatgggtggagtatttacggtaaactgcccacttggcagtacatcaagtgtatcatatgccaagtacgccccctattgacgtcaatgacggtaaatggcccgcctggcattatgcccagtacatgaccttatgggactttcctacttggcagtacatctacgtattagtcatcgctattac

SEQ ID NO: 1409 - DNA, 303 bp, Artificial Sequence
  source: /note="Description of Artificial Sequence: Synthetic polynucleotide"
cgttacataacttacggtaaatggcccgcctggctgaccgcccaacgacccccgcccattgacgtcaataatgacgtatgttcccatagtaacgccaatagggactttccattgacgtcaatgggtggagtatttacggtaaactgcccacttggcagtacatcaagtgtatcatatgccaagtacgccccctattgacgtcaatgacggtaaatggcccgcctggcattatgcccagtacatgaccttatgggactttcctacttggcagtacatctagtattagtcatcgctattaccatg

SEQ ID NO: 1410 - DNA, 260 bp, Artificial Sequence
  source: /note="Description of Artificial Sequence: Synthetic polynucleotide"
ccacgttctgcttcactctccccatctcccccccctccccacccccaattttgtatttatttattttttaattattttgtgcagcgatgggggcggggggggggggcgcgcgccaggcggggcggggcggggcgaggggcggggcggggcgaggcggagaggtgcggcggcagccaatcagagcggcgcgctccgaaagtttccttttatggcgaggcggcggcggcggcggccctataaaaagcgaagcgcgcggcggg

SEQ ID NO: 1411 - DNA, 588 bp, Artificial Sequence
  source: /note="Description of Artificial Sequence: Synthetic polynucleotide"
gttgacattgattattgactagttattaatagtaatcaattacggggtcattagttcatagcccatatatggagttccgcgttacataacttacggtaaatggcccgcctggctgaccgcccaacgacccccgcccattgacgtcaataatgacgtatgttcccatagtaacgccaatagggactttccattgacgtcaatgggtggagtatttacggtaaactgcccacttggcagtacatcaagtgtatcatatgccaagtacgccccctattgacgtcaatgacggtaaatggcccgcctggcattatgcccagtacatgaccttatgggactttcctacttggcagtacatctacgtattagtcatcgctattaccatggtgatgcggttttggcagtacatcaatgggcgtggatagcggtttgactcacggggatttccaagtctccaccccattgacgtcaatgggagtttgttttggcaccaaaatcaacgggactttccaaaatgtcgtaacaactccgccccattgacgcaaatgggcggtaggcgtgtacggtgggaggtctatataagcagagctc

SEQ ID NO: 1412 - DNA, 204 bp, Artificial Sequence
  source: /note="Description of Artificial Sequence: Synthetic polynucleotide"
gtgatgcggttttggcagtacatcaatgggcgtggatagcggtttgactcacggggatttccaagtctccaccccattgacgtcaatgggagtttgttttggcaccaaaatcaacgggactttccaaaatgtcgtaacaactccgccccattgacgcaaatgggcggtaggcgtgtacggtgggaggtctatataagcagagct

SEQ ID NO: 1413 - DNA, 219 bp, Artificial Sequence
  source: /note="Description of Artificial Sequence: Synthetic polynucleotide"
aattcgaacgctgacgtcatcaacccgctccaaggaatcgcgggcccagtgtcactaggcgggaacacccagcgcgcgtgcgccctggcaggaagatggctgtgagggacagggagtggcgccctgcaatatttgcatgtcgctatgtgttctgggaaatcaccataaacgtgaaatgtctttggatttgggaatcttataagttctgtatgagaccac

SEQ ID NO: 1414 - DNA, 17 bp, Artificial Sequence
  source: /note="Description of Artificial Sequence: Synthetic oligonucleotide"
taatacgactcactata

SEQ ID NO: 1415 - DNA, 134 bp, Artificial Sequence
  source: /note="Description of Artificial Sequence: Synthetic polynucleotide"
tcagatcgcctggagacgccatccacgctgttttgacctccatagaagacaccgggaccgatccagcctccgcggattcgaatcccggccgggaacggtgcattggaacgcggattccccgtgccaagagtgac

SEQ ID NO: 1416 - DNA, 53 bp, Artificial Sequence
  source: /note="Description of Artificial Sequence: Synthetic oligonucleotide"
ctcctgggcaacgtgctggtctgtgtgctggcccatcactttggcaaagaatt

SEQ ID NO: 1417 - DNA, 172 bp, Artificial Sequence
  source: /note="Description of Artificial Sequence: Synthetic polynucleotide"
gaactgaaaaaccagaaagttaactggtaagtttagtctttttgtcttttatttcaggtcccggatccggtggtggtgcaaatcaaagaactgctcctcagtggatgttgcctttacttctaggcctgtacggaagtgttacttctgctctaaaagctgcggaattgtaccc

SEQ ID NO: 1418 - DNA, 32 bp, Artificial Sequence
  source: /note="Description of Artificial Sequence: Synthetic oligonucleotide"
gtaagtaccgcctatagagtctataggcccac

SEQ ID NO: 1419 - DNA, 347 bp, Artificial Sequence
  source: /note="Description of Artificial Sequence: Synthetic polynucleotide"
aaaaaatgctttcttcttttaatatacttttttgtttatcttatttctaatactttccctaatctctttctttcagggcaataatgatacaatgtatcatgcctctttgcaccattctaaagaataacagtgataatttctgggttaaggcaatagcaatatttctgcatataaatatttctgcatataaattgtaactgatgtaagaggtttcatattgctaatagcagctacaatccagctaccattctgcttttattttatggttgggataaggctggattattctgagtccaagctaggcccttttgctaatcatgttcatacctcttatcttcctcccacag

SEQ ID NO: 1420 - DNA, 127 bp, Artificial Sequence
  source: /note="Description of Artificial Sequence: Synthetic polynucleotide"
gatctttttccctctgccaaaaattatggggacatcatgaagccccttgagcatctgacttctggctaataaaggaaatttattttcattgcaatagtgtgttggaattttttgtgtctctcactcg

SEQ ID NO: 1421 - DNA, 225 bp, Artificial Sequence
  source: /note="Description of Artificial Sequence: Synthetic polynucleotide"
ctgtgccttctagttgccagccatctgttgtttgcccctcccccgtgccttccttgaccctggaaggtgccactcccactgtcctttcctaataaaatgaggaaattgcatcgcattgtctgagtaggtgtcattctattctggggggtggggtggggcaggacagcaagggggaggattgggaagacaatagcaggcatgctggggatgcggtgggctctatgg

SEQ ID NO: 1422 - DNA, 477 bp, Artificial Sequence
  source: /note="Description of Artificial Sequence: Synthetic polynucleotide"
gggtggcatccctgtgacccctccccagtgcctctcctggccctggaagttgccactccagtgcccaccagccttgtcctaataaaattaagttgcatcattttgtctgactaggtgtccttctataatattatggggtggaggggggtggtatggagcaaggggcaagttgggaagacaacctgtagggcctgcggggtctattgggaaccaagctggagtgcagtggcacaatcttggctcactgcaatctccgcctcctgggttcaagcgattctcctgcctcagcctcccgagttgttgggattccaggcatgcatgaccaggctcagctaatttttgtttttttggtagagacggggtttcaccatattggccaggctggtctccaactcctaatctcaggtgatctacccaccttggcctcccaaattgctgggattacaggcgtgaaccactgctcccttccctgtcctt

SEQ ID NO: 1423 - DNA, 476 bp, Artificial Sequence
  source: /note="Description of Artificial Sequence: Synthetic polynucleotide"
gggtggcatccctgtgacccctccccagtgcctctcctggccctggaagttgccactccagtgcccaccagccttgtcctaataaaattaagttgcatcattttgtctgactaggtgtccttctataatattatggggtggaggggggtggtatggagcaaggggcaagttgggaagacaacctgtagggcctgcggggtctattgggaaccaagctggagtgcagtggcacaatcttggctcactgcaatctccgcctcctgggttcaagcgattctcctgcctcagcctcccgagttgttgggattccaggcatgcatgaccaggctcagctaatttttgtttttttggtagagacggggtttcaccatattggccaggctggtctccaactcctaatctcaggtgatctacccaccttggcctcccaaattgctgggattacaggcgtgaaccactgctcccttccctgtcct

SEQ ID NO: 1424 - protein, 3137 aa, Homo sapiens
MATLEKLMKAFESLKSFQQQQQQQQQQQQQQQQQQQQQQQPPPPPPPPPPPQLPQPPPQAQPLLPQPQPPPPPPPPPPGPAVAEEPLHRPKKELSATKKDRVNHCLTICENIVAQSVRNSPEFQKLLGIAMELFLLCSDDAESDVRMVADECLNKVIKALMDSNLPRLQLELYKEIKKNGAPRSLRAALWRFAELAHLVRPQKCRPYLVNLLPCLTRTSKRPEESVQETLAAAVPKIMASFGNFANDNEIKVLLKAFIANLKSSSPTIRRTAAGSAVSICQHSRRTQYFYSWLLNVLLGLLVPVEDEHSTLLILGVLLTLRYLVPLLQQQVKTSLKGSFGVTRKEMEVSPSAEQLVQVYELTLHHTQHQDHNVVTGALELLQQLFRTPPPELLQTLTAVGGIGQLTAAKEESGGRSRSGSIVELIAGGGSSCSPVLSRKQKGKVLLGEEEALEDDSESRSDVSSSALTASVKDEISGELAASSGVSTPGSAGHDIITEQPRSQHTLQADSVDLASCDLTSSATDGDEEDILSHSSSQVSAVPSDPAMDLNDGTQASSPISDSSQTTTEGPDSAVTPSDSSEIVLDGTDNQYLGLQIGQPQDEDEEATGILPDEASEAFRNSSMALQQAHLLKNMSHCRQPSDSSVDKFVLRDEATEPGDQENKPCRIKGDIGQSTDDDSAPLVHCVRLLSASFLLTGGKNVLVPDRDVRVSVKALALSCVGAAVALHPESFFSKLYKVPLTTEYPEEQYVSDILNYIDHGDPQVRGATAILCGTLICSILSRSRFHVGDWMGTIRTLTGNTFSLADCIPLLRKTLKDESSVTCKLACTAVRNCVMSLCSSSYSELGLQLIIDVLTLRNSSYWLVRTELLETLAEIDFRLVSFLEAKAENLHRGAHHYTGLLKLQERVLNNVVIHLLGDEDPRVRHVAAASLIRLVPKLFYKCDQGQADPVVAVARDQSSVYLKLLMHETQPPSHFSVSTITRIYRGYNLLPSITDVTMENNLSRVIAAVSHELITSTTRALTFGCCEALCLLSTAFPVCIWSLGWHCGVPPLSASDESRKSCTVGMATMILTLLSSAWFPLDLSAHQDALILAGNLLAASAPKSLRSSWASEEEANPAATKQEEVWPALGDRALVPMVEQLFSHLLKVINICAHVLDDVAPGPAIKAALPSLTNPPSLSPIRRKGKEKEPGEQASVPLSPKKGSEASAASRQSTSGPVTTSKSSSLGSFYHLPSYLKLHDVLKATHANYKVTLDLQNSTEKFGGFLRSALDVLSQILELATLQDIGKCVEEILGYLKSCFSREPMMATVCVQQLLKTLFGTNLASQFDGLSSNPSKSQGRAQRLGSSSVRPGLYHYCFMAPYTHFTQALADASLRNMVQAEQENTSGWFDVLQKVSTQLKTNLTSVTKNRADKNAIHNHIRLFEPLVIKALKQYTTTTCVQLQKQVLDLLAQLVQLRVNYCLLDSDQVFIGFVLKQFEYIEVGQFRESEAIIPNIFFFLVLLSYERYHSKQIIGIPKIIQLCDGIMASGRKAVTHAIPALQPIVHDLFVLRGTNKADAGKELETQKEVVVSMLLRLIQYHQVLEMFILVLQQCHKENEDKWKRLSRQIADIILPMLAKQQMHIDSHEALGVLNTLFEILAPSSLRPVDMLLRSMFVTPNTMASVSTVQLWISGILAILRVLISQSTEDIVLSRIQELSFSPYLISCTVINRLRDGDSTSTLEEHSEGKQIKNLPEETFSRFLLQLVGILLEDIVTKQLKVEMSEQQHTFYCQELGTLLMCLIHIFKSGMFRRITAAATRLFRSDGCGGSFYTLDSLNLRARSMITTHPALVLLWCQILLLVNHTDYRWWAEVQQTPKRHSLSSTKLLSPQMSGEEEDSDLAAKLGMCNREIVRRGALILFCDYVCQNLHDSEHLTWLIVNHIQDLISLSHEPPVQDFISAVHRNSAASGLFIQAIQSRCENLSTPTMLKKTLQCLEGIHLSQSGAVLTLYVDRLLCTPFRVLARMVDILACRRVEMLLAANLQSSMAQLPMEELNRIQEYLQSSGLAQRHQRLYSLLDRFRLSTMQDSLSPSPPVSSHPLDGDGHVSLETVSPDKDWYVHLVKSQCWTRSDSALLEGAELVNRIPAEDMNAFMMNSEFNLSLLAPCLSLGMSEISGGQKSALFEAAREVTLARVSGTVQQLPAVHHVFQPELPAEPAAYWSKLNDLFGDAALYQSLPTLARALAQYLVVVSKLPSHLHLPPEKEKDIVKFVVATLEALSWHLIHEQIPLSLDLQAGLDCCCLALQLPGLWSVVSSTEFVTHACSLIYCVHFILEAVAVQPGEQLLSPERRTNTPKAISEEEEEVDPNTQNPKYITAACEMVAEMVESLQSVLALGHKRNSGVPAFLTPLLRNIIISLARLPLVNSYTRVPPLVWKLGWSPKPGGDFGTAFPEIPVEFLQEKEVFKEFIYRINTLGWTSRTQFEETWATLLGVLVTQPLVMEQEESPPEETERTQINVLAVQAITSLVLSAMTVPVAGNPAVSCLEQQPRNKPLKALTRFGRKLSIIRGIVEQEIQAMVSKRENIATHHLYQAWDPVPSLSPATTGALISHEKLLLQINPERELGSMSYKLGQVSIHSVWLGNSITPLREEEWDEEEEEEADAPAPSSPPTSPVNSRKHRAGVDIHSCSQFLLELYSRWILPSSSARRTPAILISEVVRSLLVVSDLFTERNQFELMYVTLTELRRVHPSEDEILAQYLVPATCKAAAVLGMDKAVAEPVSRLLESTLRSSHLPSRVGALHGVLYVLECDLLDTAKQLIPVISDYLLSNLKGIAHCVNIHSQQHVLVMCATAFYLIENYPLDVGPEFSASIIQMCGVMLSGSEESTPSIIYHCALRGLERLLLSEQLSRLDAESLVKLSVDRVNVHSPHRAMAALGLMLTCMYTGKEKVSPGRTSDPNPAAPDSESVIVAMERVSVLFDRIRKGFPCEARVVARILPQFLDDFFPPQDIMNKVIGEFLSNQQPYPQFMATVVYKVFQTLHSTGQSSMVRDWVMLSLSNFTQRAPVAMATWSLSCFFVSASTSPWVAAILPHVISRMGKLEQVDVNLFCLVATDFYRHQIEEELDRRAFQSVLEVVAAPGSPYHRLLTCLRNVHKVTTC

SEQ ID NO: 1425 - DNA, 13669 bp, Homo sapiens
ttgctgtgtgaggcagaacctgcgggggcaggggcgggctggttccctggccagccattggcagagtccgcaggctagggctgtcaatcatgctggccggcgtggccccgcctccgccggcgcggccccgcctccgccggcgcagcgtctgggacgcaaggcgccgtgggggctgccgggacgggtccaagatggacggccgctcaggttctgcttttacctgcggcccagagccccattcattgccccggtgctgagcggcgccgcgagtcggcccgaggcctccggggactgccgtgccgggcgggagaccgccatggcgaccctggaaaagctgatgaaggccttcgagtccctcaagtccttccagcagcagcagcagcagcagcagcagcagcagcagcagcagcagcagcagcagcagcagcagcaacagccgccaccgccgccgccgccgccgccgcctcctcagcttcctcagccgccgccgcaggcacagccgctgctgcctcagccgcagccgcccccgccgccgcccccgccgccacccggcccggctgtggctgaggagccgctgcaccgaccaaagaaagaactttcagctaccaagaaagaccgtgtgaatcattgtctgacaatatgtgaaaacatagtggcacagtctgtcagaaattctccagaatttcagaaacttctgggcatcgctatggaactttttctgctgtgcagtgatgacgcagagtcagatgtcaggatggtggctgacgaatgcctcaacaaagttatcaaagctttgatggattctaatcttccaaggttacagctcgagctctataaggaaattaaaaagaatggtgcccctcggagtttgcgtgctgccctgtggaggtttgctgagctggctcacctggttcggcctcagaaatgcaggccttacctggtgaaccttctgccgtgcctgactcgaacaagcaagagacccgaagaatcagtccaggagaccttggctgcagctgttcccaaaattatggcttcttttggcaattttgcaaatgacaatgaaattaaggttttgttaaaggccttcatagcgaacctgaagtcaagctcccccaccattcggcggacagcggctggatcagcagtgagcatctgccagcactcaagaaggacacaatatttctatagttggctactaaatgtgctcttaggcttactcgttcctgtcgaggatgaacactccactctgctgattcttggcgtgctgctcaccctgaggtatttggtgcccttgctgcagcagcaggtcaaggacacaagcctgaaaggcagcttcggagtgacaaggaaagaaatggaagtctctccttctgcagagcagcttgtccaggtttatgaactgacgttacatcatacacagcaccaagaccacaatgttgtgaccggagccctggagctgttgcagcagctcttcagaacgcctccacccgagcttctgcaaaccctgaccgcagtcgggggcattgggcagctcaccgctgctaaggaggagtctggtggccgaagccgtagtgggagtattgtggaacttatagctggagggggttcctcatgcagccctgtcctttcaagaaaacaaaaaggcaaagtgctcttaggagaagaagaagccttggaggatgactctgaatcgagatcggatgtcagcagctctgccttaacagcctcagtgaaggatgagatcagtggagagctggctgcttcttcaggggtttccactccagggtcagcaggtcatgacatcatcacagaacagccacggtcacagcacacactgcaggcggactcagtggatctggccagctgtgacttgacaagctctgccactgatggggatgaggaggatatcttgagccacagctccagccaggtcagcgccgtcccatctgaccctgccatggacctgaatgatgggacccaggcctcgtcgcccatcagcgacagctcccagaccaccaccgaagggcctgattcagctgttaccccttcagacagttctgaaattgtgttagacggtaccgacaaccagtatttgggcctgcagattggacagccccaggatgaagatgaggaagccacaggtattcttcctgatgaagcctcggaggccttcaggaactcttccatggcccttcaacaggcacatttattgaaaaacatgagtcactgcaggcagccttctgacagcagtgttgataaatttgtgttgagagatgaagctactgaaccgggtgatcaagaaaacaagccttgccgcatcaaaggtgacattggacagtccactgatgatgactctgcacctcttgtccattgtgtccgccttttatctgcttcgtttttgctaacagggggaaaaaatgtgctggttccggacagggatgtgagggtcagcgtgaaggccctggccctcagctgtgtgggagcagctgtggccctccacccggaatctttcttcagcaaactctataaagttcctcttgacaccacggaataccctgaggaacagtatgtctcagacatcttgaactacatcgatcatggagacccacaggttcgaggagccactgccattctctgtgggaccctcatctgctccatcctcagcaggtcccgcttccacgtgggagattggatgggcaccattagaaccctcacaggaaatacattttctttggcggattgcattcctttgctgcggaaaacactgaaggatgagtcttctgttacttgcaagttagcttgtacagctgtgaggaactgtgtcatgagtctctgcagcagcagctacagtgagttaggactgcagctgatcatcgatgtgctgactctgaggaacagttcctattggctggtgaggacagagcttctggaaacccttgcagagattgacttcaggctggtgagctttttggaggcaaaagcagaaaacttacacagaggggctcatcattatacagggcttttaaaactgcaagaacgagtgctcaataatgttgtcatccatttgcttggagatgaagaccccagggtgcgacatgttgccgcagcatcactaattaggcttgtcccaaagctgttttataaatgtgaccaaggacaagctgatccagtagtggccgtggcaagagatcaaagcagtgtttacctgaaacttctcatgcatgagacgcagcctccatctcatttctccgtcagcacaataaccagaatatatagaggctataacctactaccaagcataacagacgtcactatggaaaataacctttcaagagttattgcagcagtttctcatgaactaatcacatcaaccaccagagcactcacatttggatgctgtgaagctttgtgtcttctttccactgccttcccagtttgcatttggagtttaggttggcactgtggagtgcctccactgagtgcctcagatgagtctaggaagagctgtaccgttgggatggccacaatgattctgaccctgctctcgtcagcttggttcccattggatctctcagcccatcaagatgctttgattttggccggaaacttgcttgcagccagtgctcccaaatctctgagaagttcatgggcctctgaagaagaagccaacccagcagccaccaagcaagaggaggtctggccagccctgggggaccgggccctggtgcccatggtggagcagctcttctctcacctgctgaaggtgattaacatttgtgcccacgtcctggatgacgtggctcctggacccgcaataaaggcagccttgccttctctaacaaaccccccttctctaagtcccatccgacgaaaggggaaggagaaagaaccaggagaacaagcatctgtaccgttgagtcccaagaaaggcagtgaggccagtgcagcttctagacaatctgatacctcaggtcctgttacaacaagtaaatcctcatcactggggagtttctatcatcttccttcatacctcaaactgcatgatgtcctgaaagctacacacgctaactacaaggtcacgctggatcttcagaacagcacggaaaagtttggagggtttctccgctcagccttggatgttctttctcagatactagagctggccacactgcaggacattgggaagtgtgttgaagagatcctaggatacctgaaatcctgctttagtcgagaaccaatgatggcaactgtttgtgttcaacaattgttgaagactctctttggcacaaacttggcctcccagtttgatggcttatcttccaaccccagcaagtcacaaggccgagcacagcgccttggctcctccagtgtgaggccaggcttgtaccactactgcttcatggccccgtacacccacttcacccaggccctcgctgacgccagcctgaggaacatggtgcaggcggagcaggagaacgacacctcgggatggtttgatgtcctccagaaagtgtctacccagttgaagacaaacctcacgagtgtcacaaagaaccgtgcagataagaatgctattcataatcacattcgtttgtttgaacctcttgttataaaagctttaaaacagtacacgactacaacatgtgtgcagttacagaagcaggttttagatttgctggcgcagctggttcagttacgggttaattactgtcttctggattcagatcaggtgtttattggctttgtattgaaacagtttgaatacattgaagtgggccagttcagggaatcagaggcaatcattccaaacatctttttcttcttggtattactatcttatgaacgctatcattcaaaacagatcattggaattcctaaaatcattcagctctgtgatggcatcatggccagtggaaggaaggctgtgacacatgccataccggctctgcagcccatagtccacgacctctttgtattaagaggaacaaataaagctgatgcaggaaaagagcttgaaacccaaaaagaggtggtggtgtcaatgttactgagactcatccagtaccatcaggtgttggagatgttcattcttgtcctgcagcagtgccacaaggagaatgaagacaagtggaagcgactgtctcgacagatagctgacatcatcctcccaatgttagccaaacagcagatgcacattgactctcatgaagcccttggagtgttaaatacattatttgagattttggccccttcctccctccgtccggtagacatgcttttacggagtatgttcgtcactccaaacacaatggcgtccgtgagcactgttcaactgtggatatcgggaattctggccattttgagggttctgatttcccagtcaactgaagatattgttctttctcgtattcaggagctctccttctctccgtatttaatctcctgtacagtaattaataggttaagagatggggacagtacttcaacgctagaagaacacagtgaagggaaacaaataaagaatttgccagaagaaacattttcaaggtttctattacaactggttggtattcttttagaagacattgttacaaaacagctgaaggtggaaatgagtgagcagcaacatactttctattgccaggaactaggcacactgctaatgtgtctgatccacatcttcaagtctggaatgttccggagaatcacagcagctgccactaggctgttccgcagtgatggctgtggcggcagtttctacaccctggacagcttgaacttgcgggctcgttccatgatcaccacccacccggccctggtgctgctctggtgtcagatactgctgcttgtcaaccacaccgactaccgctggtgggcagaagtgcagcagaccccgaaaagacacagtctgtccagcacaaagttacttagtccccagatgtctggagaagaggaggattctgacttggcagccaaacttggaatgtgcaatagagaaatagtacgaagaggggctctcattctcttctgtgattatgtctgtcagaacctccatgactccgagcacttaacgtggctcattgtaaatcacattcaagatctgatcagcctttcccacgagcctccagtacaggacttcatcagtgccgttcatcggaactctgctgccagcggcctgttcatccaggcaattcagtctcgttgtgaaaacctttcaactccaaccatgctgaagaaaactcttcagtgcttggaggggatccatctcagccagtcgggagctgtgctcacgctgtatgtggacaggcttctgtgcacccctttccgtgtgctggctcgcatggtcgacatccttgcttgtcgccgggtagaaatgcttctggctgcaaatttacagagcagcatggcccagttgccaatggaagaactcaacagaatccaggaataccttcagagcagcgggctcgctcagagacaccaaaggctctattccctgctggacaggtttcgtctctccaccatgcaagactcacttagtccctctcctccagtctcttcccacccgctggacggggatgggcacgtgtcactggaaacagtgagtccggacaaagactggtacgttcatcttgtcaaatcccagtgttggaccaggtcagattctgcactgctggaaggtgcagagctggtgaatcggattcctgctgaagatatgaatgccttcatgatgaactcggagttcaacctaagcctgctagctccatgcttaagcctagggatgagtgaaatttctggtggccagaagagtgccctttttgaagcagcccgtgaggtgactctggcccgtgtgagcggcaccgtgcagcagctccctgctgtccatcatgtcttccagcccgagctgcctgcagagccggcggcctactggagcaagttgaatgatctgtttggggatgctgcactgtatcagtccctgcccactctggcccgggccctggcacagtacctggtggtggtctccaaactgcccagtcatttgcaccttcctcctgagaaagagaaggacattgtgaaattcgtggtggcaacccttgaggccctgtcctggcatttgatccatgagcagatcccgctgagtctggatctccaggcagggctggactgctgctgcctggccctgcagctgcctggcctctggagcgtggtctcctccacagagtttgtgacccacgcctgctccctcatctactgtgtgcacttcatcctggaggccgttgcagtgcagcctggagagcagcttcttagtccagaaagaaggacaaataccccaaaagccatcagcgaggaggaggaggaagtagatccaaacacacagaatcctaagtatatcactgcagcctgtgagatggtggcagaaatggtggagtctctgcagtcggtgttggccttgggtcataaaaggaatagcggcgtgccggcgtttctcacgccattgctaaggaacatcatcatcagcctggcccgcctgccccttgtcaacagctacacacgtgtgcccccactggtgtggaagcttggatggtcacccaaaccgggaggggattttggcacagcattccctgagatccccgtggagttcctccaggaaaaggaagtctttaaggagttcatctaccgcatcaacacactaggctggaccagtcgtactcagtttgaagaaacttgggccaccctccttggtgtcctggtgacgcagcccctcgtgatggagcaggaggagagcccaccagaagaagacacagagaggacccagatcaacgtcctggccgtgcaggccatcacctcactggtgctcagtgcaatgactgtgcctgtggccggcaacccagctgtaagctgcttggagcagcagccccggaacaagcctctgaaagctctcgacaccaggtttgggaggaagctgagcattatcagagggattgtggagcaagagattcaagcaatggtttcaaagagagagaatattgccacccatcatttatatcaggcatgggatcctgtcccttctctgtctccggctactacaggtgccctcatcagccacgagaagctgctgctacagatcaaccccgagcgggagctggggagcatgagctacaaactcggccaggtgtccatacactccgtgtggctggggaacagcatcacacccctgagggaggaggaatgggacgaggaagaggaggaggaggccgacgcccctgcaccttcgtcaccacccacgtctccagtcaactccaggaaacaccgggctggagttgacatccactcctgttcgcagtttttgcttgagttgtacagccgctggatcctgccgtccagctcagccaggaggaccccggccatcctgatcagtgaggtggtcagatcccttctagtggtctcagacttgttcaccgagcgcaaccagtttgagctgatgtatgtgacgctgacagaactgcgaagggtgcacccttcagaagacgagatcctcgctcagtacctggtgcctgccacctgcaaggcagctgccgtccttgggatggacaaggccgtggcggagcctgtcagccgcctgctggagagcacgctcaggagcagccacctgcccagcagggttggagccctgcacggcgtcctctatgtgctggagtgcgacctgctggacgacactgccaagcagctcatcccggtcatcagcgactatctcctctccaacctgaaagggatcgcccactgcgtgaacattcacagccagcagcacgtactggtcatgtgtgccactgcgttttacctcattgagaactatcctctggacgtagggccggaattttcagcatcaataatacagatgtgtggggtgatgctgtctggaagtgaggagtccaccccctccatcatttaccactgtgccctcagaggcctggagcgcctcctgctctctgagcagctctcccgcctggatgcagaatcgctggtcaagctgagtgtggacagagtgaacgtgcacagcccgcaccgggccatggcggctctgggcctgatgctcacctgcatgtacacaggaaaggagaaagtcagtccgggtagaacttcagaccctaatcctgcagcccccgacagcgagtcagtgattgttgctatggagcgggtatctgttctttttgataggatcaggaaaggctttccttgtgaagccagagtggtggccaggatcctgccccagtttctagacgacttcttcccaccccaggacatcatgaacaaagtcatcggagagtttctgtccaaccagcagccatacccccagttcatggccaccgtggtgtataaggtgtttcagactctgcacagcaccgggcagtcgtccatggtccgggactgggtcatgctgtccctctccaacttcacgcagagggccccggtcgccatggccacgtggagcctctcctgcttctttgtcagcgcgtccaccagcccgtgggtcgcggcgatcctcccacatgtcatcagcaggatgggcaagctggagcaggtggacgtgaaccttttctgcctggtcgccacagacttctacagacaccagatagaggaggagctcgaccgcagggccttccagtctgtgcttgaggtggttgcagccccaggaagcccatatcaccggctgctgacttgtttacgaaatgtccacaaggtcaccacctgctgagcgccatggtgggagagactgtgaggcggcagctggggccggagcctttggaagtctgcgcccttgtgccctgcctccaccgagccagcttggtccctatgggcttccgcacatgccgcgggcggccaggcaacgtgcgtgtctctgccatgtggcagaagtgctctttgtggcagtggccaggcagggagtgtctgcagtcctggtggggctgagcctgaggccttccagaaagcaggagcagctgtgctgcaccccatgtgggtgaccaggtcctttctcctgatagtcacctgctggttgttgccaggttgcagctgctcttgcatctgggccagaagtcctccctcctgcaggctggctgttggcccctctgctgtcctgcagtagaaggtgccgtgagcaggctttgggaacactggcctgggtctccctggtggggtgtgcatgccacgccccgtgtctggatgcacagatgccatggcctgtgctgggccagtggctgggggtgctagacacccggcaccattctcccttctctcttttcttctcaggatttaaaatttaattatatcagtaaagagattaattttaacgtaactctttctatgcccgtgtaaagtatgtgaatcgcaaggcctgtgctgcatgcgacagcgtccggggtggtggacagggcccccggccacgctccctctcctgtagccactggcatagccctcctgagcacccgctgacatttccgttgtacatgttcctgtttatgcattcacaaggtgactgggatgtagagaggcgttagtgggcaggtggccacagcaggactgaggacaggcccccattatcctaggggtgcgctcacctgcagcccctcctcctcgggcacagacgactgtcgttctccacccaccagtcagggacagcagcctccctgtcactcagctgagaaggccagccctccctggctgtgagcagcctccactgtgtccagagacatgggcctcccactcctgttccttgctagccctggggtggcgtctgcctaggagctggctggcaggtgttgggacctgctgctccatggatgcatgccctaagagtgtcactgagctgtgttttgtctgagcctctctcggtcaacagcaaagcttggtgtcttggcactgttagtgacagagcccagcatcccttctgcccccgttccagctgacatcttgcacggtgaccccttttagtcaggagagtgcagatctgtgctcatcggagactgccccacggccctgtcagagccgccactcctatccccaggccaggtccctggaccagcctcctgtttgcaggcccagaggagccaagtcattaaaatggaagtggattctggatggccgggctgctgctgatgtaggagctggatttgggagctctgcttgccgactggctgtgagacgaggcaggggctctgcttcctcagccctagaggcgagccaggcaaggttggcgactgtcatgtggcttggtttggtcatgcccgtcgatgttttgggtattgaatgtggtaagtggaggaaatgttggaactctgtgcaggtgctgccttgagacccccaagcttccacctgtccctctcctatgtggcagctggggagcagctgagatgtggacttgtatgctgcccacatacgtgagggggagctgaaagggagcccctcctctgagcagcctctgccaggcctgtatgaggcttttcccaccagctcccaacagaggcctcccccagccaggaccacctcgtcctcgtggcggggcagcaggagcggtagaaaggggtccgatgtttgaggaggcccttaagggaagctactgaattataacacgtaagaaaatcaccattccgtattggttgggggctcctgtttctcatcctagctttttcctggaaagcccgctagaaggtttgggaacgaggggaaagttctcagaactgttggctgctccccacccgcctcccgcctcccccgcaggttatgtcagcagctctgagacagcagtatcacaggccagatgttgttcctggctagatgtttacatttgtaagaaataacactgtgaatgtaaaacagagccattcccttggaatgcatatcgctgggctcaacatagagtttgtcttcctcttgtttacgacgtgatctaaaccagtccttagcaaggggctcagaacaccccgctctggcagtaggtgtcccccacccccaaagacctgcctgtgtgctccggagatgaatatgagctcattagtaaaaatgacttcacccacgcatatacataaagtatccatgcatgtgcatatagacacatctataattttacacacacacctctcaagacggagatgcatggcctctaagagtgcccgtgtcggttcttcctggaagttgactttccttagacccgccaggtcaagttagccgcgtgacggacatccaggcgtgggacgtggtcagggcagggctcattcattgcccactaggatcccactggcgaagatggtctccatatcagctctctgcagaagggaggaagactttatcatgttcctaaaaatctgtggcaagcacccatcgtattatccaaattttgttgcaaatgtgattaatttggttgtcaagttttgggggtgggctgtggggagattgcttttgttttcctgctggtaatatcgggaaagattttaatgaaaccagggtagaattgtttggcaatgcactgaagcgtgtttctttcccaaaatgtgcctcccttccgctgcgggcccagctgagtctatgtaggtgatgtttccagctgccaagtgctctttgttactgtccaccctcatttctgccagcgcatgtgtcctttcaaggggaaaatgtgaagctgaaccccctccagacacccagaatgtagcatctgagaaggccctgtgccctaaaggacacccctcgcccccatcttcatggagggggtcatttcagagccctcggagccaatgaacagctcctcctcttggagctgagatgagccccacgtggagctcgggacggatagtagacagcaataactcggtgtgtggccgcctggcaggtggaacttcctcccgttgcggggtggagtgaggttagttctgtgtgtctggtgggtggagtcaggcttctcttgctacctgtgagcatccttcccagcagacatcctcatcgggctttgtccctcccccgcttcctccctctgcggggaggacccgggaccacagctgctggccagggtagacttggagctgtcctccagaggggtcacgtgtaggagtgagaagaaggaagatcttgagagctgctgagggaccttggagagctcaggatggctcagacgaggacactcgcttgccgggcctgggcctcctgggaaggagggagctgctcagaatgccgcatgacaactgaaggcaacctggaaggttcaggggccgctcttcccccatgtgcctgtcacgctctggtgcagtcaaaggaacgccttcccctcagttgtttctaagagcagagtctcccgctgcaatctgggtggtaactgccagccttggaggatcgtggccaacgtggacctgcctacggagggtgggctctgacccaagtggggcctccttgtccaggtctcactgctttgcaccgtggtcagagggactgtcagctgagcttgagctcccctggagccagcagggctgtgatgggcgagtcccggagccccacccagacctgaatgcttctgagagcaaagggaaggactgacgagagatgtatatttaattttttaactgctgcaaacattgtacatccaaattaaaggaaaaaaatggaaaccatcaaaaaaaaaaaaaaaaaa

SEQ ID NO: 1426 - DNA, 1482 bp, Artificial Sequence
  source: /note="Description of Artificial Sequence: Synthetic polynucleotide"
ctgcgcgctcgctcgctcactgaggccgcccgggcaaagcccgggcgtcgggcgacctttggtcgcccggcctcagtgagcgagcgagcgcgcagagagggagtgtagccatgctctaggaagatcaattcaattcacgcgtcgacattgattattgactagttattaatagtaatcaattacggggtcattagttcatagcccatatatggagttccgcgttacataacttacggtaaatggcccgcctggctgaccgcccaacgacccccgcccattgacgtcaataatgacgtatgttcccatagtaacgccaatagggactttccattgacgtcaatgggtggagtatttacggtaaactgcccacttggcagtacatcaagtgtatcatatgccaagtacgccccctattgacgtcaatgacggtaaatggcccgcctggcattatgcccagtacatgaccttatgggactttcctacttggcagtacatctacgtattagtcatcgctattaccatgtcgaggccacgttctgcttcactctccccatctcccccccctccccacccccaattttgtatttatttattttttaattattttgtgcagcgatgggggcggggggggggggcgcgcgccaggcggggcggggcggggcgaggggcggggcggggcgaggcggagaggtgcggcggcagccaatcagagcggcgcgctccgaaagtttccttttatggcgaggcggcggcggcggcggccctataaaaagcgaagcgcgcggcgggcgggagcaagcttgaactgaaaaaccagaaagttaactggtaagtttagtctttttgtcttttatttcaggtcccggatccggtggtggtgcaaatcaaagaactgctcctcagtggatgttgcctttacttctaggcctgtacggaagtgttacttctgctctaaaagctgcggaattgtacccgcggccgatccaccggtgtgctgggcggggggcggcgggccctcccgcagaacaccatgcgctcttcggaagcaattcagtctcgttgtccctgtgacctggtacaacgagactgaattgcttctgaggagcgccttgacagcagccatgggagggccgccccctacctcagtgactcgaggacggggtgaactacgcctgaggatccgatctttttccctctgccaaaaattatggggacatcatgaagccccttgagcatctgacttctggctaataaaggaaatttattttcattgcaatagtgtgttggaattttttgtgtctctcactcggcctaggtagataagtagcatggcgggttaatcattaactacaaggaacccctagtgatggagttggccactccctctctgcgcgctcgctcgctcactgaggccgggcgaccaaaggtcgcccgacgcccgggctttgcccgggcggcctcagtgagcgagcgagcgcgcag

SEQ ID NO: 1427 - DNA, 1482 bp, Artificial Sequence
  source: /note="Description of Artificial Sequence: Synthetic polynucleotide"
ctgcgcgctcgctcgctcactgaggccgcccgggcaaagcccgggcgtcgggcgacctttggtcgcccggcctcagtgagcgagcgagcgcgcagagagggagtgtagccatgctctaggaagatcaattcaattcacgcgtcgacattgattattgactagttattaatagtaatcaattacggggtcattagttcatagcccatatatggagttccgcgttacataacttacggtaaatggcccgcctggctgaccgcccaacgacccccgcccattgacgtcaataatgacgtatgttcccatagtaacgccaatagggactttccattgacgtcaatgggtggagtatttacggtaaactgcccacttggcagtacatcaagtgtatcatatgccaagtacgccccctattgacgtcaatgacggtaaatggcccgcctggcattatgcccagtacatgaccttatgggactttcctacttggcagtacatctacgtattagtcatcgctattaccatgtcgaggccacgttctgcttcactctccccatctcccccccctccccacccccaattttgtatttatttattttttaattattttgtgcagcgatgggggcggggggggggggcgcgcgccaggcggggcggggcggggcgaggggcggggcggggcgaggcggagaggtgcggcggcagccaatcagagcggcgcgctccgaaagtttccttttatggcgaggcggcggcggcggcggccctataaaaagcgaagcgcgcggcgggcgggagcaagcttgaactgaaaaaccagaaagttaactggtaagtttagtctttttgtcttttatttcaggtcccggatccggtggtggtgcaaatcaaagaactgctcctcagtggatgttgcctttacttctaggcctgtacggaagtgttacttctgctctaaaagctgcggaattgtacccgcggccgatccaccggtgtgctgggcggggggcggcgggccctcccgcagaacaccatgcgctcttcggaatgaacctcttgttataaagcctgtgacctggttttataacaagaggttcattctgaggagcgccttgacagcagccatgggagggccgccccctacctcagtgactcgaggacggggtgaactacgcctgaggatccgatctttttccctctgccaaaaattatggggacatcatgaagccccttgagcatctgacttctggctaataaaggaaatttattttcattgcaatagtgtgttggaattttttgtgtctctcactcggcctaggtagataagtagcatggcgggttaatcattaactacaaggaacccctagtgatggagttggccactccctctctgcgcgctcgctcgctcactgaggccgggcgaccaaaggtcgcccgacgcccgggctttgcccgggcggcctcagtgagcgagcgagcgcgcag

SEQ ID NO: 1428 - DNA, 1482 bp, Artificial Sequence
  source: /note="Description of Artificial Sequence: Synthetic polynucleotide"
ctgcgcgctcgctcgctcactgaggccgcccgggcaaagcccgggcgtcgggcgacctttggtcgcccggcctcagtgagcgagcgagcgcgcagagagggagtgtagccatgctctaggaagatcaattcaattcacgcgtcgacattgattattgactagttattaatagtaatcaattacggggtcattagttcatagcccatatatggagttccgcgttacataacttacggtaaatggcccgcctggctgaccgcccaacgacccccgcccattgacgtcaataatgacgtatgttcccatagtaacgccaatagggactttccattgacgtcaatgggtggagtatttacggtaaactgcccacttggcagtacatcaagtgtatcatatgccaagtacgccccctattgacgtcaatgacggtaaatggcccgcctggcattatgcccagtacatgaccttatgggactttcctacttggcagtacatctacgtattagtcatcgctattaccatgtcgaggccacgttctgcttcactctccccatctcccccccctccccacccccaattttgtatttatttattttttaattattttgtgcagcgatgggggcggggggggggggcgcgcgccaggcggggcggggcggggcgaggggcggggcggggcgaggcggagaggtgcggcggcagccaatcagagcggcgcgctccgaaagtttccttttatggcgaggcggcggcggcggcggccctataaaaagcgaagcgcgcggcgggcgggagcaagcttgaactgaaaaaccagaaagttaactggtaagtttagtctttttgtcttttatttcaggtcccggatccggtggtggtgcaaatcaaagaactgctcctcagtggatgttgcctttacttctaggcctgtacggaagtgttacttctgctctaaaagctgcggaattgtacccgcggccgatccaccggtgtgctgggcggggggcggcgggccctcccgcagaacaccatgcgctcttcggaaccgacaaccagtatttgggcctgtgacctggtccaaatactggttgtcggttctgaggagcgccttgacagcagccatgggagggccgccccctacctcagtgactcgaggacggggtgaactacgcctgaggatccgatctttttccctctgccaaaaattatggggacatcatgaagccccttgagcatctgacttctggctaataaaggaaatttattttcattgcaatagtgtgttggaattttttgtgtctctcactcggcctaggtagataagtagcatggcgggttaatcattaactacaaggaacccctagtgatggagttggccactccctctctgcgcgctcgctcgctcactgaggccgggcgaccaaaggtcgcccgacgcccgggctttgcccgggcggcctcagtgagcgagcgagcgcgcag

SEQ ID NO: 1429 - DNA, 1482 bp, Artificial Sequence
  source: /note="Description of Artificial Sequence: Synthetic polynucleotide"
ctgcgcgctcgctcgctcactgaggccgcccgggcaaagcccgggcgtcgggcgacctttggtcgcccggcctcagtgagcgagcgagcgcgcagagagggagtgtagccatgctctaggaagatcaattcaattcacgcgtcgacattgattattgactagttattaatagtaatcaattacggggtcattagttcatagcccatatatggagttccgcgttacataacttacggtaaatggcccgcctggctgaccgcccaacgacccccgcccattgacgtcaataatgacgtatgttcccatagtaacgccaatagggactttccattgacgtcaatgggtggagtatttacggtaaactgcccacttggcagtacatcaagtgtatcatatgccaagtacgccccctattgacgtcaatgacggtaaatggcccgcctggcattatgcccagtacatgaccttatgggactttcctacttggcagtacatctacgtattagtcatcgctattaccatgtcgaggccacgttctgcttcactctccccatctcccccccctccccacccccaattttgtatttatttattttttaattattttgtgcagcgatgggggcggggggggggggcgcgcgccaggcggggcggggcggggcgaggggcggggcggggcgaggcggagaggtgcggcggcagccaatcagagcggcgcgctccgaaagtttccttttatggcgaggcggcggcggcggcggccctataaaaagcgaagcgcgcggcgggcgggagcaagcttgaactgaaaaaccagaaagttaactggtaagtttagtctttttgtcttttatttcaggtcccggatccggtggtggtgcaaatcaaagaactgctcctcagtggatgttgcctttacttctaggcctgtacggaagtgttacttctgctctaaaagctgcggaattgtacccgcggccgatccaccggtgtgctgggcggggggcggcgggccctcccgcagaacaccatgcgctcttcggaaccacaatgttgtgactgggcctgtgacctggtccggtcacaacattgtggttctgaggagcgccttgacagcagccatgggagggccgccccctacctcagtgactcgaggacggggtgaactacgcctgaggatccgatctttttccctctgccaaaaattatggggacatcatgaagccccttgagcatctgacttctggctaataaaggaaatttattttcattgcaatagtgtgttggaattttttgtgtctctcactcggcctaggtagataagtagcatggcgggttaatcattaactacaaggaacccctagtgatggagttggccactccctctctgcgcgctcgctcgctcactgaggccgggcgaccaaaggtcgcccgacgcccgggctttgcccgggcggcctcagtgagcgagcgagcgcgcag

SEQ ID NO: 1430 - DNA, 1482 bp, Artificial Sequence
  source: /note="Description of Artificial Sequence: Synthetic polynucleotide"
ctgcgcgctcgctcgctcactgaggccgcccgggcaaagcccgggcgtcgggcgacctttggtcgcccggcctcagtgagcgagcgagcgcgcagagagggagtgtagccatgctctaggaagatcaattcaattcacgcgtcgacattgattattgactagttattaatagtaatcaattacggggtcattagttcatagcccatatatggagttccgcgttacataacttacggtaaatggcccgcctggctgaccgcccaacgacccccgcccattgacgtcaataatgacgtatgttcccatagtaacgccaatagggactttccattgacgtcaatgggtggagtatttacggtaaactgcccacttggcagtacatcaagtgtatcatatgccaagtacgccccctattgacgtcaatgacggtaaatggcccgcctggcattatgcccagtacatgaccttatgggactttcctacttggcagtacatctacgtattagtcatcgctattaccatgtcgaggccacgttctgcttcactctccccatctcccccccctccccacccccaattttgtatttatttattttttaattattttgtgcagcgatgggggcggggggggggggcgcgcgccaggcggggcggggcggggcgaggggcggggcggggcgaggcggagaggtgcggcggcagccaatcagagcggcgcgctccgaaagtttccttttatggcgaggcggcggcggcggcggccctataaaaagcgaagcgcgcggcgggcgggagcaagcttgaactgaaaaaccagaaagttaactggtaagtttagtctttttgtcttttatttcaggtcccggatccggtggtggtgcaaatcaaagaactgctcctcagtggatgttgcctttacttctaggcctgtacggaagtgttacttctgctctaaaagctgcggaattgtacccgcggccgatccaccggtgtgctgggcggggggcggcgggccctcccgcagaacaccatgcgctcttcggaagcaattcagtctcgttgtacctgtgatttggtacaacgagactgaattgcttctgaggagcgccttgacagcagccatgggagggccgccccctacctcagtgactcgaggacggggtgaactacgcctgaggatccgatctttttccctctgccaaaaattatggggacatcatgaagccccttgagcatctgacttctggctaataaaggaaatttattttcattgcaatagtgtgttggaattttttgtgtctctcactcggcctaggtagataagtagcatggcgggttaatcattaactacaaggaacccctagtgatggagttggccactccctctctgcgcgctcgctcgctcactgaggccgggcgaccaaaggtcgcccgacgcccgggctttgcccgggcggcctcagtgagcgagcgagcgcgcag

SEQ ID NO: 1431 - DNA, 1482 bp, Artificial Sequence
  source: /note="Description of Artificial Sequence: Synthetic polynucleotide"
ctgcgcgctcgctcgctcactgaggccgcccgggcaaagcccgggcgtcgggcgacctttggtcgcccggcctcagtgagcgagcgagcgcgcagagagggagtgtagccatgctctaggaagatcaattcaattcacgcgtcgacattgattattgactagttattaatagtaatcaattacggggtcattagttcatagcccatatatggagttccgcgttacataacttacggtaaatggcccgcctggctgaccgcccaacgacccccgcccattgacgtcaataatgacgtatgttcccatagtaacgccaatagggactttccattgacgtcaatgggtggagtatttacggtaaactgcccacttggcagtacatcaagtgtatcatatgccaagtacgccccctattgacgtcaatgacggtaaatggcccgcctggcattatgcccagtacatgaccttatgggactttcctacttggcagtacatctacgtattagtcatcgctattaccatgtcgaggccacgttctgcttcactctccccatctcccccccctccccacccccaattttgtatttatttattttttaattattttgtgcagcgatgggggcggggggggggggcgcgcgccaggcggggcggggcggggcgaggggcggggcggggcgaggcggagaggtgcggcggcagccaatcagagcggcgcgctccgaaagtttccttttatggcgaggcggcggcggcggcggccctataaaaagcgaagcgcgcggcgggcgggagcaagcttgaactgaaaaaccagaaagttaactggtaagtttagtctttttgtcttttatttcaggtcccggatccggtggtggtgcaaatcaaagaactgctcctcagtggatgttgcctttacttctaggcctgtacggaagtgttacttctgctctaaaagctgcggaattgtacccgcggccgatccaccggtgtgctgggcggggggcggcgggccctcccgcagaacaccatgcgctcttcggaagcaattcagactcgttgtacctgtgacctggtacaacgagactgaattgcttctgtggagcgccttgacagcagccatgggagggccgccccctacctcagtgactcgaggacggggtgaactacgcctgaggatccgatctttttccctctgccaaaaattatggggacatcatgaagccccttgagcatctgacttctggctaataaaggaaatttattttcattgcaatagtgtgttggaattttttgtgtctctcactcggcctaggtagataagtagcatggcgggttaatcattaactacaaggaacccctagtgatggagttggccactccctctctgcgcgctcgctcgctcactgaggccgggcgaccaaaggtcgcccgacgcccgggctttgcccgggcggcctcagtgagcgagcgagcgcgcag

SEQ ID NO: 1432 - DNA, 1482 bp, Artificial Sequence
  source: /note="Description of Artificial Sequence: Synthetic polynucleotide"
ctgcgcgctcgctcgctcactgaggccgcccgggcaaagcccgggcgtcgggcgacctttggtcgcccggcctcagtgagcgagcgagcgcgcagagagggagtgtagccatgctctaggaagatcaattcaattcacgcgtcgacattgattattgactagttattaatagtaatcaattacggggtcattagttcatagcccatatatggagttccgcgttacataacttacggtaaatggcccgcctggctgaccgcccaacgacccccgcccattgacgtcaataatgacgtatgttcccatagtaacgccaatagggactttccattgacgtcaatgggtggagtatttacggtaaactgcccacttggcagtacatcaagtgtatcatatgccaagtacgccccctattgacgtcaatgacggtaaatggcccgcctggcattatgcccagtacatgaccttatgggactttcctacttggcagtacatctacgtattagtcatcgctattaccatgtcgaggccacgttctgcttcactctccccatctcccccccctccccacccccaattttgtatttatttattttttaattattttgtgcagcgatgggggcggggggggggggcgcgcgccaggcggggcggggcggggcgaggggcggggcggggcgaggcggagaggtgcggcggcagccaatcagagcggcgcgctccgaaagtttccttttatggcgaggcggcggcggcggcggccctataaaaagcgaagcgcgcggcgggcgggagcaagcttgaactgaaaaaccagaaagttaactggtaagtttagtctttttgtcttttatttcaggtcccggatccggtggtggtgcaaatcaaagaactgctcctcagtggatgttgcctttacttctaggcctgtacggaagtgttacttctgctctaaaagctgcggaattgtacccgcggccgatccaccggtgtgctgggcggggggcggcgggccctcccgcagaacaccatgcgctcttcggaagcaattcagtctcgttgtacctgtgacctggtacaacgagactgaattgcttctgtggagcgccttgacagcagccatgggagggccgccccctacctcagtgactcgaggacggggtgaactacgcctgaggatccgatctttttccctctgccaaaaattatggggacatcatgaagccccttgagcatctgacttctggctaataaaggaaatttattttcattgcaatagtgtgttggaattttttgtgtctctcactcggcctaggtagataagtagcatggcgggttaatcattaactacaaggaacccctagtgatggagttggccactccctctctgcgcgctcgctcgctcactgaggccgggcgaccaaaggtcgcccgacgcccgggctttgcccgggcggcctcagtgagcgagcgagcgcgcag

SEQ ID NO: 1433 - DNA, 1584 bp, Artificial Sequence
  source: /note="Description of Artificial Sequence: Synthetic polynucleotide"
ctgcgcgctcgctcgctcactgaggccgcccgggcaaagcccgggcgtcgggcgacctttggtcgcccggcctcagtgagcgagcgagcgcgcagagagggagtgtagccatgctctaggaagatcaattcaattcacgcgtcgacattgattattgactagttattaatagtaatcaattacggggtcattagttcatagcccatatatggagttccgcgttacataacttacggtaaatggcccgcctggctgaccgcccaacgacccccgcccattgacgtcaataatgacgtatgttcccatagtaacgccaatagggactttccattgacgtcaatgggtggagtatttacggtaaactgcccacttggcagtacatcaagtgtatcatatgccaagtacgccccctattgacgtcaatgacggtaaatggcccgcctggcattatgcccagtacatgaccttatgggactttcctacttggcagtacatctacgtattagtcatcgctattaccatgtcgaggccacgttctgcttcactctccccatctcccccccctccccacccccaattttgtatttatttattttttaattattttgtgcagcgatgggggcggggggggggggcgcgcgccaggcggggcggggcggggcgaggggcggggcggggcgaggcggagaggtgcggcggcagccaatcagagcggcgcgctccgaaagtttccttttatggcgaggcggcggcggcggcggccctataaaaagcgaagcgcgcggcgggcgggagcaagcttgaactgaaaaaccagaaagttaactggtaagtttagtctttttgtcttttatttcaggtcccggatccggtggtggtgcaaatcaaagaactgctcctcagtggatgttgcctttacttctaggcctgtacggaagtgttacttctgctctaaaagctgcggaattgtacccgcggccgatccaccggtgaagcaaagaaggggcagagggagcccgtgagctgagtgggccagggactgggagaaggagtgaggaggcagggccggcatgcctctgctgctggccagagcaattcagtctcgttgtaccgtctgcacctgtcactagtacaacgagactgaattgctttggccgtgtagtgctacccagcgctggctgcctcctcagcattgcaattcctctcccatctgggcaccagtcagctaccctggtgggaatctgggtagccctcgaggacggggtgaactacgcctgaggatccgatctttttccctctgccaaaaattatggggacatcatgaagccccttgagcatctgacttctggctaataaaggaaatttattttcattgcaatagtgtgttggaattttttgtgtctctcactcggcctaggtagataagtagcatggcgggttaatcattaactacaaggaacccctagtgatggagttggccactccctctctgcgcgctcgctcgctcactgaggccgggcgaccaaaggtcgcccgacgcccgggctttgcccgggcggcctcagtgagcgagcgagcgcgcag

SEQ ID NO: 1434 - DNA, 1584 bp, Artificial Sequence
  source: /note="Description of Artificial Sequence: Synthetic polynucleotide"
ctgcgcgctcgctcgctcactgaggccgcccgggcaaagcccgggcgtcgggcgacctttggtcgcccggcctcagtgagcgagcgagcgcgcagagagggagtgtagccatgctctaggaagatcaattcaattcacgcgtcgacattgattattgactagttattaatagtaatcaattacggggtcattagttcatagcccatatatggagttccgcgttacataacttacggtaaatggcccgcctggctgaccgcccaacgacccccgcccattgacgtcaataatgacgtatgttcccatagtaacgccaatagggactttccattgacgtcaatgggtggagtatttacggtaaactgcccacttggcagtacatcaagtgtatcatatgccaagtacgccccctattgacgtcaatgacggtaaatggcccgcctggcattatgcccagtacatgaccttatgggactttcctacttggcagtacatctacgtattagtcatcgctattaccatgtcgaggccacgttctgcttcactctccccatctcccccccctccccacccccaattttgtatttatttattttttaattattttgtgcagcgatgggggcggggggggggggcgcgcgccaggcggggcggggcggggcgaggggcggggcggggcgaggcggagaggtgcggcggcagccaatcagagcggcgcgctccgaaagtttccttttatggcgaggcggcggcggcggcggccctataaaaagcgaagcgcgcggcgggcgggagcaagcttgaactgaaaaaccagaaagttaactggtaagtttagtctttttgtcttttatttcaggtcccggatccggtggtggtgcaaatcaaagaactgctcctcagtggatgttgcctttacttctaggcctgtacggaagtgttacttctgctctaaaagctgcggaattgtacccgcggccgatccaccggtgaagcaaagaaggggcagagggagcccgtgagctgagtgggccagggactgggagaaggagtgaggaggcagggccggcatgcctctgctgctggccagaggtttatgaactgacgttaccgtctgcacctgtcactagtaacgtcagttcataaacctttggccgtgtagtgctacccagcgctggctgcctcctcagcattgcaattcctctcccatctgggcaccagtcagctaccctggtgggaatctgggtagccctcgaggacggggtgaactacgcctgaggatccgatctttttccctctgccaaaaattatggggacatcatgaagccccttgagcatctgacttctggctaataaaggaaatttattttcattgcaatagtgtgttggaattttttgtgtctctcactcggcctaggtagataagtagcatggcgggttaatcattaactacaaggaacccctagtgatggagttggccactccctctctgcgcgctcgctcgctcactgaggccgggcgaccaaaggtcgcccgacgcccgggctttgcccgggcggcctcagtgagcgagcgagcgcgcag

SEQ ID NO: 1435 - DNA, 1584 bp, Artificial Sequence
  source: /note="Description of Artificial Sequence: Synthetic polynucleotide"
ctgcgcgctcgctcgctcactgaggccgcccgggcaaagcccgggcgtcgggcgacctttggtcgcccggcctcagtgagcgagcgagcgcgcagagagggagtgtagccatgctctaggaagatcaattcaattcacgcgtcgacattgattattgactagttattaatagtaatcaattacggggtcattagttcatagcccatatatggagttccgcgttacataacttacggtaaatggcccgcctggctgaccgcccaacgacccccgcccattgacgtcaataatgacgtatgttcccatagtaacgccaatagggactttccattgacgtcaatgggtggagtatttacggtaaactgcccacttggcagtacatcaagtgtatcatatgccaagtacgccccctattgacgtcaatgacggtaaatggcccgcctggcattatgcccagtacatgaccttatgggactttcctacttggcagtacatctacgtattagtcatcgctattaccatgtcgaggccacgttctgcttcactctccccatctcccccccctccccacccccaattttgtatttatttattttttaattattttgtgcagcgatgggggcggggggggggggcgcgcgccaggcggggcggggcggggcgaggggcggggcggggcgaggcggagaggtgcggcggcagccaatcagagcggcgcgctccgaaagtttccttttatggcgaggcggcggcggcggcggccctataaaaagcgaagcgcgcggcgggcgggagcaagcttgaactgaaaaaccagaaagttaactggtaagtttagtctttttgtcttttatttcaggtcccggatccggtggtggtgcaaatcaaagaactgctcctcagtggatgttgcctttacttctaggcctgtacggaagtgttacttctgctctaaaagctgcggaattgtacccgcggccgatccaccggtgaagcaaagaaggggcagagggagcccgtgagctgagtgggccagggactgggagaaggagtgaggaggcagggccggcatgcctctgctgctggccagaccgacaaccagtatttggaccgtctgcacctgtcactagtccaaatactggttgtcggtttggccgtgtagtgctacccagcgctggctgcctcctcagcattgcaattcctctcccatctgggcaccagtcagctaccctggtgggaatctgggtagccctcgaggacggggtgaactacgcctgaggatccgatctttttccctctgccaaaaattatggggacatcatgaagccccttgagcatctgacttctggctaataaaggaaatttattttcattgcaatagtgtgttggaattttttgtgtctctcactcggcctaggtagataagtagcatggcgggttaatcattaactacaaggaacccctagtgatggagttggccactccctctctgcgcgctcgctcgctcactgaggccgggcgaccaaaggtcgcccgacgcccgggctttgcccgggcggcctcagtgagcgagcgagcgcgcag

SEQ ID NO: 1436 - DNA, 1584 bp, Artificial Sequence
  source: /note="Description of Artificial Sequence: Synthetic polynucleotide"
ctgcgcgctcgctcgctcactgaggccgcccgggcaaagcccgggcgtcgggcgacctttggtcgcccggcctcagtgagcgagcgagcgcgcagagagggagtgtagccatgctctaggaagatcaattcaattcacgcgtcgacattgattattgactagttattaatagtaatcaattacggggtcattagttcatagcccatatatggagttccgcgttacataacttacggtaaatggcccgcctggctgaccgcccaacgacccccgcccattgacgtcaataatgacgtatgttcccatagtaacgccaatagggactttccattgacgtcaatgggtggagtatttacggtaaactgcccacttggcagtacatcaagtgtatcatatgccaagtacgccccctattgacgtcaatgacggtaaatggcccgcctggcattatgcccagtacatgaccttatgggactttcctacttggcagtacatctacgtattagtcatcgctattaccatgtcgaggccacgttctgcttcactctccccatctcccccccctccccacccccaattttgtatttatttattttttaattattttgtgcagcgatgggggcggggggggggggcgcgcgccaggcggggcggggcggggcgaggggcggggcggggcgaggcggagaggtgcggcggcagccaatcagagcggcgcgctccgaaagtttccttttatggcgaggcggcggcggcggcggccctataaaaagcgaagcgcgcggcgggcgggagcaagcttgaactgaaaaaccagaaagttaactggtaagtttagtctttttgtcttttatttcaggtcccggatccggtggtggtgcaaatcaaagaactgctcctcagtggatgttgcctttacttctaggcctgtacggaagtgttacttctgctctaaaagctgcggaattgtacccgcggccgatccaccggtgaagcaaagaaggggcagagggagcccgtgagctgagtgggccagggactgggagaaggagtgaggaggcagggccggcatgcctctgctgctggccagaccacaatgttgtgactggaccgtctgcacctgtcactagtccggtcacaacattgtggtttggccgtgtagtgctacccagcgctggctgcctcctcagcattgcaattcctctcccatctgggcaccagtcagctaccctggtgggaatctgggtagccctcgaggacggggtgaactacgcctgaggatccgatctttttccctctgccaaaaattatggggacatcatgaagccccttgagcatctgacttctggctaataaaggaaatttattttcattgcaatagtgtgttggaattttttgtgtctctcactcggcctaggtagataagtagcatggcgggttaatcattaactacaaggaacccctagtgatggagttggccactccctctctgcgcgctcgctcgctcactgaggccgggcgaccaaaggtcgcccgacgcccgggctttgcccgggcggcctcagtgagcgagcgagcgcgcag

SEQ ID NO: 1437 - DNA, 1487 bp, Artificial Sequence
  source: /note="Description of Artificial Sequence: Synthetic polynucleotide"
ctgcgcgctcgctcgctcactgaggccgcccgggcaaagcccgggcgtcgggcgacctttggtcgcccggcctcagtgagcgagcgagcgcgcagagagggagtgtagccatgctctaggaagatcaattcaattcacgcgtcgacattgattattgactagttattaatagtaatcaattacggggtcattagttcatagcccatatatggagttccgcgttacataacttacggtaaatggcccgcctggctgaccgcccaacgacccccgcccattgacgtcaataatgacgtatgttcccatagtaacgccaatagggactttccattgacgtcaatgggtggagtatttacggtaaactgcccacttggcagtacatcaagtgtatcatatgccaagtacgccccctattgacgtcaatgacggtaaatggcccgcctggcattatgcccagtacatgaccttatgggactttcctacttggcagtacatctacgtattagtcatcgctattaccatgtcgaggccacgttctgcttcactctccccatctcccccccctccccacccccaattttgtatttatttattttttaattattttgtgcagcgatgggggcggggggggggggcgcgcgccaggcggggcggggcggggcgaggggcggggcggggcgaggcggagaggtgcggcggcagccaatcagagcggcgcgctccgaaagtttccttttatggcgaggcggcggcggcggcggccctataaaaagcgaagcgcgcggcgggcgggagcaagcttgaactgaaaaaccagaaagttaactggtaagtttagtctttttgtcttttatttcaggtcccggatccggtggtggtgcaaatcaaagaactgctcctcagtggatgttgcctttacttctaggcctgtacggaagtgttacttctgctctaaaagctgcggaattgtacccgcggccgatccaccggtgtgctgggcggggggcggcgggccctcccgcagaacaccatgcgctccacggaacctgctagctccatgcttgctgtggccactgagaagtaagcatggagctagcaggttctgaggagcgccttgacagcagccatgggagggccgccccctacctcagtgactcgaggacggggtgaactacgcctgaggatccgatctttttccctctgccaaaaattatggggacatcatgaagccccttgagcatctgacttctggctaataaaggaaatttattttcattgcaatagtgtgttggaattttttgtgtctctcactcggcctaggtagataagtagcatggcgggttaatcattaactacaaggaacccctagtgatggagttggccactccctctctgcgcgctcgctcgctcactgaggccgggcgaccaaaggtcgcccgacgcccgggctttgcccgggcggcctcagtgagcgagcgagcgcgcag

SEQ ID NO: 1438 - DNA, 1487 bp, Artificial Sequence
  source: /note="Description of Artificial Sequence: Synthetic polynucleotide"
ctgcgcgctcgctcgctcactgaggccgcccgggcaaagcccgggcgtcgggcgacctttggtcgcccggcctcagtgagcgagcgagcgcgcagagagggagtgtagccatgctctaggaagatcaattcaattcacgcgtcgacattgattattgactagttattaatagtaatcaattacggggtcattagttcatagcccatatatggagttccgcgttacataacttacggtaaatggcccgcctggctgaccgcccaacgacccccgcccattgacgtcaataatgacgtatgttcccatagtaacgccaatagggactttccattgacgtcaatgggtggagtatttacggtaaactgcccacttggcagtacatcaagtgtatcatatgccaagtacgccccctattgacgtcaatgacggtaaatggcccgcctggcattatgcccagtacatgaccttatgggactttcctacttggcagtacatctacgtattagtcatcgctattaccatgtcgaggccacgttctgcttcactctccccatctcccccccctccccacccccaattttgtatttatttattttttaattattttgtgcagcgatgggggcggggggggggggcgcgcgccaggcggggcggggcggggcgaggggcggggcggggcgaggcggagaggtgcggcggcagccaatcagagcggcgcgctccgaaagtttccttttatggcgaggcggcggcggcggcggccctataaaaagcgaagcgcgcggcgggcgggagcaagcttgaactgaaaaaccagaaagttaactggtaagtttagtctttttgtcttttatttcaggtcccggatccggtggtggtgcaaatcaaagaactgctcctcagtggatgttgcctttacttctaggcctgtacggaagtgttacttctgctctaaaagctgcggaattgtacccgcggccgatccaccggtgtgctgggcggggggcggcgggccctcccgcagaacaccatgcgctcctcggaataagcatggagctagcaggttgtggccactgagaaacctgctagctccatgcttgttctgcggagcgccttgacagcagccatgggagggccgccccctacctcagtgactcgaggacggggtgaactacgcctgaggatccgatctttttccctctgccaaaaattatggggacatcatgaagccccttgagcatctgacttctggctaataaaggaaatttattttcattgcaatagtgtgttggaattttttgtgtctctcactcggcctaggtagataagtagcatggcgggttaatcattaactacaaggaacccctagtgatggagttggccactccctctctgcgcgctcgctcgctcactgaggccgggcgaccaaaggtcgcccgacgcccgggctttgcccgggcggcctcagtgagcgagcgagcgcgcag

SEQ ID NO: 1439 - protein, 743 aa, Artificial Sequence
  source: /note="Description of Artificial Sequence: Synthetic polypeptide"
MAADGYLPDWLEDNLSEGIREWWALKPGAPQPKANQQHQDNARGLVLPGYKYLGPGNGLDKGEPVNAADAAALEHDKAYDQQLKAGDNPYLKYNHADAEFQERLKEDTSFGGNLGRAVFQAKKRLLEPLGLVEEAAKTAPGKKRPVEQSPQEPDSSAGIGKSGAQPAKKRLNFGQTGDTESVPDPQPIGEPPAAPSGVGSLTMASGGGAPVADNNEGADGVGSSSGNWHCDSQWLGDRVITTSTRTWALPTYNNHLYKQISNSTSGGSSNDNAYFGYSTPWGYFDFNRFHCHFSPRDWQRLINNNWGFRPKRLNFKLFNIQVKEVTDNNGVKTIANNLTSTVQVFTDSDYQLPYVLGSAHEGCLPPFPADVFMIPQYGYLTLNDGSQAVGRSSFYCLEYFPSQMLRTGNNFQFSYEFENVPFHSSYAHSQSLDRLMNPLIDQYLYYLSRTINGSGQNQQTLKFSVAGPSNMAVQGRNYIPGPSYRQQRVSTTVTQNNNSEFAWPGASSWALNGRNSLMNPGPAMASHKEGEDRFFPLSGSLIFGKQGTGRDNVDADKVMITNEEEIKTTNPVATESYGQVATNHQSDGTLAVPFKAQAQTGWVQNQGILPGMVWQDRDVYLQGPIWAKIPHTDGNFHPSPLMGGFGMKHPPPQILIKNTPVPADPPTAFNKDKLNSFITQYSTGQVSVEIEWELQKENSKRWNPEIQYTSNYYKSNNVEFAVNTEGVYSEPRPIGTRYLTRNL

SEQ ID NO: 1440 - protein, 743 aa, Artificial Sequence
  source: /note="Description of Artificial Sequence: Synthetic polypeptide"
MAADGYLPDWLEDNLSEGIREWWALKPGAPQPKANQQHQDNARGLVLPGYKYLGPGNGLDKGEPVNAADAAALEHDKAYDQQLKAGDNPYLKYNHADAEFQERLKEDTSFGGNLGRAVFQAKKRLLEPLGLVEEAAKTAPGKKRPVEQSPQEPDSSAGIGKSGAQPAKKRLNFGQTGDTESVPDPQPIGEPPAAPSGVGSLTMASGGGAPVADNNEGADGVGSSSGNWHCDSQWLGDRVITTSTRTWALPTYNNHLYKQISNSTSGGSSNDNAYFGYSTPWGYFDFNRFHCHFSPRDWQRLINNNWGFRPKRLNFKLFNIQVKEVTDNNGVKTIANNLTSTVQVFTDSDYQLPYVLGSAHEGCLPPFPADVFMIPQYGYLTLNDGSQAVGRSSFYCLEYFPSQMLRTGNNFQFSYEFENVPFHSSYAHSQSLDRLMNPLIDQYLYYLSRTINGSGQNQQTLKFSVAGPSNMAVQGRNYIPGPSYRQQRVSTTVTQNNNSEFAWPGASSWALNGRNSLMNPGPAMASHKEGEDRFFPLSGSLIFGKQGTGRDNVDADKVMITNEEEIKTTNPVATESYGQVATNHQSAQQAVRTSLAQAQTGWVQNQGILPGMVWQDRDVYLQGPIWAKIPHTDGNFHPSPLMGGFGMKHPPPQILIKNTPVPADPPTAFNKDKLNSFITQYSTGQVSVEIEWELQKENSKRWNPEIQYTSNYYKSNNVEFAVNTEGVYSEPRPIGTRYLTRNL

SEQ ID NO: 1441 - protein, 736 aa, Artificial Sequence
  source: /note="Description of Artificial Sequence: Synthetic polypeptide"
MAADGYLPDWLEDNLSEGIREWWALKPGAPQPKANQQHQDNARGLVLPGYKYLGPGNGLDKGEPVNAADAAALEHDKAYDQQLKAGDNPYLKYNHADAEFQERLKEDTSFGGNLGRAVFQAKKRLLEPLGLVEEAAKTAPGKKRPVEQSPQEPDSSAGIGKSGAQPAKKRLNFGQTGDTESVPDPQPIGEPPAAPSGVGSLTMASGGGAPVADNNEGADGVGSSSGNWHCDSQWLGDRVITTSTRTWALPTYNNHLYKQISNSTSGGSSNDNAYFGYSTPWGYFDFNRFHCHFSPRDWQRLINNNWGFRPKRLNFKLFNIQVKEVTDNNGVKTIANNLTSTVQVFTDSDYQLPYVLGSAHEGCLPPFPADVFMIPQYGYLTLNDGSQAVGRSSFYCLEYFPSQMLRTGNNFQFSYEFENVPFHSSYAHSQSLDRLMNPLIDQYLYYLSRTINGSGQNQQTLKFSVAGPSNMAVQGRNYIPGPSYRQQRVSTTVTQNNNSEFAWPGASSWALNGRNSLMNPGPAMASHKEGEDRFFPLSGSLIFGKQGTGRDNVDADKVMITNEEEIKTTNPVATESYGQVATNHQSAQAQAQTGWVQNQGILPGMVWQDRDVYLQGPIWAKIPHTDGNFHPSPLMGGFGMKHPPPQILIKNTPVPADPPTAFNKDKLNSFITQYSTGQVSVEIEWELQKENSKRWNPEIQYTSNYYKSNNVEFAVNTEGVYSEPRPIGTRYLTRNL

SEQ ID NO: 1442 - protein, 11 aa, Artificial Sequence
  source: /note="Description of Artificial Sequence: Synthetic peptide"
AQTLAVPFKAQ

SEQ ID NO: 1443 - protein, 11 aa, Artificial Sequence
  source: /note="Description of Artificial Sequence: Synthetic peptide"
AQSVSKPFLAQ

SEQ ID NO: 1444 - protein, 11 aa, Artificial Sequence
  source: /note="Description of Artificial Sequence: Synthetic peptide"
AQFTLTTPKAQ

SEQ ID NO: 1445 - protein, 11 aa, Artificial Sequence
  source: /note="Description of Artificial Sequence: Synthetic peptide"
DGTLAVPFKAQ

SEQ ID NO: 1446 - protein, 11 aa, Artificial Sequence
  source: /note="Description of Artificial Sequence: Synthetic peptide"
ESTLAVPFKAQ

SEQ ID NO: 1447 - protein, 11 aa, Artificial Sequence
  source: /note="Description of Artificial Sequence: Synthetic peptide"
GGTLAVPFKAQ

SEQ ID NO: 1448 - protein, 11 aa, Artificial Sequence
  source: /note="Description of Artificial Sequence: Synthetic peptide"
AQTLATPFKAQ

SEQ ID NO: 1449 - protein, 11 aa, Artificial Sequence
  source: /note="Description of Artificial Sequence: Synthetic peptide"
ATTLATPFKAQ

SEQ ID NO: 1450 - protein, 11 aa, Artificial Sequence
  source: /note="Description of Artificial Sequence: Synthetic peptide"
DGTLATPFKAQ

SEQ ID NO: 1451 - protein, 11 aa, Artificial Sequence
  source: /note="Description of Artificial Sequence: Synthetic peptide"
GGTLATPFKAQ

SEQ ID NO: 1452 - protein, 11 aa, Artificial Sequence
  source: /note="Description of Artificial Sequence: Synthetic peptide"
SGSLAVPFKAQ

SEQ ID NO: 1453 - protein, 11 aa, Artificial Sequence
  source: /note="Description of Artificial Sequence: Synthetic peptide"
AQTLAQPFKAQ

SEQ ID NO: 1454 - protein, 11 aa, Artificial Sequence
  source: /note="Description of Artificial Sequence: Synthetic peptide"
AQTLQQPFKAQ

SEQ ID NO: 1455 - protein, 11 aa, Artificial Sequence
  source: /note="Description of Artificial Sequence: Synthetic peptide"
AQTLSNPFKAQ

SEQ ID NO: 1456 - protein, 11 aa, Artificial Sequence
  source: /note="Description of Artificial Sequence: Synthetic peptide"
AQTLAVPFSNP

SEQ ID NO: 1457 - protein, 11 aa, Artificial Sequence
  source: /note="Description of Artificial Sequence: Synthetic peptide"
QGTLAVPFKAQ

SEQ ID NO: 1458 - protein, 11 aa, Artificial Sequence
  source: /note="Description of Artificial Sequence: Synthetic peptide"
NQTLAVPFKAQ

SEQ ID NO: 1459 - protein, 11 aa, Artificial Sequence
  source: /note="Description of Artificial Sequence: Synthetic peptide"
EGSLAVPFKAQ

SEQ ID NO: 1460 - protein, 11 aa, Artificial Sequence
  source: /note="Description of Artificial Sequence: Synthetic peptide"
SGNLAVPFKAQ

SEQ ID NO: 1461 - protein, 11 aa, Artificial Sequence
  source: /note="Description of Artificial Sequence: Synthetic peptide"
EGTLAVPFKAQ

SEQ ID NO: 1462 - protein, 11 aa, Artificial Sequence
  source: /note="Description of Artificial Sequence: Synthetic peptide"
DSTLAVPFKAQ

SEQ ID NO: 1463 - protein, 11 aa, Artificial Sequence
  source: /note="Description of Artificial Sequence: Synthetic peptide"
AVTLAVPFKAQ

SEQ ID NO: 1464 - protein, 11 aa, Artificial Sequence
  source: /note="Description of Artificial Sequence: Synthetic peptide"
AQTLSTPFKAQ

SEQ ID NO: 1465 - protein, 11 aa, Artificial Sequence
  source: /note="Description of Artificial Sequence: Synthetic peptide"
AQTLPQPFKAQ

SEQ ID NO: 1466 - protein, 11 aa, Artificial Sequence
  source: /note="Description of Artificial Sequence: Synthetic peptide"
AQTLSQPFKAQ

SEQ ID NO: 1467 - protein, 11 aa, Artificial Sequence
  source: /note="Description of Artificial Sequence: Synthetic peptide"
AQTLQLPFKAQ

SEQ ID NO: 1468 - protein, 11 aa, Artificial Sequence
  source: /note="Description of Artificial Sequence: Synthetic peptide"
AQTLTMPFKAQ

SEQ ID NO: 1469 - protein, 11 aa, Artificial Sequence
  source: /note="Description of Artificial Sequence: Synthetic peptide"
AQTLTTPFKAQ

SEQ ID NO: 1470 - protein, 11 aa, Artificial Sequence
  source: /note="Description of Artificial Sequence: Synthetic peptide"
AQYTLSQGWAQ

SEQ ID NO: 1471 - protein, 11 aa, Artificial Sequence
  source: /note="Description of Artificial Sequence: Synthetic peptide"
AQMNATKNVAQ

SEQ ID NO: 1472 - protein, 11 aa, Artificial Sequence
  source: /note="Description of Artificial Sequence: Synthetic peptide"
AQVSGGHHSAQ

SEQ ID NO: 1473 - protein, 11 aa, Artificial Sequence
  source: /note="Description of Artificial Sequence: Synthetic peptide"
AQTLTAPFKAQ

SEQ ID NO: 1474 - protein, 11 aa, Artificial Sequence
  source: /note="Description of Artificial Sequence: Synthetic peptide"
AQTLSKPFKAQ

SEQ ID NO: 1475 - protein, 7 aa, Artificial Sequence
  source: /note="Description of Artificial Sequence: Synthetic peptide"
QAVRTSL

SEQ ID NO: 1476 - protein, 7 aa, Artificial Sequence
  source: /note="Description of Artificial Sequence: Synthetic peptide"
LAKERLS

SEQ ID NO: 1477 - protein, 7 aa, Artificial Sequence
  source: /note="Description of Artificial Sequence: Synthetic peptide"
MNSTKNV

SEQ ID NO: 1478 - protein, 7 aa, Artificial Sequence
  source: /note="Description of Artificial Sequence: Synthetic peptide"
VSGGHHS

SEQ ID NO: 1479 - protein, 14 aa, Artificial Sequence
  source: /note="Description of Artificial Sequence: Synthetic peptide"
SAQTLAVPFKAQAQ

SEQ ID NO: 1480 - protein, 14 aa, Artificial Sequence
  source: /note="Description of Artificial Sequence: Synthetic peptide"
  MOD_RES (2)..(4): Any amino acid
SXXXLAVPFKAQAQ

SEQ ID NO: 1481 - protein, 14 aa, Artificial Sequence
  source: /note="Description of Artificial Sequence: Synthetic peptide"
  MOD_RES (4)..(6): Any amino acid
SAQXXXVPFKAQAQ

SEQ ID NO: 1482 - protein, 14 aa, Artificial Sequence
  source: /note="Description of Artificial Sequence: Synthetic peptide"
  MOD_RES (6)..(8): Any amino acid
SAQTLXXXFKAQAQ

SEQ ID NO: 1483 - protein, 14 aa, Artificial Sequence
  source: /note="Description of Artificial Sequence: Synthetic peptide"
  MOD_RES (8)..(10): Any amino acid
SAQTLAVXXXAQAQ

SEQ ID NO: 1484 - protein, 14 aa, Artificial Sequence
  source: /note="Description of Artificial Sequence: Synthetic peptide"
  MOD_RES (10)..(12): Any amino acid
SAQTLAVPFXXXAQ

SEQ ID NO: 1485 - protein, 7 aa, Artificial Sequence
  source: /note="Description of Artificial Sequence: Synthetic peptide"
TNHQSAQ

SEQ ID NO: 1486 - protein, 7 aa, Artificial Sequence
  source: /note="Description of Artificial Sequence: Synthetic peptide"
AQAQTGW

SEQ ID NO: 1487 - protein, 9 aa, Artificial Sequence
  source: /note="Description of Artificial Sequence: Synthetic peptide"
DGTLATPFK

SEQ ID NO: 1488 - protein, 11 aa, Artificial Sequence
  source: /note="Description of Artificial Sequence: Synthetic peptide"
  MOD_RES (10)..(11): Any amino acid
DGTLATPFKXX

SEQ ID NO: 1489 - protein, 8 aa, Artificial Sequence
  source: /note="Description of Artificial Sequence: Synthetic peptide"
LAVPFKAQ

SEQ ID NO: 1490 - protein, 6 aa, Artificial Sequence
  source: /note="Description of Artificial Sequence: Synthetic peptide"
VPFKAQ

SEQ ID NO: 1491 - protein, 4 aa, Artificial Sequence
  source: /note="Description of Artificial Sequence: Synthetic peptide"
FKAQ

SEQ ID NO: 1492 - protein, 6 aa, Artificial Sequence
  source: /note="Description of Artificial Sequence: Synthetic peptide"
AQTLAV

SEQ ID NO: 1493 - protein, 8 aa, Artificial Sequence
  source: /note="Description of Artificial Sequence: Synthetic peptide"
AQTLAVPF

SEQ ID NO: 1494 - protein, 4 aa, Artificial Sequence
  source: /note="Description of Artificial Sequence: Synthetic peptide"
QAVR

SEQ ID NO: 1495 - protein, 4 aa, Artificial Sequence
  source: /note="Description of Artificial Sequence: Synthetic peptide"
AVRT

SEQ ID NO: 1496 - protein, 4 aa, Artificial Sequence
  source: /note="Description of Artificial Sequence: Synthetic peptide"
VRTS

SEQ ID NO: 1497 - protein, 4 aa, Artificial Sequence
  source: /note="Description of Artificial Sequence: Synthetic peptide"
RTSL

SEQ ID NO: 1498 - protein, 5 aa, Artificial Sequence
  source: /note="Description of Artificial Sequence: Synthetic peptide"
QAVRT

SEQ ID NO: 1499 - protein, 5 aa, Artificial Sequence
  source: /note="Description of Artificial Sequence: Synthetic peptide"
AVRTS

SEQ ID NO: 1500 - protein, 5 aa, Artificial Sequence
  source: /note="Description of Artificial Sequence: Synthetic peptide"
VRTSL

SEQ ID NO: 1501 - protein, 6 aa, Artificial Sequence
  source: /note="Description of Artificial Sequence: Synthetic peptide"
QAVRTS

SEQ ID NO: 1502 - protein, 6 aa, Artificial Sequence
  source: /note="Description of Artificial Sequence: Synthetic peptide"
AVRTSL

SEQ ID NO: 1503 - DNA, 33 bp, Artificial Sequence
  source: /note="Description of Artificial Sequence: Synthetic oligonucleotide"
gatgggactttggcggtgccttttaaggcacag

SEQ ID NO: 1504 - DNA, 33 bp, Artificial Sequence
  source: /note="Description of Artificial Sequence: Synthetic oligonucleotide"
gatgggacgttggcggtgccttttaaggcacag

SEQ ID NO: 1505 - DNA, 21 bp, Artificial Sequence
  source: /note="Description of Artificial Sequence: Synthetic oligonucleotide"
caggcggttaggacgtctttg

SEQ ID NO: 1506 - DNA, 27 bp, Artificial Sequence
  source: /note="Description of Artificial Sequence: Synthetic oligonucleotide"
caggtcttcacggactcagactatcag

SEQ ID NO: 1507 - DNA, 32 bp, Artificial Sequence
  source: /note="Description of Artificial Sequence: Synthetic oligonucleotide"
caagtaaaacctctacaaatgtggtaaaatcg

SEQ ID NO: 1508 - DNA, 36 bp, Artificial Sequence
  source: /note="Description of Artificial Sequence: Synthetic oligonucleotide"
actcatcgaccaatacttgtactatctctctagaac

SEQ ID NO: 1509 - DNA, 26 bp, Artificial Sequence
  source: /note="Description of Artificial Sequence: Synthetic oligonucleotide"
ggaagtattccttggttttgaaccca

SEQ ID NO: 1510 - DNA, 23 bp, Artificial Sequence
  source: /note="Description of Artificial Sequence: Synthetic oligonucleotide"
ggtcgcggttcttgtttgtggat

SEQ ID NO: 1511 - DNA, 24 bp, Artificial Sequence
  source: /note="Description of Artificial Sequence: Synthetic oligonucleotide"
cgaccttgaagcgcatgaactcct

SEQ ID NO: 1512 - DNA, 83 bp, Artificial Sequence
  source: /note="Description of Artificial Sequence: Synthetic oligonucleotide"
  modified_base (42)..(43): a, c, t, or g
  modified_base (45)..(46): a, c, t, or g
  modified_base (48)..(49): a, c, t, or g
  modified_base (51)..(52): a, c, t, or g
  modified_base (54)..(55): a, c, t, or g
  modified_base (57)..(58): a, c, t, or g
  modified_base (60)..(61): a, c, t, or g
gtattccttggttttgaacccaaccggtctgcgcctgtgcmnnmnnmnnmnnmnnmnnmnnttgggcactctggtggtttgtc

SEQ ID NO: 1513 - DNA, 64 bp, Artificial Sequence
  source: /note="Description of Artificial Sequence: Synthetic oligonucleotide"
  modified_base (36)..(37): a, c, t, or g
  modified_base (39)..(40): a, c, t, or g
  modified_base (42)..(43): a, c, t, or g
gtattccttggttttgaacccaaccggtctgcgcmnnmnnmnnaaaaggcaccgccaaagtttg

SEQ ID NO: 1514 - DNA, 70 bp, Artificial Sequence
  source: /note="Description of Artificial Sequence: Synthetic oligonucleotide"
  modified_base (42)..(43): a, c, t, or g
  modified_base (45)..(46): a, c, t, or g
  modified_base (48)..(49): a, c, t, or g
gtattccttggttttgaacccaaccggtctgcgcctgtgcmnnmnnmnncaccgccaaagtttgggcact

SEQ ID NO: 1515 - DNA, 77 bp, Artificial Sequence
  source: /note="Description of Artificial Sequence: Synthetic oligonucleotide"
  modified_base (48)..(49): a, c, t, or g
  modified_base (51)..(52): a, c, t, or g
  modified_base (54)..(55): a, c, t, or g
gtattccttggttttgaacccaaccggtctgcgcctgtgccttaaamnnmnnmnncaaagtttgggcactctggtgg

SEQ ID NO: 1516 - DNA, 83 bp, Artificial Sequence
  source: /note="Description of Artificial Sequence: Synthetic oligonucleotide"
  modified_base (54)..(55): a, c, t, or g
  modified_base (57)..(58): a, c, t, or g
  modified_base (60)..(61): a, c, t, or g
gtattccttggttttgaacccaaccggtctgcgcctgtgccttaaaaggcacmnnmnnmnnttgggcactctggtggtttgtg

SEQ ID NO: 1517 - DNA, 21 bp, Artificial Sequence
  source: /note="Description of Artificial Sequence: Synthetic oligonucleotide"
cttgcgaaggagcggctttcg

SEQ ID NO: 1518 - protein, 534 aa, Artificial Sequence
  source: /note="Description of Artificial Sequence: Synthetic polypeptide"
MAEGGGGAMGDSSGGADGVGNASGNWHCDSQWMGNTVITKTTRTWVLPSYNNHIYKAITSGTSQDANVQYAGYSTPWGYFDFNRFHCHFSPRDWQRLINNHWGIRPKSLKFKIFNVQVKEVTTQDQTKTIANNLTSTIQVFTDDEHQLPYVLGSATEGTMPPFPSDVYALPQYGYCTMHTNQNGARFNDRSAFYCLEYFPSQMLRTGNNFEFTFDFEEVPFHSMFAHSQDLDRLMNPLVDQYLWNFNEVDSSRNAQFKKAVKGAYGTMGRNWLPGPKFLDQRVRAYTGGTDNYANWNIWSNGNKVNLKDRQYLLQPGPVSATYTEGEASSLPAQNILGIAKDPYRSGSTTAGISDIMVTEEQEVAPTNGVGWKPYGRTVTNEQNTTTAPTSSDLDVLGALPGMVWQNRDIYLQGPIGAKIPKTDGKFHPSPNLGGFGLHNPPPQVFIKNTPVPADPPVEYVHQKWNSYITQYSTGQCTVEMVWELRKENSKRWNPEIQFTSNFSNRTSIMFAPNETGGYVEDRLIGTRYLTQNL

SEQ ID NO: 1519 - protein, 554 aa, Artificial Sequence
  source: /note="Description of Artificial Sequence: Synthetic polypeptide"
MTSVNSAEASTGAGGGGSNPVKSMWSEGATFSANSVTCTFSRQFLIPYDPEHHYKVFSPAASSCHNASGKEAKVCTISPIMGYSTPWRYLDFNALNLFFSPLEFQHLIENYGSIAPDALTVTISEIAVKDVTDKTGGGVQVTDSTTGRLCMLVDHEYKYPYVLGQGQDTLAPELPIWVYFPPQYAYLTVGDVNTQGISGDSKKLASEESAFYVLEHSSFQLLGTGGTATMSYKFPPVPPENLEGCSQHFYEMYNPLYGSRLGVPDTLGGDPKFRSLTHEDHAIQPQNFMPGPLVNSVSTKEGDSFNTGAGKALTGLSTGTSQNTRISLRPGPVSQPYHHWDTDKYVTGINAISHGQTTYGNAEDKEYQQGVGRFPNEKEQLKQLQGLNMHTYFPNKGTQQYTDQIERPLMVGSVWNRRALHYESQLWSKIPNLDDSFKTQFAALGGWGLHQPPPQIFLKILPQSGPIGGIKSMGITTLVQYAVGIMTVTMTFKLGPRKATGRWNPQPGVYPPHAAGHLPYVLYDPTATDAKQHHRHGYEKPEELWTAKSRVHPL

SEQ ID NO: 1520 - protein, 587 aa, Artificial Sequence
  source: /note="Description of Artificial Sequence: Synthetic polypeptide"
MSDGTSQPDGGNAVHSAARVERAADGPGGSGGGGSGGGGVGVSTGSYDNQTHYRFLGDGWVEITALATRLVHLNMPKSENYCRIRVHNTTDTSVKGNMAKDDAHEQIWTPWSLVDANAWGVWLQPSDWQYICNTMSQLNLVSLDQEIFNVVLKTVTEQDSGGQAIKIYNNDLTACMMVAVDSNNILPYTPAANSMETLGFYPWKPTIASPYRYYFCVDRDLSVTYENQEGTIEHNVMGTPKGMNSQFFTIENTQQITLLRTGDEFATGTYYFDTNPVKLTHTWQTNRQLGQPPLLSTFPEADTDAGTLTAQGSRHGATQMEVNWVSEAIRTRPAQVGFCQPHNDFEASRAGPFAAPKVPADVTQGMDREANGSVRYSYGKQHGENWAAHGPAPERYTWDETNFGSGRDTRDGFIQSAPLVVPPPLNGILTNANPIGTKNDIHFSNVFNSYGPLTTFSHPSPVYPQGQIWDKELDLEHKPRLHITAPFVCKNNAPGQMLVRLGPNLTDQYDPNGATLSRIVTYGTFFWKGKLTMRAKLRANTTWNPVYQVSVEDNGNSYMSVTKWLPTATGNMQSVPLITRPVARNTY

SEQ ID NO: 1521 - protein, 584 aa, Artificial Sequence
  source: /note="Description of Artificial Sequence: Synthetic polypeptide"
MSDGAVQPDGGQPAVRNERATGSGNGSGGGGGGGSGGVGISTGTFNNQTEFKFLENGWVEITANSSRLVHLNMPESENYKRVVVNNMDKTAVKGNMALDDIHVEIVTPWSLVDANAWGVWFNPGDWQLIVNTMSELHLVSFEQEIFNVVLKTVSESATQPPTKVYNNDLTASLMVALDSNNTMPFTPAAMRSETLGFYPWKPTIPTPWRYYFQWDRTLIPSHTGTSGTPTNVYHGTDPDDVQFYTIENSVPVHLLRTGDEFATGTFFFDCKPCRLTHTWQTNRALGLPPFLNSLPQSEGATNFGDIGVQQDKRRGVTQMGNTDYITEATIMRPAEVGYSAPYYSFEASTQGPFKTPIAAGRGGAQTDENQAADGDPRYAFGRQHGQKTTTTGETPERFTYIAHQDTGRYPEGDWIQNINFNLPVTNDNVLLPTDPIGGKTGINYTNIFNTYGPLTALNNVPPVYPNGQIWDKEFDTDLKPRLHINAPFVCQNNCPGQLFVKVAPNLTNQYDPDASANMSRIVTYSDFWWKGKLVFKAKLRASHTWNPIQQMSINVDNQFNYVPNNIGAMKIVYEKSQLAPRKLY

SEQ ID NO: 1522 - protein, 548 aa, Artificial Sequence
  source: /note="Description of Artificial Sequence: Synthetic polypeptide"
GVGISTGTFNNQTEFKFLENGWVEITANSSRLVHLNMPESENYRRVVVNNMDKTAVNGNMALDDIHAQIVTPWSLVDANAWGVWFNPGDWQLIVNTMSELHLVSFEQEIFNVVLKTVSESATQPPTKVYNNDLTASLMVALDSNNTMPFTPAAMRSETLGFYPWKPTIPTPWRYYFQWDRTLIPSHTGTSGTPTNIYHGTDPDDVQFYTIENSVPVHLLRTGDEFATGTFFFDCKPCRLTHTWQTNRALGLPPFLNSLPQSEGATNFGDIGVQQDKRRGVTQMGNTNYITEATIMRPAEVGYSAPYYSFEASTQGPFKTPIAAGRGGAQTDENQAADGNPRYAFGRQHGQKTTTTGETPERFTYIAHQDTGRYPEGDWIQNINFNLPVTNDNVLLPTDPIGGKTGINYTNIFNTYGPLTALNNVPPVYPNGQIWDKEFDTDLKPRLHVNAPFVCQNNCPGQLFVKVAPNLTNEYDPDASANMSRIVTYSDFWWKGKLVFKAKLRASHTWNPIQQMSINVDNQFNYVPSNIGGMKIVYEKSQLAPRKLY

SEQ ID NO: 1523 - protein, 736 aa, Artificial Sequence; identical to SEQ ID NO: 101
  source: /note="Description of Artificial Sequence: Synthetic polypeptide"

SEQ ID NO: 1524 - protein, 736 aa, Artificial Sequence; identical to SEQ ID NO: 96
  source: /note="Description of Artificial Sequence: Synthetic polypeptide"

SEQ ID NO: 1525 - protein, 736 aa, Artificial Sequence
  source: /note="Description of Artificial Sequence: Synthetic polypeptide"
MAADGYLPDWLEDTLSEGIRQWWKLKPGPPPPKPAERHKDDSRGLVLPGYKYLGPFNGLDKGEPVNEADAAALEHDKAYDRQLDSGDNPYLKYNHADAEFQERLKEDTSFGGNLGRAVFQAKKRVLEPLGLVEEPVKTAPGKKRPVEHSPVEEPDSSSGTGKAGQQPARKRLNFGQTGDADSVPDPQPLGQPPAAPSGLGTNTMATGSGAPMADNNEGADGVGNSSGNWHCDSTWMGDRVITTSTRTWALPTYNNHLYKQISSQSGASNDNHYFGYSTPWGYFDFNRFHCHFSPRDWQRLINNNWGFRPKRLNFKLFNIQVKEVTQNDGTTTIANNLTSTVQVFTDSEYQLPYVLGSAHQGCLPPFPADVFMVPQYGYLTLNNGSQAVGRSSFYCLEYFPSQMLRTGNNFTFSYTFEDVPFHSSYAHSQSLDRLMNPLIDQYLYYLSRTNTPSGTTTQSRLQFSQAGASDIRDQSRNWLPGPCYRQQRVSKTSADNNNSEYSWTGATKYHLNGRDSLVNPGPAMASHKDDEEKFFPQSGVLIFGKQGSEKTNVDIEKVMITDEEEIRTTNPVATEQYGSVSTNLQRGNRQAATADVNTQGVLPGMVWQDRDVYLQGPIWAKIPHTDGHFHPSPLMGGFGLKHPPPQILIKNTPVPANPSTTFSAAKFASFITQYSTGQVSVEIEWELQKENSKRWNPEIQYTSNYNKSVNVDFTVDTNGVYSEPRPIGTRYLTRNL

SEQ ID NO: 1526 - protein, 736 aa, Artificial Sequence
  source: /note="Description of Artificial Sequence: Synthetic polypeptide"
MAADGYLPDWLEDNLSEGIREWWDLKPGAPKPKANQQKQDDGRGLVLPGYKYLGPFNGLDKGEPVNAADAAALEHDKAYDQQLKAGDNPYLRYNHADAEFQERLQEDTSFGGNLGRAVFQAKKRVLEPFGLVEEGAKTAPGKKRPVEQSPQEPDSSSGIGKTGQQPAKKRLNFGQTGDSESVPDPQPLGEPPATPAAVGPTTMASGGGAPMADNNEGADGVGNASGNWHCDSTWLGDRVITTSTRTWALPTYNNHLYKQISSASTGASNDNHYFGYSTPWGYFDFNRFHCHFSPRDWQRLINNNWGFRPKRLNFKLFNVQVKEVTTNDGVTTIANNLTSTVQVFSDSEYQLPYVLGSAHQGCLPPFPADVFMIPQYGYLTLNNGSQAVGRSSFYCLEYFPSQMLRTGNNFTFSYTFEDVPFHSSYAHSQSLDRLMNPLIDQYLYYLNRTQDQSGSAQNKDLLFSRGSPAGMSVQPKNWLPGPCYRQQRVSKTKTDNNNSNFTWTGASKYNLNGRESIINPGTAMASHKDDKNKFFPMSGVMIFGKESAGASNTALDNVMITDEEEIKATNPVATERFGTVAVNLQSSSTDPATGDVHVMGALPGMVWQDRDVYLQGPIWAKIPHTDGHFHPSPLMGGFGLKNPPPQILIKNTPVPANPPAEFSATKFASFITQYSTGQVSVEIEWELQKENSKRWNPEVQYTSNYAKSANVDFTVDNNGLYTEPRPIGTRYLTRPL

SEQ ID NO: 1527 - protein, 737 aa, Artificial Sequence
  source: /note="Description of Artificial Sequence: Synthetic polypeptide"
MAADGYLPDWLEDTLSEGIRQWWKLKPGPPPPKPAERHKDDSRGLVLPGYKYLGPGNGLDKGEPVNAADAAALEHDKAYDQQLKAGDNPYLKYNHADAEFQERLKEDTSFGGNLGRAVFQAKKRVLEPLGLVEEGAKTAPGKKRPVEPSPQRSPDSSTGIGKKGQQPARKRLNFGQTGDSESVPDPQPLGEPPATPAAVGPTTMASGGGAPMADNNEGADGVGNASGNWHCDSTWLGDRVITTSTRTWALPTYNNHLYKQISSASTGASNDNHYFGYSTPWGYFDFNRFHCHFSPRDWQRLINNNWGFRPKRLNFKLFNIQVKEVTTNDGVTTIANNLTSTVQVFSDSEYQLPYVLGSAHQGCLPPFPADVFMIPQYGYLTLNNGSQAVGRSSFYCLEYFPSQMLRTGNNFTFSYTFEDVPFHSSYAHSQSLDRLMNPLIDQYLYYLNRTQNQSGSAQNKDLLFSRGSPAGMSVQPKNWLPGPCYRQQRVSKTKTDNNNSNFTWTGASKYNLNGRESIINPGTAMASHKDDKDKFFPMSGVMIFGKESAGASNTALDNVMITDEEEIKATNPVATERFGTVAVNLQSSSTDPATEDVHVMGALPGMVWQDRDVYLQGPIWAKIPHTDGHFHPSPLMGGFGLKNPPPQILIKNTPVPANPPAEFSATKFASFITQYSTGQVSVEIEWELQKENSKRWNPEVQYTSNYAKSANVDFTVDNNGLYTEPRPIGTRYLTRNL

SEQ ID NO: 1528 - protein, 736 aa, Artificial Sequence
  source: /note="Description of Artificial Sequence: Synthetic polypeptide"
MAADGYLPDWLEDNLSEGIREWWDLKPGAPKPKANQQKQDDGRGLVLPGYKYLGPFNGLDKGEPVNAADAAALEHDKAYDQQLKAGDNPYLRYNHADAEFQERLQEDTSFGGNLGRAVFQAKKRVLEPFGLVEEGAKTAPGKKRPVEQSPQEPDSSSGIGKTGQQPAKKRLNFGQTGDSESVPDPQPLGEPPATPAAVGPTTMASGGGAPMADNNEGADGVGNASGNWHCDSTWLGDRVITTSTRTWALPTYNNHLYKQISSASTGASNDNHYFGYSTPWGYFDFNRFHCHFSPRDWQRLINNNWGFRPKRLNFKLFNVQVKEVTTNDGVTTIANNLTSTVQVFSDSEYQLPYVLGSAHQGCLPPFPADVFMIPQYGYLTLNNGSQAVGRSSFYCLEYFPSQMLRTGNNFTFSYTFEDVPFHSSYAHSQSLDRLMNPLIDQYLYYLNRTQDQSGSAQNKDLLFSRGSPAGMSVQPKNWLPGPCYRQQRVSKTKTDNNNSNFTWTGASKYNLNGRESIINPGTAMASHKDDKNKFFPMSGVMIFGKESAGASNTALDNVMITDEEEIKATNPVATERFGTVAVNLQSSSTDPATGDVHVMGALPGMVWQDRDVYLQGPIWAKIPHTDGHFHPSPLMGGFGLKHPPPQILIKNTPVPANPPAEFSATKFASFITQYSTGQVSVEIEWELQKENSKRWNPEVQYTSNYAKSANVDFTVDNNGLYTEPRPIGTRYLTRPL

SEQ ID NO: 1529 - protein, 736 aa, Artificial Sequence
  source: /note="Description of Artificial Sequence: Synthetic polypeptide"
MAADGYLPDWLEDNLSEGIREWWDLKPGAPKPKANQQKQDDGRGLVLPGYKYLGPFNGLDKGEPVNAADAAALEHDKAYDQQLKAGDNPYLRYNHADAEFQERLQEDTSFGGNLGRAVFQAKKRVLEPFGLVEEGAKTAPGKKRPVEQSPQEPDSSSGIGKTGQQPAKKRLNFGQTGDSESVPDPQPLGEPPATPAAVGPTTMASGGGAPMADNNEGADGVGNASGNWHCDSTWLGDRVITTSTRTWALPTYNNHLYKQISSASTGASNDNHYFGYSTPWGYFDFNRFHCHFSPRDWQRLINNNWGFRPKRLNFKLFNVQVKEVTTNDGVTTIANNLTSTVQVFSDSEYQLPYVLGSAHQGCLPPFPADVFMIPQYGYLTLNNGSQAVGRSSFYCLEYFPSQMLRTGNNFTFSYTFEDVPFHSSYAHSQSLDRLMNPLIDQYLYYLNRTQDQSGSAQNKDLLFSRGSPAGMSVQPKNWLPGPCYRQQRVSKTKTDNNNSNFTWTGASKYNLNGRESIINPGTAMASHKDDKDKFFPMSGVMIFGKESAGASNTALDNVMITDEEEIKATNPVATERFGTVAVNLQSSSTDPATGDVHVMGALPGMVWQDRDVYLQGPIWAKIPHTDGHFHPSPLMGGFGLKHPPPQILIKNTPVPANPPAEFSATKFASFITQYSTGQVSVEIEWELQKENSKRWNPEVQYTSNYAKSANVDFTVDNNGLYTEPRPIGTRYLTRPL

SEQ ID NO: 1530 - protein, 736 aa, Artificial Sequence
  source: /note="Description of Artificial Sequence: Synthetic polypeptide"
MAADGYLPDWLEDNLSEGIREWWDLKPGAPKPKANQQKQDDGRGLVLPGYKYLGPFNGLDKGEPVNAADAAALEHDKAYDQQLKAGDNPYLRYNHADAEFQERLQEDTSFGGNLGRAVFQAKKRVLEPFGLVEEGAKTAPGKKRPVEQSPQEPDSSSGIGKTGQQPAKKRLNFGQTGDSESVPDPQPLGEPPATPAAVGPTTMASGGGAPMADNNEGADGVGNASGNWHCDSTWLGDRVITTSTRTWALPTYNNHLYKQISSASTGASNDNHYFGYSTPWGYFDFNRFHCHFSPRDWQRLINNNWGFRPKRLNFKLFNIQVKEVTTNDGVTTIANNLTSTVQVFSDSEYQLPYVLGSAHQGCLPPFPADVFMIPQYGYLTLNNGSQAVGRSSFYCLEYFPSQMLRTGNNFTFSYTFEDVPFHSSYAHSQSLDRLMNPLIDQYLYYLNRTQDQSGSAQNKDLLFSRGSPAGMSVQPKNWLPGPCYRQQRVSKTKTDNNNSNFTWTGASKYNLNGRESIINPGTAMASHKDDKNKFFPMSGVMIFGKESAGASNTALDNVMITDEEEIKATNPVATERFGTVAVNLQSSSTDPATGDVHVMGALPGMVWQDRDVYLQGPIWAKIPHTDGHFHPSPLMGGFGLKHPPPQILIKNTPVPANPPAEFSATKFASFITQYSTGQVSVEIEWELQKENSKRWNPEVQYTSNYAKSANVDFTVDNNGLYTEPRPIGTRYLTRPL

SEQ ID NO: 1531 - protein, 736 aa, Artificial Sequence
  source: /note="Description of Artificial Sequence: Synthetic polypeptide"
MAADGYLPDWLEDNLSEGIREWWDLKPGAPKPKANQQKQDDGRGLVLPGYKYLGPFNGLDKGEPVNAADAAALEHDKAYDQQLKAGDNPYLRYNHADAEFQERLQEDTSFGGNLGRAVFQAKKRVLEPFGLVEEGAKTAPGKKRPVEQSPQEPDSSSGIGKTGQQPAKKRLNFGQTGDSESVPDPQPLGEPPATPAAVGPTTMASGGGAPMADNNEGADGVGNASGNWHCDSTWLGDRVITTSTRTWALPTYNNHLYKQISSASTGASNDNHYFGYSTPWGYFDFNRFHCHFSPRDWQRLINNNWGFRPKRLNFKLFNVQVKEVTTNDGVTTIANNLTSTVQVFSDSEYQLPYVLGSAHQGCLPPFPADVFMIPQYGYLTLNNGSQAVGRSSFYCLEYFPSQMLRTGNNFTFSYTFEDVPFHSSYAHSQSLDRLMNPLIDQYLYYLNRTQNQSGSAQNKDLLFSRGSPAGMSVQPKNWLPGPCYRQQRVSKTKTDNNNSNFTWTGASKYNLNGRESIINPGTAMASHKDDKDKFFPMSGVMIFGKESAGASNTALDNVMITDEEEIKATNPVATERFGTVAVNLQSSSTDPATGDVHVMGALPGMVWQDRDVYLQGPIWAKIPHTDGHFHPSPLMGGFGLKHPPPQILIKNTPVPANPPAEFSATKFASFITQYSTGQVSVEIEWELQKENSKRWNPEVQYTSNYAKSANVDFTVDNNGLYTEPRPIGTRYLTRPL

SEQ ID NO: 1532 - protein, 736 aa, Artificial Sequence
  source: /note="Description of Artificial Sequence: Synthetic polypeptide"
MAADGYLPDWLEDNLSEGIREWWDLKPGAPKPKANQQKQDDGRGLVLPGYKYLGPFNGLDKGEPVNAADAAALEHDKAYDQQLKAGDNPYLRYNHADAEFQERLQEDTSFGGNLGRAVFQAKKRVLEPFGLVEEGAKTAPGKKRPVEQSPQEPDSSSGIGKTGQQPAKKRLNFGQTGDSESVPDPQPLGEPPATPAAVGPTTMASGGGAPMADNNEGADGVGNASGNWHCDSTWLGDRVITTSTRTWALPTYNNHLYKQISSASTGASNDNHYFGYSTPWGYFDFNRFHCHFSPRDWQRLINNNWGFRPKRLNFKLFNVQVKEVTTNDGVTTIANNLTSTVQVFSDSEYQLPYVLGSAHQGCLPPFPADVFMIPQYGYLTLNNGSQAVGRSSFYCLEYFPSQMLRTGNNFTFSYTFEDVPFHSSYAHSQSLDRLMNPLIDQYLYYLNRTQNQSGSAQNKDLLFSRGSPAGMSVQPKNWLPGPCYRQQRVSKTKTDNNNSNFTWTGASKYNLNGRESIINPGTAMASHKDDKNKFFPMSGVMIFGKESAGASNTALDNVMITDEEEIKATNPVATERFGTVAVNLQSSSTDPATGDVHVMGALPGMVWQDRDVYLQGPIWAKIPHTDGHFHPSPLMGGFGLKHPPPQILIKNTPVPANPPAEFSATKFASFITQYSTGQVSVEIEWELQKENSKRWNPEVQYTSNYAKSANVDFTVDNNGLYTEPRPIGTRYLTRPL

SEQ ID NO: 1533 - DNA, 2217 bp, Artificial Sequence
  source: /note="Description of Artificial Sequence: Synthetic polynucleotide"
atggctgccgatggttatcttccagattggctcgaggacaacctctctgagggcattcgcgagtggtgggacctgaaacctggagccccgaaacccaaagccaaccagcaaaagcaggacaacggccggggtctggtgcttcctggctacaagtacctcggacccttcaacggactcgacaagggggagcccgtcaacgcggcggacgcagcggccctcgagcacgacaaggcctacgaccagcagctccaagcgggtgacaatccgtacctgcggtataatcacgccgacgccgagtttcaggagcgtctgcaagaagatacgtcttttgggggcaacctcgggcgcgcagtcttccaggccaaaaagcgggttctcgaacctctgggcctggttgaatcgccggttaagacggctcctggaaagaagagaccggtagagccatcaccccagcgctctccagactcctctacgggcatcggcaagaaaggccagcagcccgcaaaaaagagactcaattttgggcagactggcgactcagagtcagtccccgaccctcaaccaatcggagaaccaccagcaggcccctctggtctgggatctggtacaatggctgcaggcggtggcgctccaatggcagacaataacgaaggcgccgacggagtgggtagttcctcaggaaattggcattgcgattccacatggctgggcgacagagtcatcaccaccagcacccgcacctgggccctgcccacctacaacaaccacctctacaagcaaatctccaacgggacctcgggaggaagcaccaacgacaacacctacttcggctacagcaccccctgggggtattttgacttcaacagattccactgccacttttcaccacgtgactggcagcgactcatcaacaacaactggggattccggcccaagaggctcaacttcaagctcttcaacatccaagtcaaggaggtcacgcagaatgaaggcaccaagaccatcgccaataaccttaccagcacgattcaggtctttacggactcggaataccagctcccgtacgtgctcggctcggcgcaccagggctgcctgcctccgttcccggcggacgtcttcatgattcctcagtacgggtacctgactctgaacaatggcagtcaggctgtgggccggtcgtccttctactgcctggagtactttccttctcaaatgctgagaacgggcaacaactttgaattcagctacaacttcgaggacgtgcccttccacagcagctacgcgcacagccagagcctggaccggctgatgaaccctctcatcgaccagtacttgtactacctgtcccggactcaaagcacgggcggtactgcaggaactcagcagttgctattttctcaggccgggcctaacaacatgtcggctcaggccaagaactggctacccggtccctgctaccggcagcaacgcgtctccacgacactgtcgcagaacaacaacagcaactttgcctggacgggtgccaccaagtatcatctgaatggcagagactctctggtgaatcctggcgttgccatggctacccacaaggacgacgaagagcgattttttccatccagcggagtcttaatgtttgggaaacagggagctggaaaagacaacgtggactatagcagcgtgatgctaaccagcgaggaagaaataaagaccaccaacccagtggccacagaacagtacggcgtggtggccgataacctgcaacagcaaaacgccgctcctattgtaggggccgtcaatagtcaaggagccttacctggcatggtgtggcagaaccgggacgtgtacctgcagggtcccatctgggccaagattcctcatacggacggcaactttcatccctcgccgctgatgggaggctttggactgaagcatccgcctcctcagatcctgattaaaaacacacctgttcccgcggatcctccgaccaccttcaatcaggccaagctggcttctttcatcacgcagtacagtaccggccaggtcagcgtggagatcgagtgggagctgcagaaggagaacagcaaacgctggaacccagagattcagtacacttccaactactacaaatctacaaatgtggactttgctgtcaatactgagggtacttattccgagcctcgccccattggcacccgttacctcacccgtaatctgtaa

SEQ ID NO: 1534 - protein, 738 aa, Artificial Sequence
  source: /note="Description of Artificial Sequence: Synthetic polypeptide"
MAADGYLPDWLEDNLSEGIREWWDLKPGAPKPKANQQKQDNGRGLVLPGYKYLGPFNGLDKGEPVNAADAAALEHDKAYDQQLQAGDNPYLRYNHADAEFQERLQEDTSFGGNLGRAVFQAKKRVLEPLGLVESPVKTAPGKKRPVEPSPQRSPDSSTGIGKKGQQPAKKRLNFGQTGDSESVPDPQPIGEPPAGPSGLGSGTMAAGGGAPMADNNEGADGVGSSSGNWHCDSTWLGDRVITTSTRTWALPTYNNHLYKQISNGTSGGSTNDNTYFGYSTPWGYFDFNRFHCHFSPRDWQRLINNNWGFRPKRLNFKLFNIQVKEVTQNEGTKTIANNLTSTIQVFTDSEYQLPYVLGSAHQGCLPPFPADVFMIPQYGYLTLNNGSQAVGRSSFYCLEYFPSQMLRTGNNFEFSYNFEDVPFHSSYAHSQSLDRLMNPLIDQYLYYLSRTQSTGGTAGTQQLLFSQAGPNNMSAQAKNWLPGPCYRQQRVSTTLSQNNNSNFAWTGATKYHLNGRDSLVNPGVAMATHKDDEERFFPSSGVLMFGKQGAGKDNVDYSSVMLTSEEEIKTTNPVATEQYGVVADNLQQQNAAPIVGAVNSQGALPGMVWQNRDVYLQGPIWAKIPHTDGNFHPSPLMGGFGLKHPPPQILIKNTPVPADPPTTFNQAKLASFITQYSTGQVSVEIEWELQKENSKRWNPEIQYTSNYYKSTNVDFAVNTEGTYSEPRPIGTRYLTRNL

SEQ ID NO: 1535 - protein, 738 aa, Artificial Sequence; identical to SEQ ID NO: 1534
  source: /note="Description of Artificial Sequence: Synthetic polypeptide"

SEQ ID NO: 1536 - DNA, 4472 bp, Artificial Sequence
  source: /note="Description of Artificial Sequence: Synthetic polynucleotide"
ctccatcactaggggtaaccgcgaagcgcctcccacgctgccgcgtcagcgctgacgtaaattacgtcataggggagtggtcctgtattagctgtcacgtgagtgcttttgcgacattttgcgacaccacgtggccattcatggtatatatggccgagtgagcgagcaggatctccattttgaccgcgaaatttgaacgagcagcagccatgccgggcttctacgagatcgtgcttaaggtgccgagcgacctggacgagcacctgccgggcatttctgactcgtttgtgaactgggtggcagagaaggaatgggagctgcccccggattctgacatggatcggaatctgattgagcaggcacccctgaccgtggccgagaagctacagcgcgacttcctggtccaatggcgccgcgtgagtaaggccccggaggccctcttctttgttcagttcgagaagggcgagtcctacttccacctccatattctggtagagaccacgggggtcaaatccatggtgctgggccgcttcctgagtcagattcgggacaagctggtgcagaccatctaccgcgggatcgagccgaccctgcccaactggttcgcggtgacaaagacgcgtaatggcgccggaggggggaacaaggtggtggacgagtgctacatccccaactacctgctgcccaagactcagcccgagctgcagtgggcgtggactaacatggaggagtatataagcgcgtgcttgaacctggccgagcgcaaacggctcgtggcgcagcacctgacccacgtcagccagacccaggagcagaacaaggagaatctgaacccgaattctgacgcgcctgtcatccggtcaaaaacctccgcgcgctacatggagctggtcgggtggctggtggaccggggcatcacctccgagaagcagtggatccaggaggaccaggcctcgtacatctccttcaacgccgcctccaactcgcggtctcagatcaaggccgcgctggacaatgccggcaagatcatggcgctgaccaaatccgcgcccgactacctggtaggccccgctctgcccgcggacattaaatccaaccgcatctaccgcatcctggagctgaatggctacgaccctgcctacgccggttccgtctttctcggctgggcccagaaaaagtttggcaaaaggaacaccatctggctgtttgggccggccaccacgggcaagaccaacatcgcggaagccatcgcccacgccgtgcccttctacggctgcgtcaactggaccaatgagaactttcccttcaacgattgcgtcgacaagatggtgatctggtgggaggagggcaagatgacggccaaggtcgtggagtccgccaaggccattctcggcggcagcaaggtgcgcgtggaccaaaagtgcaagtcgtccgcccagatcgatcccacccccgtgatcgtcacctccaacaccaacatgtgcgccgtgattgacgggaacagcaccaccttcgagcaccagcagccgttgcaggaccggatgttcaaatttgaacttacccgccgtctggagcacgactttggcaaggtgacaaagcaggaagtcaaagagttcttccgctgggcgcaggatcacgtgaccgaggtggcgcatgagttctacgtcagaaagggtggagctaacaaaagacccgcccccgatgacgcggatataagcgagcccaagcgggcctgcccctcagtcgcggatccatcgacgtcagacgcggaaggagctccggtggactttgccgacaggtaccaaaacaaatgttctcgtcacgcgggcatgcttcagatgctgtttccctgcaaaacatgcgagagaatgaatcagaatttcaacatttgcttcacgcacgggaccagagactgttcagaatgtttccctggcgtgtcagaatctcaaccggtcgtcagaaaaaagacgtatcggaaactctgtgcgattcatcatctgctggggcgggcacccgagattgcttgctcggcctgcgacctggtcaacgtggacctggatgactgtgtttctgagcaataaatgacttaaaccaggtatggctgccgatggttatcttccagattggctcgaggacaacctctctgagggcattcgcgagtggtgggacctgaaacctggagccccgaaacccaaagccaaccagcaaaagcaggacaacggccggggtctggtgcttcctggctacaagtacctcggacccttcaacggactcgacaagggggagcccgtcaacgcggcggacgcagcggccctcgagcacgacaaggcctacgaccagcagctccaagcgggtgacaatccgtacctgcggtataatcacgccgacgccgagtttcaggagcgtctgcaagaagatacgtcttttgggggcaacctcgggcgcgcagtcttccaggccaaaaagcgggttctcgaacctctgggcctggttgaatcgccggttaagacggctcctggaaagaagagaccggtagagccatcaccccagcgctctccagactcctctacgggcatcggcaagaaaggccagcagcccgcaaaaaagagactcaattttgggcagactggcgactcagagtcagtccccgaccctcaaccaatcggagaaccaccagcaggcccctctggtctgggatctggtacaatggctgcaggcggtggcgctccaatggcagacaataacgaaggcgccgacggagtgggtagttcctcaggaaattggcattgcgattccacatggctgggcgacagagtcatcaccaccagcacccgcacctgggccctgcccacctacaacaaccacctctacaagcaaatctccaacgggacctcgggaggaagcaccaacgacaacacctacttcggctacagcaccccctgggggtattttgacttcaacagattccactgccacttttcaccacgtgactggcagcgactcatcaacaacaactggggattccggcccaagaggctcaacttcaagctcttcaacatccaagtcaaggaggtcacgcagaatgaaggcaccaagaccatcgccaataaccttaccagcacgattcaggtctttacggactcggaataccagctcccgtacgtgctcggctcggcgcaccagggctgcctgcctccgttcccggcggacgtcttcatgattcctcagtacgggtacctgactctgaacaatggcagtcaggctgtgggccggtcgtccttctactgcctggagtactttccttctcaaatgctgagaacgggcaacaactttgaattcagctacaacttcgaggacgtgcccttccacagcagctacgcgcacagccagagcctggaccggctgatgaaccctctcatcgaccagtacttgtactacctgtcccggactcaaagcacgggcggtactgcaggaactcagcagttgctattttctcaggccgggcctaacaacatgtcggctcaggccaagaactggctacccggtccctgctaccggcagcaacgcgtctccacgacactgtcgcagaacaacaacagcaactttgcctggacgggtgccaccaagtatcatctgaatggcagagactctctggtgaatcctggcgttgccatggctacccacaaggacgacgaagagcgattttttccatccagcggagtcttaatgtttgggaaacagggagctggaaaagacaacgtggactatagcagcgtgatgctaaccagcgaggaagaaataaagaccaccaacccagtggccacagaacagtacggcgtggtggccgataacctgcaacagcaaaacgccgctcctattgtaggggccgtcaatagtcaaggagccttacctggcatggtgtggcagaaccgggacgtgtacctgcagggtcccatctgggccaagattcctcatacggacggcaactttcatccctcgccgctgatgggaggctttggactgaagcatccgcctcctcagatcctgattaaaaacacacctgttcccgcggatcctccgaccaccttcaatcaggccaagctggcttctttcatcacgcagtacagtaccggccaggtcagcgtggagatcgagtgggagctgcagaaggagaacagcaaacgctggaacccagagattcagtacacttccaactactacaaatctacaaatgtggactttgctgtcaatactgagggtacttattccgagcctcgccccattggcacccgttacctcacccgtaatctgtaattacatgttaatcaataaaccggttaattcgtttcagttgaactttggtctcctgtccttcttatcttatcggttaccatagaaactggttacttattaactgcttggtgcgcttcgcgataaaagacttacgtcatcgggttacccctagtgatgga

SEQ ID NO: 1537 - protein, 738 aa, Artificial Sequence
  source: /note="Description of Artificial Sequence: Synthetic polypeptide"
MAADGYLPDWLEDNLSEGIREWWDLKPGAPKPKANQQKQDNGRGLVLPGYKYLGPFNGLDKGEPVNAADAAALEHDKAYDQQLQAGDNPYLRYNHADAEFQERLQEDTSFGGNLGRAVFQAKKRVLEPLGLVESPVKTAPGKKRPVEPSPQRSPDSSTGIGKKGQQPAKKRLNFGQTGDSESVPDPQPIGEPPAAPSGVGPNTMAAGGGAPMADNNEGADGVGSSSGNWHCDSTWLGDRVITTSTRTWALPTYNNHLYKQISNGTSGGSTNDNTYFGYSTPWGYFDFNRFHCHFSPRDWQRLINNNWGFRPKRLNFKLFNIQVKEVTQNEGTKTIANNLTSTIQVFTDSEYQLPYVLGSAHQGCLPPFPADVFMIPQYGYLTLNNGSQAVGRSSFYCLEYFPSQMLRTGNNFEFSYNFEDVPFHSSYAHSQSLDRLMNPLIDQYLYYLSRTQSTGGTAGTQQLLFSQAGPNNMSAQAKNWLPGPCYRQQRVSTTLSQNNNSNFAWTGATKYHLNGRDSLVNPGVAMATHKDDEERFFPSSGVLMFGKQGAGKDNVDYSSVMLTSEEEIKTTNPVATEQYGVVADNLQQQNAAPIVGAVNSQGALPGMVWQNRDVYLQGPIWAKIPHTDGNFHPSPLMGGFGLKHPPPQILIKNTPVPADPPTTFNQAKLASFITQYSTGQVSVEIEWELQKENSKRWNPEIQYTSNYYKSTNVDFAVNTEGTYSEPRPIGTRYLTRNL

SEQ ID NO: 1538 - protein, 738 aa, Artificial Sequence
  source: /note="Description of Artificial Sequence: Synthetic polypeptide"
MAADGYLPDWLEDNLSEGIREWWDLKPGAPKPKANQQRQDNGRGLVLPGYRYLGPFNGLDKGEPVNAADAAALEHDRAYDQQLQAGDNPYLRYNHADAEFQERLQEDTSFGGNLGRAVFQAKKRVLEPLGLVESPVRTAPGKKRPVEPSPQRSPDSSTGIGKKGQQPARKRLNFGQTGDSESVPDPQPIGEPPAAPSGVGPNTMAAGGGAPMADNNEGADGVGSSSGNWHCDSTWLGDRVITTSTRTWALPTYNNHLYRQISNGTSGGSTNDNTYFGYSTPWGYFDFNRFHCHFSPRDWQRLINNNWGFRPKRLNFKLFNIQVKEVTQNEGTRTIANNLTSTIQVFTDSEYQLPYVLGSAHQGCLPPFPADVFMIPQYGYLTLNNGSQAVGRSSFYCLEYFPSQMLRTGNNFEFSYNFEDVPFHSSYAHSQSLDRLMNPLIDQYLYYLSRTQSTGGTAGTQQLLFSQAGPNNMSAQAKNWLPGPCYRQQRVSTTLSQNNNSNFAWTGATKYHLNGRDSLVNPGVAMATHRDDEERFFPSSGVLMFGRQGAGRDNVDYSSVMLTSEEEIRTTNPVATEQYGVVADNLQQQNAAPIVGAVNSQGALPGMVWQNRDVYLQGPIWAKIPHTDGNFHPSPLMGGFGLKHPPPQILIKNTPVPADPPTTFNQAKLASFITQYSTGQVSVEIEWELQKENSKRWNPEIQYTSNYYKSTNVDFAVNTEGTYSEPRPIGTRYLTRNL

SEQ ID NO: 1539 - protein, 738 aa, Artificial Sequence
  source: /note="Description of Artificial Sequence: Synthetic polypeptide"
MAADGYLPDWLEDNLSEGIREWWDLKPGAPKPKANQQRQDNGRGLVLPGYRYLGPFNGLDKGEPVNAADAAALEHDRAYDQQLQAGDNPYLRYNHADAEFQERLQEDTSFGGNLGRAVFQAKKRVLEPLGLVESPVRTAPGKKRPVEPSPQRSPDSSTGIGKRGQQPARKRLNFGQTGDSESVPDPQPIGEPPAAPSGVGPNTMAAGGGAPMADNNEGADGVGSSSGNWHCDSTWLGDRVITTSTRTWALPTYNNHLYRQISNGTSGGSTNDNTYFGYSTPWGYFDFNRFHCHFSPRDWQRLINNNWGFRPKRLNFKLFNIQVKEVTQNEGTRTIANNLTSTIQVFTDSEYQLPYVLGSAHQGCLPPFPADVFMIPQYGYLTLNNGSQAVGRSSFYCLEYFPSQMLRTGNNFEFSYNFEDVPFHSSYAHSQSLDRLMNPLIDQYLYYLSRTQSTGGTAGTQQLLFSQAGPNNMSAQAKNWLPGPCYRQQRVSTTLSQNNNSNFAWTGATKYHLNGRDSLVNPGVAMATHRDDEERFFPSSGVLMFGKQGAGRDNVDYSSVMLTSEEEIRTTNPVATEQYGVVADNLQQQNAAPIVGAVNSQGALPGMVWQNRDVYLQGPIWAKIPHTDGNFHPSPLMGGFGLKHPPPQILIKNTPVPADPPTTFNQAKLASFITQYSTGQVSVEIEWELQKENSKRWNPEIQYTSNYYKSTNVDFAVNTEGTYSEPRPIGTRYLTRNL

SEQ ID NO: 1540 - protein, 738 aa, Artificial Sequence
  source: /note="Description of Artificial Sequence: Synthetic polypeptide"
MAADGYLPDWLEDNLSEGIREWWDLKPGAPKPKANQQRQDNGRGLVLPGYRYLGPFNGLDKGEPVNAADAAALEHDRAYDQQLQAGDNPYLRYNHADAEFQERLQEDTSFGGNLGRAVFQAKKRVLEPLGLVESPVRTAPGKKRPVEPSPQRSPDSSTGIGKRGQQPAKKRLNFGQTGDSESVPDPQPIGEPPAAPSGVGPNTMAAGGGAPMADNNEGADGVGSSSGNWHCDSTWLGDRVITTSTRTWALPTYNNHLYRQISNGTSGGSTNDNTYFGYSTPWGYFDFNRFHCHFSPRDWQRLINNNWGFRPKRLNFKLFNIQVKEVTQNEGTRTIANNLTSTIQVFTDSEYQLPYVLGSAHQGCLPPFPADVFMIPQYGYLTLNNGSQAVGRSSFYCLEYFPSQMLRTGNNFEFSYNFEDVPFHSSYAHSQSLDRLMNPLIDQYLYYLSRTQSTGGTAGTQQLLFSQAGPNNMSAQAKNWLPGPCYRQQRVSTTLSQNNNSNFAWTGATKYHLNGRDSLVNPGVAMATHRDDEERFFPSSGVLMFGRQGAGRDNVDYSSVMLTSEEEIRTTNPVATEQYGVVADNLQQQNAAPIVGAVNSQGALPGMVWQNRDVYLQGPIWAKIPHTDGNFHPSPLMGGFGLKHPPPQILIKNTPVPADPPTTFNQAKLASFITQYSTGQVSVEIEWELQKENSKRWNPEIQYTSNYYKSTNVDFAVNTEGTYSEPRPIGTRYLTRNL

SEQ ID NO: 1541 - protein, 738 aa, Artificial Sequence
  source: /note="Description of Artificial Sequence: Synthetic polypeptide"
MAADGYLPDWLEDNLSEGIREWWDLKPGAPKPKANQQRQDNGRGLVLPGYRYLGPFNGLDKGEPVNAADAAALEHDRAYDQQLQAGDNPYLRYNHADAEFQERLQEDTSFGGNLGRAVFQAKKRVLEPLGLVESPVRTAPGKKRPVEPSPQRSPDSSTGIGKRGQQPAKKRLNFGQTGDSESVPDPQPIGEPPAAPSGVGPNTMAAGGGAPMADNNEGADGVGSSSGNWHCDSTWLGDRVITTSTRTWALPTYNNHLYRQISNGTSGGSTNDNTYFGYSTPWGYFDFNRFHCHFSPRDWQRLINNNWGFRPKRLNFKLFNIQVKEVTQNEGTRTIANNLTSTIQVFTDSEYQLPYVLGSAHQGCLPPFPADVFMIPQYGYLTLNNGSQAVGRSSFYCLEYFPSQMLRTGNNFEFSYNFEDVPFHSSYAHSQSLDRLMNPLIDQYLYYLSRTQSTGGTAGTQQLLFSQAGPNNMSAQAKNWLPGPCYRQQRVSTTLSQNNNSNFAWTGATKYHLNGRDSLVNPGVAMATHRDDEERFFPSSGVLMFGKQGAGRDNVDYSSVMLTSEEEIRTTNPVATEQYGVVADNLQQQNAAPIVGAVNSQGALPGMVWQNRDVYLQGPIWAKIPHTDGNFHPSPLMGGFGLKHPPPQILIKNTPVPADPPTTFNQARLASFITQYSTGQVSVEIEWELQKENSKRWNPEIQYTSNYYKSTNVDFAVNTEGTYSEPRPIGTRYLTRNL

SEQ ID NO: 1542 - protein, 738 aa, Artificial Sequence
  source: /note="Description of Artificial Sequence: Synthetic polypeptide"
MAADGYLPDWLEDNLSEGIREWWDLKPGAPKPKANQQRQDNGRGLVLPGYRYLGPFNGLDKGEPVNAADAAALEHDRAYDQQLQAGDNPYLRYNHADAEFQERLQEDTSFGGNLGRAVFQAKKRVLEPLGLVESPVRTAPGKKRPVEPSPQRSPDSSTGIGKKGQQPAKKRLNFGQTGDSESVPDPQPIGEPPAAPSGVGPNTMAAGGGAPMADNNEGADGVGSSSGNWHCDSTWLGDRVITTSTRTWALPTYNNHLYRQISNGTSGGSTNDNTYFGYSTPWGYFDFNRFHCHFSPRDWQRLINNNWGFRPKRLNFKLFNIQVKEVTQNEGTRTIANNLTSTIQVFTDSEYQLPYVLGSAHQGCLPPFPADVFMIPQYGYLTLNNGSQAVGRSSFYCLEYFPSQMLRTGNNFEFSYNFEDVPFHSSYAHSQSLDRLMNPLIDQYLYYLSRTQSTGGTAGTQQLLFSQAGPNNMSAQAKNWLPGPCYRQQRVSTTLSQNNNSNFAWTGATKYHLNGRDSLVNPGVAMATHRDDEERFFPSSGVLMFGRQGAGRDNVDYSSVMLTSEEEIRTTNPVATEQYGVVADNLQQQNAAPIVGAVNSQGALPGMVWQNRDVYLQGPIWAKIPHTDGNFHPSPLMGGFGLKHPPPQILIKNTPVPADPPTTFNQARLASFITQYSTGQVSVEIEWELQKENSKRWNPEIQYTSNYYKSTNVDFAVNTEGTYSEPRPIGTRYLTRNL

SEQ ID NO: 1543 - DNA, 2214 bp, Artificial Sequence
  source: /note="Description of Artificial Sequence: Synthetic polynucleotide"
atggctgccgatggttatcttccagattggctcgaggacaacctctctgagggcattcgcgagtggtgggacctgaaacctggagccccgaaacccaaagccaaccagcaaaagcaggacaacggccggggtctggtgcttcctggctacaagtacctcggacccttcaacggactcgacaagggggagcccgtcaacgcggcggacgcagcggccctcgagcacgacaaggcctacgaccagcagctccaagcgggtgacaatccgtacctgcggtataatcacgccgacgccgagtttcaggagcgtctgcaagaagatacgtcttttgggggcaacctcgggcgcgcagtcttccaggccaaaaagcgggttctcgaacctctgggcctggttgaatcgccggttaagacggctcctggaaagaagagaccggtagagccatcaccccagcgctctccagactcctctacgggcatcggcaagaaaggccagcagcccgcaaaaaagagactcaattttgggcagactggcgactcagagtcagtccccgaccctcaaccaatcggagaaccaccagcagccccctctggtgtgggacctaatacaatggctgcaggcggtggcgctccaatggcagacaataacgaaggcgccgacggagtgggtagttcctcaggaaattggcattgcgattccacatggctgggcgacagagtcatcaccaccagcacccgcacctgggccctgcccacctacaacaaccacctctacaagcaaatctccaacgggacctcgggaggaagcaccaacgacaacacctacttcggctacagcaccccctgggggtattttgacttcaacagattccactgccacttttcaccacgtgactggcagcgactcatcaacaacaactggggattccggcccaagaggctcaacttcaagctcttcaacatccaagtcaaggaggtcacgcagaatgaaggcaccaagaccatcgccaataaccttaccagcacgattcaggtctttacggactcggaataccagctcccgtacgtgctcggctcggcgcaccagggctgcctgcctccgttcccggcggacgtcttcatgattcctcagtacgggtacctgactctgaacaatggcagtcaggctgtgggccggtcgtccttctactgcctggagtactttccttctcaaatgctgagaacgggcaacaactttgaattcagctacaacttcgaggacgtgcccttccacagcagctacgcgcacagccagagcctggaccggctgatgaaccctctcatcgaccagtacttgtactacctgtcccggactcaaagcacgggcggtactgcaggaactcagcagttgctattttctcaggccgggcctaacaacatgtcggctcaggccaagaactggctacccggtccctgctaccggcagcaacgcgtctccacgacactgtcgcagaacaacaacagcaactttgcctggacgggtgccaccaagtatcatctgaatggcagagactctctggtgaatcctggcgttgccatggctacccacaaggacgacgaagagcgattttttccatccagcggagtcttaatgtttgggaaacagggagctggaaaagacaacgtggactatagcagcgtgatgctaaccagcgaggaagaaataaagaccaccaacccagtggccacagaacagtacggcgtggtggccgataacctgcaacagcaaaacgccgctcctattgtaggggccgtcaatagtcaaggagccttacctggcatggtgtggcagaaccgggacgtgtacctgcagggtcccatctgggccaagattcctcatacggacggcaactttcatccctcgccgctgatgggaggctttggactgaagcatccgcctcctcagatcctgattaaaaacacacctgttcccgcggatcctccgaccaccttcaatcaggccaagctggcttctttcatcacgcagtacagtaccggccaggtcagcgtggagatcgagtgggagctgcagaaggagaacagcaaacgctggaacccagagattcagtacacttccaactactacaaatctacaaatgtggactttgctgtcaatactgagggtacttattccgagcctcgccccattggcacccgttacctcacccgtaatctg

SEQ ID NO: 1544 - DNA, 2217 bp, Artificial Sequence
  source: /note="Description of Artificial Sequence: Synthetic polynucleotide"
atggctgccgatggttatcttccagattggctcgaggacaacctctctgagggcattcgcgagtggtgggacctgaaacctggagccccgaaacccaaagccaaccagcaaaggcaggacaacggccggggtctggtgcttcctggctacaggtacctcggacccttcaacggactcgacaagggggagcccgtcaacgcggcggacgcagcggccctcgagcacgacagggcctacgaccagcagctccaagcgggtgacaatccgtacctgcggtataatcacgccgacgccgagtttcaggagcgtctgcaagaagatacgtcttttgggggcaacctcgggcgcgcagtcttccaggccaaaaagcgggttctcgaacctctgggcctggttgaatcgccggttaggacggctcctggaaagaagagaccggtagagccatcaccccagcgctctccagactcctctacgggcatcggcaagaaaggccagcagcccgcaagaaagagactcaattttgggcagactggcgactcagagtcagtccccgaccctcaaccaatcggagaaccaccagcagccccctctggtgtgggacctaatacaatggctgcaggcggtggcgctccaatggcagacaataacgaaggcgccgacggagtgggtagttcctcaggaaattggcattgcgattccacatggctgggcgacagagtcatcaccaccagcacccgcacctgggccctgcccacctacaacaaccacctctacaggcaaatctccaacgggacctcgggaggaagcaccaacgacaacacctacttcggctacagcaccccctgggggtattttgacttcaacagattccactgccacttttcaccacgtgactggcagcgactcatcaacaacaactggggattccggcccaagaggctcaacttcaagctcttcaacatccaagtcaaggaggtcacgcagaatgaaggcaccaggaccatcgccaataaccttaccagcacgattcaggtctttacggactcggaataccagctcccgtacgtgctcggctcggcgcaccagggctgcctgcctccgttcccggcggacgtcttcatgattcctcagtacgggtacctgactctgaacaatggcagtcaggctgtgggccggtcgtccttctactgcctggagtactttccttctcaaatgctgagaacgggcaacaactttgaattcagctacaacttcgaggacgtgcccttccacagcagctacgcgcacagccagagcctggaccggctgatgaaccctctcatcgaccagtacttgtactacctgtcccggactcaaagcacgggcggtactgcaggaactcagcagttgctattttctcaggccgggcctaacaacatgtcggctcaggccaagaactggctacccggtccctgctaccggcagcaacgcgtctccacgacactgtcgcagaacaacaacagcaactttgcctggacgggtgccaccaagtatcatctgaatggcagagactctctggtgaatcctggcgttgccatggctacccacagggacgacgaagagcgattttttccatccagcggagtcttaatgtttgggagacagggagctggaagagacaacgtggactatagcagcgtgatgctaaccagcgaggaagaaataaggaccaccaacccagtggccacagaacagtacggcgtggtggccgataacctgcaacagcaaaacgccgctcctattgtaggggccgtcaatagtcaaggagccttacctggcatggtgtggcagaaccgggacgtgtacctgcagggtcccatctgggccaagattcctcatacggacggcaactttcatccctcgccgctgatgggaggctttggactgaagcatccgcctcctcagatcctgattaaaaacacacctgttcccgcggatcctccgaccaccttcaatcaggccaagctggcttctttcatcacgcagtacagtaccggccaggtcagcgtggagatcgagtgggagctgcagaaggagaacagcaaacgctggaacccagagattcagtacacttccaactactacaaatctacaaatgtggactttgctgtcaatactgagggtacttattccgagcctcgccccattggcacccgttacctcacccgtaatctgtaa

SEQ ID NO: 1545 - DNA, 2217 bp, Artificial Sequence
  source: /note="Description of Artificial Sequence: Synthetic polynucleotide"
atggctgccgatggttatcttccagattggctcgaggacaacctctctgagggcattcgcgagtggtgggacctgaaacctggagccccgaaacccaaagccaaccagcaaaggcaggacaacggccggggtctggtgcttcctggctacaggtacctcggacccttcaacggactcgacaagggggagcccgtcaacgcggcggacgcagcggccctcgagcacgacagggcctacgaccagcagctccaagcgggtgacaatccgtacctgcggtataatcacgccgacgccgagtttcaggagcgtctgcaagaagatacgtcttttgggggcaacctcgggcgcgcagtcttccaggccaaaaagcgggttctcgaacctctgggcctggttgaatcgccggttaggacggctcctggaaagaagagaccggtagagccatcaccccagcgctctccagactcctctacgggcatcggcaagagaggccagcagcccgcaagaaagagactcaattttgggcagactggcgactcagagtcagtccccgaccctcaaccaatcggagaaccaccagcagccccctctggtgtgggacctaatacaatggctgcaggcggtggcgctccaatggcagacaataacgaaggcgccgacggagtgggtagttcctcaggaaattggcattgcgattccacatggctgggcgacagagtcatcaccaccagcacccgcacctgggccctgcccacctacaacaaccacctctacaggcaaatctccaacgggacctcgggaggaagcaccaacgacaacacctacttcggctacagcaccccctgggggtattttgacttcaacagattccactgccacttttcaccacgtgactggcagcgactcatcaacaacaactggggattccggcccaagaggctcaacttcaagctcttcaacatccaagtcaaggaggtcacgcagaatgaaggcaccaggaccatcgccaataaccttaccagcacgattcaggtctttacggactcggaataccagctcccgtacgtgctcggctcggcgcaccagggctgcctgcctccgttcccggcggacgtcttcatgattcctcagtacgggtacctgactctgaacaatggcagtcaggctgtgggccggtcgtccttctactgcctggagtactttccttctcaaatgctgagaacgggcaacaactttgaattcagctacaacttcgaggacgtgcccttccacagcagctacgcgcacagccagagcctggaccggctgatgaaccctctcatcgaccagtacttgtactacctgtcccggactcaaagcacgggcggtactgcaggaactcagcagttgctattttctcaggccgggcctaacaacatgtcggctcaggccaagaactggctacccggtccctgctaccggcagcaacgcgtctccacgacactgtcgcagaacaacaacagcaactttgcctggacgggtgccaccaagtatcatctgaatggcagagactctctggtgaatcctggcgttgccatggctacccacagggacgacgaagagcgattttttccatccagcggagtcttaatgtttgggaaacagggagctggaagagacaacgtggactatagcagcgtgatgctaaccagcgaggaagaaataaggaccaccaacccagtggccacagaacagtacggcgtggtggccgataacctgcaacagcaaaacgccgctcctattgtaggggccgtcaatagtcaaggagccttacctggcatggtgtggcagaaccgggacgtgtacctgcagggtcccatctgggccaagattcctcatacggacggcaactttcatccctcgccgctgatgggaggctttggactgaagcatccgcctcctcagatcctgattaaaaacacacctgttcccgcggatcctccgaccaccttcaatcaggccaagctggcttctttcatcacgcagtacagtaccggccaggtcagcgtggagatcgagtgggagctgcagaaggagaacagcaaacgctggaacccagagattcagtacacttccaactactacaaatctacaaatgtggactttgctgtcaatactgagggtacttattccgagcctcgccccattggcacccgttacctcacccgtaatctgtaa

SEQ ID NO: 1546 - DNA, 2217 bp, Artificial Sequence
  source: /note="Description of Artificial Sequence: Synthetic polynucleotide"
atggctgccgatggttatcttccagattggctcgaggacaacctctctgagggcattcgcgagtggtgggacctgaaacctggagccccgaaacccaaagccaaccagcaaaggcaggacaacggccggggtctggtgcttcctggctacaggtacctcggacccttcaacggactcgacaagggggagcccgtcaacgcggcggacgcagcggccctcgagcacgacagggcctacgaccagcagctccaagcgggtgacaatccgtacctgcggtataatcacgccgacgccgagtttcaggagcgtctgcaagaagatacgtcttttgggggcaacctcgggcgcgcagtcttccaggccaaaaagcgggttctcgaacctctgggcctggttgaatcgccggttaggacggctcctggaaagaagagaccggtagagccatcaccccagcgctctccagactcctctacgggcatcggcaagagaggccagcagcccgcaaaaaagagactcaattttgggcagactggcgactcagagtcagtccccgaccctcaaccaatcggagaaccaccagcagccccctctggtgtgggacctaatacaatggctgcaggcggtggcgctccaatggcagacaataacgaaggcgccgacggagtgggtagttcctcaggaaattggcattgcgattccacatggctgggcgacagagtcatcaccaccagcacccgcacctgggccctgcccacctacaacaaccacctctacaggcaaatctccaacgggacctcgggaggaagcaccaacgacaacacctacttcggctacagcaccccctgggggtattttgacttcaacagattccactgccacttttcaccacgtgactggcagcgactcatcaacaacaactggggattccggcccaagaggctcaacttcaagctcttcaacatccaagtcaaggaggtcacgcagaatgaaggcaccaggaccatcgccaataaccttaccagcacgattcaggtctttacggactcggaataccagctcccgtacgtgctcggctcggcgcaccagggctgcctgcctccgttcccggcggacgtcttcatgattcctcagtacgggtacctgactctgaacaatggcagtcaggctgtgggccggtcgtccttctactgcctggagtactttccttctcaaatgctgagaacgggcaacaactttgaattcagctacaacttcgaggacgtgcccttccacagcagctacgcgcacagccagagcctggaccggctgatgaaccctctcatcgaccagtacttgtactacctgtcccggactcaaagcacgggcggtactgcaggaactcagcagttgctattttctcaggccgggcctaacaacatgtcggctcaggccaagaactggctacccggtccctgctaccggcagcaacgcgtctccacgacactgtcgcagaacaacaacagcaactttgcctggacgggtgccaccaagtatcatctgaatggcagagactctctggtgaatcctggcgttgccatggctacccacagggacgacgaagagcgattttttccatccagcggagtcttaatgtttgggagacagggagctggaagagacaacgtggactatagcagcgtgatgctaaccagcgaggaagaaataaggaccaccaacccagtggccacagaacagtacggcgtggtggccgataacctgcaacagcaaaacgccgctcctattgtaggggccgtcaatagtcaaggagccttacctggcatggtgtggcagaaccgggacgtgtacctgcagggtcccatctgggccaagattcctcatacggacggcaactttcatccctcgccgctgatgggaggctttggactgaagcatccgcctcctcagatcctgattaaaaacacacctgttcccgcggatcctccgaccaccttcaatcaggccaagctggcttctttcatcacgcagtacagtaccggccaggtcagcgtggagatcgagtgggagctgcagaaggagaacagcaaacgctggaacccagagattcagtacacttccaactactacaaatctacaaatgtggactttgctgtcaatactgagggtacttattccgagcctcgccccattggcacccgttacctcacccgtaatctgtaa

SEQ ID NO: 1547 - DNA, 2217 bp, Artificial Sequence
  source: /note="Description of Artificial Sequence: Synthetic polynucleotide"
atggctgccgatggttatcttccagattggctcgaggacaacctctctgagggcattcgcgagtggtgggacctgaaacctggagccccgaaacccaaagccaaccagcaaaggcaggacaacggccggggtctggtgcttcctggctacaggtacctcggacccttcaacggactcgacaagggggagcccgtcaacgcggcggacgcagcggccctcgagcacgacagggcctacgaccagcagctccaagcgggtgacaatccgtacctgcggtataatcacgccgacgccgagtttcaggagcgtctgcaagaagatacgtcttttgggggcaacctcgggcgcgcagtcttccaggccaaaaagcgggttctcgaacctctgggcctggttgaatcgccggttaggacggctcctggaaagaagagaccggtagagccatcaccccagcgctctccagactcctctacgggcatcggcaagagaggccagcagcccgcaaaaaagagactcaattttgggcagactggcgactcagagtcagtccccgaccctcaaccaatcggagaaccaccagcagccccctctggtgtgggacctaatacaatggctgcaggcggtggcgctccaatggcagacaataacgaaggcgccgacggagtgggtagttcctcaggaaattggcattgcgattccacatggctgggcgacagagtcatcaccaccagcacccgcacctgggccctgcccacctacaacaaccacctctacaggcaaatctccaacgggacctcgggaggaagcaccaacgacaacacctacttcggctacagcaccccctgggggtattttgacttcaacagattccactgccacttttcaccacgtgactggcagcgactcatcaacaacaactggggattccggcccaagaggctcaacttcaagctcttcaacatccaagtcaaggaggtcacgcagaatgaaggcaccaggaccatcgccaataaccttaccagcacgattcaggtctttacggactcggaataccagctcccgtacgtgctcggctcggcgcaccagggctgcctgcctccgttcccggcggacgtcttcatgattcctcagtacgggtacctgactctgaacaatggcagtcaggctgtgggccggtcgtccttctactgcctggagtactttccttctcaaatgctgagaacgggcaacaactttgaattcagctacaacttcgaggacgtgcccttccacagcagctacgcgcacagccagagcctggaccggctgatgaaccctctcatcgaccagtacttgtactacctgtcccggactcaaagcacgggcggtactgcaggaactcagcagttgctattttctcaggccgggcctaacaacatgtcggctcaggccaagaactggctacccggtccctgctaccggcagcaacgcgtctccacgacactgtcgcagaacaacaacagcaactttgcctggacgggtgccaccaagtatcatctgaatggcagagactctctggtgaatcctggcgttgccatggctacccacagggacgacgaagagcgattttttccatccagcggagtcttaatgtttgggaaacagggagctggaagagacaacgtggactatagcagcgtgatgctaaccagcgaggaagaaataaggaccaccaacccagtggccacagaacagtacggcgtggtggccgataacctgcaacagcaaaacgccgctcctattgtaggggccgtcaatagtcaaggagccttacctggcatggtgtggcagaaccgggacgtgtacctgcagggtcccatctgggccaagattcctcatacggacggcaactttcatccctcgccgctgatgggaggctttggactgaagcatccgcctcctcagatcctgattaaaaacacacctgttcccgcggatcctccgaccaccttcaatcaggccaggctggcttctttcatcacgcagtacagtaccggccaggtcagcgtggagatcgagtgggagctgcagaaggagaacagcaaacgctggaacccagagattcagtacacttccaactactacaaatctacaaatgtggactttgctgtcaatactgagggtacttattccgagcctcgccccattggcacccgttacctcacccgtaatctgtaa

SEQ ID NO: 1548 - DNA, 2217 bp, Artificial Sequence
  source: /note="Description of Artificial Sequence: Synthetic polynucleotide"
atggctgccgatggttatcttccagattggctcgaggacaacctctctgagggcattcgcgagtggtgggacctgaaacctggagccccgaaacccaaagccaaccagcaaaggcaggacaacggccggggtctggtgcttcctggctacaggtacctcggacccttcaacggactcgacaagggggagcccgtcaacgcggcggacgcagcggccctcgagcacgacagggcctacgaccagcagctccaagcgggtgacaatccgtacctgcggtataatcacgccgacgccgagtttcaggagcgtctgcaagaagatacgtcttttgggggcaacctcgggcgcgcagtcttccaggccaaaaagcgggttctcgaacctctgggcctggttgaatcgccggttaggacggctcctggaaagaagagaccggtagagccatcaccccagcgctctccagactcctctacgggcatcggcaagaaaggccagcagcccgcaaaaaagagactcaattttgggcagactggcgactcagagtcagtccccgaccctcaaccaatcggagaaccaccagcagccccctctggtgtgggacctaatacaatggctgcaggcggtggcgctccaatggcagacaataacgaaggcgccgacggagtgggtagttcctcaggaaattggcattgcgattccacatggctgggcgacagagtcatcaccaccagcacccgcacctgggccctgcccacctacaacaaccacctctacaggcaaatctccaacgggacctcgggaggaagcaccaacgacaacacctacttcggctacagcaccccctgggggtattttgacttcaacagattccactgccacttttcaccacgtgactggcagcgactcatcaacaacaactggggattccggcccaagaggctcaacttcaagctcttcaacatccaagtcaaggaggtcacgcagaatgaaggcaccaggaccatcgccaataaccttaccagcacgattcaggtctttacggactcggaataccagctcccgtacgtgctcggctcggcgcaccagggctgcctgcctccgttcccggcggacgtcttcatgattcctcagtacgggtacctgactctgaacaatggcagtcaggctgtgggccggtcgtccttctactgcctggagtactttccttctcaaatgctgagaacgggcaacaactttgaattcagctacaacttcgaggacgtgcccttccacagcagctacgcgcacagccagagcctggaccggctgatgaaccctctcatcgaccagtacttgtactacctgtcccggactcaaagcacgggcggtactgcaggaactcagcagttgctattttctcaggccgggcctaacaacatgtcggctcaggccaagaactggctacccggtccctgctaccggcagcaacgcgtctccacgacactgtcgcagaacaacaacagcaactttgcctggacgggtgccaccaagtatcatctgaatggcagagactctctggtgaatcctggcgttgccatggctacccacagggacgacgaagagcgattttttccatccagcggagtcttaatgtttgggagacagggagctggaagagacaacgtggactatagcagcgtgatgctaaccagcgaggaagaaataaggaccaccaacccagtggccacagaacagtacggcgtggtggccgataacctgcaacagcaaaacgccgctcctattgtaggggccgtcaatagtcaaggagccttacctggcatggtgtggcagaaccgggacgtgtacctgcagggtcccatctgggccaagattcctcatacggacggcaactttcatccctcgccgctgatgggaggctttggactgaagcatccgcctcctcagatcctgattaaaaacacacctgttcccgcggatcctccgaccaccttcaatcaggccaggctggcttctttcatcacgcagtacagtaccggccaggtcagcgtggagatcgagtgggagctgcagaaggagaacagcaaacgctggaacccagagattcagtacacttccaactactacaaatctacaaatgtggactttgctgtcaatactgagggtacttattccgagcctcgccccattggcacccgttacctcacccgtaatctgtaa

SEQ ID NO: 1549 - protein, 744 aa, Artificial Sequence
  source: /note="Description of Artificial Sequence: Synthetic polypeptide"
MAADGYLPDWLEDTLSEGIRQWWKLKPGPPPPKPAERHKDDSRGLVLPGYKYLGPFNGLDKGEPVNEADAAALEHDKAYDRQLDSGDNPYLKYNHADAEFQERLKEDTSFGGNLGRAVFQAKKRVLEPLGLVEEPVKTAPGKKRPVEHSPVEPDSSSGTGKAGQQPARKRLNFGQTGDADSVPDPQPLGQPPAAPSGLGTNTMATGSGAPMADNNEGADGVGNSSGNWHCDSTWMGDRVITTSTRTWALPTYNNHLYKQISSQSGASNDNHYFGYSTPWGYFDFNRFHCHFSPRDWQRLINNNWGFRPKRLNFKLFNIQVKEVTQNDGTTTIANNLTSTVQVFTDSEYQLPYVLGSAHQGCLPPFPADVFMVPQYGYLTLNNGSQAVGRSSFYCLEYFPSQMLRTGNNFTFSYTFEDVPFHSSYAHSQSLDRLMNPLIDQYLYYLSRTNTPSGTTTQSRLQFSQAGASDIRDQSRNWLPGPCYRQQRVSKTSADNNNSEYSWTGATKYHLNGRDSLVNPGPAMASHKDDEEKFFPQSGVLIFGKQGSEKTNVDIEKVMITDEEEIRTTNPVATEQYGSVSTNLQRGQRGESGHGYFAQAATADVNTQGVLPGMVWQDRDVYLQGPIWAKIPHTDGHFHPSPLMGGFGLKHPPPQILIKNTPVPANPSTTFSAAKFASFITQYSTGQVSVEIEWELQKENSKRWNPEIQYTSNYNKSVNVDFTVDTNGVYSEPRPIGTRYLTRNL

SEQ ID NO: 1550 - DNA, 8359 bp, Artificial Sequence
  source: /note="Description of Artificial Sequence: Synthetic polynucleotide"
catcatcaataatataccttattttggattgaagccaatatgataatgagggggtggagtttgtgacgtggcgcggggcgtgggaacggggcgggtgacgtagtagctctagaggtcctgtattagaggtcacgtgagtgttttgcgacattttgcgacaccatgtggtcacgctgggtatttaagcccgagtgagcacgcagggtctccattttgaagcgggaggtttgaacgcgcagccgccatgccggggttttacgagattgtgattaaggtccccagcgaccttgacgagcatctgcccggcatttctgacagctttgtgaactgggtggccgagaaggaatgggagttgccgccagattctgacatggatctgaatctgattgagcaggcacccctgaccgtggccgagaagctgcagcgcgactttctgacggaatggcgccgtgtgagtaaggcaccggaggcccttttctttgtgcaatttgagaagggagagagctacttccacatgcacgtgctcgtggaaaccaccggggtgaaatccatggttttgggacgtttcctgagtcagattcgcgaaaaactgattcagagaatttaccgcgggatcgagccgactttgccaaactggttcgcggtcacaaagaccagaaatggcgccggaggcgggaacaaggtggtggatgagtgctacatccccaattacttgctccccaaaacccagcctgagctccagtgggcgtggactaatatggaacagtatttaagcgcctgtttgaatctcacggagcgtaaacggttggtggcgcagcatctgacgcacgtgtcgcagacgcaggagcagaacaaagagaatcagaatcccaattctgatgcgccggtgatcagatcaaaaacttcagccaggtacatggagctggtcgggtggctcgtggacaaggggattacctcggagaagcagtggatccaggaggaccaggcctcatacatctccttcaatgcggcctccaactcgcggtcccaaatcaaggctgccttggacaatgcgggaaagattatgagcctgactaaaaccgcccccgactacctggtgggccagcagcccgtggaggacatttccagcaatcggatttataaaattttggaactaaacgggtacgatccccaatatgcggcttccgtctttctgggatgggccacgaaaaagttcggcaagaggaacaccatctggctgtttgggcctgcaactaccgggaagaccaacatcgcggaggccatagcccacactgtgcccttctacgggtgcgtaaactggaccaatgagaactttcccttcaacgactgtgtcgacaagatggtgatctggtgggaggaggggaagatgaccgccaaggtcgtggagtcggccaaagccattctcggaggaagcaaggtgcgcgtggaccagaaatgcaagtcctcggcccagatagacccgactcccgtgatcgtcacctccaacaccaacatgtgcgccgtgattgacgggaactcaacgaccttcgaacaccagcagccgttgcaagaccggatgttcaaatttgaactcacccgccgtctggatcatgactttgggaaggtcaccaagcaggaagtcaaagactttttccggtgggcaaaggatcacgtggttgaggtggagcatgaattctacgtcaaaaagggtggagccaagaaaagacccgcccccagtgacgcagatataagtgagcccaaacgggtgcgcgagtcagttgcgcagccatcgacgtcagacgcggaagcttcgatcaactacgcagacaggtaccaaaacaaatgttctcgtcacgtgggcatgaatctgatgctgtttccctgcagacaatgcgagagaatgaatcagaattcaaatatctgcttcactcacggacagaaagactgtttagagtgctttcccgtgtcagaatctcaacccgtttctgtcgtcaaaaaggcgtatcagaaactgtgctacattcatcatatcatgggaaaggtgccagacgcttgcactgcctgcgatctggtcaatgtggatttggatgactgcatctttgaacaataaatgatttaaatcaggtatggctgccgatggttatcttccagattggctcgaggacactctctctgaaggaataagacagtggtggaagctcaaacctggcccaccaccaccaaagcccgcagagcggcataaggacgacagcaggggtcttgtgcttcctgggtacaagtacctcggacccttcaacggactcgacaagggagagccggtcaacgaggcagacgccgcggccctcgagcacgacaaagcctacgaccggcagctcgacagcggagacaacccgtacctcaagtacaaccacgccgacgcggagtttcaggagcgccttaaagaagatacgtcttttgggggcaacctcggacgagcagtcttccaggcgaaaaagagggttcttgaacctctgggcctggttgaggaacctgttaagacggctccgggaaaaaagaggccggtagagcactctcctgtggagccagactcctcctcgggaaccggaaaggcgggccagcagcctgcaagaaaaagattgaattttggtcagactggagacgcagactcagtacctgacccccagcctctcggacagccaccagcagccccctctggtctgggaactaatacgatggctacaggcagtggcgcaccaatggcagacaataacgagggcgccgacggagtgggtaattcctcgggaaattggcattgcgattccacatggatgggcgacagagtcatcaccaccagcacccgaacctgggccctgcccacctacaacaaccacctctacaaacaaatttccagccaatcaggagcctcgaacgacaatcactactttggctacagcaccccttgggggtattttgacttcaacagattccactgccacttttcaccacgtgactggcaaagactcatcaacaacaactggggattccgacccaagagactcaacttcaagctctttaacattcaagtcaaagaggtcacgcagaatgacggtacgacgacgattgccaataaccttaccagcacggttcaggtgtttactgactcggagtaccagctcccgtacgtcctcggctcggcgcatcaaggatgcctcccgccgttcccagcagacgtcttcatggtgccacagtatggatacctcaccctgaacaacgggagtcaggcagtaggacgctcttcattttactgcctggagtactttccttctcagatgctgcgtaccggaaacaactttaccttcagctacacttttgaggacgttcctttccacagcagctacgctcacagccagagtctggaccgtctcatgaatcctctcatcgaccagtacctgtattacttgagcagaacaaacactccaagtggaaccaccacgcagtcaaggcttcagttttctcaggccggagcgagtgacattcgggaccagtctaggaactggcttcctggaccctgttaccgccagcagcgagtatcaaagacatctgcggataacaacaacagtgaatactcgtggactggagctaccaagtaccacctcaatggcagagactctctggtgaatccgggcccggccatggcaagccacaaggacgatgaagaaaagttttttcctcagagcggggttctcatctttgggaagcaaggctcagagaaaacaaatgtggacattgaaaaggtcatgattacagacgaagaggaaatcaggacaaccaatcccgtggctacggagcagtatggttctgtatctaccaacctccagagaggccagagaggcgagtctggtcatggttattttgcccaggcggccaccgcagatgtcaacacacaaggcgttcttccaggcatggtctggcaggacagagatgtgtaccttcaggggcccatctgggcaaagattccacacacggacggacattttcacccctctcccctcatgggtggattcggacttaaacaccctcctccacagattctcatcaagaacaccccggtacctgcgaatccttcgaccaccttcagtgcggcaaagtttgcttccttcatcacacagtactccacgggacaggtcagcgtggagatcgagtgggagctgcagaaggaaaacagcaaacgctggaatcccgaaattcagtacacttccaactacaacaagtctgttaatgtggactttactgtggacactaatggcgtgtattcagagcctcgccccattggcaccagatacctgactcgtaatctgtaattgcttgttaatcaataaaccgtttaattcgtttcagttgaactttggtctctgcgtatttctttcttatctagtttccatgctctagaggtcctgtattagaggtcacgtgagtgttttgcgacattttgcgacaccatgtggtcacgctgggtatttaagcccgagtgagcacgcagggtctccattttgaagcgggaggtttgaacgcgcagccaccacggcggggttttacgagattgtgattaaggtccccagcgaccttgacgagcatctgcccggcatttctgacagctttgtgaactgggtggccgagaaggaatgggagttgccgccagattctgacatggatctgaatctgattgagcaggcacccctgaccgtggccgagaagctgcatcgctggcgtaatagcgaagaggcccgcaccgatcgcccttcccaacagttgcgcagcctgaatggcgaatggcgattccgttgcaatggctggcggtaatattgttctggatattaccagcaaggccgatagtttgagttcttctactcaggcaagtgatgttattactaatcaaagaagtattgcgacaacggttaatttgcgtgatggacagactcttttactcggtggcctcactgattataaaaacacttctcaggattctggcgtaccgttcctgtctaaaatccctttaatcggcctcctgtttagctcccgctctgattctaacgaggaaagcacgttatacgtgctcgtcaaagcaaccatagtacgcgccctgtagcggcgcattaagcgcggcgggtgtggtggttacgcgcagcgtgaccgctacacttgccagcgccctagcgcccgctcctttcgctttcttcccttcctttctcgccacgttcgccggctttccccgtcaagctctaaatcgggggctccctttagggttccgatttagtgctttacggcacctcgaccccaaaaaacttgattagggtgatggttcacgtagtgggccatcgccctgatagacggtttttcgccctttgacgttggagtccacgttctttaatagtggactcttgttccaaactggaacaacactcaaccctatctcggtctattcttttgatttataagggattttgccgatttcggcctattggttaaaaaatgagctgatttaacaaaaatttaacgcgaattttaacaaaatattaacgtttacaatttaaatatttgcttatacaatcttcctgtttttggggcttttctgattatcaaccggggtacatatgattgacatgctagttttacgattaccgttcatcgattctcttgtttgctccagactctcaggcaatgacctgatagcctttgtagagacctctcaaaaatagctaccctctccggcatgaatttatcagctagaacggttgaatatcatattgatggtgatttgactgtctccggcctttctcacccgtttgaatctttacctacacattactcaggcattgcatttaaaatatatgagggttctaaaaatttttatccttgcgttgaaataaaggcttctcccgcaaaagtattacagggtcataatgtttttggtacaaccgatttagctttatgctctgaggctttattgcttaattttgctaattctttgccttgcctgtatgatttattggatgttggaattcctgatgcggtattttctccttacgcatctgtgcggtatttcacaccgcatatggtgcactctcagtacaatctgctctgatgccgcatagttaagccagccccgacacccgccaacacccgctgacgcgccctgacgggcttgtctgctcccggcatccgcttacagacaagctgtgaccgtctccgggagctgcatgtgtcagaggttttcaccgtcatcaccgaaacgcgcgagacgaaagggcctcgtgatacgcctatttttataggttaatgtcatgataataatggtttcttagacgtcaggtggcacttttcggggaaatgtgcgcggaacccctatttgtttatttttctaaatacattcaaatatgtatccgctcatgagacaataaccctgataaatgcttcaataatattgaaaaaggaagagtatgagtattcaacatttccgtgtcgcccttattcccttttttgcggcattttgccttcctgtttttgctcacccagaaacgctggtgaaagtaaaagatgctgaagatcagttgggtgcacgagtgggttacatcgaactggatctcaacagcggtaagatccttgagagttttcgccccgaagaacgttttccaatgatgagcacttttaaagttctgctatgtggcgcggtattatcccgtattgacgccgggcaagagcaactcggtcgccgcatacactattctcagaatgacttggttgagtactcaccagtcacagaaaagcatcttacggatggcatgacagtaagagaattatgcagtgctgccataaccatgagtgataacactgcggccaacttacttctgacaacgatcggaggaccgaaggagctaaccgcttttttgcacaacatgggggatcatgtaactcgccttgatcgttgggaaccggagctgaatgaagccataccaaacgacgagcgtgacaccacgatgcctgtagcaatggcaacaacgttgcgcaaactattaactggcgaactacttactctagcttcccggcaacaattaatagactggatggaggcggataaagttgcaggaccacttctgcgctcggcccttccggctggctggtttattgctgataaatctggagccggtgagcgtgggtctcgcggtatcattgcagcactggggccagatggtaagccctcccgtatcgtagttatctacacgacggggagtcaggcaactatggatgaacgaaatagacagatcgctgagataggtgcctcactgattaagcattggtaactgtcagaccaagtttactcatatatactttagattgatttaaaacttcatttttaatttaaaaggatctaggtgaagatcctttttgataatctcatgaccaaaatcccttaacgtgagttttcgttccactgagcgtcagaccccgtagaaaagatcaaaggatcttcttgagatcctttttttctgcgcgtaatctgctgcttgcaaacaaaaaaaccaccgctaccagcggtggtttgtttgccggatcaagagctaccaactctttttccgaaggtaactggcttcagcagagcgcagataccaaatactgtccttctagtgtagccgtagttaggccaccacttcaagaactctgtagcaccgcctacatacctcgctctgctaatcctgttaccagtggctgctgccagtggcgataagtcgtgtcttaccgggttggactcaagacgatagttaccggataaggcgcagcggtcgggctgaacggggggttcgtgcacacagcccagcttggagcgaacgacctacaccgaactgagatacctacagcgtgagctatgagaaagcgccacgcttcccgaagggagaaaggcggacaggtatccggtaagcggcagggtcggaacaggagagcgcacgagggagcttccagggggaaacgcctggtatctttatagtcctgtcgggtttcgccacctctgacttgagcgtcgatttttgtgatgctcgtcaggggggcggagcctatggaaaaacgccagcaacgcggcctttttacggttcctggccttttgctggccttttgctcacatgttctttcctgcgttatcccctgattctgtggataaccgtattaccgcctttgagtgagctgataccgctcgccgcagccgaacgaccgagcgcagcgagtcagtgagcgaggaagcggaagagcgcccaatacgcaaaccgcctctccccgcgcgttggccgattcattaatgcagaattcc

SEQ ID NO: 1551 - protein, 736 aa, Artificial Sequence
  source: /note="Description of Artificial Sequence: Synthetic polypeptide"
MAADGYLPDWLEDNLSEGIREWWDLKPGAPKPKANQQKQDDGRGLVLPGYKYLGPFNGLDKGEPVNAADAAALEHDKAYDQQLKAGDNPYLRYNHADAEFQERLQEDTSFGGNLGRAVFQAKKRVLEPLGLVEEGAKTAPGKKRPVEQSPQEPDSSSGIGKKGQQPAKKRLNFGQTGDSESVPDPQPLGEPPAAPSGVGSNTMAAGGGAPMADNNEGADGVGNASGNWHCDSTWLGDRVITTSTRTWALPTYNNHLYKQISSQSGASTNDNTYFGYSTPWGYFDFNRFHCHFSPRDWQRLINNNWGFRPKRLNFKLFNIQVKEVTTNDGTTTIANNLTSTVQVFTDSEYQLPYVLGSAHQGCLPPFPADVFMIPQYGYLTLNNGSQAVGRSSFYCLEYFPSQMLRTGNNFEFSYTFEDVPFHSSYAHSQSLDRLMNPLIDQYLYYLSRTQTTSGTAGNRTLQFSQAGPSSMANQAKNWLPGPCYRQQRVSKTANQNNNSNFAWTGATKYHLNGRDSLVNPGPAMATHKDDEDKFFPMSGVLIFGKQGAGNSNVDLDNVMITSEEEIKTTNPVATEQYGTVATNLQSSNTAPATGTVNSQGALPGMVWQNRDVYLQGPIWAKIPHTDGHFHPSPLMGGFGLKHPPPQILIKNTPVPANPPTTFSPAKFASFITQYSTGQVSVEIEWELQKENSKRWNPEIQYTSNYNKSTNVDFAVDTNGVYSEPRPIGTRYLTRNL

SEQ ID NO: 1552 - DNA, 2208 bp, Artificial Sequence
  source: /note="Description of Artificial Sequence: Synthetic polynucleotide"
atggctgccgatggttatcttccagattggctcgaggacaacctctctgagggcattcgcgagtggtgggacttgaaacctggagccccgaaacccaaagccaaccagcaaaagcaggacgacggccggggtctggtgcttcctggctacaagtacctcggacccttcaacggactcgacaagggggagcccgtcaacgcggcggacgcagcggccctcgagcacgacaaggcctacgaccagcagctcaaagcgggtgacaatccgtacctgcggtataaccacgccgacgccgagtttcaggagcgtctgcaagaagatacgtcttttgggggcaacctcgggcgagcagtcttccaggccaagaagcgggttctcgaacctctcggtctggttgaggaaggcgctaagacggctcctggaaagaagagaccggtagagcaatcaccccaggaaccagactcctcttcgggcatcggcaagaaaggccagcagcccgcgaagaagagactcaactttgggcagacaggcgactcagagtcagtgcccgaccctcaaccactcggagaaccccccgcagccccctctggtgtgggatctaatacaatggcagcaggcggtggcgctccaatggcagacaataacgaaggcgccgacggagtgggtaacgcctcaggaaattggcattgcgattccacatggctgggcgacagagtcatcaccaccagcacccgaacctgggccctccccacctacaacaaccacctctacaagcaaatctccagccaatcgggagcaagcaccaacgacaacacctacttcggctacagcaccccctgggggtattttgactttaacagattccactgccacttctcaccacgtgactggcagcgactcatcaacaacaactggggattccggcccaagagactcaacttcaagctcttcaacatccaggtcaaggaggtcacgacgaatgatggcaccacgaccatcgccaataaccttaccagcacggttcaggtctttacggactcggaataccagctcccgtacgtcctcggctctgcgcaccagggctgcctgcctccgttcccggcggacgtcttcatgattcctcagtacgggtacctgactctgaacaatggcagtcaggccgtgggccgttcctccttctactgcctggagtactttccttctcaaatgctgagaacgggcaacaactttgagttcagctacacgtttgaggacgtgccttttcacagcagctacgcgcacagccaaagcctggaccggctgatgaaccccctcatcgaccagtacctgtactacctgtctcggactcagaccacgagtggtaccgcaggaaatcggacgttgcaattttctcaggccgggcctagtagcatggcgaatcaggccaaaaactggctacccgggccctgctaccggcagcaacgcgtctccaagacagcgaatcaaaataacaacagcaactttgcctggaccggtgccaccaagtatcatctgaatggcagagactctctggtaaatcccggtcccgctatggcaacccacaaggacgacgaagacaaattttttccgatgagcggagtcttaatatttgggaaacagggagctggaaatagcaacgtggaccttgacaacgttatgataaccagtgaggaagaaattaaaaccaccaacccagtggccacagaacagtacggcacggtggccactaacctgcaatcgtcaaacaccgctcctgctacagggaccgtcaacagtcaaggagccttacctggcatggtctggcagaaccgggacgtgtacctgcagggtcctatctgggccaagattcctcacacggacggacactttcatccctcgccgctgatgggaggctttggactgaaacacccgcctcctcagatcctgattaagaatacacctgttcccgcgaatcctccaactaccttcagtccagctaagtttgcgtcgttcatcacgcagtacagcaccggacaggtcagcgtggaaattgaatgggagctgcagaaagaaaacagcaaacgctggaacccagagattcaatacacttccaactacaacaaatctacaaatgtggactttgctgttgacacaaatggcgtttattctgagcctcgccccatcggcacccgttacctcacccgtaatctg

SEQ ID NO: 1553 - protein, 737 aa, Artificial Sequence
  source: /note="Description of Artificial Sequence: Synthetic polypeptide"
MAADGYLPDWLEDNLSEGIREWWDLKPGAPKPKANQQKQDDGRGLVLPGYKYLGPFNGLDKGEPVNAADAAALEHDKAYDQQLKAGDNPYLRYNHADAEFQERLQEDTSFGGNLGRAVFQAKKRVLEPLGLVEEGAKTAPGKKRPVEQSPQEPDSSTGIGKKGQQPAKKRLNFGQTGDSESVPDPQPLGEPPAAPSGVGSNTMAAGGGAPMADNNEGADGVGNASGNWHCDSTWLGDRVITTSTRTWALPTYNNHLYKQISNSQSGGSTNDNTYFGYSTPWGYFDFNRFHCHFSPRDWQRLINNNWGFRPKRLNFKLFNIQVKEVTTNDGTTTIANNLTSTVQVFTDSEYQLPYVLGSAHQGCLPPFPADVFMIPQYGYLTLNNGSQAVGRSSFYCLEYFPSQMLRTGNNFEFSYTFEDVPFHSSYAHSQSLDRLMNPLIDQYLYYLSRTQTTGGTAGNRTLQFSQAGPSSMANQAKNWLPGPCYRQQRVSKTTNQNNNSNFAWTGATKYHLNGRDSLVNPGVAMATHKDDEDRFFPSSGVLIFGKQGAGNDNVDLDNVMITSEEEIKTTNPVATEEYGVVATNLQSANTAPQTGTVNSQGALPGMVWQNRDVYLQGPIWAKIPHTDGNFHPSPLMGGFGLKHPPPQILIKNTPVPANPPTTFSPAKFASFITQYSTGQVSVEIEWELQKENSKRWNPEIQYTSNYNKSTNVDFAVDTEGVYSEPRPIGTRYLTRNL

SEQ ID NO: 1554 - DNA, 2211 bp, Artificial Sequence
  source: /note="Description of Artificial Sequence: Synthetic polynucleotide"
atggctgccgatggttatcttccagattggctcgaggacaacctctctgagggcattcgcgagtggtgggacttgaaacctggagccccgaaacccaaagccaaccagcaaaagcaggacgacggccggggtctggtgcttcctggctacaagtacctcggacccttcaacggactcgacaagggggagcccgtcaacgcggcggacgcagcggccctcgagcacgacaaggcctacgaccagcagctcaaagcgggtgacaatccgtacctgcggtataaccacgccgacgccgagtttcaggagcgtctgcaagaagatacgtcttttgggggcaacctcgggcgagcagtcttccaggccaagaagcgggttctcgaacctctcggtctggttgaggaaggcgctaagacggctcctggaaagaagagaccggtagagcaatcaccccaggaaccagactcctctacgggcatcggcaagaaaggccagcagcccgcgaaaaagagactcaactttgggcagactggcgactcagagtcagtgcccgaccctcaaccactcggagaaccccccgcagccccctctggtgtgggatctaatacaatggctgcaggcggtggcgctccaatggcagacaataacgaaggcgccgacggagtgggtaatgcctcaggaaattggcattgcgattccacatggctgggcgacagagtcatcaccaccagcacccgaacctgggccctccccacctacaacaaccacctctacaagcaaatctccaacagccaatcgggaggaagcaccaacgacaacacctacttcggctacagcaccccctgggggtattttgactttaacagattccactgccacttctcaccacgtgactggcagcgactcatcaacaacaactggggattccggcccaagagactcaacttcaagctcttcaacatccaggtcaaggaggtcacgacgaatgatggcaccacgaccatcgccaataaccttaccagcacggttcaggtctttacggactcggaataccagctcccgtacgtcctcggctctgcgcaccagggctgcctgcctccgttcccggcggacgtcttcatgattcctcagtacgggtacctgactctgaacaatggcagtcaggccgtgggccgttcctccttctactgcctggagtactttccttctcaaatgctgagaacgggcaacaactttgagttcagctacacgtttgaggacgtgccttttcacagcagctacgcgcacagccaaagcctggaccggctgatgaaccccctcatcgaccagtacctgtactacctgtctcggactcagaccacgggaggtaccgcaggaaatcggacgttgcaattttctcaggccgggcctagtagcatggcgaatcaggccaaaaactggctacccgggccctgctaccggcagcaacgcgtctccaagacaacgaatcaaaataacaacagcaactttgcctggaccggtgccaccaagtatcatctgaatggcagagactctctggtaaatcccggtgtcgctatggcaacccacaaggacgacgaagaccgattttttccgtccagcggagtcttaatatttgggaaacagggagctggaaatgacaacgtggaccttgacaacgttatgataaccagtgaggaagaaattaaaaccaccaacccagtggccacagaagagtacggcgtggtggccactaacctgcaatcggcaaacaccgctcctcaaacagggaccgtcaacagtcaaggagccttacctggcatggtctggcagaaccgggacgtgtacctgcagggtcctatctgggccaagattcctcacacggacggaaactttcatccctcgccgctgatgggaggctttggactgaaacacccgcctcctcagatcctgattaagaatacacctgttcccgcgaatcctccaactaccttcagtccagctaagtttgcgtcgttcatcacgcagtacagcaccggacaggtcagcgtggaaattgaatgggagctgcagaaagaaaacagcaaacgctggaacccagagattcaatacacttccaactacaacaaatctacaaatgtggactttgctgttgacacagaaggcgtttattctgagcctcgccccatcggcacccgttacctcacccgtaatctg

SEQ ID NO: 1555 - protein, 738 aa, Artificial Sequence
  source: /note="Description of Artificial Sequence: Synthetic polypeptide"
MAADGYLPDWLEDNLSEGIREWWDLKPGAPKPKANQQKQDDGRGLVLPGYKYLGPFNGLDKGEPVNAADAAALEHDKAYDQQLKAGDNPYLRYNHADAEFQERLQEDTSFGGNLGRAVFQAKKRVLEPLGLVEEGAKTAPGKKRPVEQSPQREPDSSTGIGKKGQQPAKKRLNFGQTGDSESVPDPQPLGEPPAAPSGVGSNTMAAGGGAPMADNNEGADGVGNSSGNWHCDSTWLGDRVITTSTRTWALPTYNNHLYKQISNGTSGGSTNDNTYFGYSTPWGYFDFNRFHCHFSPRDWQRLINNNWGFRPKRLNFKLFNIQVKEVTTNEGTKTIANNLTSTVQVFTDSEYQLPYVLGSAHQGCLPPFPADVFMIPQYGYLTLNNGSQAVGRSSFYCLEYFPSQMLRTGNNFQFSYTFEDVPFHSSYAHSQSLDRLMNPLIDQYLYYLSRTQTTGGTAGTQTLQFSQAGPSSMANQAKNWLPGPCYRQQRVSTTTNQNNNSNFAWTGATKYHLNGRDSLVNPGVAMATHKDDEDRFFPSSGVLIFGKQGAGNDNVDYSNVMITSEEEIKTTNPVATEEYGVVATNLQSANTAPQTGTVNSQGALPGMVWQNRDVYLQGPIWAKIPHTDGNFHPSPLMGGFGLKHPPPQILIKNTPVPADPPTTFNQAKLNSFITQYSTGQVSVEIEWELQKENSKRWNPEIQYTSNYYKSTNVDFAVNTEGVYSEPRPIGTRYLTRNL

SEQ ID NO: 1556 - DNA, 2214 bp, Artificial Sequence
  source: /note="Description of Artificial Sequence: Synthetic polynucleotide"
atggctgccgatggttatcttccagattggctcgaggacaacctctctgagggcattcgcgagtggtgggacctgaaacctggagccccgaaacccaaagccaaccagcaaaagcaggacgacggccggggtctggtgcttcctggctacaagtacctcggacccttcaacggactcgacaagggggagcccgtcaacgcggcggacgcagcggccctcgagcacgacaaggcctacgaccagcagctcaaagcgggtgacaatccgtacctgcggtataatcacgccgacgccgagtttcaggagcgtctgcaagaagatacgtcttttgggggcaacctcgggcgagcagtcttccaggccaagaagcgggttctcgaacctctcggtctggttgaggaaggcgctaagacggctcctggaaagaagagaccggtagagcagtcaccacagcgtgagcccgactcctccacgggcatcggcaagaaaggccagcagcccgccaaaaagagactcaatttcggtcagactggcgactcagagtcagtccccgaccctcaacctctcggagaacctccagcagcgccctctggtgtgggatctaatacaatggctgcaggcggtggcgcaccaatggcagacaataacgaaggtgccgacggagtgggtaattcctcgggaaattggcattgcgattccacatggctgggcgacagagtcatcaccaccagcacccgaacctgggccctgcccacctacaacaaccacctctacaagcaaatctccaacgggacctcgggaggcagcaccaacgacaacacctactttggctacagcaccccctgggggtattttgactttaacagattccactgccacttctcaccacgtgactggcagcgactcatcaacaacaactggggattccggcccaagagactcaacttcaagctcttcaacatccaggtcaaagaggtcacgacgaatgaaggcaccaagaccatcgccaataacctcaccagcaccgtccaggtgtttacggactcggaataccagctgccgtacgtcctcggctctgcccaccagggctgcctgcctccgttcccggcggacgtcttcatgattcctcagtacggctacctgactctcaacaacggtagtcaggccgtgggacgttcctccttctactgcctggagtacttcccctctcagatgctgagaacgggcaacaactttcaattcagctacactttcgaggacgtgcctttccacagcagctacgcgcacagccagagtttggacaggctgatgaatcctctcatcgaccagtacctgtactacctgtcaagaacccagactacgggaggcacagcgggaacccagacgttgcagttttctcaggccgggcctagcagcatggcgaatcaggccaaaaactggctgcctggaccctgctacagacagcagcgcgtctccacgacaacgaatcaaaacaacaacagcaactttgcctggactggtgccaccaagtatcatctgaacggcagagactctctggtgaatccgggcgtcgccatggcaacccacaaggacgacgaggaccgcttcttcccatccagcggcgtcctcatatttggcaagcagggagctggaaatgacaacgtggactatagcaacgtgatgataaccagcgaggaagaaatcaagaccaccaaccccgtggccacagaagagtatggcgtggtggctactaacctacagtcggcaaacaccgctcctcaaacggggaccgtcaacagccagggagccttacctggcatggtctggcagaaccgggacgtgtacctgcagggtcctatttgggccaagattcctcacacagatggcaactttcacccgtctcctttaatgggcggctttggacttaaacatccgcctcctcagatcctcatcaaaaacactcctgttcctgcggatcctccaacaacgttcaaccaggccaagctgaattctttcatcacgcagtacagcaccggacaagtcagcgtggagatcgagtgggagctgcagaaggagaacagcaagcgctggaacccagagattcagtatacttccaactactacaaatctacaaatgtggactttgctgttaatactgagggtgtttactctgagcctcgccccattggcactcgttacctcacccgtaatctg

SEQ ID NO: 1557 - protein, 738 aa, Artificial Sequence
  source: /note="Description of Artificial Sequence: Synthetic polypeptide"
MAADGYLPDWLEDNLSEGIREWWDLKPGAPKPKANQQKQDDGRGLVLPGYKYLGPFNGLDKGEPVNAADAAALEHDKAYDQQLKAGDNPYLRYNHADAEFQERLQEDTSFGGNLGRAVFQAKKRVLEPLGLVEEGAKTAPGKKRPVEQSPQREPDSSTGIGKKGQQPARKRLNFGQTGDSESVPDPQPLGEPPAAPSGVGSNTMAAGGGAPMADNNEGADGVGSSSGNWHCDSTWLGDRVITTSTRTWALPTYNNHLYKQISNGTSGGSTNDNTYFGYSTPWGYFDFNRFHCHFSPRDWQRLINNNWGFRPKRLNFKLFNIQVKEVTQNEGTKTIANNLTSTIQVFTDSEYQLPYVLGSAHQGCLPPFPADVFMIPQYGYLTLNNGSQAVGRSSFYCLEYFPSQMLRTGNNFQFSYTFEDVPFHSSYAHSQSLDRLMNPLIDQYLYYLSRTQTTGGTAGTQTLQFSQAGPSNMANQAKNWLPGPCYRQQRVSTTTSQNNNSNFAWTGATKYHLNGRDSLVNPGVAMATHKDDEDRFFPSSGILIFGKQGAGKDNVDYSNVMLTSEEEIKTTNPVATEEYGVVADNLQQQNTAPQIGTVNSQGALPGMVWQNRDVYLQGPIWAKIPHTDGNFHPSPLMGGFGLKHPPPQILIKNTPVPADPPTTFNQAKLNSFITQYSTGQVSVEIEWELQKENSKRWNPEIQYTSNYYKSTNVDFAVNTEGVYSEPRPIGTRYLTRNL

SEQ ID NO: 1558 - DNA, 2214 bp, Artificial Sequence
  source: /note="Description of Artificial Sequence: Synthetic polynucleotide"
atggctgccgatggttatcttccagattggctcgaggacaacctctctgagggcattcgcgagtggtgggacctgaaacctggagccccgaaacccaaagccaaccagcaaaagcaggacgacggccggggtctggtgcttcctggctacaagtacctcggacccttcaacggactcgacaagggggagcccgtcaacgcggcggacgcagcggccctcgagcacgacaaggcctacgaccagcagctcaaagcgggtgacaatccgtacctgcggtataatcacgccgacgccgagtttcaggagcgtctgcaagaagatacgtcttttgggggcaacctcgggcgagcagtcttccaggccaagaagcgggttctcgaacctctcggtctggttgaggaaggcgctaagacggctcctggaaagaagagaccggtagagcagtcaccacagcgtgagcccgactcctccacgggcatcggcaagaaaggccagcagcccgccagaaagagactcaatttcggtcagactggcgactcagagtcagtccccgaccctcaacctctcggagaacctccagcagcgccctctggtgtgggatctaatacaatggctgcaggcggtggcgcaccaatggcagacaataacgaaggtgccgacggagtgggtagttcctcgggaaattggcattgcgattccacatggctgggcgacagagtcatcaccaccagcacccgaacctgggccctgcccacctacaacaaccacctctacaagcaaatctccaacgggacctcgggaggcagcaccaacgacaacacctactttggctacagcaccccctgggggtattttgactttaacagattccactgccacttctcaccacgtgactggcagcgactcatcaacaacaactggggattccggcccaagagactcaacttcaagctcttcaacatccaggtcaaagaggtcacgcagaatgaaggcaccaagaccatcgccaataacctcaccagcaccatccaggtgtttacggactcggaataccagctgccgtacgtcctcggctctgcccaccagggctgcctgcctccgttcccggcggacgtcttcatgattcctcagtacggctacctgactctcaacaacggtagtcaggccgtgggacgttcctccttctactgcctggagtacttcccctctcagatgctgagaacgggcaacaactttcaattcagctacactttcgaggacgtgcctttccacagcagctacgcgcacagccagagtttggacaggctgatgaatcctctcatcgaccagtacctgtactacctgtcaagaacccagactacgggaggcacagcgggaacccagacgttgcagttttctcaggccgggcctagcaacatggcgaatcaggccaaaaactggctgcctggaccctgctacagacagcagcgcgtctccacgacaacgtcgcaaaacaacaacagcaactttgcctggactggtgccaccaagtatcatctgaacggcagagactctctggtgaatccgggcgtcgccatggcaacccacaaggacgacgaggaccgcttcttcccatccagcggcatcctcatatttggcaagcagggagctggaaaagacaacgtggactatagcaacgtgatgctaaccagcgaggaagaaatcaagaccaccaaccccgtggccacagaagagtatggcgtggtggctgataacctacagcagcaaaacaccgctcctcaaatagggaccgtcaacagccagggagccttacctggcatggtctggcagaaccgggacgtgtacctgcagggtcctatttgggccaagattcctcacacagatggcaactttcacccgtctcctttaatgggcggctttggacttaaacatccgcctcctcagatcctcatcaaaaacactcctgttcctgcggatcctccaacaacgttcaaccaggccaagctgaattctttcatcacgcagtacagcaccggacaagtcagcgtggagatcgagtgggagctgcagaaggagaacagcaagcgctggaacccagagattcagtatacttccaactactacaaatctacaaatgtggactttgctgttaatactgagggtgtttactctgagcctcgccccattggcactcgttacctcacccgtaatctg

SEQ ID NO: 1559 - protein, 738 aa, Artificial Sequence
  source: /note="Description of Artificial Sequence: Synthetic polypeptide"
MAADGYLPDWLEDNLSEGIREWWDLKPGAPKPKANQQKQDDGRGLVLPGYKYLGPFNGLDKGEPVNAADAAALEHDKAYDQQLKAGDNPYLRYNHADAEFQERLQEDTSFGGNLGRAVFQAKKRVLEPLGLVEEGAKTAPGKKRPVEPSPQRSPDSSTGIGKKGQQPARKRLNFGQTGDSESVPDPQPIGEPPAAPSGVGSGTMAAGGGAPMADNNEGADGVGSSSGNWHCDSTWLGDRVITTSTRTWALPTYNNHLYKQISNGTSGGSTNDNTYFGYSTPWGYFDFNRFHCHFSPRDWQRLINNNWGFRPKRLNFKLFNIQVKEVTQNEGTKTIANNLTSTIQVFTDSEYQLPYVLGSAHQGCLPPFPADVFMIPQYGYLTLNNGSQAVGRSSFYCLEYFPSQMLRTGNNFEFSYTFEDVPFHSSYAHSQSLDRLMNPLIDQYLYYLSRTQSTGGTAGTQQLLFSQAGPSNMSAQAKNWLPGPCYRQQRVSTTLSQNNNSNFAWTGATKYHLNGRDSLVNPGVAMATHKDDEDRFFPSSGILMFGKQGAGKDNVDYSNVMLTSEEEIKTTNPVATEQYGVVADNLQQQNTAPIVGAVNSQGALPGMVWQNRDVYLQGPIWAKIPHTDGNFHPSPLMGGFGLKHPPPQILIKNTPVPADPPTTFNQAKLNSFITQYSTGQVSVEIEWELQKENSKRWNPEIQYTSNYYKSTNVDFAVNTEGVYSEPRPIGTRYLTRNL

SEQ ID NO: 1560 - DNA, 2214 bp, Artificial Sequence
  source: /note="Description of Artificial Sequence: Synthetic polynucleotide"
atggctgccgatggttatcttccagattggctcgaggacaacctctctgagggcattcgcgagtggtgggacctgaaacctggagccccgaaacccaaagccaaccagcaaaagcaggacgacggccggggtctggtgcttcctggctacaagtacctcggacccttcaacggactcgacaagggggagcccgtcaacgcggcggacgcagcggccctcgagcacgacaaggcctacgaccagcagctcaaagcgggtgacaatccgtacctgcggtataatcacgccgacgccgagtttcaggagcgtctgcaagaagatacgtcttttgggggcaacctcgggcgagcagtcttccaggccaagaagcgggttctcgaacctctcggtctggttgaggaaggcgctaagacggctcctggaaagaagagaccggtagagccgtcaccacagcgttcccccgactcctccacgggcatcggcaagaaaggccagcagcccgccagaaagagactcaatttcggtcagactggcgactcagagtcagtccccgaccctcaacctatcggagaacctccagcagcgccctctggtgtgggatctggtacaatggctgcaggcggtggcgcaccaatggcagacaataacgaaggtgccgacggagtgggtagttcctcgggaaattggcattgcgattccacatggctgggcgacagagtcatcaccaccagcacccgaacctgggccctgcccacctacaacaaccacctctacaagcaaatctccaacgggacctcgggaggcagcaccaacgacaacacctactttggctacagcaccccctgggggtattttgactttaacagattccactgccacttctcaccacgtgactggcagcgactcatcaacaacaactggggattccggcccaagagactcaacttcaagctcttcaacatccaggtcaaagaggtcacgcagaatgaaggcaccaagaccatcgccaataacctcaccagcaccatccaggtgtttacggactcggaataccagctgccgtacgtcctcggctctgcccaccagggctgcctgcctccgttcccggcggacgtcttcatgattcctcagtacggctacctgactctcaacaacggtagtcaggccgtgggacgttcctccttctactgcctggagtacttcccctctcagatgctgagaacgggcaacaactttgagttcagctacactttcgaggacgtgcctttccacagcagctacgcgcacagccagagtttggacaggctgatgaatcctctcatcgaccagtacctgtactacctgtcaagaacccagtctacgggaggcacagcgggaacccagcagttgctgttttctcaggccgggcctagcaacatgtcggctcaggccaaaaactggctgcctggaccctgctacagacagcagcgcgtctccacgacactgtcgcaaaacaacaacagcaactttgcctggactggtgccaccaagtatcatctgaacggcagagactctctggtgaatccgggcgtcgccatggcaacccacaaggacgacgaggaccgcttcttcccatccagcggcatcctcatgtttggcaagcagggagctggaaaagacaacgtggactatagcaacgtgatgctaaccagcgaggaagaaatcaagaccaccaaccccgtggccacagaacagtatggcgtggtggctgataacctacagcagcaaaacaccgctcctattgtgggggccgtcaacagccagggagccttacctggcatggtctggcagaaccgggacgtgtacctgcagggtcctatttgggccaagattcctcacacagatggcaactttcacccgtctcctttaatgggcggctttggacttaaacatccgcctcctcagatcctcatcaaaaacactcctgttcctgcggatcctccaacaacgttcaaccaggccaagctgaattctttcatcacgcagtacagcaccggacaagtcagcgtggagatcgagtgggagctgcagaaggagaacagcaagcgctggaacccagagattcagtatacttccaactactacaaatctacaaatgtggactttgctgttaatactgagggtgtttactctgagcctcgccccattggcactcgttacctcacccgtaatctg

SEQ ID NO: 1561 - protein, 738 aa, Artificial Sequence
  source: /note="Description of Artificial Sequence: Synthetic polypeptide"
MAADGYLPDWLEDNLSEGIREWWDLKPGAPKPKANQQKQDDGRGLVLPGYKYLGPFNGLDKGEPVNAADAAALEHDKAYDQQLKAGDNPYLRYNHADAEFQERLQEDTSFGGNLGRAVFQAKKRVLEPLGLVEEGAKTAPGKKRPVEPSPQRSPDSSTGIGKKGQQPAKKRLNFGQTGDSESVPDPQPIGEPPAGPSGLGSGTMAAGGGAPMADNNEGADGVGSSSGNWHCDSTWLGDRVITTSTRTWALPTYNNHLYKQISNGTSGGSTNDNTYFGYSTPWGYFDFNRFHCHFSPRDWQRLINNNWGFRPKRLNFKLFNIQVKEVTQNEGTKTIANNLTSTIQVFTDSEYQLPYVLGSAHQGCLPPFPADVFMIPQYGYLTLNNGSQAVGRSSFYCLEYFPSQMLRTGNNFEFSYTFEDVPFHSSYAHSQSLDRLMNPLIDQYLYYLSRTQSTGGTAGTQQLLFSQAGPSNMSAQAKNWLPGPCYRQQRVSTTLSQNNNSNFAWTGATKYHLNGRDSLVNPGVAMATHKDDEERFFPSSGVLMFGKQGAGKDNVDYSSVMLTSEEEIKTTNPVATEQYGVVADNLQQQNTAPIVGAVNSQGALPGMVWQNRDVYLQGPIWAKIPHTDGNFHPSPLMGGFGLKHPPPQILIKNTPVPADPPTTFSQAKLASFITQYSTGQVSVEIEWELQKENSKRWNPEIQYTSNYYKSTNVDFAVNTEGTYSEPRPIGTRYLTRNL

SEQ ID NO: 1562 - DNA, 2214 bp, Artificial Sequence
  source: /note="Description of Artificial Sequence: Synthetic polynucleotide"
atggctgccgatggttatcttccagattggctcgaggacaacctctctgagggcattcgcgagtggtgggacttgaaacctggagccccgaaacccaaagccaaccagcaaaagcaggacgacggccggggtctggtgcttcctggctacaagtacctcggacccttcaacggactcgacaagggggagcccgtcaacgcggcggacgcagcggccctcgagcacgacaaggcctacgaccagcagctcaaagcgggtgacaatccgtacctgcggtataaccacgccgacgccgagtttcaggagcgtctgcaagaagatacgtcttttgggggcaacctcgggcgagcagtcttccaggccaagaagcgggttctcgaacctctcggtctggttgaggaaggcgctaagacggctcctggaaagaagagaccggtagagccatcaccccagcgttctccagactcctctacgggcatcggcaagaaaggccagcagcccgcgaaaaagagactcaactttgggcagactggcgactcagagtcagtgcccgaccctcaaccaatcggagaaccccccgcaggcccctctggtctgggatctggtacaatggctgcaggcggtggcgctccaatggcagacaataacgaaggcgccgacggagtgggtagttcctcaggaaattggcattgcgattccacatggctgggcgacagagtcatcaccaccagcacccgaacctgggccctccccacctacaacaaccacctctacaagcaaatctccaacgggacttcgggaggaagcaccaacgacaacacctacttcggctacagcaccccctgggggtattttgactttaacagattccactgccacttctcaccacgtgactggcagcgactcatcaacaacaactggggattccggcccaagagactcaacttcaagctcttcaacatccaggtcaaggaggtcacgcagaatgaaggcaccaagaccatcgccaataaccttaccagcacgattcaggtctttacggactcggaataccagctcccgtacgtcctcggctctgcgcaccagggctgcctgcctccgttcccggcggacgtcttcatgattcctcagtacgggtacctgactctgaacaatggcagtcaggccgtgggccgttcctccttctactgcctggagtactttccttctcaaatgctgagaacgggcaacaactttgagttcagctacacgtttgaggacgtgccttttcacagcagctacgcgcacagccaaagcctggaccggctgatgaaccccctcatcgaccagtacctgtactacctgtctcggactcagtccacgggaggtaccgcaggaactcagcagttgctattttctcaggccgggcctagtaacatgtcggctcaggccaaaaactggctacccgggccctgctaccggcagcaacgcgtctccacgacactgtcgcaaaataacaacagcaactttgcctggaccggtgccaccaagtatcatctgaatggcagagactctctggtaaatcccggtgtcgctatggcaacccacaaggacgacgaagagcgattttttccgtccagcggagtcttaatgtttgggaaacagggagctggaaaagacaacgtggactatagcagcgttatgctaaccagtgaggaagaaattaaaaccaccaacccagtggccacagaacagtacggcgtggtggccgataacctgcaacagcaaaacaccgctcctattgtaggggccgtcaacagtcaaggagccttacctggcatggtctggcagaaccgggacgtgtacctgcagggtcctatctgggccaagattcctcacacggacggaaactttcatccctcgccgctgatgggaggctttggactgaaacacccgcctcctcagatcctgattaagaatacacctgttcccgcggatcctccaactaccttcagtcaagctaagctggcgtcgttcatcacgcagtacagcaccggacaggtcagcgtggaaattgaatgggagctgcagaaagaaaacagcaaacgctggaacccagagattcaatacacttccaactactacaaatctacaaatgtggactttgctgttaacacagaaggcacttattctgagcctcgccccatcggcacccgttacctcacccgtaatctg

SEQ ID NO: 1563 - protein, 737 aa, Artificial Sequence
  source: /note="Description of Artificial Sequence: Synthetic polypeptide"
MAADGYLPDWLEDNLSEGIREWWDLKPGAPKPKANQQKQDDGRGLVLPGYKYLGPFNGLDKGEPVNAADAAALEHDKAYDQQLKAGDNPYLRYNHADAEFQERLQEDTSFGGNLGRAVFQAKKRVLEPLGLVEEGAKTAPGKKRPVEPSPQRSPDSSTGIGKKGQQPAKKRLNFGQTGDSESVPDPQPLGEPPAAPSGVGSGTMAAGGGAPMADNNEGADGVGNASGNWHCDSTWLGDRVITTSTRTWALPTYNNHLYKQISSQSAGSTNDNTYFGYSTPWGYFDFNRFHCHFSPRDWQRLINNNWGFRPKKLRFKLFNIQVKEVTTNDGVTTIANNLTSTVQVFSDSEYQLPYVLGSAHQGCLPPFPADVFMIPQYGYLTLNNGSQSVGRSSFYCLEYFPSQMLRTGNNFEFSYTFEDVPFHSSYAHSQSLDRLMNPLIDQYLYYLARTQSTTGGTAGNRELQFYQAGPSTMAEQAKNWLPGPCYRQQRVSKTLDQNNNSNFAWTGATKYHLNGRNSLVNPGVAMATHKDDEDRFFPSSGVLIFGKTGAANKTTLENVLMTNEEEIKTTNPVATEEYGVVSSNLQSANTAPQTQTVNSQGALPGMVWQNRDVYLQGPIWAKIPHTDGNFHPSPLMGGFGLKHPPPQILIKNTPVPANPPEVFTPAKFASFITQYSTGQVSVEIEWELQKENSKRWNPEIQYTSNYDKSTNVDFAVDSEGVYSEPRPIGTRYLTRNL

SEQ ID NO: 1564 - DNA, 2211 bp, Artificial Sequence
  source: /note="Description of Artificial Sequence: Synthetic polynucleotide"
atggctgccgatggttatcttccagattggctcgaggacaacctctctgagggcattcgcgagtggtgggacctgaaacctggagccccgaaacccaaagccaaccagcaaaagcaggacgacggccggggtctggtgcttcctggctacaagtacctcggacccttcaacggactcgacaagggggagcccgtcaacgcggcggacgcagcggccctcgagcacgacaaggcctacgaccagcagctcaaagcgggtgacaatccgtacctgcggtataaccacgccgacgccgagtttcaggagcgtctgcaagaagatacgtcatttgggggcaacctcgggcgagcagtcttccaggccaagaagcgggttctcgaacctctcggtctggttgaggaaggcgctaagacggctcctggaaagaagagaccggtagagccgtcacctcagcgttcccccgactcctccacgggcatcggcaagaaaggccagcagcccgccaaaaagagactcaatttcggtcagactggcgactcagagtcagtccccgaccctcaacctctcggagaacctccagcagcgccctctggtgtgggatctggtacaatggctgcaggcggtggcgcaccaatggcagacaataacgaaggtgccgacggagtgggtaatgcctcaggaaattggcattgcgattccacatggctgggcgacagagtcattaccaccagcacccgaacctgggccctgcccacctacaacaaccacctctacaagcaaatctccagtcaaagtgcaggtagtaccaacgacaacacctacttcggctacagcaccccctgggggtattttgactttaacagattccactgccacttctcaccacgtgactggcagcgactcatcaacaacaactggggattccggcccaagaagctgcggttcaagctcttcaacatccaggtcaaggaggtcacgacgaatgacggcgttacgaccatcgctaataaccttaccagcacggttcaggtattctcggactcggaataccagctgccgtacgtcctcggctctgcgcaccagggctgcctgcctccgttcccggcggacgtcttcatgattcctcagtacggctacctgactctcaacaatggcagtcagtctgtgggacgttcctccttctactgcctggagtacttcccctctcagatgctgagaacgggcaacaactttgagttcagctacaccttcgaggacgtgcctttccacagcagctacgcacacagccagagcctggaccggctgatgaatcccctcatcgaccagtacttgtactacctggccagaacacagagtaccacaggaggcacagctggcaatcgggaactgcagttttaccaggccgggccttcaactatggccgaacaagccaagaattggttacctggaccttgctaccggcaacaaagagtctccaaaacgctggatcaaaacaacaacagcaactttgcttggactggtgccaccaaatatcacctgaacggcagaaactcgttggttaatcccggcgtcgccatggcaactcacaaggacgacgaggaccgctttttcccatccagcggagtcctgatttttggaaaaactggagcagctaacaaaactacattggaaaatgtgttaatgacaaatgaagaagaaattaaaactactaatcctgtagccacggaagaatacggggtagtcagcagcaacttacaatcggctaatactgcaccccagacacaaactgtcaacagccagggagccttacctggcatggtctggcagaaccgggacgtgtacctgcagggtcccatctgggccaagattcctcacacggatggcaactttcacccgtctcctttgatgggcggctttggacttaaacatccgcctcctcagatcctgatcaagaacactcccgttcccgctaatcctccggaggtgtttactcctgccaagtttgcttcgttcatcacacagtacagcaccggacaagtcagcgtggaaatcgagtgggagctgcagaaggaaaacagcaagcgctggaacccggagattcagtacacctccaactatgataagtcgactaatgtggactttgccgttgacagcgagggtgtttactctgagcctcgccctattggcactcgttacctcacccgtaatctg

SEQ ID NO: 1565 - protein, 735 aa, Artificial Sequence
  source: /note="Description of Artificial Sequence: Synthetic polypeptide"
MAADGYLPDWLEDNLSEGIREWWDLKPGAPKPKANQQKQDDGRGLVLPGYKYLGPFNGLDKGEPVNAADAAALEHDKAYDQQLKAGDNPYLRYNHADAEFQERLQEDTSFGGNLGRAVFQAKKRVLEPLGLVEEGAKTAPGKKRPVEQSPQEPDSSSGIGKSGQQPAKKRLNFGQTGDSESVPDPQPLGEPPAAPSGVGSNTMASGGGAPMADNNEGADGVGNASGNWHCDSTWLGDRVITTSTRTWALPTYNNHLYKQISSQSGASNDNHYFGYSTPWGYFDFNRFHCHFSPRDWQRLINNNWGFRPKRLNFKLFNIQVKEVTTNDGTTTIANNLTSTVQVFTDSEYQLPYVLGSAHQGCLPPFPADVFMIPQYGYLTLNNGSQAVGRSSFYCLEYFPSQMLRTGNNFTFSYTFEDVPFHSSYAHSQSLDRLMNPLIDQYLYYLSRTQTTSGTAQNRELQFSQAGPSSMANQAKNWLPGPCYRQQRVSKTANDNNNSNFAWTGATKYHLNGRDSLVNPGPAMASHKDDEDKFFPMSGVLIFGKQGAGASNVDLDNVMITDEEEIKTTNPVATEQYGTVATNLQSSNTAPATGTVNSQGALPGMVWQDRDVYLQGPIWAKIPHTDGHFHPSPLMGGFGLKHPPPQILIKNTPVPANPPTTFSPAKFASFITQYSTGQVSVEIEWELQKENSKRWNPEIQYTSNYNKSANVDFTVDTNGVYSEPRPIGTRYLTRNL

SEQ ID NO: 1566 - DNA, 2205 bp, Artificial Sequence
  source: /note="Description of Artificial Sequence: Synthetic polynucleotide"
atggctgccgatggttatcttccagattggctcgaggacaacctctctgagggcattcgcgagtggtgggacttgaaacctggagccccgaaacccaaagccaaccagcaaaagcaggacgacggccggggtctggtgcttcctggctacaagtacctcggacccttcaacggactcgacaagggggagcccgtcaacgcggcggatgcagcggccctcgagcacgacaaggcctacgaccagcagctcaaagcgggtgacaatccgtacctgcggtataaccacgccgacgccgagtttcaggagcgtctgcaagaagatacgtcttttgggggcaacctcgggcgagcagtcttccaggccaagaagagggttctcgaacctcttggtctggttgaggaaggtgctaagacggctcctggaaagaaacgtccggtagagcagtcgccacaagagccagactcctcctcgggcattggcaagtcaggccagcagcccgctaaaaagagactcaattttggtcagactggcgactcagagtcagtccccgacccacaacctctcggagaacctccagcagccccctctggtgtgggatctaatacaatggcttcaggcggtggcgcaccaatggcagacaataacgaaggcgccgacggagtgggtaatgcctcaggaaattggcattgcgattccacatggctgggcgacagagtcatcaccaccagcacccgaacatgggccttgcccacctataacaaccacctctacaagcaaatctccagtcaatcaggggccagcaacgacaaccactacttcggctacagcaccccctgggggtattttgatttcaacagattccactgccatttctcaccacgtgactggcagcgactcatcaacaacaattggggattccggcccaagagactcaacttcaagctcttcaacatccaagtcaaggaggtcacgacgaatgatggcaccacgaccatcgctaataaccttaccagcacggttcaagtcttcacggactcggagtaccagttgccgtacgtcctcggctctgcgcaccagggctgcctccctccgttcccggcggacgtgttcatgattccgcagtacggctacctaacgctcaacaatggcagccaggcagtgggacggtcatccttttactgcctggaatatttcccatcgcagatgctgagaacgggcaataactttaccttcagctacaccttcgaggacgtgcctttccacagcagctacgcgcacagccagagcctggaccggctgatgaatcctctcatcgaccagtacctgtattacctgagcagaactcagactacgtccggaactgcccaaaacagggagttgcagtttagccaggcgggtccatctagcatggctaatcaggccaaaaactggctacctggaccctgttaccggcagcagcgcgtttctaaaacagcaaatgacaacaacaacagcaactttgcctggactggtgctacaaaatatcaccttaatgggcgtgattctttagtcaaccctggccctgctatggcctcacacaaagacgacgaagacaagttctttcccatgagcggtgtcttgatttttggaaagcagggcgccggagcttcaaacgttgatttggacaatgtcatgatcacagacgaagaggaaatcaaaaccactaaccccgtggccaccgaacaatatgggactgtggcaaccaatctccagagcagcaacacagcccctgcgaccggaactgtgaattctcagggagccttacctggaatggtgtggcaagacagagacgtatacctgcagggtcctatttgggccaaaattcctcacacggatggacactttcacccgtctcctctcatgggcggctttggacttaagcacccgcctcctcagatcctcatcaaaaacacgcctgttcctgcgaatcctccgacaacgttttcgcctgcaaagtttgcttcattcatcacccagtattccacaggacaagtgagcgtggagattgaatgggagctgcagaaagaaaacagcaaacgctggaatcccgaaatacagtatacatctaactataataaatctgccaacgttgatttcactgtggacaccaatggagtttatagtgagcctcgccccattggcacccgttacctcacccgtaacctg

SEQ ID NO: 1567 - protein, 735 aa, Artificial Sequence
  source: /note="Description of Artificial Sequence: Synthetic polypeptide"
MAADGYLPDWLEDNLSEGIREWWDLKPGAPQPKANQQHQDDGRGLVLPGYKYLGPFNGLDKGEPVNEADAAALEHDKAYDQQLKAGDNPYLKYNHADAEFQERLQEDTSFGGNLGRAVFQAKKRVLEPLGLVEEAAKTAPGKKRPVEQSPQEPDSSSGIGKSGQQPARKRLNFGQTGDSESVPDPQPLGEPPAAPSGVGSNTMASGGGAPMADNNEGADGVGNSSGNWHCDSTWLGDRVITTSTRTWALPTYNNHLYKQISSQSGASNDNHYFGYSTPWGYFDFNRFHCHFSPRDWQRLINNNWGFRPKKLNFKLFNIQVKEVTQNDGTTTIANNLTSTVQVFTDSEYQLPYVLGSAHQGCLPPFPADVFMIPQYGYLTLNNGSQAVGRSSFYCLEYFPSQMLRTGNNFTFSYTFEDVPFHSSYAHSQSLDRLMNPLIDQYLYYLSRTQTTSGTTQQSRLQFSQAGPSSMAQQAKNWLPGPCYRQQRVSKTANDNNNSNFAWTGATKYHLNGRDSLVNPGPAMASHKDDEEKFFPMHGVLIFGKQGTGASNVDLDNVMITDEEEIRTTNPVATEQYGTVATNLQSSNTAPATGTVNSQGALPGMVWQDRDVYLQGPIWAKIPHTDGHFHPSPLMGGFGLKHPPPQILIKNTPVPANPPTTFSPAKFASFITQYSTGQVSVEIEWELQKENSKRWNPEIQYTSNYNKSVNVDFTVDTNGVYSEPRPIGTRYLTRNL

SEQ ID NO: 1568 - DNA, 2205 bp, Artificial Sequence
  source: /note="Description of Artificial Sequence: Synthetic polynucleotide"
atggctgctgacggttatcttccagattggctcgaggacaacctttctgaaggcattcgtgagtggtgggatctgaaacctggagcccctcaacccaaagcgaaccaacaacaccaggacgacggtcggggtcttgtgcttccgggttacaaatacctcggaccctttaacggactcgacaaaggagagccggtcaacgaggcggacgcggcagccctcgaacacgacaaagcttacgaccagcagctcaaggccggtgacaacccgtacctcaagtacaaccacgccgacgccgagtttcaggagcgtcttcaagaagatacgtcttttgggggcaaccttggcagagcagtcttccaggccaaaaagagggtccttgagcctcttggtctggttgaggaagcagctaaaacggctcctggaaagaagaggcctgtagaacagtctcctcaggaaccggactcatcatctggtattggcaaatcgggccaacagcctgccagaaaaagactaaatttcggtcagactggagactcagagtcagtcccagaccctcaacctctcggagaaccaccagcagccccctcaggtgtgggatctaatacaatggcttcaggcggtggcgcaccaatggcagacaataacgagggtgccgatggagtgggtaattcctcaggaaattggcattgcgattccacatggctgggcgacagagtcatcaccaccagcaccagaacctgggccctgcccacttacaacaaccatctctacaagcaaatctccagccaatcaggagcttcaaacgacaaccactactttggctacagcaccccttgggggtattttgactttaacagattccactgccacttctcaccacgtgactggcagcgactcattaacaacaactggggattccggcccaagaaactcaacttcaagctcttcaacatccaagttaaagaggtcacgcagaacgatggcacgacgactattgccaataaccttaccagcacggttcaagtgtttacggactcggagtatcagctcccgtacgtgctcgggtcggcgcaccaaggctgtctcccgccgtttccagcggacgtcttcatgatccctcagtatggatacctcaccctgaacaacggaagtcaagcggtgggacgctcatccttttactgcctggagtacttcccttcgcagatgctaaggactggaaataacttcacattcagctataccttcgaggatgtaccttttcacagcagctacgctcacagccagagtttggatcgcttgatgaatcctcttattgatcagtatctgtactacctgagcagaacgcaaacaacctctggaacaacccaacaatcacggctgcaatttagccaggctgggccttcgtctatggctcagcaggccaaaaattggctacctgggccctgctaccggcaacagagagtttcaaagactgctaacgacaacaacaacagtaactttgcttggacaggggccaccaaatatcatctcaatggccgcgactcgctggtgaatccaggaccagctatggccagtcacaaggacgatgaagaaaaatttttccctatgcacggcgttctaatatttggcaaacaagggacaggggcaagtaacgtagatttagataatgtaatgattacggatgaagaagagattcgtaccaccaatcctgtggcaacagagcagtatggaactgtggcaactaacttgcagagctcaaatacagctcccgcgactggaactgtcaatagtcagggggccttacctggcatggtgtggcaagatcgtgacgtgtaccttcaaggacctatctgggcaaagattcctcacacggatggacactttcatccttctcctctgatgggaggctttggactgaaacatccgcctcctcaaatcttgatcaaaaatactccggtaccggcaaatcctccgacgactttcagcccggccaagtttgcttcatttatcactcagtactccactggacaggtcagcgtggaaattgagtgggagctacagaaagaaaacagcaaacgttggaatccagagattcagtacacttccaactacaacaagtctgttaatgtggactttactgtagacactaatggtgtttatagtgaacctcgccctattggaacccggtatctcacacgaaacttg

SEQ ID NO: 1569 - protein, 736 aa, Artificial Sequence
  source: /note="Description of Artificial Sequence: Synthetic polypeptide"
MAADGYLPDWLEDNLSEGIREWWDLKPGAPKPKANQQKQDDGRGLVLPGYKYLGPFNGLDKGEPVNAADAAALEHDKAYDQQLKAGDNPYLRYNHADAEFQERLQEDTSFGGNLGRAVFQAKKRVLEPLGLVEEGAKTAPGKKRPVEQSPQEPDSSSGIGKKGQQPARKRLNFGQTGDSESVPDPQPLGEPPAAPSGVGSNTMAAGGGAPMADNNEGADGVGNASGNWHCDSTWLGDRVITTSTRTWALPTYNNHLYKQISSQSGGSTNDNTYFGYSTPWGYFDFNRFHCHFSPRDWQRLINNNWGFRPKRLNFKLFNIQVKEVTTNDGTTTIANNLTSTVQVFTDSEYQLPYVLGSAHQGCLPPFPADVFMIPQYGYLTLNNGSQAVGRSSFYCLEYFPSQMLRTGNNFEFSYTFEDVPFHSSYAHSQSLDRLMNPLIDQYLYYLSRTQTTSGTAGNRTLQFSQAGPSSMANQAKNWLPGPCYRQQRVSKTANQNNNSNFAWTGATKYHLNGRDSLVNPGPAMATHKDDEDKFFPMSGVLIFGKQGAGNSNVDLDNVMITNEEEIKTTNPVATEQYGTVATNLQSANTAPATGTVNSQGALPGMVWQDRDVYLQGPIWAKIPHTDGHFHPSPLMGGFGLKHPPPQILIKNTPVPANPPTTFSPAKFASFITQYSTGQVSVEIEWELQKENSKRWNPEIQYTSNYNKSTNVDFAVDTNGVYSEPRPIGTRYLTRNL

SEQ ID NO: 1570 - protein, 736 aa, Artificial Sequence
  source: /note="Description of Artificial Sequence: Synthetic polypeptide"
MAADGYLPDWLEDNLSEGIREWWDLKPGAPKPKANQQKQDDGRGLVLPGYKYLGPFNGLDKGEPVNAADAAALEHDKAYDQQLKAGDNPYLRYNHADAEFQERLQEDTSFGGNLGRAVFQAKKRVLEPLGLVEEGAKTAPGKKRPVEQSPQEPDSSSGIGKKGQQPAKKRLNFGQTGDSESVPDPQPLGEPPAAPSGVGSNTMASGGGAPMADNNEGADGVGNASGNWHCDSTWLGDRVITTSTRTWALPTYNNHLYKQISSQSGASTNDNTYFGYSTPWGYFDFNRFHCHFSPRDWQRLINNNWGFRPKRLNFKLFNIQVKEVTTNDGTTTIANNLTSTVQVFTDSEYQLPYVLGSAHQGCLPPFPADVFMIPQYGYLTLNNGSQAVGRSSFYCLEYFPSQMLRTGNNFQFSYTFEDVPFHSSYAHSQSLDRLMNPLIDQYLYYLSRTQTTSGTAGNRELQFSQAGPSSMANQAKNWLPGPCYRQQRVSKTTNQNNNSNFAWTGATKYHLNGRDSLVNPGPAMATHKDDEDKFFPMSGVLIFGKQGAGNSNVDLDNVMITNEEEIKTTNPVATEEYGTVATNLQSANTAPATGTVNSQGALPGMVWQNRDVYLQGPIWAKIPHTDGHFHPSPLMGGFGLKHPPPQILIKNTPVPANPPTTFSPAKFASFITQYSTGQVSVEIEWELQKENSKRWNPEIQYTSNYNKSTNVDFAVDTNGVYSEPRPIGTRYLTRNL

SEQ ID NO: 1571 - protein, 736 aa, Artificial Sequence
  source: /note="Description of Artificial Sequence: Synthetic polypeptide"
MAADGYLPDWLEDNLSEGIREWWDLKPGAPKPKANQQKQDDGRGLVLPGYKYLGPFNGLDKGEPVNAADAAALEHDKAYDQQLKAGDNPYLRYNHADAEFQERLQEDTSFGGNLGRAVFQAKKRVLEPLGLVEEGAKTAPGKKRPVEQSPQEPDSSSGIGKKGQQPARKRLNFGQTGDSESVPDPQPLGEPPAAPSGVGSNTMAAGGGAPMADNNEGADGVGNASGNWHCDSTWLGDRVITTSTRTWALPTYNNHLYKQISSQSGGSTNDNTYFGYSTPWGYFDFNRFHCHFSPRDWQRLINNNWGFRPKRLNFKLFNIQVKEVTTNDGTTTIANNLTSTVQVFTDSEYQLPYVLGSAHQGCLPPFPADVFMIPQYGYLTLNNGSQAVGRSSFYCLEYFPSQMLRTGNNFEFSYTFEDVPFHSSYAHSQSLDRLMNPLIDQYLYYLSRTQTTSGTAGNRELQFSQAGPSSMANQAKNWLPGPCYRQQRVSKTTNQNNNSNFAWTGATKYHLNGRDSLVNPGPAMATHKDDEDKFFPMSGVLIFGKQGAGNSNVDLDNVMITSEEEIKTTNPVATEEYGTVATNLQSSNTAPATGTVNSQGALPGMVWQERDVYLQGPIWAKIPHTDGHFHPSPLMGGFGLKHPPPQILIKNTPVPANPPTTFSPAKFASFITQYSTGQVSVEIEWELQKENSKRWNPEIQYTSNYNKSTNVDFAVDTNGVYSEPRPIGTRYLTRNL

SEQ ID NO: 1572 - protein, 736 aa, Artificial Sequence
  source: /note="Description of Artificial Sequence: Synthetic polypeptide"
MAADGYLPDWLEDNLSEGIREWWDLKPGAPKPKANQQKQDDGRGLVLPGYKYLGPFNGLDKGEPVNAADAAALEHDKAYDQQLKAGDNPYLRYNHADAEFQERLQEDTSFGGNLGRAVFQAKKRVLEPLGLVEEGAKTAPGKKRPVEQSPQEPDSSSGIGKKGQQPARKRLNFGQTGDSESVPDPQPLGEPPAAPSGVGSNTMASGGGAPMADNNEGADGVGNASGNWHCDSTWLGDRVITTSTRTWALPTYNNHLYKQISSQSGGSTNDNTYFGYSTPWGYFDFNRFHCHFSPRDWQRLINNNWGFRPKKLNFKLFNIQVKEVTTNDGTTTIANNLTSTVQVFTDSEYQLPYVLGSAHQGCLPPFPADVFMIPQYGYLTLNNGSQAVGRSSFYCLEYFPSQMLRTGNNFEFSYTFEDVPFHSSYAHSQSLDRLMNPLIDQYLYYLSRTQTTSGTAGNRELQFSQAGPSSMANQAKNWLPGPCYRQQRVSKTTNQNNNSNFAWTGATKYHLNGRDSLVNPGPAMATHKDDEDKFFPMSGVLIFGKQGAGNSNVDLDNVMITSEEEIKTTNPVATEEYGTVATNLQSANTAPATGTVNSQGALPGMVWQDRDVYLQGPIWAKIPHTDGHFHPSPLMGGFGLKHPPPQILIKNTPVPANPPTTFSPAKFASFITQYSTGQVSVEIEWELQKENSKRWNPEIQYTSNYNKSTNVDFAVDTNGVYSEPRPIGTRYLTRNL

SEQ ID NO: 1573 - protein, 736 aa, Artificial Sequence
  source: /note="Description of Artificial Sequence: Synthetic polypeptide"
MAADGYLPDWLEDNLSEGIREWWDLKPGAPKPKANQQKQDDGRGLVLPGYKYLGPFNGLDKGEPVNAADAAALEHDKAYDQQLKAGDNPYLRYNHADAEFQERLQEDTSFGGNLGRAVFQAKKRVLEPLGLVEEGAKTAPGKKRPVEQSPQEPDSSSGIGKKGQQPARKRLNFGQTGDSESVPDPQPLGEPPAAPSGVGSNTMAAGGGAPMADNNEGADGVGNASGNWHCDSTWLGDRVITTSTRTWALPTYNNHLYKQISSQSGGSTNDNTYFGYSTPWGYFDFNRFHCHFSPRDWQRLINNNWGFRPKKLNFKLFNIQVKEVTTNDGTTTIANNLTSTVQVFTDSEYQLPYVLGSAHQGCLPPFPADVFMIPQYGYLTLNNGSQAVGRSSFYCLEYFPSQMLRTGNNFQFSYTFEDVPFHSSYAHSQSLDRLMNPLIDQYLYYLSRTQTTSGTAGNRTLQFSQAGPSSMANQAKNWLPGPCYRQQRVSKTTNQNNNSNFAWTGATKYHLNGRDSLVNPGPAMATHKDDEDKFFPMSGVLIFGKQGAGNSNVDLDNVMITNEEEIKTTNPVATEEYGTVATNLQSANTAPATGTVNSQGALPGMVWQDRDVYLQGPIWAKIPHTDGHFHPSPLMGGFGLKHPPPQILIKNTPVPANPPTTFSPAKFASFITQYSTGQVSVEIEWELQKENSKRWNPEIQYTSNYNKSTNVDFAVDTNGVYSEPRPIGTRYLTRNL

SEQ ID NO: 1574 - protein, 736 aa, Artificial Sequence
  source: /note="Description of Artificial Sequence: Synthetic polypeptide"
MAADGYLPDWLEDNLSEGIREWWDLKPGAPKPKANQQKQDDGRGLVLPGYKYLGPFNGLDKGEPVNAADAAALEHDKAYDQQLKAGDNPYLRYNHADAEFQERLQEDTSFGGNLGRAVFQAKKRVLEPLGLVEEGAKTAPGKKRPVEQSPQEPDSSSGIGKKGQQPAKKRLNFGQTGDSESVPDPQPLGEPPAAPSGVGSNTMAAGGGAPMADNNEGADGVGNASGNWHCDSTWLGDRVITTSTRTWALPTYNNHLYKQISSQSGGSTNDNTYFGYSTPWGYFDFNRFHCHFSPRDWQRLINNNWGFRPKKLNFKLFNIQVKEVTTNDGTTTIANNLTSTVQVFTDSEYQLPYVLGSAHQGCLPPFPADVFMIPQYGYLTLNNGSQAVGRSSFYCLEYFPSQMLRTGNNFEFSYTFEDVPFHSSYAHSQSLDRLMNPLIDQYLYYLSRTQTTSGTAGNRTLQFSQAGPSSMANQAKNWLPGPCYRQQRVSKTANQNNNSNFAWTGATKYHLNGRDSLVNPGPAMATHKDDEDKFFPMSGVLIFGKQGAGNSNVDLDNVMITSEEEIKTTNPVATEQYGTVATNLQSSNTAPATGTVNSQGALPGMVWQNRDVYLQGPIWAKIPHTDGHFHPSPLMGGFGLKHPPPQILIKNTPVPANPPTTFSPAKFASFITQYSTGQVSVEIEWELQKENSKRWNPEIQYTSNYNKSTNVDFAVDTNGVYSEPRPIGTRYLTRNL

SEQ ID NO: 1575 - protein, 736 aa, Artificial Sequence
  source: /note="Description of Artificial Sequence: Synthetic polypeptide"
MAADGYLPDWLEDNLSEGIREWWDLKPGAPKPKANQQKQDDGRGLVLPGYKYLGPFNGLDKGEPVNAADAAALEHDKAYDQQLKAGDNPYLRYNHADAEFQERLQEDTSFGGNLGRAVFQAKKRVLEPLGLVEEGAKTAPGKKRPVEQSPQEPDSSSGIGKKGQQPAKKRLNFGQTGDSESVPDPQPLGEPPAAPSGVGSNTMASGGGAPMADNNEGADGVGNASGNWHCDSTWLGDRVITTSTRTWALPTYNNHLYKQISSQSGGSTNDNTYFGYSTPWGYFDFNRFHCHFSPRDWQRLINNNWGFRPKKLNFKLFNIQVKEVTTNDGTTTIANNLTSTVQVFTDSEYQLPYVLGSAHQGCLPPFPADVFMIPQYGYLTLNNGSQAVGRSSFYCLEYFPSQMLRTGNNFEFSYTFEDVPFHSSYAHSQSLDRLMNPLIDQYLYYLSRTQTTSGTAGNRTLQFSQAGPSSMANQAKNWLPGPCYRQQRVSKTANQNNNSNFAWTGATKYHLNGRDSLVNPGPAMATHKDDEDKFFPMSGVLIFGKQGAGNSNVDLDNVMITSEEEIKTTNPVATEEYGTVATNLQSSNTAPATGTVNSQGALPGMVWQNRDVYLQGPIWAKIPHTDGHFHPSPLMGGFGLKHPPPQILIKNTPVPANPPTTFSPAKFASFITQYSTGQVSVEIEWELQKENSKRWNPEIQYTSNYNKSTNVDFAVDTNGVYSEPRPIGTRYLTRNL

SEQ ID NO: 1576 - protein, 736 aa, Artificial Sequence
  source: /note="Description of Artificial Sequence: Synthetic polypeptide"
MAADGYLPDWLEDNLSEGIREWWDLKPGAPKPKANQQKQDDGRGLVLPGYKYLGPFNGLDKGEPVNAADAAALEHDKAYDQQLKAGDNPYLRYNHADAEFQERLQEDTSFGGNLGRAVFQAKKRVLEPLGLVEEGAKTAPGKKRPVEQSPQEPDSSSGIGKKGQQPAKKRLNFGQTGDSESVPDPQPLGEPPAAPSGVGSNTMASGGGAPMADNNEGADGVGNASGNWHCDSTWLGDRVITTSTRTWALPTYNNHLYKQISSQSGGSTNDNTYFGYSTPWGYFDFNRFHCHFSPRDWQRLINNNWGFRPKKLNFKLFNIQVKEVTTNDGTTTIANNLTSTVQVFTDSEYQLPYVLGSAHQGCLPPFPADVFMIPQYGYLTLNNGSQAVGRSSFYCLEYFPSQMLRTGNNFQFSYTFEDVPFHSSYAHSQSLDRLMNPLIDQYLYYLSRTQTTSGTAGNRELQFSQAGPSSMANQAKNWLPGPCYRQQRVSKTTNQNNNSNFAWTGATKYHLNGRDSLVNPGPAMATHKDDEDKFFPMSGVLIFGKQGAGNSNVDLDNVMITNEEEIKTTNPVATEQYGTVATNLQSANTAPATGTVNSQGALPGMVWQDRDVYLQGPIWAKIPHTDGHFHPSPLMGGFGLKHPPPQILIKNTPVPANPPTTFSPAKFASFITQYSTGQVSVEIEWELQKENSKRWNPEIQYTSNYNKSTNVDFAVDTNGVYSEPRPIGTRYLTRNL

SEQ ID NO: 1577 - DNA, 2211 bp, Artificial Sequence
  source: /note="Description of Artificial Sequence: Synthetic polynucleotide"
atggctgccgatggttatcttccagattggctcgaggacaacctctctgagggcattcgcgagtggtgggacttgaaacctggagccccgaaacccaaagccaaccagcaaaagcaggacgacggccggggtctggtgcttcctggctacaagtacctcggacccttcaacggactcgacaagggggagcccgtcaacgcggcggacgcagcggccctcgagcacgacaaggcctacgaccagcagctcaaagcgggtgacaatccgtacctgcggtataaccacgccgacgccgagtttcaggagcgtctgcaagaagatacgtcttttgggggcaacctcgggcgagcagtcttccaggccaagaagcgggttctcgaacctctcggtctggttgaggaaggcgctaagacggctcctggaaagaagagaccggtagagcaatcaccccaggaaccagactcctcttcgggcatcggcaagaaaggccagcagcccgcgaaaaagagactcaactttgggcagacaggcgactcagagtcagtgcccgaccctcaaccactcggagaaccccccgcagccccctctggtgtgggatctaatacaatggctgcaggcggtggcgctccaatggcagacaataacgaaggcgccgacggagtgggtaacgcctcaggaaattggcattgcgattccacatggctgggcgacagagtcatcaccaccagcacccgaacctgggccctccccacctacaacaaccacctctacaagcaaatctccagccaatcgggagcaagcaccaacgacaacacctacttcggctacagcaccccctgggggtattttgactttaacagattccactgccacttctcaccacgtgactggcagcgactcatcaacaacaactggggattccggcccaagagactcaacttcaagctcttcaacatccaggtcaaggaggtcacgacgaatgatggcaccacgaccatcgccaataaccttaccagcacggttcaggtctttacggactcggaataccagctcccgtacgtcctcggctctgcgcaccagggctgcctgcctccgttcccggcggacgtcttcatgattcctcagtacgggtacctgactctgaacaatggcagtcaggccgtgggccgttcctccttctactgcctggagtactttccttctcaaatgctgagaacgggcaacaactttgagttcagctacacgtttgaggacgtgccttttcacagcagctacgcgcacagccaaagcctggaccggctgatgaaccccctcatcgaccagtacctgtactacctgtctcggactcagaccacgagtggtaccgcaggaaatcggacgttgcaattttctcaggccgggcctagtagcatggcgaatcaggccaaaaactggctacccgggccctgctaccggcagcaacgcgtctccaagacagcgaatcaaaataacaacagcaactttgcctggaccggtgccaccaagtatcatctgaatggcagagactctctggtaaatcccggtcccgctatggcaacccacaaggacgacgaagacaaattttttccgatgagcggagtcttaatatttgggaaacagggagctggaaatagcaacgtggaccttgacaacgttatgataaccagtgaggaagaaattaaaaccaccaacccagtggccacagaacagtacggcacggtggccactaacctgcaatcgtcaaacaccgctcctgctacagggaccgtcaacagtcaaggagccttacctggcatggtctggcagaaccgggacgtgtacctgcagggtcctatctgggccaagattcctcacacggacggacactttcatccctcgccgctgatgggaggctttggactgaaacacccgcctcctcagatcctgattaagaatacacctgttcccgcgaatcctccaactaccttcagtccagctaagtttgcgtcgttcatcacgcagtacagcaccggacaggtcagcgtggaaattgaatgggagctgcagaaagaaaacagcaaacgctggaacccagagattcaatacacttccaactacaacaaatctacaaatgtggactttgctgttgacacaaatggcgtttattctgagcctcgccccatcggcacccgttacctcacccgtaatctgtaa

SEQ ID NO: 1578 - protein, 738 aa, Artificial Sequence; identical to SEQ ID NO: 7
  source: /note="Description of Artificial Sequence: Synthetic polypeptide"

SEQ ID NO: 1579 - DNA, 2211 bp, Artificial Sequence
  source: /note="Description of Artificial Sequence: Synthetic polynucleotide"
atggctgccgatggttatcttccagattggctcgaggacaacctctctgagggcattcgcgagtggtgggacttgaaacctggagccccgaaacccaaagccaaccagcaaaagcaggacgacggccggggtctggtgcttcctggctacaagtacctcggacccttcaacggactcgacaagggggagcccgtcaacgcggcggacgcagcggccctcgagcacgacaaggcctacgaccagcagctcaaagcgggtgacaatccgtacctgcggtataaccacgccgacgccgagtttcaggagcgtctgcaagaagatacgtcttttgggggcaacctcgggcgagcagtcttccaggccaagaagcgggttctcgaaccttttggtctggttgaggaaggcgctaagacggctcctggaaagaaacgtccggtagagcagtcgccacaagagccagactcctcctcgggcatcggcaagacaggccagcagcccgctaaaaagagactcaattttggtcagactggcgactcagagtcagtccccgacccacaacctctcggagaacctccagcaacccccgctgctgtgggacctactacaatggcttcaggcggtggcgcaccaatggcagacaataacgaaggcgccgacggagtgggtaatgcctcaggaaattggcattgcgattccacatggctgggcgacagagtcatcaccaccagcacccgcacctgggccttgcccacctacaataaccacctctacaagcaaatctccagtgcttcaacgggggccagcaacgacaaccactacttcggctacagcaccccctgggggtattttgatttcaacagattccactgccacttttcaccgcgtgactggcagcgactcatcaacaacaattggggattccggcccaagagactcaacttcaagctcttcaacatccaagtcaaggaggtcacgacgagtgatggcgtcacaaccatcgctaataaccttaccagcacggttcaagtcttctcggactcggagtaccagcttccgtacgtcctcggctctgcgcaccagggctgcctccctccgttcccggcggacgtgttcatgattccgcaatacggctacctgacgctcaacaatggcagccaagccgtgggacgttcatccttttactgcctggaatatttcccttctcagatgctgagaacgggcaacaactttaccttcagctacacctttgaggaagtgcctttccacagcagctacgcgcacagccagagcctggaccggctgatgaatcctctcatcgaccaatacctgtattacctgaacagaactcaaaatcagtccggaagtgcccaaaacaaggacttgctgtttagccgtgggtctccagctggcatgtctgttcagcccaaaaactggctacctggaccctgttatcggcagcagcgcgtttctaaaacaaaaacaggcaacaacaacagcaattttacctggactggtgcttcaaaatataacctcaatgggcatgaatccatcatcaaccctggcactgctatggcctcacacaaagacgacgaagacaagttctttcccatgagcggtgtcatgatttttggaaaagagagcgccggagcttcaaacactgcattggacaatgtcatgattacagacgaagaggaaattaaagccactaaccctgtggccaccgaaagatttgggaccgtggcagtcaatttccagagcagcagcacacaccctgcgaccggagatgtgcatgttatgggagcattacctggcatggtgtggcaagatagagacgtgtacctgcagggtcccatctgggccaaaattcctcacacagatggacactttcacccgtctcctcttatgggcggctttggactcaagcacccgcctcctcagatcctcatcaaaaacacgcctgttcctgcgaatcctccggcggagttttcagctacaaagtttgcttcattcatcacccaatactccacaggacaagtgagtgtggaaattgaatgggagctgcagaaagaaaacagcaagcgctggaatcccgaagtgcagtacacatccaattatgcaaaatctgccaacgttgattttaccgtggacaacaatggactttatactgagcctcgccccattggcacccgttaccttacccgtcccctgtaa

SEQ ID NO: 1580 - DNA, 2211 bp, Artificial Sequence; identical to SEQ ID NO: 1579
  source: /note="Description of Artificial Sequence: Synthetic polynucleotide"

SEQ ID NO: 1581 - DNA, 2202 bp, Artificial Sequence
  source: /note="Description of Artificial Sequence: Synthetic polynucleotide"
atgactgacggttaccttccagattggctagaggacaacctctctgaaggcgttcgagagtggtgggcgctgcaacctggagcccctaaacccaaggcaaatcaacaacatcaggacaacgctcggggtcttgtgcttccgggttacaaatacctcggacccggcaacggacttgacaagggggaacccgtcaacgcagcggacgcggcagccctcgaacacgacaaggcctacgaccagcagctcaaggccggtgacaacccctacctcaagtacaaccacgccgacgccgagtttcaggagcgtcttcaagaagatacgtcttttgggggcaacctcggacgagcagtcttccaggccaaaaagaggatccttgagcctctgggtctggttgaggaagcggctaagacggctcctggaaaaaagagacctgtagagcaatctccagcagaaccggactcctcttcgggcatcggcaaatcaggccagcagcccgctagaaaaagactgaattttggtcagactggcgacacagagtcagtcccagaccctcaaccactcggacaacctcccgcagccccctctggtgtgggatctactacaatggcttcaggcggtggcgcaccaatggcagacaataacgagggtgccgatggagtgggtaattcctcaggaaattggcattgcgattcccaatggctgggcgacagagtcatcaccaccagcacccgcacctgggccctgcccacctacaacaatcacctctacaagcaaatctccagccaatcaggagccaccaacgacaaccactactttggctacagcaccccctgggggtattttgacttcaacagattccactgccacttttcaccacgtgactggcaaagactcatcaacaacaactggggattccgacccaagagactcaacttcaagctctttaacattcaagtcaaagaggtcacgcagaatgacggtacgacgacgattgccaataaccttaccagcacggttcaggtgtttactgactccgagtaccagctcccgtacgtcctcggctcggcgcatcagggatgcctcccgccgttcccagcagacgtcttcatggtcccacagtatggatacctcaccctgaacaacgggagtcaggcggtaggacgctcttccttttactgcctggagtactttccttctcagatgctgcgtactggaaacaactttcagtttagctacacttttgaagacgtgcctttccacagcagctacgctcacagccaaagtctggaccgtctcatgaatcctctgatcgaccagtacctgtactatctgaacaggacacaaacagccagtggaactcagcagtctcggctactgtttagccaagctggacccaccagtatgtctcttcaagctaaaaactggctgcctggaccttgctacagacagcagcgtctgtcaaagcaggcaaacgacaacaacaacagcaactttccctggactggtgccaccaaatatcatctgaatggccgggactcattggtgaacccgggccctgctatggccagtcacaaggatgacaaagaaaagtttttccccatgcatggaaccctgatatttggtaaagaaggaacaaatgccaacaacgcggatttggaaaatgtcatgattacagatgaagaagaaatccgcaccaccaatcccgtggctacggagcagtacgggactgtgtcaaataatttgcaaaactcaaacgctggtccaactactggaactgtcaatcaccaaggagcgttacctggtatggtgtggcaggatcgagacgtgtacctgcagggacccatttgggccaagattcctcacaccgatggacactttcatccttctccactgatgggaggttttgggctcaaacacccgcctcctcagatcatgatcaaaaacactcccgttccagccaatcctcccacaaactttagtgcggcaaagtttgcttccttcatcacacagtactccacggggcaggtcagcgtggagatcgagtgggagctgcagaaggagaacagcaaacgctggaatcccgaaattcagtacacttccaactacaacaaatctgttaatgtggactttactgtggacactaatggtgtgtattcagagcctcgccccattggcaccagatacctgactcgtaatctgtaa

SEQ ID NO: 1582 - DNA, 2211 bp, Artificial Sequence
  source: /note="Description of Artificial Sequence: Synthetic polynucleotide"
atggctgccgatggttatcttccagattggctcgaggacaacctctctgagggcattcgcgagtggtgggacttgaaacctggagccccgaaacccaaagccaaccagcaaaagcaggacgacggccggggtctggtgcttcctggctacaagtacctcggacccttcaacggactcgacaagggggagcccgtcaacgcggcggacgcagcggccctcgagcacgacaaggcctacgaccagcagctcaaagcgggtgacaatccgtacctgcggtataaccacgccgacgccgagtttcaggagcgtctgcaagaagatacgtcttttgggggcaacctcgggcgagcagtcttccaggccaagaagcgggttctcgaaccttttggtctggttgaggaaggcgctaagacggctcctggaaagaaacgtccggtagagcagtcgccacaagagccagactcctcctcgggcatcggcaagacaggccagcagcccgctaaaaagagactcaattttggtcagactggcgactcagagtcagtccccgacccacaacctctcggagaacctccagcaacccccgctgctgtgggacctactacaatggcttcaggcggtggcgcaccaatggcagacaataacgaaggcgccgacggagtgggtaatgcctcaggaaattggcattgcgattccacatggctgggcgacagagtcatcaccaccagcacccgcacctgggccttgcccacctacaataaccacctctacaagcaaatctccagtgcttcaacgggggccagcaacgacaaccactacttcggctacagcaccccctgggggtattttgatttcaacagattccactgccacttttcaccacgtgactggcagcgactcatcaacaacaattggggattccggcccaagagactcaacttcaagctcttcaacatccaagtcaaggaggtcacgacgaatgatggcgtcacaaccatcgctaataaccttaccagcacggttcaagtcttctcggactcggagtaccagcttccgtacgtcctcggctctgcgcaccagggctgcctccctccgttcccggcggacgtgttcatgattccgcaatacggctacctgacgctcaacaatggcagccaagccgtgggacgttcatccttttactgcctggaatatttcccttctcagatgctgagaacgggcaacaactttaccttcagctacacctttgaggaagtgcctttccacagcagctacgcgcacagccagagcctggaccggctgatgaatcctctcatcgaccaatacctgtattacctgaacagaactcaaaatcagtccggaagtgcccaaaacaaggacttgctgtttagccgtgggtctccagctggcatgtctgttcagcccaaaaactggctacctggaccctgttatcggcagcagcgcgtttctaaaacaaaaacagacaacaacaacagcaattttacctggactggtgcttcaaaatataacctcaatgggcgtgaatccatcatcaaccctggcactgctatggcctcacacaaagacgacgaagacaagttctttcccatgagcggtgtcatgatttttggaaaagagagcgccggagcttcaaacactgcattggacaatgtcatgattacagacgaagaggaaattaaagccactaaccctgtggccaccgaaagatttgggaccgtggcagtcaatttccagagcagcagcacagaccctgcgaccggagatgtgcatgttatgggagcattacctggcatggtgtggcaagatagagacgtgtacctgcagggtcccatctgggccaaaattcctcacacagatggacactttcacccgtctcctcttatgggcggctttggactcaagcacccgcctcctcagatcctcatcaaaaacacgcctgttcctgcgaatcctccggcggagttttcagctacaaagtttgcttcattcatcacccaatactccacaggacaagtgagtgtggaaattgaatgggagctgcagaaagaaaacagcaagcgctggaatcccgaagtgcagtacacatccaattatgcaaaatctgccaacgttgattttaccgtggacaacaatggactttatactgagcctcgccccattggcacccgttaccttacccgtcccctgtaa

SEQ ID NO: 1583 - DNA, 2211 bp, Artificial Sequence
  source: /note="Description of Artificial Sequence: Synthetic polynucleotide"
atggctgccgatggttatcttccagattggctcgaggacaacctctctgagggcattcgcaagtggtgggacttgaaacctggagccccgaaacccaaagccaaccagcaaaagcaggacgacggccggggtctggtgcttcctggctacaagtacctcggacccttcaacggactcgacaagggggagcccgtcaacgcggcggacgcagcggccctcgagcacgacaaggcctacgaccagcagctcaaagcgggtgacaatccgtacctgcggtataaccacgccgacgccgagtttcaggagcgtctgcaagaagatacgtcttttgggggcaacctcgggagagcagtcttccaggccaagaagcgggttctcgaaccttttggtctggttgaggaaggcgctaagacggctcctggaaagaaacgtccggtagagcagtcgccacaagagccagactcctcctcgggcatcggcaagacaggccagcagcccgctaaaaagagactcaattttggtcagactggcgactcagagtcagtccccgacccacaacctctcggagaacctccagcaacccccgctgctgtgggacctactacaatggcttcaggcggtggcgcaccaatggcagacaataacgaaggcgccgacggagtgggtaatgcctcaggaaattggcattgcgattccacatggctgggcgacagagtcatcaccaccagcacccgcacctgggccttgcccacctacaataaccacctctacaagcaaatctccagtgcttcaacgggggccagcaacgacaaccactacttcggctacagcaccccctgggggtattttgatttcaacagattccactgccacttttcaccacgtgactggcagcgactcatcaacaacaattggggattccggcccaagagactcaacttcaagctcttcaacatccaagtcaaggaggtcacgacgaatgatggcgtcacaaccatcgctaataaccttaccagcacggttcaagtcttctcggactcggagtaccagcttccgtacgtcctcggctctgcgcaccagggctgcctccctccgttcccggcggacgtgttcatgattccgcaatacggctacctgacgctcaacaatggcagccaagccgtgggacgttcatccttttactgcctggaatatttcccttctcagatgctgagaacgggcaacaactttaccttcagctacacctttgaggaagtgcctttccacagcagctacgcgcacagccagagcctggaccggctgatgaatcctctcatcgaccaatacctgtattacctgaacagaactcaaaatcagtccggaagtgcccaaaacaaggacttgctgtttagccgtgggtctccagctggcatgtctgttcagcccaaaaactggctacctggaccctgttatcggcagcagcgcgtttctaaaacaaaaacagacaacaacaacagcaattttacctggactggtgcttcaaaatataacctcaatgggcgtgaatccatcatcaaccctggcactgctatggcctcacacaaagacgacaaagacaagttctttcccatgagcggtgtcatgatttttggaaaagagagcgccggagcttcaaacactgcattggacaatgtcatgattacagacgaagaggaaattaaagccactaaccctgtggccaccgaaagatttgggaccgtggcagtcaatttccagagcagcagcacagaccctgcgaccggagatgtgcatgttatgggagcattacctggcatggtgtggcaagatagagacgtgtacctgcagggtcccatttgggccaaaattcctcacacagatggacactttcacccgtctcctcttatgggcggctttggactcaagcacccgcctcctcagatcctcatcaaaaacacacctgttcctgcgaatcctccggcggagttttcagctacaaagtttgcttcattcatcacccaatactccacaggacaagtgagtgtggaaattgaatgggagctgcagaaagaaaacagcaagcgctggaatcccgaagtgcagtacacatccaattatgcaaaatctgccaacgttgattttaccgtggacaacaatggactttatactgagcctcgccccattggcacccgttaccttacccgtcccctgtaa

SEQ ID NO: 1584 - DNA, 2211 bp, Artificial Sequence
  source: /note="Description of Artificial Sequence: Synthetic polynucleotide"
atggctgccgatggttatcttccagattggctcgaggacaacctctctgagggcattcgcgagtggtgggacttgaaacctggagccccgaaacccaaagccaaccagcaaaagcaggacaacggccggggtctggtgcttcctggctacaagtacctcggacccttcaacggactcgacaagggggagcccgtcaacgcggcggacgcagcggccctcgagcacgacaaggcctacgaccagcagctcaaagcgggtgacaatccgtacctgcggtataaccacgccgacgccgagtttcaggagcgtctgcaagaagatacgtcttttgggggcaacctcgggcgagcagtcttccaggccaagaagcgggttctcgaaccttttggtctggttgaggaaggcgctaagacggctcctggaaagaaacgtccggtagagcagtcgccacaagagccagactcctcctcgggcatcggcaagacaggccagcagcccgctaaaaagagactcaattttggtcagactggcgactcagagtcagtccccgacccacaacctctcggagaacctccagcaacccccgctgctgtgggacctactacaatggcttcaggcggtggcgcaccaatggcagacaataacgaaggcgccgacggagtgggtaatgcctcaggaaattggcattgcgattccacatggctgggcgacagagtcatcaccaccagcacccgcacctgggccttgcccacctacaataaccacctctacaagcaaatctccagtgcttcaacgggggccagcaacgacaaccactacttcggctacagcaccccctgggggtattttgatttcaacagattccactgccacttttcaccacgtgactggcagcgactcatcaacaacaattggggattccggcccaagagactcaacttcaagctcttcaacatccaagtcaaggaggtcacgacgaatgatggcgtcacaaccatcgctaataaccttaccagcacggttcaagtcttctcggactcggagtaccagcttccgtacgtcctcggctctgcgcaccagggctgcctccctccgttcccggcggacgtgttcatgattccgcaatacggctacctgacgctcaacaatggcagccaagccgtgggacgttcatccttttactgcctggaatatttcccttctcagatgctgagaacgggcaacaactttaccttcagctacacctttgaggaagtgcctttccacagcagctacgcgcacagccagagcctggaccggctgatgaatcctctcatcgaccaatacctgtattacctgaacagaactcaaaatcagtccggaagtgcccaaaacaaggacttgctgtttagccgtgggtctccagctggcatgtctgttcagcccaaaaactggctacctggaccctgttatcggcagcagcgcgtttctaaaacaaaaacagacaacaacaacagcaattttacctggactggtgcttcaaaatataacctcaatgggcgtgaatccatcatcaaccctggcactgctatggcctcacacaaagacgacgaagacaagttctttcccatgagcggtgtcatgatttttggaaaagagagcgccggagcttcaaacactgcattggacaatgtcatgattacagacgaagaggaaattaaagccactaaccctgtggccaccgaaagatttgggaccgtggcagtcaatttccagagcagcagcacacaccctgcgaccggagatgtgcatgttatgggagcattacctggcatggtgtggcaagatagagacgtgtacctgcagggtcccatctgggccaaaattcctcacacagatggacactttcacccgtctcctcttatgggcggctttggactcaagcacccgcctcctcagatcctcatcaaaaacacgcctgttcctgcgaatcctccggcggagttttcagctacaaagtttgcttcattcatcacccaatactccacaggacaagtgagtgtggaaattgaatgggagctgcagaaagaaaacagcaagcgctggaatcccgaagtgcagtacacatccaattatgcaaaatctgccaacgttgattttaccgtggacaacaatggactttatactgagcctcgccccattggcacccgttaccttacccgtcccctgtaa

SEQ ID NO: 1585 - DNA, 2211 bp, Artificial Sequence
  source: /note="Description of Artificial Sequence: Synthetic polynucleotide"
atggctgccgatggttatcttccagattggctcgaggacaacctctctgagggcattcgcgagtggtgggacttgaaacctggagccccgaaacccaaagccaaccagcaaaagcaggacgacggccggggtctggtgcttcctggctacaagtacctcggacccttcaacggactcgacaagggggagcccgtcaacgcggcggacgcagcggccctcgagcacgacaaggcctacgaccagcagctcaaagcgggtgacaatccgtacctgcggtataaccacgccgacgccgagtttcaggagcgtctgcaagaagatacgtcttttgggggcaacctcgggcgagcagtcttccaggccaaaaagcgggttctcgaaccttttggtctggttgaggaaggcgctaagacggctcctggaaagaaacgtccggtagagcagtcgccacaagagccagactcctcctcgggcatcggcaagacaggccagcagcccgctaaaaagagactcaattttggtcagactggcgactcagagtcagtccccgacccacaacctctcggagaacctccagcaacccccgctgctgtgggacctactacaatggcttcaggcggtggcgcaccaatggcagacaataacgaaggcgccgacggagtgggtaatgcctcaggaaattggcattgcgattccacatggctgggcgacagagtcatcaccaccagcacccgcacctgggccttgcccacctacaataaccacctctacaagcaaatctccagtgcttcaacgggggccagcaacgacaaccactacttcggctacagcaccccctgggggtattttgatttcaacagattccactgccacttttcaccacgtgactggcagcgactcatcaacaacaattggggattccggcccaagagactcaacttcaagctcttcaacatccaagtcaaggaggtcacgacgaatgatggcgtcacaaccatcgctaataaccttaccagcacggttcaagtcttctcggactcggagtaccagcttccgtacgtcctcggctctgcgcaccagggctgcctccctccgttcccggcggacgtgttcatgattccgcaatacggctacctgacgctcaacaatggcagccaagccgtgggacgttcatccttttattgcctggaatatttcccatcgcagatgctgagaacgggcaataactttaccttcagctacacctttgaggacgtgcctttccacagcagctacgcgcacagccagagcctggaccggctgatgaatcctctcatcgaccagtacctgtattacctgaacagaactcagaaccagtccggaagtgcccaaaacaaggacttgctgtttagccgggggtctccagctggcatgtctgttcagctcaaaaactggctacctggaccctgttatcggcagcagcgcgtttctaaaacaaaaacagacaacaacaacagcaattttacctggactggtgcttcaaaatataaccttaatgggcgtgaatccatcatcaaccctggcactgctatggcctcacacaaagacgacgaagacaagttctttcccatgagcggtgtcatgatttttggaaaagagagcgccggagcttcaaacactgcattggacaatgtcatgattacagacgaagaggaaattaaagccactaaccctgtggccaccgaaagatttgggaccgtggcagtcaatttccagagcagcagcacagaccctgcgaccggagatgtgcatgttatgggagcattacctggcatggtgtggcaagatagagacgtgtacctgcagggtcccatttgggccaaaattcctcacacagatggacactttcacccgtctcctcttatgggcggctttggactcaaacacccgcctcctcagatcctcatcaaaaacacacctgttcctgcgaatcctccggcggagttttcagctacaaagtttgcttcattcatcacccaatactccacaggacaagtgagcgtggaaattgaatgggagctgcagaaagaaaacagcaagcgctggaatcccgaagtgcagtacacatccaattatgcaaaatctgccaacgttgattttaccgtggacaacaatggactttatactgagcctcgccccattggcacccgttaccttacccgtcccctgtaa

SEQ ID NO: 1586 - DNA, 2211 bp, Artificial Sequence
  source: /note="Description of Artificial Sequence: Synthetic polynucleotide"
atggctgccgatggttatcttccagattggctcgaggacaacctctctgagggcattcgcgagtggtgggacttgaaacctggagccccgaaacccaaagccaaccagcaaaagcaggacgacggccggggtctggtgcttcctggctacaagtacctcggacccttcaacggactcgacaagggggagcccgtcaacgcggcggacgcagcggccctcgagcacgacaaggcctacgaccagcagctcaaagcgggtgacaatccgtacctgcggtataaccacgccgacgccgagtttcaggagcgtctgcaagaagatacgtcttttgggggcaacctcgggcgagcagtcttccaggccaagaagcgggttctcgaaccttttggtctggttgaggaaggtgctaagacggctcctggaaagaagagaccggtagagcagtcgccccaagaaccagactcctcatcgggcatcggcaaatcaggccagcagcccgctaaaaagagactcaattttggtcagactggcgactcagagtcagtccccgacccacaacctctcggagaacctccagcaacccccgctgctgtgggacctactacaatggcttcaggcggtggcgcaccaatggcagacaataacgaaggcgccgacggagtgggtaatgcctcaggaaattggcattgcgattccacatggctgggcgacagagtcattaccaccagcacccgaacctgggccctgcccacctataacaaccacctctacaaacaaatctccagcgcttcaacgggggccagcaacgacaaccactacttcggctacagcaccccctgggggtattttgattttaacagattccactgccacttctcaccacgtgactggcagcgactcatcaacaacaattggggattccggcccaagagactcaacttcaagctcttcaacatccaagtcaaggaggtcacgacgaacgatggcgtcacgaccatcgctaataaccttaccagcacggttcaagtcttctcggactcggagtaccagttgccgtacgtcctcggctctgcgcaccagggctgcctccctccgttcccggcggacgtgttcatgattccgcagtacggctacctaacactcaacaatggcagccaggccgtgggacgttcatccttttactgcctggaatatttcccatcgcagatgctgagaacgggcaataactttaccttcagctacacattcgaggacgtgcctttccacagcagctacgcgcacagccaaagcctggaccggctgatgaatcctctcatcgaccagtacttgtattacctaaacagaactcaaaatcagtccggaagtgcccaaaacaaggacttgctgtttagccgggggtctccagctggcatgtctgttcagcccaaaaactggctacctggaccctgttatcggcagcagcgcgtttctaaaacaaaaacagacaacaacaacagcaactttacctggactggtgcttcaaaatataaccttaatgggcgtgaatctataatcaaccctggcactgctatggcttcacacaaagacgacgaagacaagttctttccaatgagcggtgtcatgatttttggcaaggagagcgccggagcttcaaacactgcattggacaatgtcatgattacagacgaagaggaaattaaagccactaaccctgtggccaccgaaagatttgggaccgtggcagtcaatttccagagcagcagcacagaccctgcgaccggagatgtgcatgttatgggagcattacctggcatggtgtggcaagatagagacgtgtacctgcagggtccaatttgggccaaaattcctcacacagatggacactttcacccgtctcctcttatgggcggctttggacttaagcacccgcctcctcagatcctcatcaaaaacacgcctgttcctgcgaatcctccggcagagttttcggctacaaagtttgcttcattcatcacccagtattccacaggacaagtgagtgtggaaattgaatgggagttgcagaaagaaaacagcaagcgttggaatcccgaagtgcagtacacatctaattatgcaaaatctgccaacgttgatttcactgtggacaacaatggactttatactgagcctcgccccattggcacccgttacctcacccgtcccctgtaa

SEQ ID NO: 1587 - DNA, 2211 bp, Artificial Sequence
  source: /note="Description of Artificial Sequence: Synthetic polynucleotide"
atggctgccgatggttatcttccagattggctcgaggacaacctctctgagggcattcgcgagtggtgggacttgaaacctggagccccgaaacccaaagccaaccagcaaaagcaggacgacggccggggtctggtgcttcctggctacaagtacctcggacccttcaacggactcgacaagggggagcccgtcaacgcggcggacgcagcggccctcgagcacgacaaggcctacgaccagcagctcaaagcgggtgacaatccgtacctgcggtataaccacgccgacgccgagtttcaggagcgtctgcaagaagatacgtcttttgggggcaacctcgggcgagcagtcttccaggccaagaagagggttctcgaaccttttggtctggttgaggaaggtgctaagacggctcctggaaagaaacgtccggtagagcagtcaccccaagaaccagactcctcctcgggcattggcaaatcaggccagcagcccgctaaaaagagactcaattttggtcagactggcgactcagagtcagtccccgacccacaacctctcggagaacctccagcaacccccgctgctttgggacctactacaatggcttcaggcggtggcgcaccaatggcagacaataacgaaggcgccgacggagtgggtaatgcctcaggaaattggcattgcgattccacatggctgggcgacagagtcatcaccaccagcacccgcacctgggccttgcccacctacaataaccacctctacaagcaaatctccagtgcttcaacgggggccagcaacgacaaccactacttcggctacagcaccccctgggggtattttgatttcaacagattccactgccatttctcaccacgtgactggcagcgactcatcaacaacaactggggattccggcccaagagactcaacttcaagctcttcaacatccaagtcaaggaggtcacgacgaacgatggcgtcacgaccatcgctaataaccttaccagcacggttcaagtcttctcggactcggagtaccagcttccgtacgtcctcggctctgcgcaccagggctgcctccctccgttcccggcggacgtgttcatgattccgcagtacggctacctgacgctcaacaatggcagcaaagccgtgggacgttcatccttttactgcctggaatatttcccttctcagatgctgagaacgggcaacaactttaccttcagctacacctttgaggaagtgcctttccacagcagctacgcgcacagccagagcctggaccggctgatgaatcctctcatcgaccaatacctgtattacctgaacagaactcaaaatcagtccggaagtgcccaaaacaaggacttgctgtttagccgtgggtctccagctggcatgtctgttcagcccaaaaactggctacctggaccctgttatcggcagcagcgcgtttctaaaacaaaaacagacaacaacaacagcaattttacctggactggtgcttcaaaatataacctcaatgggcgtgaatccatcatcaaccctggcactgctatggcctcacacaaagacgacgaagacaagttctttcccatgagcggtgtcatgatttttggaaaagagagcgccggagcttcaaacactgcattggacaatgtcatgattacagacgaagaggaaattaaagccactaaccctgtggccaccgaaagatttgggaccgtggcagtcaatttccagagcagcagcacagaccctgcgaccggagatgtgcatgttatgggagcattacctggcatggtgtggcaagatagagacgtgtacctgcagggtcccatttgggccaaaattcctcacacggatggacactttcacccgtctcctcttatgggcggctttggactcaagcacccgcctcctcagatcctcatcaaaaacacacctgttcctgcgaatcctccggcagagttttcggctacaaagtttgcttcattcatcacccagtactccacaggacaagtgagcgtggaaattgaatgggagttgcagaaagaaaacagtaagcgctggaatcccgaagtgcagtacacatctaattatgcaaaatctgccaacgttgacttcactgtggacaacaatggactttatactgagcctcgccccattggcacccgttacctcacccgtcccctgtaa

SEQ ID NO: 1588 - DNA, 2970 bp, Artificial Sequence
  source: /note="Description of Artificial Sequence: Synthetic polynucleotide"
agatgaccgccaaggtcgtagagtccgccaaggccattctgggcggcagcaaggtgcgcgtggaccaaaaatgcaaggcctctgcgcagatcgaccccacccccgtgatcgtcacctccaacaccaacatgtgcgccgtgattgacgggaacagcaccaccttcgagcaccagcagcccctgcaggaccggatgttcaagtttgaactcacccgccgcctcgactacgactttggcaaggtcaccaagcaggaagtcaaggactttttccggtgggcggctgatcacgtgactgacgtggctcatgagttttacgtcacaaagggtggagctaagaaaaggcccgccccctctgacgaggatataagcgagcccaagcggccgcgcgtgtcatttgcgcagccggagacgtcagacgcggaagctcccggagacttcgccgacaggtaccaaaacaaatgttctcgtcacgcgggtatgctgcagatgctctttccctgcaagacgtgcgagagaatgaatcagaattccaacgtctgcttcacgcacggtcagaaagattgcggggagtgctttcccgggtcagaatctcaaccggtttctgtcgtcagaaaaacgtatcagaaactgtgcatccttcatcagctccggggggcacccgagatcgcctgctctgcttgcgaccaactcaaccccgatttggacgattgccaatttgagcaataaatgactgaaatcaggtatggctgctgacggttatcttccagattggctcgaggacaacctctctgaaggcattcgcgagtggtgggcgctgaaacctggagctccacaacccaaggccaaccaacagcatcaggacaacggcaggggtcttgtgcttcctgggtacaagtacctcggacccttcaacggactcgacaagggagagccggtcaacgaggcagacgccgcggccctcgagcacgacaaggcctacgacaagcagctcgagcagggggacaacccgtatctcaagtacaaccacggcgacgccgagttccagcagcgcttggcgaccgacacctcttttgggggcaacctcgggcgagcagtcttccaggccaaaaagaggattctcgagcctctgggtctggttgaagagggcgttaaaacggctcctggaaagaaacgcccattagaaaagactccaaatcggccgaccaacccggactctgggaaggccccggccaagaaaaagcaaaaagacggcgaaccagccgactctgctagaaggacactcgactttgaagactctggagcaggagacggaccccctgagggatcatcttccggagaaatgtctcatgatgctgagatgcgtgcggcgccaggcggaaatgctgtcgaggcgggacaaggtgccgatggagtgggtaatgcctccggtgattggcattgcgattccacctggtcagagggccgagtcaccaccaccagcacccgaacctgggtcctacccacgtacaacaaccacctgtacctgcgaatcggaacaacggccaacagcaacacctacaacggattctccaccccctggggatactttgactttaaccgcttccactgccacttttccccacgcgactggcagcgactcatcaacaacaactggggactcaggccgaaatcgatgcgtgttaaaatcttcaacatacaggtcaaggaggtcacgacgtcaaacggcgagactacggtcgctaataaccttaccagcacggttcagatctttgcggattcgacgtatgaactcccatacgtgatggacgccggtcaggaggggagctttcctccgtttcccaacgacgtctttatggttccccaatacggatactgcggagttgtcactggaaaaaaccagaaccagacagacagaaatgccttttactgcctggaatactttccatcccaaatgctaagaactggcaacaattttgaagtcagttaccaatttgaaaaagttcctttccattcaatgtacgcgcacagccagagcctggacagaatgatgaatcctttactggatcagtacctgtggcatctgcaatcgaccactaccggaaattcccttaatcaaggaacagctaccaccacgtacgggaaaattaccactggagactttgcctactacaggaaaaactggttgcctggagcctgcattaaacaacaaaaattttcaaagaatgccaatcaaaactacaagattcccgccagcgggggagacgcccttttaaagtatgacacgcataccactctaaatgggcgatggagtaacatggctcctggacctccaatggcaaccgcaggtgccggggactcggattttagcaacagccagctgatctttgccggacccaatccgagcggtaacacgaccacatcttcaaacaatttgttgtttacctcagaagaggagattgccacaacaaacccacgagacacggacatgtttggacagattgcagataataatcaaaatgccaccaccgcccctcacatcgctaacctggacgctatgggaattgttcccggaatggtctggcaaaacagagacatctactaccagggccctatttgggccaaggtccctcacacggacggacactttcacccttcgccgctgatgggaggatttggactgaaacacccgcctccacagattttcatcaaaaacacccccgtacccgccaatcccaatactacctttagcgctgcaaggattaattcttttctgacgcagtacagcaccggacaagttgccgttcagatcgactgggaaattcagaaggagcattccaaacgctggaatcccgaagttcaatttacttcaaactacggcactcaaaattctatgctgtgggctcccgacaatgctggcaactaccacgaactccgggctattgggtcccgtttcctcacccaccacttgtaa

SEQ ID NO: 1589 - protein, 736 aa, Artificial Sequence
  source: /note="Description of Artificial Sequence: Synthetic polypeptide"
MAADGYLPDWLEDNLSEGIREWWDLKPGAPKPKANQQKQDDGRGLVLPGYKYLGPFNGLDKGEPVNAADAAALEHDKAYDQQLKAGDNPYLRYNHADAEFQERLQEDTSFGGNLGRAVFQAKKRVLEPFGLVEEGAKTAPGKKRPVEQSPQEPDSSSGIGKTGQQPAKKRLNFGQTGDSESVPDPQPLGEPPATPAAVGPTTMASGGGAPMADNNEGADGVGNASGNWHCDSTWLGDRVITTSTRTWALPTYNNHLYKQISSASTGASNDNHYFGYSTPWGYFDFNRFHCHFSPRDWQRLINNNWGFRPKRLNFKLFNIQVKEVTTSDGVTTIANNLTSTVQVFSDSEYQLPYVLGSAHQGCLPPFPADVFMIPQYGYLTLNNGSQAVGRSSFYCLEYFPSQMLRTGNNFTFSYTFEEVPFHSSYAHSQSLDRLMNPLIDQYLYYLNRTQNQSGSAQNKDLLFSRGSPAGMSVQPKNWLPGPCYRQQRVSKTKTGNNNSNFTWTGASKYNLNGHESIINPGTAMASHKDDEDKFFPMSGVMIFGKESAGASNTALDNVMITDEEEIKATNPVATERFGTVAVNFQSSSTHPATGDVHVMGALPGMVWQDRDVYLQGPIWAKIPHTDGHFHPSPLMGGFGLKHPPPQILIKNTPVPANPPAEFSATKFASFITQYSTGQVSVEIEWELQKENSKRWNPEVQYTSNYAKSANVDFTVDNNGLYTEPRPIGTRYLTRPL

SEQ ID NO: 1590 - protein, 736 aa, Artificial Sequence; identical to SEQ ID NO: 1589
  source: /note="Description of Artificial Sequence: Synthetic polypeptide"

SEQ ID NO: 1591 - protein, 733 aa, Artificial Sequence
  source: /note="Description of Artificial Sequence: Synthetic polypeptide"
MTDGYLPDWLEDNLSEGVREWWALQPGAPKPKANQQHQDNARGLVLPGYKYLGPGNGLDKGEPVNAADAAALEHDKAYDQQLKAGDNPYLKYNHADAEFQERLQEDTSFGGNLGRAVFQAKKRILEPLGLVEEAAKTAPGKKRPVEQSPAEPDSSSGIGKSGQQPARKRLNFGQTGDTESVPDPQPLGQPPAAPSGVGSTTMASGGGAPMADNNEGADGVGNSSGNWHCDSQWLGDRVITTSTRTWALPTYNNHLYKQISSQSGATNDNHYFGYSTPWGYFDFNRFHCHFSPRDWQRLINNNWGFRPKRLNFKLFNIQVKEVTQNDGTTTIANNLTSTVQVFTDSEYQLPYVLGSAHQGCLPPFPADVFMVPQYGYLTLNNGSQAVGRSSFYCLEYFPSQMLRTGNNFQFSYTFEDVPFHSSYAHSQSLDRLMNPLIDQYLYYLNRTQTASGTQQSRLLFSQAGPTSMSLQAKNWLPGPCYRQQRLSKQANDNNNSNFPWTGATKYHLNGRDSLVNPGPAMASHKDDKEKFFPMHGTLIFGKEGTNANNADLENVMITDEEEIRTTNPVATEQYGTVSNNLQNSNAGPTTGTVNHQGALPGMVWQDRDVYLQGPIWAKIPHTDGHFHPSPLMGGFGLKHPPPQIMIKNTPVPANPPTNFSAAKFASFITQYSTGQVSVEIEWELQKENSKRWNPEIQYTSNYNKSVNVDFTVDTNGVYSEPRPIGTRYLTRNL

SEQ ID NO: 1592 - protein, 736 aa, Artificial Sequence; identical to SEQ ID NO: 757
  source: /note="Description of Artificial Sequence: Synthetic polypeptide"

SEQ ID NO: 1593 - protein, 736 aa, Artificial Sequence
  source: /note="Description of Artificial Sequence: Synthetic polypeptide"
MAADGYLPDWLEDNLSEGIRKWWDLKPGAPKPKANQQKQDDGRGLVLPGYKYLGPFNGLDKGEPVNAADAAALEHDKAYDQQLKAGDNPYLRYNHADAEFQERLQEDTSFGGNLGRAVFQAKKRVLEPFGLVEEGAKTAPGKKRPVEQSPQEPDSSSGIGKTGQQPAKKRLNFGQTGDSESVPDPQPLGEPPATPAAVGPTTMASGGGAPMADNNEGADGVGNASGNWHCDSTWLGDRVITTSTRTWALPTYNNHLYKQISSASTGASNDNHYFGYSTPWGYFDFNRFHCHFSPRDWQRLINNNWGFRPKRLNFKLFNIQVKEVTTNDGVTTIANNLTSTVQVFSDSEYQLPYVLGSAHQGCLPPFPADVFMIPQYGYLTLNNGSQAVGRSSFYCLEYFPSQMLRTGNNFTFSYTFEEVPFHSSYAHSQSLDRLMNPLIDQYLYYLNRTQNQSGSAQNKDLLFSRGSPAGMSVQPKNWLPGPCYRQQRVSKTKTDNNNSNFTWTGASKYNLNGRESIINPGTAMASHKDDKDKFFPMSGVMIFGKESAGASNTALDNVMITDEEEIKATNPVATERFGTVAVNFQSSSTDPATGDVHVMGALPGMVWQDRDVYLQGPIWAKIPHTDGHFHPSPLMGGFGLKHPPPQILIKNTPVPANPPAEFSATKFASFITQYSTGQVSVEIEWELQKENSKRWNPEVQYTSNYAKSANVDFTVDNNGLYTEPRPIGTRYLTRPL

SEQ ID NO: 1594 - protein, 736 aa, Artificial Sequence
  source: /note="Description of Artificial Sequence: Synthetic polypeptide"
MAADGYLPDWLEDNLSEGIREWWDLKPGAPKPKANQQKQDNGRGLVLPGYKYLGPFNGLDKGEPVNAADAAALEHDKAYDQQLKAGDNPYLRYNHADAEFQERLQEDTSFGGNLGRAVFQAKKRVLEPFGLVEEGAKTAPGKKRPVEQSPQEPDSSSGIGKTGQQPAKKRLNFGQTGDSESVPDPQPLGEPPATPAAVGPTTMASGGGAPMADNNEGADGVGNASGNWHCDSTWLGDRVITTSTRTWALPTYNNHLYKQISSASTGASNDNHYFGYSTPWGYFDFNRFHCHFSPRDWQRLINNNWGFRPKRLNFKLFNIQVKEVTTNDGVTTIANNLTSTVQVFSDSEYQLPYVLGSAHQGCLPPFPADVFMIPQYGYLTLNNGSQAVGRSSFYCLEYFPSQMLRTGNNFTFSYTFEEVPFHSSYAHSQSLDRLMNPLIDQYLYYLNRTQNQSGSAQNKDLLFSRGSPAGMSVQPKNWLPGPCYRQQRVSKTKTDNNNSNFTWTGASKYNLNGRESIINPGTAMASHKDDEDKFFPMSGVMIFGKESAGASNTALDNVMITDEEEIKATNPVATERFGTVAVNFQSSSTHPATGDVHVMGALPGMVWQDRDVYLQGPIWAKIPHTDGHFHPSPLMGGFGLKHPPPQILIKNTPVPANPPAEFSATKFASFITQYSTGQVSVEIEWELQKENSKRWNPEVQYTSNYAKSANVDFTVDNNGLYTEPRPIGTRYLTRPL

SEQ ID NO: 1595 - protein, 736 aa, Artificial Sequence
  source: /note="Description of Artificial Sequence: Synthetic polypeptide"
MAADGYLPDWLEDNLSEGIREWWDLKPGAPKPKANQQKQDDGRGLVLPGYKYLGPFNGLDKGEPVNAADAAALEHDKAYDQQLKAGDNPYLRYNHADAEFQERLQEDTSFGGNLGRAVFQAKKRVLEPFGLVEEGAKTAPGKKRPVEQSPQEPDSSSGIGKTGQQPAKKRLNFGQTGDSESVPDPQPLGEPPATPAAVGPTTMASGGGAPMADNNEGADGVGNASGNWHCDSTWLGDRVITTSTRTWALPTYNNHLYKQISSASTGASNDNHYFGYSTPWGYFDFNRFHCHFSPRDWQRLINNNWGFRPKRLNFKLFNIQVKEVTTNDGVTTIANNLTSTVQVFSDSEYQLPYVLGSAHQGCLPPFPADVFMIPQYGYLTLNNGSQAVGRSSFYCLEYFPSQMLRTGNNFTFSYTFEDVPFHSSYAHSQSLDRLMNPLIDQYLYYLNRTQNQSGSAQNKDLLFSRGSPAGMSVQLKNWLPGPCYRQQRVSKTKTDNNNSNFTWTGASKYNLNGRESIINPGTAMASHKDDEDKFFPMSGVMIFGKESAGASNTALDNVMITDEEEIKATNPVATERFGTVAVNFQSSSTDPATGDVHVMGALPGMVWQDRDVYLQGPIWAKIPHTDGHFHPSPLMGGFGLKHPPPQILIKNTPVPANPPAEFSATKFASFITQYSTGQVSVEIEWELQKENSKRWNPEVQYTSNYAKSANVDFTVDNNGLYTEPRPIGTRYLTRPL

SEQ ID NO: 1596 - protein, 736 aa, Artificial Sequence
  source: /note="Description of Artificial Sequence: Synthetic polypeptide"
MAADGYLPDWLEDNLSEGIREWWDLKPGAPKPKANQQKQDDGRGLVLPGYKYLGPFNGLDKGEPVNAADAAALEHDKAYDQQLKAGDNPYLRYNHADAEFQERLQEDTSFGGNLGRAVFQAKKRVLEPFGLVEEGAKTAPGKKRPVEQSPQEPDSSSGIGKSGQQPAKKRLNFGQTGDSESVPDPQPLGEPPATPAAVGPTTMASGGGAPMADNNEGADGVGNASGNWHCDSTWLGDRVITTSTRTWALPTYNNHLYKQISSASTGASNDNHYFGYSTPWGYFDFNRFHCHFSPRDWQRLINNNWGFRPKRLNFKLFNIQVKEVTTNDGVTTIANNLTSTVQVFSDSEYQLPYVLGSAHQGCLPPFPADVFMIPQYGYLTLNNGSQAVGRSSFYCLEYFPSQMLRTGNNFTFSYTFEDVPFHSSYAHSQSLDRLMNPLIDQYLYYLNRTQNQSGSAQNKDLLFSRGSPAGMSVQPKNWLPGPCYRQQRVSKTKTDNNNSNFTWTGASKYNLNGRESIINPGTAMASHKDDEDKFFPMSGVMIFGKGSAGASNTALDNVMITDEEEIKATNPVATERFGTVAVNFQSSSTDPATGDVHVMGALPGMVWQDRDVYLQGPIWAKIPHTDGHFHPSPLMGGFGLKHPPPQILIKNTPVPANPPAEFSATKFASFITQYSTGQVSVEIEWELQKENSKRWNPEVQYTSNYAKSANVDFTVDNNGLYTEPRPIGTRYLTRPL

SEQ ID NO: 1597 - protein, 736 aa, Artificial Sequence; identical to SEQ ID NO: 688
  source: /note="Description of Artificial Sequence: Synthetic polypeptide"

SEQ ID NO: 1598 - protein, 742 aa, Artificial Sequence
  source: /note="Description of Artificial Sequence: Synthetic polypeptide"
MAADGYLPDWLEDNLSEGIREWWALKPGAPQPKANQQHQDNGRGLVLPGYKYLGPFNGLDKGEPVNEADAAALEHDKAYDKQLEQGDNPYLKYNHADAEFQQRLATDTSFGGNLGRAVFQAKKRILEPLGLVEEGVKTAPGKKRPLEKTPNRPTNPDSGKAPAKKKQKDGEPADSARRTLDFEDSGAGDGPPEGSSSGEMSHDAEMRAAPGGNAVEAGQGADGVGNASGDWHCDSTWSEGRVTTTSTRTWVLPTYNNHLYLRIGTTANSNTYNGFSTPWGYFDFNRFHCHFSPRDWQRLINNNWGLRPKSMRVKIFNIQVKEVTTSNGETTVANNLTSTVQIFADSTYELPYVMDAGQEGSFPPFPNDVFMVPQYGYCGVVTGKNQNQTDRNAFYCLEYFPSQMLRTGNNFEVSYQFEKVPFHSMYAHSQSLDRMMNPLLDQYLWHLQSTTTGNSLNQGTATTTYGKITTGDFAYYRKNWLPGACIKQQKFSKNANQNYKIPASGGDALLKYDTHTTLNGRWSNMAPGPPMATAGAGDSDFSNSQLIFAGPNPSGNTTTSSNNLLFTSEEEIATTNPRDTDMFGQIADNNQNATTAPHIANLDAMGIVPGMVWQNRDIYYQGPIWAKVPHTDGHFHPSPLMGGFGLKHPPPQIFIKNTPVPANPNTTFSAARINSFLTQYSTGQVAVQIDWEIQKEHSKRWNPEVQFTSNYGTQNSMLWAPDNAGNYHELRAIGSRFLTHHL

SEQ ID NO: 1599 - DNA, 2211 bp, Artificial Sequence
  source: /note="Description of Artificial Sequence: Synthetic polynucleotide"
atggctgccgatggttatcttccagattggctcgaggacaacctctctgagggcattcgcgagtggtgggacttgaaacctggagccccgaagcccaaagccaaccagcaaaagcaggacgacggccggggtctggtgcttcctggctacaagtacctcggacccttcaacggactcgacaagggggagcccgtcaacgcggcggacgcagcggccctcgagcacgacaaggcctacgaccagcagctcaaagcgggtgacaatccgtacctgcggtataaccacgccgacgccgagtttcaggagcgtctgcaagaagatacgtcttttgggggcaacctcgggcgagcagtcttccaggccaagaagcgggttctcgaacctctcggtctggttgaggaaggcgctaaggcggctcctggaaagaaacgtccggtagagcagtcgccacaagagccagactcctcctcgggcatcggcaagacaggccagcagcccgctaaaaagagactcaattttggtcagactggcgactcagagtcagtccccgatccacaacctctcggagaacctccagcagccccctcaggtctgggacctaatacaatggcttcaggcggtggcgctccaatggcagacaataacgaaggcgccgacggagtgggtaattcctcgggaaattggcattgcgattccacatggctgggggacagagtcatcaccaccagcacccgaacctgggccctgcccacctacaacaaccacctctacaagcaaatctccaacggcacctcgggaggaagcaccaacgacaacacctattttggctacagcaccccctgggggtattttgacttcaacagattccactgtcacttttcaccacgtgactggcaacgactcatcaacaacaattggggattccggcccaaaagactcaacttcaagctgttcaacatccaggtcaaggaagtcacgacgaacgaaggcaccaagaccatcgccaataatctcaccagcaccgtgcaggtctttacggactcggagtaccagttaccgtacgtgctaggatccgctcaccagggatgtctgcctccgttcccggcggacgtcttcatggttcctcagtacggctatttaactttaaacaatggaagccaagccctgggacgttcctccttctactgtctggagtatttcccatcgcagatgctgagaaccggcaacaactttcagttcagctacaccttcgaggacgtgcctttccacagcagctacgcgcacagccagagcctggacaggctgatgaatcccctcatcgaccagtacctgtactacctggtcagaacgcaaacgactggaactggagggacgcagactctggcattcagccaagcgggtcctagctcaatggccaaccaggctagaaattgggtgcccggaccttgctaccggcagcagcgcgtctccacgacaaccaaccagaacaacaacagcaactttgcctggacgggagctgccaagtttaagctgaacggccgagactctctaatgaatccgggcgtggcaatggcttcccacaaggatgacgacgaccgcttcttcccttcgagcggggtcctgatttttggcaagcaaggagccgggaacgatggagtggattacagccaagtgctgattacagatgaggaagaaatcaaggctaccaaccccgtggccacagaagaatatggagcagtggccatcaacaaccaggccgccaatacgcaggcgcagaccggactcgtgcacaaccagggggtgattcccggcatggtgtggcagaatagagacgtgtacctgcagggtcccatctgggccaaaattcctcacacggacggcaactttcacccgtctcccctgatgggcggctttggactgaagcacccgcctcctcaaattctcatcaagaacacaccggttccagcggacccgccgcttaccttcaaccaggccaagctgaactctttcatcacgcagtacagcaccggacaggtcagcgtggaaatcgagtgggagctgcagaaagaaaacagcaaacgctggaatccagagattcaatacacttccaactactacaaatctacaaatgtggactttgctgtcaacacggagggggtttatagcgagcctcgccccattggcacccgttacctcacccgcaacctgtaa

SEQ ID NO: 1600 - DNA, 2592 bp, Artificial Sequence
  source: /note="Description of Artificial Sequence: Synthetic polynucleotide"
ctggctgccgatggttatcttccagattggctcgaggacaacctctctgagggcattcgcgagtggtgggacttgaaacctggagccccgaagcccaaagccaaccagcaaaagcaggacgacggccggggtctggtgcttcctggctacaagtacctcggacccttcaacggactcgacaagggggagcccgtcaacgcggcggacgcagcggccctcgagcacgacaaggcctacgaccagcagctcaaagcgggtgacaatccgtacctgcggtataaccacgccgacgccgagtttcaggagcgtctgcaagaagatacgtcttttgggggcaacctcgggcgagcagtcttccaggccaagaagcgggttctcgaacctctcggtctggttgaggaaggcgctaagatggaagtgcagctccaagccagtggtggcggactggtgcaggcaggaggcagcttgaggctcagctgtgccgccagcggcttcaagatcacccactacaccatgggctggttccggcaggcccctggcaaggagagggagttcgtgagcaggattacctggggtggtgacaacaccttctacagcaacagcgtgaagggcaggttcaccatcagcagggacaacgccaagaacaccgtgtacctgcagatgaacagcctgaagcccgaggacaccgccgactactactgtgcagccggcagtaccagcaccgctacccccctgagggtggactactggggcaaaggcactcaggtgacagtgtcttcaggagggggtggcagcgctcctggaaagaaacgtccggtagagcagtcgccacaagagccagactcctcctcgggcatcggcaagacaggccagcagcccgctaaaaagagactcaattttggtcagactggcgactcagagtcagtccccgatccacaacctctcggagaacctccagcagccccctcaggtctgggacctaatacaatggcttcaggcggtggcgctccaatggcagacaataacgaaggcgccgacggagtgggtaattcctcgggaaattggcattgcgattccacatggctgggggacagagtcatcaccaccagcacccgaacctgggccctgcccacctacaacaaccacctctacaagcaaatctccaacggcacctcgggaggaagcaccaacgacaacacctattttggctacagcaccccctgggggtattttgacttcaacagattccactgtcacttttcaccacgtgactggcaacgactcatcaacaacaattggggattccggcccaaaagactcaacttcaagctgttcaacatccaggtcaaggaagtcacgacgaacgaaggcaccaagaccatcgccaataatctcaccagcaccgtgcaggtctttacggactcggagtaccagttaccgtacgtgctaggatccgctcaccagggatgtctgcctccgttcccggcggacgtcttcatggttcctcagtacggctatttaactttaaacaatggaagccaagccctgggacgttcctccttctactgtctggagtatttcccatcgcagatgctgagaaccggcaacaactttcagttcagctacaccttcgaggacgtgcctttccacagcagctacgcgcacagccagagcctggacaggctgatgaatcccctcatcgaccagtacctgtactacctggtcagaacgcaaacgactggaactggagggacgcagactctggcattcagccaagcgggtcctagctcaatggccaaccaggctagaaattgggtgcccggaccttgctaccggcagcagcgcgtctccacgacaaccaaccagaacaacaacagcaactttgcctggacgggagctgccaagtttaagctgaacggccgagactctctaatgaatccgggcgtggcaatggcttcccacaaggatgacgacgaccgcttcttcccttcgagcggggtcctgatttttggcaagcaaggagccgggaacgatggagtggattacagccaagtgctgattacagatgaggaagaaatcaaggctaccaaccccgtggccacagaagaatatggagcagtggccatcaacaaccaggccgccaatacgcaggcgcagaccggactcgtgcacaaccagggggtgattcccggcatggtgtggcagaatagagacgtgtacctgcagggtcccatctgggccaaaattcctcacacggacggcaactttcacccgtctcccctgatgggcggctttggactgaagcacccgcctcctcaaattctcatcaagaacacaccggttccagcggacccgccgcttaccttcaaccaggccaagctgaactctttcatcacgcagtacagcaccggacaggtcagcgtggaaatcgagtgggagctgcagaaagaaaacagcaaacgctggaatccagagattcaatacacttccaactactacaaatctacaaatgtggactttgctgtcaacacggagggggtttatagcgagcctcgccccattggcacccgttacctcacccgcaacctgtaa

SEQ ID NO: 1601 - DNA, 2601 bp, Artificial Sequence
  source: /note="Description of Artificial Sequence: Synthetic polynucleotide"
ctggctgccgatggttatcttccagattggctcgaggacaacctctctgagggcattcgcgagtggtgggacttgaaacctggagccccgaagcccaaagccaaccagcaaaagcaggacgacggccggggtctggtgcttcctggctacaagtacctcggacccttcaacggactcgacaagggggagcccgtcaacgcggcggacgcagcggccctcgagcacgacaaggcctacgaccagcagctcaaagcgggtgacaatccgtacctgcggtataaccacgccgacgccgagtttcaggagcgtctgcaagaagatacgtcttttgggggcaacctcgggcgagcagtcttccaggccaagaagcgggttctcgaacctctcggtctggttgaggaaggcgctaagatggaggtgcagctgcaggcttctggaggaggactggtgcaggctggagggagtctgaggctgtcttgcagtgcctcagtgaggactttctccatctacgccatgggctggtttaggcaggctcccgggaaggagcgcgaattcgtggccggaatcaaccggtctggcgacgtgaccaagtacgctgatttcgtgaaaggccggtttagcatttccagagacaacgccaagaatatggtgtatctgcagatgaactccctgaaacctgaagacacagctctgtactattgtgccgctacttgggcctacgataccgtgggggctctgacatcaggatataatttttggggccaggggacccaggtgacagtgagctccggaggaggaggaagcgctcctggaaagaaacgtccggtagagcagtcgccacaagagccagactcctcctcgggcatcggcaagacaggccagcagcccgctaaaaagagactcaattttggtcagactggcgactcagagtcagtccccgatccacaacctctcggagaacctccagcagccccctcaggtctgggacctaatacaatggcttcaggcggtggcgctccaatggcagacaataacgaaggcgccgacggagtgggtaattcctcgggaaattggcattgcgattccacatggctgggggacagagtcatcaccaccagcacccgaacctgggccctgcccacctacaacaaccacctctacaagcaaatctccaacggcacctcgggaggaagcaccaacgacaacacctattttggctacagcaccccctgggggtattttgacttcaacagattccactgtcacttttcaccacgtgactggcaacgactcatcaacaacaattggggattccggcccaaaagactcaacttcaagctgttcaacatccaggtcaaggaagtcacgacgaacgaaggcaccaagaccatcgccaataatctcaccagcaccgtgcaggtctttacggactcggagtaccagttaccgtacgtgctaggatccgctcaccagggatgtctgcctccgttcccggcggacgtcttcatggttcctcagtacggctatttaactttaaacaatggaagccaagccctgggacgttcctccttctactgtctggagtatttcccatcgcagatgctgagaaccggcaacaactttcagttcagctacaccttcgaggacgtgcctttccacagcagctacgcgcacagccagagcctggacaggctgatgaatcccctcatcgaccagtacctgtactacctggtcagaacgcaaacgactggaactggagggacgcagactctggcattcagccaagcgggtcctagctcaatggccaaccaggctagaaattgggtgcccggaccttgctaccggcagcagcgcgtctccacgacaaccaaccagaacaacaacagcaactttgcctggacgggagctgccaagtttaagctgaacggccgagactctctaatgaatccgggcgtggcaatggcttcccacaaggatgacgacgaccgcttcttcccttcgagcggggtcctgatttttggcaagcaaggagccgggaacgatggagtggattacagccaagtgctgattacagatgaggaagaaatcaaggctaccaaccccgtggccacagaagaatatggagcagtggccatcaacaaccaggccgccaatacgcaggcgcagaccggactcgtgcacaaccagggggtgattcccggcatggtgtggcagaatagagacgtgtacctgcagggtcccatctgggccaaaattcctcacacggacggcaactttcacccgtctcccctgatgggcggctttggactgaagcacccgcctcctcaaattctcatcaagaacacaccggttccagcggacccgccgcttaccttcaaccaggccaagctgaactctttcatcacgcagtacagcaccggacaggtcagcgtggaaatcgagtgggagctgcagaaagaaaacagcaaacgctggaatccagagattcaatacacttccaactactacaaatctacaaatgtggactttgctgtcaacacggagggggtttatagcgagcctcgccccattggcacccgttacctcacccgcaacctgtaa

SEQ ID NO: 1602 - DNA, 2367 bp, Artificial Sequence
  source: /note="Description of Artificial Sequence: Synthetic polynucleotide"
ctggctgccgatggttatcttccagattggctcgaggacaacctctctgagggcattcgcgagtggtgggacttgaaacctggagccccgaagcccaaagccaaccagcaaaagcaggacgacggccggggtctggtgcttcctggctacaagtacctcggacccttcaacggactcgacaagggggagcccgtcaacgcggcggacgcagcggccctcgagcacgacaaggcctacgaccagcagctcaaagcgggtgacaatccgtacctgcggtataaccacgccgacgccgagtttcaggagcgtctgcaagaagatacgtcttttgggggcaacctcgggcgagcagtcttccaggccaagaagcgggttctcgaacctctcggtctggttgaggaaggcgctaagatgccaagcagtgtaatcgatgcgctgcagtacaagctggagggcaccacgaggctgaccaggaagaggggtctgaagctggccacggccctcagccttagcaataagttcgtagagggcagccccagcggcggcggcggcagcggcggcggcggcagcgctcctggaaagaaacgtccggtagagcagtcgccacaagagccagactcctcctcgggcatcggcaagacaggccagcagcccgctaaaaagagactcaattttggtcagactggcgactcagagtcagtccccgatccacaacctctcggagaacctccagcagccccctcaggtctgggacctaatacaatggcttcaggcggtggcgctccaatggcagacaataacgaaggcgccgacggagtgggtaattcctcgggaaattggcattgcgattccacatggctgggggacagagtcatcaccaccagcacccgaacctgggccctgcccacctacaacaaccacctctacaagcaaatctccaacggcacctcgggaggaagcaccaacgacaacacctattttggctacagcaccccctgggggtattttgacttcaacagattccactgtcacttttcaccacgtgactggcaacgactcatcaacaacaattggggattccggcccaaaagactcaacttcaagctgttcaacatccaggtcaaggaagtcacgacgaacgaaggcaccaagaccatcgccaataatctcaccagcaccgtgcaggtctttacggactcggagtaccagttaccgtacgtgctaggatccgctcaccagggatgtctgcctccgttcccggcggacgtcttcatggttcctcagtacggctatttaactttaaacaatggaagccaagccctgggacgttcctccttctactgtctggagtatttcccatcgcagatgctgagaaccggcaacaactttcagttcagctacaccttcgaggacgtgcctttccacagcagctacgcgcacagccagagcctggacaggctgatgaatcccctcatcgaccagtacctgtactacctggtcagaacgcaaacgactggaactggagggacgcagactctggcattcagccaagcgggtcctagctcaatggccaaccaggctagaaattgggtgcccggaccttgctaccggcagcagcgcgtctccacgacaaccaaccagaacaacaacagcaactttgcctggacgggagctgccaagtttaagctgaacggccgagactctctaatgaatccgggcgtggcaatggcttcccacaaggatgacgacgaccgcttcttcccttcgagcggggtcctgatttttggcaagcaaggagccgggaacgatggagtggattacagccaagtgctgattacagatgaggaagaaatcaaggctaccaaccccgtggccacagaagaatatggagcagtggccatcaacaaccaggccgccaatacgcaggcgcagaccggactcgtgcacaaccagggggtgattcccggcatggtgtggcagaatagagacgtgtacctgcagggtcccatctgggccaaaattcctcacacggacggcaactttcacccgtctcccctgatgggcggctttggactgaagcacccgcctcctcaaattctcatcaagaacacaccggttccagcggacccgccgcttaccttcaaccaggccaagctgaactctttcatcacgcagtacagcaccggacaggtcagcgtggaaatcgagtgggagctgcagaaagaaaacagcaaacgctggaatccagagattcaatacacttccaactactacaaatctacaaatgtggactttgctgtcaacacggagggggtttatagcgagcctcgccccattggcacccgttacctcacccgcaacctgtaa

SEQ ID NO: 1603 - DNA, 2328 bp, Artificial Sequence
  source: /note="Description of Artificial Sequence: Synthetic polynucleotide"
ctggctgccgatggttatcttccagattggctcgaggacaacctctctgagggcattcgcgagtggtgggacttgaaacctggagccccgaagcccaaagccaaccagcaaaagcaggacgacggccggggtctggtgcttcctggctacaagtacctcggacccttcaacggactcgacaagggggagcccgtcaacgcggcggacgcagcggccctcgagcacgacaaggcctacgaccagcagctcaaagcgggtgacaatccgtacctgcggtataaccacgccgacgccgagtttcaggagcgtctgcaagaagatacgtcttttgggggcaacctcgggcgagcagtcttccaggccaagaagcgggttctcgaacctctcggtctggttgaggaaggcgctaagatgtataccatctggatgcccgagaaccccaggcccggtaccccctgcgacatcttcaccaacagcaggggcaagcgagccagcaacggcggcggcggcggcagcggcggcggcggcagcgctcctggaaagaaacgtccggtagagcagtcgccacaagagccagactcctcctcgggcatcggcaagacaggccagcagcccgctaaaaagagactcaattttggtcagactggcgactcagagtcagtccccgatccacaacctctcggagaacctccagcagccccctcaggtctgggacctaatacaatggcttcaggcggtggcgctccaatggcagacaataacgaaggcgccgacggagtgggtaattcctcgggaaattggcattgcgattccacatggctgggggacagagtcatcaccaccagcacccgaacctgggccctgcccacctacaacaaccacctctacaagcaaatctccaacggcacctcgggaggaagcaccaacgacaacacctattttggctacagcaccccctgggggtattttgacttcaacagattccactgtcacttttcaccacgtgactggcaacgactcatcaacaacaattggggattccggcccaaaagactcaacttcaagctgttcaacatccaggtcaaggaagtcacgacgaacgaaggcaccaagaccatcgccaataatctcaccagcaccgtgcaggtctttacggactcggagtaccagttaccgtacgtgctaggatccgctcaccagggatgtctgcctccgttcccggcggacgtcttcatggttcctcagtacggctatttaactttaaacaatggaagccaagccctgggacgttcctccttctactgtctggagtatttcccatcgcagatgctgagaaccggcaacaactttcagttcagctacaccttcgaggacgtgcctttccacagcagctacgcgcacagccagagcctggacaggctgatgaatcccctcatcgaccagtacctgtactacctggtcagaacgcaaacgactggaactggagggacgcagactctggcattcagccaagcgggtcctagctcaatggccaaccaggctagaaattgggtgcccggaccttgctaccggcagcagcgcgtctccacgacaaccaaccagaacaacaacagcaactttgcctggacgggagctgccaagtttaagctgaacggccgagactctctaatgaatccgggcgtggcaatggcttcccacaaggatgacgacgaccgcttcttcccttcgagcggggtcctgatttttggcaagcaaggagccgggaacgatggagtggattacagccaagtgctgattacagatgaggaagaaatcaaggctaccaaccccgtggccacagaagaatatggagcagtggccatcaacaaccaggccgccaatacgcaggcgcagaccggactcgtgcacaaccagggggtgattcccggcatggtgtggcagaatagagacgtgtacctgcagggtcccatctgggccaaaattcctcacacggacggcaactttcacccgtctcccctgatgggcggctttggactgaagcacccgcctcctcaaattctcatcaagaacacaccggttccagcggacccgccgcttaccttcaaccaggccaagctgaactctttcatcacgcagtacagcaccggacaggtcagcgtggaaatcgagtgggagctgcagaaagaaaacagcaaacgctggaatccagagattcaatacacttccaactactacaaatctacaaatgtggactttgctgtcaacacggagggggtttatagcgagcctcgccccattggcacccgttacctcacccgcaacctgtaa

SEQ ID NO: 1604 - DNA, 2298 bp, Artificial Sequence
  source: /note="Description of Artificial Sequence: Synthetic polynucleotide"
ctggctgccgatggttatcttccagattggctcgaggacaacctctctgagggcattcgcgagtggtgggacttgaaacctggagccccgaagcccaaagccaaccagcaaaagcaggacgacggccggggtctggtgcttcctggctacaagtacctcggacccttcaacggactcgacaagggggagcccgtcaacgcggcggacgcagcggccctcgagcacgacaaggcctacgaccagcagctcaaagcgggtgacaatccgtacctgcggtataaccacgccgacgccgagtttcaggagcgtctgcaagaagatacgtcttttgggggcaacctcgggcgagcagtcttccaggccaagaagcgggttctcgaacctctcggtctggttgaggaaggcgctaagatgaccttcttctacggcggcagcaggggcaagaggaacaacttcaagaccgaggagtacggcggcggcggcagcggcggcggcggcagcgctcctggaaagaaacgtccggtagagcagtcgccacaagagccagactcctcctcgggcatcggcaagacaggccagcagcccgctaaaaagagactcaattttggtcagactggcgactcagagtcagtccccgatccacaacctctcggagaacctccagcagccccctcaggtctgggacctaatacaatggcttcaggcggtggcgctccaatggcagacaataacgaaggcgccgacggagtgggtaattcctcgggaaattggcattgcgattccacatggctgggggacagagtcatcaccaccagcacccgaacctgggccctgcccacctacaacaaccacctctacaagcaaatctccaacggcacctcgggaggaagcaccaacgacaacacctattttggctacagcaccccctgggggtattttgacttcaacagattccactgtcacttttcaccacgtgactggcaacgactcatcaacaacaattggggattccggcccaaaagactcaacttcaagctgttcaacatccaggtcaaggaagtcacgacgaacgaaggcaccaagaccatcgccaataatctcaccagcaccgtgcaggtctttacggactcggagtaccagttaccgtacgtgctaggatccgctcaccagggatgtctgcctccgttcccggcggacgtcttcatggttcctcagtacggctatttaactttaaacaatggaagccaagccctgggacgttcctccttctactgtctggagtatttcccatcgcagatgctgagaaccggcaacaactttcagttcagctacaccttcgaggacgtgcctttccacagcagctacgcgcacagccagagcctggacaggctgatgaatcccctcatcgaccagtacctgtactacctggtcagaacgcaaacgactggaactggagggacgcagactctggcattcagccaagcgggtcctagctcaatggccaaccaggctagaaattgggtgcccggaccttgctaccggcagcagcgcgtctccacgacaaccaaccagaacaacaacagcaactttgcctggacgggagctgccaagtttaagctgaacggccgagactctctaatgaatccgggcgtggcaatggcttcccacaaggatgacgacgaccgcttcttcccttcgagcggggtcctgatttttggcaagcaaggagccgggaacgatggagtggattacagccaagtgctgattacagatgaggaagaaatcaaggctaccaaccccgtggccacagaagaatatggagcagtggccatcaacaaccaggccgccaatacgcaggcgcagaccggactcgtgcacaaccagggggtgattcccggcatggtgtggcagaatagagacgtgtacctgcagggtcccatctgggccaaaattcctcacacggacggcaactttcacccgtctcccctgatgggcggctttggactgaagcacccgcctcctcaaattctcatcaagaacacaccggttccagcggacccgccgcttaccttcaaccaggccaagctgaactctttcatcacgcagtacagcaccggacaggtcagcgtggaaatcgagtgggagctgcagaaagaaaacagcaaacgctggaatccagagattcaatacacttccaactactacaaatctacaaatgtggactttgctgtcaacacggagggggtttatagcgagcctcgccccattggcacccgttacctcacccgcaacctgtaa

SEQ ID NO: 1605 - DNA, 2211 bp, Artificial Sequence
  source: /note="Description of Artificial Sequence: Synthetic polynucleotide"
atggctgccgatggttatcttccagattggctcgaggacaaccttagtgaaggaattcgcgagtggtgggctttgaaacctggagcccctcaacccaaggcaaatcaacaacatcaagacaacgctcgaggtcttgtgcttccgggttacaaataccttggacccggcaacggactcgacaagggggagccggtcaacgcagcagacgcggcggccctcgagcacgacaaggcctacgaccagcagctcaaggccggagacaacccgtacctcaagtacaaccacgccgacgccgagttccaggagcggctcaaagaagatacgtcttttgggggcaacctcgggcgagcagtcttccaggccaaaaagaggcttcttgaacctcttggtctggttgaggaagcggctaaggcggctcctggaaagaagaggcctgtagagcagtctcctcaggaaccggactcctccgcgggtattggcaaatcgggtgcacagcccgctaaaaagagactcaatttcggtcagactggcgacacagagtcagtcccagaccctcaaccaatcggagaacctcccgcagccccctcaggtgtgggatctcttacaatggcttcaggtggtggcgcaccagtggcagacaataacgaaggtgccgatggagtgggtagttcctcgggaaattggcattgcgattcccaatggctgggggacagagtcatcaccaccagcacccgaacctgggccctgcccacctacaacaatcacctctacaagcaaatctccaacagcacatctggaggatcttcaaatgacaacgcctacttcggctacagcaccccctgggggtattttgacttcaacagattccactgccacttctcaccacgtgactggcagcgactcatcaacaacaactggggattccggcctaagcgactcaacttcaagctcttcaacattcaggtcaaagaggttacggacaacaatggagtcaagaccatcgccaataaccttaccagcacggtccaggtcttcacggactcagactatcagctcccgtacgtgctcgggtcggctcacgagggctgcctcccgccgttcccagcggacgttttcatgattcctcagtacgggtatctgacgcttaatgatggaagccaggccgtgggtcgttcgtccttttactgcctggaatatttcccgtcgcaaatgctaagaacgggtaacaacttccagttcaactacgagtttgagaacgtacctttccatagcagctacgctcacagccaaagcctggaccgactaatgaatccactcatcgaccaatacttgtactatctctcaaagactattaacgattctggacagaatcaacaaacgctaaaattcagtgtggccggacccagcaacatggctgtccagggaagaaactacatacctggacccagctaccgacaacaacgtgtctcaaccactgtgactcaaaacaacaacagcgaatttgcttggcctggagcttcttcttgggctctcaatggacgtaatagcttgatgaatcctggacctgctatggccagccacaaagaaggagaggaccgtttctttcctttgtctggatctttaatttttggcaaacaaggaactggaagagacaacgtggatgcggacgaagtcatgataaccaacgaagaagaaattaaaactactaacccggtagcaacggagtcctatggacaagtggccataaaccaccagagtgcccaagcacaggcgcagaccggctgggttcaaaaccaaggaatacttccgggtatggtttggcaggacagagatgtgtacctgcaaggacccatttgggccaaaattcctcacacggacggcaactttcacccttctccgctgatgggagggtttggaatgaagcacccgcctcctcagatcctcatcaaaaacacacctgtacctgcggatcctccaacggccttcaacaaggacaagctgaactctttcatcacccagtattctactggccaagtcagcgtggagatcgagtgggagctgcagaaggaaaacagcaagcgctggaacccggagatccagtacacttccaactattacaagtctaataatgttgaatttgctgttaatactgaaggtgtatatagtgaaccccgccccattggcaccagatacctgactcgtaatctgtaa

SEQ ID NO: 1606 - DNA, 2277 bp, Artificial Sequence
  source: /note="Description of Artificial Sequence: Synthetic polynucleotide"
ctggctgccgatggttatcttccagattggctcgaggacaaccttagtgaaggaattcgcgagtggtgggctttgaaacctggagcccctcaacccaaggcaaatcaacaacatcaagacaacgctcgaggtcttgtgcttccgggttacaaataccttggacccggcaacggactcgacaagggggagccggtcaacgcagcagacgcggcggccctcgagcacgacaaggcctacgaccagcagctcaaggccggagacaacccgtacctcaagtacaaccacgccgacgccgagttccaggagcggctcaaagaagatacgtcttttgggggcaacctcgggcgagcagtcttccaggccaaaaagaggcttcttgaacctcttggtctggttgaggaagcggctaagatgaacaaccagaagatcgtgaacctgaaggagaaggtggcccagctggaggccggcggcggcggcagcgctcctggaaagaagaggcctgtagagcagtctcctcaggaaccggactcctccgcgggtattggcaaatcgggtgcacagcccgctaaaaagagactcaatttcggtcagactggcgacacagagtcagtcccagaccctcaaccaatcggagaacctcccgcagccccctcaggtgtgggatctcttacaatggcttcaggtggtggcgcaccagtggcagacaataacgaaggtgccgatggagtgggtagttcctcgggaaattggcattgcgattcccaatggctgggggacagagtcatcaccaccagcacccgaacctgggccctgcccacctacaacaatcacctctacaagcaaatctccaacagcacatctggaggatcttcaaatgacaacgcctacttcggctacagcaccccctgggggtattttgacttcaacagattccactgccacttctcaccacgtgactggcagcgactcatcaacaacaactggggattccggcctaagcgactcaacttcaagctcttcaacattcaggtcaaagaggttacggacaacaatggagtcaagaccatcgccaataaccttaccagcacggtccaggtcttcacggactcagactatcagctcccgtacgtgctcgggtcggctcacgagggctgcctcccgccgttcccagcggacgttttcatgattcctcagtacgggtatctgacgcttaatgatggaagccaggccgtgggtcgttcgtccttttactgcctggaatatttcccgtcgcaaatgctaagaacgggtaacaacttccagttcaactacgagtttgagaacgtacctttccatagcagctacgctcacagccaaagcctggaccgactaatgaatccactcatcgaccaatacttgtactatctctcaaagactattaacgattctggacagaatcaacaaacgctaaaattcagtgtggccggacccagcaacatggctgtccagggaagaaactacatacctggacccagctaccgacaacaacgtgtctcaaccactgtgactcaaaacaacaacagcgaatttgcttggcctggagcttcttcttgggctctcaatggacgtaatagcttgatgaatcctggacctgctatggccagccacaaagaaggagaggaccgtttctttcctttgtctggatctttaatttttggcaaacaaggaactggaagagacaacgtggatgcggacgaagtcatgataaccaacgaagaagaaattaaaactactaacccggtagcaacggagtcctatggacaagtggccataaaccaccagagtgcccaagcacaggcgcagaccggctgggttcaaaaccaaggaatacttccgggtatggtttggcaggacagagatgtgtacctgcaaggacccatttgggccaaaattcctcacacggacggcaactttcacccttctccgctgatgggagggtttggaatgaagcacccgcctcctcagatcctcatcaaaaacacacctgtacctgcggatcctccaacggccttcaacaaggacaagctgaactctttcatcacccagtattctactggccaagtcagcgtggagatcgagtgggagctgcagaaggaaaacagcaagcgctggaacccggagatccagtacacttccaactattacaagtctaataatgttgaatttgctgttaatactgaaggtgtatatagtgaaccccgccccattggcaccagatacctgactcgtaatctgtaa

SEQ ID NO: 1607 - DNA, 2313 bp, Artificial Sequence
  source: /note="Description of Artificial Sequence: Synthetic polynucleotide"
ctggctgccgatggttatcttccagattggctcgaggacaaccttagtgaaggaattcgcgagtggtgggctttgaaacctggagcccctcaacccaaggcaaatcaacaacatcaagacaacgctcgaggtcttgtgcttccgggttacaaataccttggacccggcaacggactcgacaagggggagccggtcaacgcagcagacgcggcggccctcgagcacgacaaggcctacgaccagcagctcaaggccggagacaacccgtacctcaagtacaaccacgccgacgccgagttccaggagcggctcaaagaagatacgtcttttgggggcaacctcgggcgagcagtcttccaggccaaaaagaggcttcttgaacctcttggtctggttgaggaagcggctaagatgtataccatctggatgcccgagaaccccaggcccggtaccccctgcgacatcttcaccaacagcaggggcaagcgagccagcaacggcggcggcggcggcagcgctcctggaaagaagaggcctgtagagcagtctcctcaggaaccggactcctccgcgggtattggcaaatcgggtgcacagcccgctaaaaagagactcaatttcggtcagactggcgacacagagtcagtcccagaccctcaaccaatcggagaacctcccgcagccccctcaggtgtgggatctcttacaatggcttcaggtggtggcgcaccagtggcagacaataacgaaggtgccgatggagtgggtagttcctcgggaaattggcattgcgattcccaatggctgggggacagagtcatcaccaccagcacccgaacctgggccctgcccacctacaacaatcacctctacaagcaaatctccaacagcacatctggaggatcttcaaatgacaacgcctacttcggctacagcaccccctgggggtattttgacttcaacagattccactgccacttctcaccacgtgactggcagcgactcatcaacaacaactggggattccggcctaagcgactcaacttcaagctcttcaacattcaggtcaaagaggttacggacaacaatggagtcaagaccatcgccaataaccttaccagcacggtccaggtcttcacggactcagactatcagctcccgtacgtgctcgggtcggctcacgagggctgcctcccgccgttcccagcggacgttttcatgattcctcagtacgggtatctgacgcttaatgatggaagccaggccgtgggtcgttcgtccttttactgcctggaatatttcccgtcgcaaatgctaagaacgggtaacaacttccagttcaactacgagtttgagaacgtacctttccatagcagctacgctcacagccaaagcctggaccgactaatgaatccactcatcgaccaatacttgtactatctctcaaagactattaacgattctggacagaatcaacaaacgctaaaattcagtgtggccggacccagcaacatggctgtccagggaagaaactacatacctggacccagctaccgacaacaacgtgtctcaaccactgtgactcaaaacaacaacagcgaatttgcttggcctggagcttcttcttgggctctcaatggacgtaatagcttgatgaatcctggacctgctatggccagccacaaagaaggagaggaccgtttctttcctttgtctggatctttaatttttggcaaacaaggaactggaagagacaacgtggatgcggacgaagtcatgataaccaacgaagaagaaattaaaactactaacccggtagcaacggagtcctatggacaagtggccataaaccaccagagtgcccaagcacaggcgcagaccggctgggttcaaaaccaaggaatacttccgggtatggtttggcaggacagagatgtgtacctgcaaggacccatttgggccaaaattcctcacacggacggcaactttcacccttctccgctgatgggagggtttggaatgaagcacccgcctcctcagatcctcatcaaaaacacacctgtacctgcggatcctccaacggccttcaacaaggacaagctgaactctttcatcacccagtattctactggccaagtcagcgtggagatcgagtgggagctgcagaaggaaaacagcaagcgctggaacccggagatccagtacacttccaactattacaagtctaataatgttgaatttgctgttaatactgaaggtgtatatagtgaaccccgccccattggcaccagatacctgactcgtaatctgtaa

SEQ ID NO: 1608 - DNA, 2283 bp, Artificial Sequence
  source: /note="Description of Artificial Sequence: Synthetic polynucleotide"
ctggctgccgatggttatcttccagattggctcgaggacaaccttagtgaaggaattcgcgagtggtgggctttgaaacctggagcccctcaacccaaggcaaatcaacaacatcaagacaacgctcgaggtcttgtgcttccgggttacaaataccttggacccggcaacggactcgacaagggggagccggtcaacgcagcagacgcggcggccctcgagcacgacaaggcctacgaccagcagctcaaggccggagacaacccgtacctcaagtacaaccacgccgacgccgagttccaggagcggctcaaagaagatacgtcttttgggggcaacctcgggcgagcagtcttccaggccaaaaagaggcttcttgaacctcttggtctggttgaggaagcggctaagatgaccttcttctacggcggcagcaggggcaagaggaacaacttcaagaccgaggagtacggcggcggcggcagcgctcctggaaagaagaggcctgtagagcagtctcctcaggaaccggactcctccgcgggtattggcaaatcgggtgcacagcccgctaaaaagagactcaatttcggtcagactggcgacacagagtcagtcccagaccctcaaccaatcggagaacctcccgcagccccctcaggtgtgggatctcttacaatggcttcaggtggtggcgcaccagtggcagacaataacgaaggtgccgatggagtgggtagttcctcgggaaattggcattgcgattcccaatggctgggggacagagtcatcaccaccagcacccgaacctgggccctgcccacctacaacaatcacctctacaagcaaatctccaacagcacatctggaggatcttcaaatgacaacgcctacttcggctacagcaccccctgggggtattttgacttcaacagattccactgccacttctcaccacgtgactggcagcgactcatcaacaacaactggggattccggcctaagcgactcaacttcaagctcttcaacattcaggtcaaagaggttacggacaacaatggagtcaagaccatcgccaataaccttaccagcacggtccaggtcttcacggactcagactatcagctcccgtacgtgctcgggtcggctcacgagggctgcctcccgccgttcccagcggacgttttcatgattcctcagtacgggtatctgacgcttaatgatggaagccaggccgtgggtcgttcgtccttttactgcctggaatatttcccgtcgcaaatgctaagaacgggtaacaacttccagttcaactacgagtttgagaacgtacctttccatagcagctacgctcacagccaaagcctggaccgactaatgaatccactcatcgaccaatacttgtactatctctcaaagactattaacgattctggacagaatcaacaaacgctaaaattcagtgtggccggacccagcaacatggctgtccagggaagaaactacatacctggacccagctaccgacaacaacgtgtctcaaccactgtgactcaaaacaacaacagcgaatttgcttggcctggagcttcttcttgggctctcaatggacgtaatagcttgatgaatcctggacctgctatggccagccacaaagaaggagaggaccgtttctttcctttgtctggatctttaatttttggcaaacaaggaactggaagagacaacgtggatgcggacgaagtcatgataaccaacgaagaagaaattaaaactactaacccggtagcaacggagtcctatggacaagtggccataaaccaccagagtgcccaagcacaggcgcagaccggctgggttcaaaaccaaggaatacttccgggtatggtttggcaggacagagatgtgtacctgcaaggacccatttgggccaaaattcctcacacggacggcaactttcacccttctccgctgatgggagggtttggaatgaagcacccgcctcctcagatcctcatcaaaaacacacctgtacctgcggatcctccaacggccttcaacaaggacaagctgaactctttcatcacccagtattctactggccaagtcagcgtggagatcgagtgggagctgcagaaggaaaacagcaagcgctggaacccggagatccagtacacttccaactattacaagtctaataatgttgaatttgctgttaatactgaaggtgtatatagtgaaccccgccccattggcaccagatacctgactcgtaatctgtaa

SEQ ID NO: 1609 - DNA, 2283 bp, Artificial Sequence
  source: /note="Description of Artificial Sequence: Synthetic polynucleotide"
ctggctgccgatggttatcttccagattggctcgaggacaaccttagtgaaggaattcgcgagtggtgggctttgaaacctggagcccctcaacccaaggcaaatcaacaacatcaagacaacgctcgaggtcttgtgcttccgggttacaaataccttggacccggcaacggactcgacaagggggagccggtcaacgcagcagacgcggcggccctcgagcacgacaaggcctacgaccagcagctcaaggccggagacaacccgtacctcaagtacaaccacgccgacgccgagttccaggagcggctcaaagaagatacgtcttttgggggcaacctcgggcgagcagtcttccaggccaaaaagaggcttcttgaacctcttggtctggttgaggaagcggctaagatggcagctgcggccgccgcggctgcagcggctgcagccgccgcagctgcggctgcagcgggcggcggcggcagcgctcctggaaagaagaggcctgtagagcagtctcctcaggaaccggactcctccgcgggtattggcaaatcgggtgcacagcccgctaaaaagagactcaatttcggtcagactggcgacacagagtcagtcccagaccctcaaccaatcggagaacctcccgcagccccctcaggtgtgggatctcttacaatggcttcaggtggtggcgcaccagtggcagacaataacgaaggtgccgatggagtgggtagttcctcgggaaattggcattgcgattcccaatggctgggggacagagtcatcaccaccagcacccgaacctgggccctgcccacctacaacaatcacctctacaagcaaatctccaacagcacatctggaggatcttcaaatgacaacgcctacttcggctacagcaccccctgggggtattttgacttcaacagattccactgccacttctcaccacgtgactggcagcgactcatcaacaacaactggggattccggcctaagcgactcaacttcaagctcttcaacattcaggtcaaagaggttacggacaacaatggagtcaagaccatcgccaataaccttaccagcacggtccaggtcttcacggactcagactatcagctcccgtacgtgctcgggtcggctcacgagggctgcctcccgccgttcccagcggacgttttcatgattcctcagtacgggtatctgacgcttaatgatggaagccaggccgtgggtcgttcgtccttttactgcctggaatatttcccgtcgcaaatgctaagaacgggtaacaacttccagttcaactacgagtttgagaacgtacctttccatagcagctacgctcacagccaaagcctggaccgactaatgaatccactcatcgaccaatacttgtactatctctcaaagactattaacgattctggacagaatcaacaaacgctaaaattcagtgtggccggacccagcaacatggctgtccagggaagaaactacatacctggacccagctaccgacaacaacgtgtctcaaccactgtgactcaaaacaacaacagcgaatttgcttggcctggagcttcttcttgggctctcaatggacgtaatagcttgatgaatcctggacctgctatggccagccacaaagaaggagaggaccgtttctttcctttgtctggatctttaatttttggcaaacaaggaactggaagagacaacgtggatgcggacgaagtcatgataaccaacgaagaagaaattaaaactactaacccggtagcaacggagtcctatggacaagtggccataaaccaccagagtgcccaagcacaggcgcagaccggctgggttcaaaaccaaggaatacttccgggtatggtttggcaggacagagatgtgtacctgcaaggacccatttgggccaaaattcctcacacggacggcaactttcacccttctccgctgatgggagggtttggaatgaagcacccgcctcctcagatcctcatcaaaaacacacctgtacctgcggatcctccaacggccttcaacaaggacaagctgaactctttcatcacccagtattctactggccaagtcagcgtggagatcgagtgggagctgcagaaggaaaacagcaagcgctggaacccggagatccagtacacttccaactattacaagtctaataatgttgaatttgctgttaatactgaaggtgtatatagtgaaccccgccccattggcaccagatacctgactcgtaatctgtaa

SEQ ID NO: 1610 - protein, 726 aa, Artificial Sequence
  source: /note="Description of Artificial Sequence: Synthetic polypeptide"
MEVQLQASGGGLVQAGGSLRLSCAASGFKITHYTMGWFRQAPGKEREFVSRITWGGDNTFYSNSVKGRFTISRDNAKNTVYLQMNSLKPEDTADYYCAAGSTSTATPLRVDYWGKGTQVTVSSGGGGSAPGKKRPVEQSPQEPDSSSGIGKTGQQPAKKRLNFGQTGDSESVPDPQPLGEPPAAPSGLGPNTMASGGGAPMADNNEGADGVGNSSGNWHCDSTWLGDRVITTSTRTWALPTYNNHLYKQISNGTSGGSTNDNTYFGYSTPWGYFDFNRFHCHFSPRDWQRLINNNWGFRPKRLNFKLFNIQVKEVTTNEGTKTIANNLTSTVQVFTDSEYQLPYVLGSAHQGCLPPFPADVFMVPQYGYLTLNNGSQALGRSSFYCLEYFPSQMLRTGNNFQFSYTFEDVPFHSSYAHSQSLDRLMNPLIDQYLYYLVRTQTTGTGGTQTLAFSQAGPSSMANQARNWVPGPCYRQQRVSTTTNQNNNSNFAWTGAAKFKLNGRDSLMNPGVAMASHKDDDDRFFPSSGVLIFGKQGAGNDGVDYSQVLITDEEEIKATNPVATEEYGAVAINNQAANTQAQTGLVHNQGVIPGMVWQNRDVYLQGPIWAKIPHTDGNFHPSPLMGGFGLKHPPPQILIKNTPVPADPPLTFNQAKLNSFITQYSTGQVSVEIEWELQKENSKRWNPEIQYTSNYYKSTNVDFAVNTEGVYSEPRPIGTRYLTRNL

SEQ ID NO: 1611 - protein, 729 aa, Artificial Sequence
  source: /note="Description of Artificial Sequence: Synthetic polypeptide"
MEVQLQASGGGLVQAGGSLRLSCSASVRTFSIYAMGWFRQAPGKEREFVAGINRSGDVTKYADFVKGRFSISRDNAKNMVYLQMNSLKPEDTALYYCAATWAYDTVGALTSGYNFWGQGTQVTVSSGGGGSAPGKKRPVEQSPQEPDSSSGIGKTGQQPAKKRLNFGQTGDSESVPDPQPLGEPPAAPSGLGPNTMASGGGAPMADNNEGADGVGNSSGNWHCDSTWLGDRVITTSTRTWALPTYNNHLYKQISNGTSGGSTNDNTYFGYSTPWGYFDFNRFHCHFSPRDWQRLINNNWGFRPKRLNFKLFNIQVKEVTTNEGTKTIANNLTSTVQVFTDSEYQLPYVLGSAHQGCLPPFPADVFMVPQYGYLTLNNGSQALGRSSFYCLEYFPSQMLRTGNNFQFSYTFEDVPFHSSYAHSQSLDRLMNPLIDQYLYYLVRTQTTGTGGTQTLAFSQAGPSSMANQARNWVPGPCYRQQRVSTTTNQNNNSNFAWTGAAKFKLNGRDSLMNPGVAMASHKDDDDRFFPSSGVLIFGKQGAGNDGVDYSQVLITDEEEIKATNPVATEEYGAVAINNQAANTQAQTGLVHNQGVIPGMVWQNRDVYLQGPIWAKIPHTDGNFHPSPLMGGFGLKHPPPQILIKNTPVPADPPLTFNQAKLNSFITQYSTGQVSVEIEWELQKENSKRWNPEIQYTSNYYKSTNVDFAVNTEGVYSEPRPIGTRYLTRNL

SEQ ID NO: 1612 - protein, 651 aa, Artificial Sequence
  source: /note="Description of Artificial Sequence: Synthetic polypeptide"
MPSSVIDALQYKLEGTTRLTRKRGLKLATALSLSNKFVEGSPSGGGGSGGGGSAPGKKRPVEQSPQEPDSSSGIGKTGQQPAKKRLNFGQTGDSESVPDPQPLGEPPAAPSGLGPNTMASGGGAPMADNNEGADGVGNSSGNWHCDSTWLGDRVITTSTRTWALPTYNNHLYKQISNGTSGGSTNDNTYFGYSTPWGYFDFNRFHCHFSPRDWQRLINNNWGFRPKRLNFKLFNIQVKEVTTNEGTKTIANNLTSTVQVFTDSEYQLPYVLGSAHQGCLPPFPADVFMVPQYGYLTLNNGSQALGRSSFYCLEYFPSQMLRTGNNFQFSYTFEDVPFHSSYAHSQSLDRLMNPLIDQYLYYLVRTQTTGTGGTQTLAFSQAGPSSMANQARNWVPGPCYRQQRVSTTTNQNNNSNFAWTGAAKFKLNGRDSLMNPGVAMASHKDDDDRFFPSSGVLIFGKQGAGNDGVDYSQVLITDEEEIKATNPVATEEYGAVAINNQAANTQAQTGLVHNQGVIPGMVWQNRDVYLQGPIWAKIPHTDGNFHPSPLMGGFGLKHPPPQILIKNTPVPADPPLTFNQAKLNSFITQYSTGQVSVEIEWELQKENSKRWNPEIQYTSNYYKSTNVDFAVNTEGVYSEPRPIGTRYLTRNL

SEQ ID NO: 1613 - protein, 638 aa, Artificial Sequence
  source: /note="Description of Artificial Sequence: Synthetic polypeptide"
MYTIWMPENPRPGTPCDIFTNSRGKRASNGGGGGSGGGGSAPGKKRPVEQSPQEPDSSSGIGKTGQQPAKKRLNFGQTGDSESVPDPQPLGEPPAAPSGLGPNTMASGGGAPMADNNEGADGVGNSSGNWHCDSTWLGDRVITTSTRTWALPTYNNHLYKQISNGTSGGSTNDNTYFGYSTPWGYFDFNRFHCHFSPRDWQRLINNNWGFRPKRLNFKLFNIQVKEVTTNEGTKTIANNLTSTVQVFTDSEYQLPYVLGSAHQGCLPPFPADVFMVPQYGYLTLNNGSQALGRSSFYCLEYFPSQMLRTGNNFQFSYTFEDVPFHSSYAHSQSLDRLMNPLIDQYLYYLVRTQTTGTGGTQTLAFSQAGPSSMANQARNWVPGPCYRQQRVSTTTNQNNNSNFAWTGAAKFKLNGRDSLMNPGVAMASHKDDDDRFFPSSGVLIFGKQGAGNDGVDYSQVLITDEEEIKATNPVATEEYGAVAINNQAANTQAQTGLVHNQGVIPGMVWQNRDVYLQGPIWAKIPHTDGNFHPSPLMGGFGLKHPPPQILIKNTPVPADPPLTFNQAKLNSFITQYSTGQVSVEIEWELQKENSKRWNPEIQYTSNYYKSTNVDFAVNTEGVYSEPRPIGTRYLTRNL

SEQ ID NO: 1614 - protein, 628 aa, Artificial Sequence
  source: /note="Description of Artificial Sequence: Synthetic polypeptide"
MTFFYGGSRGKRNNFKTEEYGGGGSGGGGSAPGKKRPVEQSPQEPDSSSGIGKTGQQPAKKRLNFGQTGDSESVPDPQPLGEPPAAPSGLGPNTMASGGGAPMADNNEGADGVGNSSGNWHCDSTWLGDRVITTSTRTWALPTYNNHLYKQISNGTSGGSTNDNTYFGYSTPWGYFDFNRFHCHFSPRDWQRLINNNWGFRPKRLNFKLFNIQVKEVTTNEGTKTIANNLTSTVQVFTDSEYQLPYVLGSAHQGCLPPFPADVFMVPQYGYLTLNNGSQALGRSSFYCLEYFPSQMLRTGNNFQFSYTFEDVPFHSSYAHSQSLDRLMNPLIDQYLYYLVRTQTTGTGGTQTLAFSQAGPSSMANQARNWVPGPCYRQQRVSTTTNQNNNSNFAWTGAAKFKLNGRDSLMNPGVAMASHKDDDDRFFPSSGVLIFGKQGAGNDGVDYSQVLITDEEEIKATNPVATEEYGAVAINNQAANTQAQTGLVHNQGVIPGMVWQNRDVYLQGPIWAKIPHTDGNFHPSPLMGGFGLKHPPPQILIKNTPVPADPPLTFNQAKLNSFITQYSTGQVSVEIEWELQKENSKRWNPEIQYTSNYYKSTNVDFAVNTEGVYSEPRPIGTRYLTRNL

SEQ ID NO: 1615 - protein, 621 aa, Artificial Sequence
  source: /note="Description of Artificial Sequence: Synthetic polypeptide"
MNNQKIVNLKEKVAQLEAGGGGSAPGKKRPVEQSPQEPDSSAGIGKSGAQPAKKRLNFGQTGDTESVPDPQPIGEPPAAPSGVGSLTMASGGGAPVADNNEGADGVGSSSGNWHCDSQWLGDRVITTSTRTWALPTYNNHLYKQISNSTSGGSSNDNAYFGYSTPWGYFDFNRFHCHFSPRDWQRLINNNWGFRPKRLNFKLFNIQVKEVTDNNGVKTIANNLTSTVQVFTDSDYQLPYVLGSAHEGCLPPFPADVFMIPQYGYLTLNDGSQAVGRSSFYCLEYFPSQMLRTGNNFQFNYEFENVPFHSSYAHSQSLDRLMNPLIDQYLYYLSKTINDSGQNQQTLKFSVAGPSNMAVQGRNYIPGPSYRQQRVSTTVTQNNNSEFAWPGASSWALNGRNSLMNPGPAMASHKEGEDRFFPLSGSLIFGKQGTGRDNVDADEVMITNEEEIKTTNPVATESYGQVAINHQSAQAQAQTGWVQNQGILPGMVWQDRDVYLQGPIWAKIPHTDGNFHPSPLMGGFGMKHPPPQILIKNTPVPADPPTAFNKDKLNSFITQYSTGQVSVEIEWELQKENSKRWNPEIQYTSNYYKSNNVEFAVNTEGVYSEPRPIGTRYLTRNL

SEQ ID NO: 1616 - protein, 633 aa, Artificial Sequence
  source: /note="Description of Artificial Sequence: Synthetic polypeptide"
MYTIWMPENPRPGTPCDIFTNSRGKRASNGGGGGSAPGKKRPVEQSPQEPDSSAGIGKSGAQPAKKRLNFGQTGDTESVPDPQPIGEPPAAPSGVGSLTMASGGGAPVADNNEGADGVGSSSGNWHCDSQWLGDRVITTSTRTWALPTYNNHLYKQISNSTSGGSSNDNAYFGYSTPWGYFDFNRFHCHFSPRDWQRLINNNWGFRPKRLNFKLFNIQVKEVTDNNGVKTIANNLTSTVQVFTDSDYQLPYVLGSAHEGCLPPFPADVFMIPQYGYLTLNDGSQAVGRSSFYCLEYFPSQMLRTGNNFQFNYEFENVPFHSSYAHSQSLDRLMNPLIDQYLYYLSKTINDSGQNQQTLKFSVAGPSNMAVQGRNYIPGPSYRQQRVSTTVTQNNNSEFAWPGASSWALNGRNSLMNPGPAMASHKEGEDRFFPLSGSLIFGKQGTGRDNVDADEVMITNEEEIKTTNPVATESYGQVAINHQSAQAQAQTGWVQNQGILPGMVWQDRDVYLQGPIWAKIPHTDGNFHPSPLMGGFGMKHPPPQILIKNTPVPADPPTAFNKDKLNSFITQYSTGQVSVEIEWELQKENSKRWNPEIQYTSNYYKSNNVEFAVNTEGVYSEPRPIGTRYLTRNL

SEQ ID NO: 1617 - protein, 623 aa, Artificial Sequence
  source: /note="Description of Artificial Sequence: Synthetic polypeptide"
MTFFYGGSRGKRNNFKTEEYGGGGSAPGKKRPVEQSPQEPDSSAGIGKSGAQPAKKRLNFGQTGDTESVPDPQPIGEPPAAPSGVGSLTMASGGGAPVADNNEGADGVGSSSGNWHCDSQWLGDRVITTSTRTWALPTYNNHLYKQISNSTSGGSSNDNAYFGYSTPWGYFDFNRFHCHFSPRDWQRLINNNWGFRPKRLNFKLFNIQVKEVTDNNGVKTIANNLTSTVQVFTDSDYQLPYVLGSAHEGCLPPFPADVFMIPQYGYLTLNDGSQAVGRSSFYCLEYFPSQMLRTGNNFQFNYEFENVPFHSSYAHSQSLDRLMNPLIDQYLYYLSKTINDSGQNQQTLKFSVAGPSNMAVQGRNYIPGPSYRQQRVSTTVTQNNNSEFAWPGASSWALNGRNSLMNPGPAMASHKEGEDRFFPLSGSLIFGKQGTGRDNVDADEVMITNEEEIKTTNPVATESYGQVAINHQSAQAQAQTGWVQNQGILPGMVWQDRDVYLQGPIWAKIPHTDGNFHPSPLMGGFGMKHPPPQILIKNTPVPADPPTAFNKDKLNSFITQYSTGQVSVEIEWELQKENSKRWNPEIQYTSNYYKSNNVEFAVNTEGVYSEPRPIGTRYLTRNL

SEQ ID NO: 1618 - protein, 623 aa, Artificial Sequence
  source: /note="Description of Artificial Sequence: Synthetic polypeptide"
MAAAAAAAAAAAAAAAAAAAGGGGSAPGKKRPVEQSPQEPDSSAGIGKSGAQPAKKRLNFGQTGDTESVPDPQPIGEPPAAPSGVGSLTMASGGGAPVADNNEGADGVGSSSGNWHCDSQWLGDRVITTSTRTWALPTYNNHLYKQISNSTSGGSSNDNAYFGYSTPWGYFDFNRFHCHFSPRDWQRLINNNWGFRPKRLNFKLFNIQVKEVTDNNGVKTIANNLTSTVQVFTDSDYQLPYVLGSAHEGCLPPFPADVFMIPQYGYLTLNDGSQAVGRSSFYCLEYFPSQMLRTGNNFQFNYEFENVPFHSSYAHSQSLDRLMNPLIDQYLYYLSKTINDSGQNQQTLKFSVAGPSNMAVQGRNYIPGPSYRQQRVSTTVTQNNNSEFAWPGASSWALNGRNSLMNPGPAMASHKEGEDRFFPLSGSLIFGKQGTGRDNVDADEVMITNEEEIKTTNPVATESYGQVAINHQSAQAQAQTGWVQNQGILPGMVWQDRDVYLQGPIWAKIPHTDGNFHPSPLMGGFGMKHPPPQILIKNTPVPADPPTAFNKDKLNSFITQYSTGQVSVEIEWELQKENSKRWNPEIQYTSNYYKSNNVEFAVNTEGVYSEPRPIGTRYLTRNL

SEQ ID NO: 1619 - DNA, 2214 bp, Artificial Sequence
  source: /note="Description of Artificial Sequence: Synthetic polynucleotide"
atggctgccgatggttatcttccagattggctcgaggacaacctctctgagggcattcgcgagtggtgggacttgaaacctggagccccgaagcccaaagccaaccagcaaaagcaggacgacggccggggtctggtgcttcctggctacaagtacctcggacccttcaacggactcgacaagggggagcccgtcaacgcggcggacgcagcggccctcgagcacgacaaggcctacgaccagcagctcaaagcgggtgacaatccgtacctgcggtataaccacgccgacgtcgagtttcaggagcgtctgcaagaagatacgtcttttgggggcaacctcgggcgagcagtcttccaggccaagaagagggttctcgaaccttttggtctggttgaggaaggcgctaagacggctcctggaaagaaacgtccggtagagcagtcgccacaagagccagactcctcctcgggcatcggcaagaaaggccaacagcccgccagaaaaagactcaattttggccagactggcgactcagagtcagttccagaccctcaacctctcggagaacctccagcagcgccctctggtgtgggacctaatacaatggctgcaggcggtggcgcaccaatggcagacaataacgagggcgccgacggagtgggtaattcctcgggaaattggcattgcgattccacatggatgggggacagagtcatcaccaccagcacccgaacctgggccctgcccacctacaacaaccacctctacaagcaaatctccaacggcacctcgggaggaagcaccaacgacaacacctattttggctacagcaccccctgggggtattttgatttcaacagattccactgccacttctcaccacgtgactggcagcgactcatcaacaacaactggggattccggccaaaaagactcagcttcaagctcttcaacatccaggtcaaggaggtcacgcagaatgaaggcaccaagaccatcgccaataaccttaccagcacgattcaggtatttacggactcggaataccagctgccatacgtcctcggctccgcgcaccagggctgcctgcctccgttcccggcggacgtcttcatgattccccagtacggctaccttacactgaacaatggaagtcaagccgtaggccgttcctccttctactgcctggaatattttccttctcaaatgctgagaacgggcaacaactttgagttcagctaccagtttgaggacgtgccttttcacagcagctacgcgcacagccaaagcctggaccggctgatgaaccccctcatcgaccagtacctgtactacctgtctcggactcagtccacgggaggtaccgcaagaactcagcagttgctattttctcaggccgggcctaatacaatggccaatcaggcaaagaactggctgccaggaccctgttaccgccaacaacgcgtctcaacgacaaccgggcaaaacaacaatagcaactctgcctggactgctgggaccaaataccatctgaatggaagaaattcattggctaatcctggcatcgctatggcaacacacaaagacgacgaggagcgtttttttcccagtaacgggatcctgatttttggcaaacaaaatgctgccagagacaatgcggattacagcgatgtcatgctcaccagcgaggaagaaatcaaaaccactaaccctgtggctacagaggaatacggtatcgtggcagataacttgcagcagcaaaacacggctcctcaaattggaactgtcaacagccagggggccttacccggtatggtctggcagaaccgggacgtgtacctgcagggtcccatctgggccaagattcctcacacggacggcaacttccacccatctccgctgatgggcggctttggcctgaaacatcctccgcctcagatcctgatcaagaacacgcctgtacctgcggatcctccgaccaccttcaaccagtcaaagctgaactctttcatcacgcaatacagcaccggacaggtcagcgtggaaattgaatgggagctacagaaggaaaacagcaagcgctggaaccccgagatccagtacacctccaactactacaaatctacaagtgtggactttgctgttaatacagaaggcgtgtactctgaaccccgccccattggcacccgttacctcacccgtaatctgtaa

SEQ ID NO: 1620 - DNA, 2214 bp, Artificial Sequence
  source: /note="Description of Artificial Sequence: Synthetic polynucleotide"
atggctgccgatggttatcttccagattggctcgaggacaacctctctgagggcattcgcgagtggtgggcgctgaaacctggagccccgaagcccaaagccaaccagcaaaagcaggacgacggccggggtctggtgcttcctggctacaagtacctcggacccttcaacggactcgacaagggggagcccgtcaacgcggcggacgcagcggccctcgagcacgacaaggcctacgaccagcagctcaaagcgggtgacaatccgtacctgcggtataaccacgccgacgccgagtttcaggagcgtctgcaagaagatacgtcttttgggggcaacctcgggcgagcagtcttccaggccaagaagcgggttctcgaacctctcggtctggttgaggacggcgctaagacggctcctggaaagaagagaccagtagagcagtcaccccaagaaccagactcctcctcgggcatcggcaagaaaggccaacagcccgccagaaaaagactcaattttggccagactggcgactcagagtcagttccagaccctcaacctctcggagaacctccagcaacccccgctgctgtgggacctactacaatggcttcaggcggtggcgcaccaatggcagacaataacgaaggcgccgacggagtgggtagttcctcgggaaattggcattgcgattccacatggctgggcgacagagtcatcaccaccagcacccgaacctgggccctgcccacctacaacaaccacctctacaagcaaatctccaacgggacatcgggaggagccaccaacgacaacacctacttcggctacagcaccccctgggggtattttgactttaacagattccactgccacttttcaccacgtgactggcagcgactcatcaacaacaactggggattccggcccaagagactcagcttcaagctcttcaacatccaggtcaaggaggtcacgcagaatgaaggcaccaagaccatcgccaataacctcaccagcaccatccaggtgtttacggactcggagtaccagctgccgtacgttctcggctctgcccaccagggctgcctgcctccgttcccggcggacgtgttcatgattccccagtacggctacctaacactcaacaacggtagtcaggccgtgggacgctcctccttctactgcctggaatactttccttcgcagatgctgagaaccggcaacaacttccagtttacttacaccttcgaggacgtgcctttccacagcagctacgcccacagccagagcttggaccggctgatgaatcctctgattgaccagtacctgtactacttgtctcggactcaaacaacaggaggcacggcaaatacgcagactctgggcttcagccaaggtgggcctaatacaatggccaatcaggcaaagaactggctgccaggaccctgttaccgccaacaacgcgtctcaacgacaaccgggcaaaacaacaatagcaactttgcctggactgctgggaccaaataccatctgaatggaagaaattcattggctaatcctggcatcgctatggcaacacacaaggacgacgaggagcgtttttttcccagtaacgggatcctgatttttggcaaacaaaatgctgccagagacaatgcggattacagcgatgtcatgctcaccagcgaggaagaaatcaaaaccactaaccctgtggctacagaggaatacggtatcgtggcagataacttgcagcagcaaaacacggctcctcaaattggaactgtcaacagccagggggccttacccggtatggtctggcagaaccgggacgtgtacctgcagggtcccatctgggccaagattcctcacacggacggcaacttccacccgtctccgctgatgggcggctttggcctgaaacatcctccgcctcagatcctgatcaagaacacgcctgtacctgcggatcctccgaccaccttcaaccagtcaaagctgaactctttcatcacgcaatacagcaccggacaggtcagcgtggaaatcgagtgggagctgcagaaagaaaacagcaagcgctggaaccccgagatccagtacacctccaactactacaaatctacaaatgtggactttgctgtcaacacggagggggtttatagcgagcctcgccccattggcacccgttacctcacccgcaacctgtaa

SEQ ID NO: 1621 - DNA, 2211 bp, Artificial Sequence
  source: /note="Description of Artificial Sequence: Synthetic polynucleotide"
  modified_base (715)..(715): a, c, t, or g
atggctgccgatggttatcttccagattggctcgaggacaacctctctgagggcattcgcgagtggtgggcgctgaaacctggagccccgaagcccaaagccaaccagcaaaagcaggacgacggccggggtctggtgcttcctggctacaagtacctcggacccttcaacggactcgacaagggggagcccgtcaacgcggcggacgcagcggccctcgagcacgacaaggcctacgaccagcagctcaaagcgggtgacaatccgtacctgcggtataaccacgccgacgccgagtttcaggagcgtctgcaagaagatacgtcttttgggggcaacctcgggcgagcagtcttccaggccaagaagcgggttctcgaacctctcggtctggttgaggaaggcgctaagacggctcctggaaagaaacgtccggtagagcagtcgccacaagagccagactcctcctcgggcatcggcaagacaggccagcagcccgctaaaaagaggctcaattttggtcagactggcgactcagagtcagtccccgacccacaacctctcggagaacctccagcaacccccgctgctgtgggacctactacaatggcttcaggcggtggcgcaccaatggcagacaataacgaaggcgccgacggagtgggtaatgcctcaggaaattggcattgcgattccacatggctgggcgacagantcatcaccaccagcacccgaacatgggccttgcccacctataacaaccacctctacaagcaaatctccagtgcttcaacgggggccagcaacgacaaccactacttcggctacagcaccccctgggggtattttgatttcaacagattccactgccatttctcaccacgtgactggcagcgactcatcaacaacaattggggattccggcccaagagactcaacttcaagctcttcaacatccaagtcaaggaggtcacgcagaatgaaggcaccaagaccatcgccaataacctcaccagcaccatccaggtgtttacggactcggagtaccagctgccgtacgttctcggctctgcccaccagggctgcctgcctccgttcccggcggacgtgttcatgattccccagtacggctacctaacactcaacaacggtagtcaggccgtgggacgctcctccttctactgcctggaatattttccatctcaaatgctgcgaactggaaacaattttgaattcagctacaccttcgaggacgtgcctttccacagcagctacgcacacagccagagcttggaccgactgatgaatcctctcatcgaccagtacctgtactacttgtctcggactcaaacaacaggaggcacggcaaatacgcagactctgggcttcagccaaggtgggcctaatacaatggccaatcaggcaaagaactggctgccaggaccctgttaccgccaacaacgcgtctcaacgacaaccgggcaaaacaacaatagcaactttgcctggactgctgggaccaaataccatctgaatggaagaaattcattggctaatcctggcatcgctatggcaacacacaaagacgacgaggagcgtttttttcccagtaacgggatcctgatttttggcaaacaaaatgctgccagagacaatgcggattacagcgatgtcatgctcaccagcgaggaagaaatcaaaaccactaaccctgtggctacagaggaatacggtatcgtggcagataacttgcagcagcaaaacacggctcctcaaattggaactgtcaacagccaggggaccttacccggtatggtctggcagaaccgggacgtgtacctgcagggtcccatctgggccaagattcctcacacggacggcaacttccacccgtctccgctgatgggcggctttggcctgaaacatcctccgcctcagatcctgatcaagaacacgcctgtacctgcggatcctccgaccaccttcaaccagtcaaagctgaactctttcatcacgcaatacagcaccggacaggtcagcgtggaaattgaatgggagctacagaaggaaaacagcaagcgctggaaccccgagatccagtacacctccaattactacaaatctacaagtgtggactttgctgttaatacagaaggcgtgtactctgaaccccgccccattggcacgcgtttcctcacccgtaatctgtaa

SEQ ID NO: 1622 - DNA, 2214 bp, Artificial Sequence
  source: /note="Description of Artificial Sequence: Synthetic polynucleotide"
atggctgccgatggttatcttccagattggctcgaggacaacctctctgagggcattcgcgagtggtgggcgctgaaacctggagccccgaagcccaaagccaaccagcaaaagcaggacgacggccggggtctggtgcttcctggctacaagtacctcggacccttcaacggactcgacaagggggagcccgtcaacgcggcggacgcagcggccctcgagcacgacaaggcctacgaccagcagctcaaagcgggtgacaatccgtacctgcggtataaccacgccgacgccgagtttcaggagcgtctgcaagaagatacgtcttttgggggcaacctcgggcgagcagtcttccaggccaagaagcgggttctcgaacctctcggtctggttgaggaaggcgctaagacggctcctggaaagaaacgtccggtagagcagtcgccacaagagccagactcctcctcgggcatcggcaagacaggccagcagcccgctaaaaagaggctcaattttggccagactggcgactcagagtcagttccagaccctcaacctctcggagaacctccagcagcgccctctggtgtgggacctaatacaatggctgcaggcggtggcgcaccaatggcagacaataacgaaggcgccgacggagtgggtagttcctcgggaaattggcattgcgattccacatggctgggcgacagagtcatcaccaccagcacccgaacctgggccctgcccacctacaacaaccacctctacaagcaaatctccaacgggacatcgggaggagccaccaacgacaacacctacttcggctacagcaccccctgggggtattttgactttaacagattccactgccacttttcaccacgtgactggcagcgactcatcaacaacaactggggattccggcccaagagactcagcttcaagctcttcaacatccaggtcaaggaggtcacgcagaatgaaggcaccaagaccatcgccaataacctcaccagcaccatccaggtgtttacggactcggagtaccagctgccgtacgtactaggatccgctcaccagggatgtctgcctccgttcccggcggacgtgttcatgattccccagtacggctacctaacactcaacaacggtagtcaggccgtgggacgctcctccttctactgcctggaatattttccatctcagatgctgagaacgggcaataactttaccttcagctacaccttcgaggacgtgcctttccacagcagctatgcccacagccagagcttggaccggctgatgaatcctctgattgaccagtacctgtactacttgtctcggactcaaacaacaggaggcacggcaaatacgcagactctgggcttcagccaaggtgggcctaatacaatggccaatcaggcaaagaactggctgccaggaccctgttaccgccaacaacgcgtctcaacgacaaccgggcaaaacaacaatagcaactttgcctggactgctgggaccaaataccatctgaatggaagaaattcattggctaatcctggcatcgctatggcaacacacaaagacgacgaggagcgtttttttcccagtaacgggatcctgatttttggcaaacaaaatgctgccagagacaatgcggattacagcgatgtcatgctcaccagcgaggaagaaatcaaaaccactaaccctgtggctacagaggaatacggtatcgtggcagataacttgcagcagcaaaacacggctcctcaaattggaactgtcaacagccagggggccttacccggtatggtctggcagaaccgggacgtgtacctgcagggtcccatctgggccaagattcctcacacggacggcaacttccacccgtctccgctaatgggaggatttggactgaagcacccacctcctcagatcctgatcaagaacacgccggtacctgcggatcctccgaccaccttcaaccagtcaaagctgtactctttcatcacgcaatacagcaccggacaggtcagcgtggaaattgaatgggagctgcagaaggaaaacagcaagcgctggaaccccgagatccaatacacctccaactactacaaatctacaagtgtggactttgctgttaatacagaaggcgtgtactctgaaccccgccccattggcacccgttacctcacccgtaatctgtaa

SEQ ID NO: 1623 - protein, 737 aa, Artificial Sequence
  source: /note="Description of Artificial Sequence: Synthetic polypeptide"
MAADGYLPDWLEDNLSEGIREWWDLKPGAPKPKANQQKQDDGRGLVLPGYKYLGPFNGLDKGEPVNAADAAALEHDKAYDQQLKAGDNPYLRYNHADVEFQERLQEDTSFGGNLGRAVFQAKKRVLEPFGLVEEGAKTAPGKKRPVEQSPQEPDSSSGIGKKGQQPARKRLNFGQTGDSESVPDPQPLGEPPAAPSGVGPNTMAAGGGAPMADNNEGADGVGNSSGNWHCDSTWMGDRVITTSTRTWALPTYNNHLYKQISNGTSGGSTNDNTYFGYSTPWGYFDFNRFHCHFSPRDWQRLINNNWGFRPKRLSFKLFNIQVKEVTQNEGTKTIANNLTSTIQVFTDSEYQLPYVLGSAHQGCLPPFPADVFMIPQYGYLTLNNGSQAVGRSSFYCLEYFPSQMLRTGNNFEFSYQFEDVPFHSSYAHSQSLDRLMNPLIDQYLYYLSRTQSTGGTARTQQLLFSQAGPNTMANQAKNWLPGPCYRQQRVSTTTGQNNNSNSAWTAGTKYHLNGRNSLANPGIAMATHKDDEERFFPSNGILIFGKQNAARDNADYSDVMLTSEEEIKTTNPVATEEYGIVADNLQQQNTAPQIGTVNSQGALPGMVWQNRDVYLQGPIWAKIPHTDGNFHPSPLMGGFGLKHPPPQILIKNTPVPADPPTTFNQSKLNSFITQYSTGQVSVEIEWELQKENSKRWNPEIQYTSNYYKSTSVDFAVNTEGVYSEPRPIGTRYLTRNL

SEQ ID NO: 1624 - protein, 737 aa, Artificial Sequence
  source: /note="Description of Artificial Sequence: Synthetic polypeptide"
MAADGYLPDWLEDNLSEGIREWWALKPGAPKPKANQQKQDDGRGLVLPGYKYLGPFNGLDKGEPVNAADAAALEHDKAYDQQLKAGDNPYLRYNHADAEFQERLQEDTSFGGNLGRAVFQAKKRVLEPLGLVEDGAKTAPGKKRPVEQSPQEPDSSSGIGKKGQQPARKRLNFGQTGDSESVPDPQPLGEPPATPAAVGPTTMASGGGAPMADNNEGADGVGSSSGNWHCDSTWLGDRVITTSTRTWALPTYNNHLYKQISNGTSGGATNDNTYFGYSTPWGYFDFNRFHCHFSPRDWQRLINNNWGFRPKRLSFKLFNIQVKEVTQNEGTKTIANNLTSTIQVFTDSEYQLPYVLGSAHQGCLPPFPADVFMIPQYGYLTLNNGSQAVGRSSFYCLEYFPSQMLRTGNNFQFTYTFEDVPFHSSYAHSQSLDRLMNPLIDQYLYYLSRTQTTGGTANTQTLGFSQGGPNTMANQAKNWLPGPCYRQQRVSTTTGQNNNSNFAWTAGTKYHLNGRNSLANPGIAMATHKDDEERFFPSNGILIFGKQNAARDNADYSDVMLTSEEEIKTTNPVATEEYGIVADNLQQQNTAPQIGTVNSQGALPGMVWQNRDVYLQGPIWAKIPHTDGNFHPSPLMGGFGLKHPPPQILIKNTPVPADPPTTFNQSKLNSFITQYSTGQVSVEIEWELQKENSKRWNPEIQYTSNYYKSTNVDFAVNTEGVYSEPRPIGTRYLTRNL

SEQ ID NO: 1625 - protein, 736 aa, Artificial Sequence
  source: /note="Description of Artificial Sequence: Synthetic polypeptide"
  MOD_RES (239)..(239): Any naturally occurring amino acid
MAADGYLPDWLEDNLSEGIREWWALKPGAPKPKANQQKQDDGRGLVLPGYKYLGPFNGLDKGEPVNAADAAALEHDKAYDQQLKAGDNPYLRYNHADAEFQERLQEDTSFGGNLGRAVFQAKKRVLEPLGLVEEGAKTAPGKKRPVEQSPQEPDSSSGIGKTGQQPAKKRLNFGQTGDSESVPDPQPLGEPPATPAAVGPTTMASGGGAPMADNNEGADGVGNASGNWHCDSTWLGDRXITTSTRTWALPTYNNHLYKQISSASTGASNDNHYFGYSTPWGYFDFNRFHCHFSPRDWQRLINNNWGFRPKRLNFKLFNIQVKEVTQNEGTKTIANNLTSTIQVFTDSEYQLPYVLGSAHQGCLPPFPADVFMIPQYGYLTLNNGSQAVGRSSFYCLEYFPSQMLRTGNNFEFSYTFEDVPFHSSYAHSQSLDRLMNPLIDQYLYYLSRTQTTGGTANTQTLGFSQGGPNTMANQAKNWLPGPCYRQQRVSTTTGQNNNSNFAWTAGTKYHLNGRNSLANPGIAMATHKDDEERFFPSNGILIFGKQNAARDNADYSDVMLTSEEEIKTTNPVATEEYGIVADNLQQQNTAPQIGTVNSQGTLPGMVWQNRDVYLQGPIWAKIPHTDGNFHPSPLMGGFGLKHPPPQILIKNTPVPADPPTTFNQSKLNSFITQYSTGQVSVEIEWELQKENSKRWNPEIQYTSNYYKSTSVDFAVNTEGVYSEPRPIGTRFLTRNL

SEQ ID NO: 1626 - protein, 737 aa, Artificial Sequence
  source: /note="Description of Artificial Sequence: Synthetic polypeptide"
MAADGYLPDWLEDNLSEGIREWWALKPGAPKPKANQQKQDDGRGLVLPGYKYLGPFNGLDKGEPVNAADAAALEHDKAYDQQLKAGDNPYLRYNHADAEFQERLQEDTSFGGNLGRAVFQAKKRVLEPLGLVEEGAKTAPGKKRPVEQSPQEPDSSSGIGKTGQQPAKKRLNFGQTGDSESVPDPQPLGEPPAAPSGVGPNTMAAGGGAPMADNNEGADGVGSSSGNWHCDSTWLGDRVITTSTRTWALPTYNNHLYKQISNGTSGGATNDNTYFGYSTPWGYFDFNRFHCHFSPRDWQRLINNNWGFRPKRLSFKLFNIQVKEVTQNEGTKTIANNLTSTIQVFTDSEYQLPYVLGSAHQGCLPPFPADVFMIPQYGYLTLNNGSQAVGRSSFYCLEYFPSQMLRTGNNFTFSYTFEDVPFHSSYAHSQSLDRLMNPLIDQYLYYLSRTQTTGGTANTQTLGFSQGGPNTMANQAKNWLPGPCYRQQRVSTTTGQNNNSNFAWTAGTKYHLNGRNSLANPGIAMATHKDDEERFFPSNGILIFGKQNAARDNADYSDVMLTSEEEIKTTNPVATEEYGIVADNLQQQNTAPQIGTVNSQGALPGMVWQNRDVYLQGPIWAKIPHTDGNFHPSPLMGGFGLKHPPPQILIKNTPVPADPPTTFNQSKLYSFITQYSTGQVSVEIEWELQKENSKRWNPEIQYTSNYYKSTSVDFAVNTEGVYSEPRPIGTRYLTRNL

SEQ ID NO: 1627 - DNA, 2208 bp, Artificial Sequence
  source: /note="Description of Artificial Sequence: Synthetic polynucleotide"
atggctgccgatggttatcttccagattggctcgaggacaacctctctgagggcattcgcgagtggtgggacttgaaacctggagccccgaaacccaaagccaaccagcaaaagcaggacgacggccggggtctggtgcttcctggctacaagtacctcggacccttcaacggactcgacaagggggagcccgtcaacgcggcggatgcagcggccctcgagcacgacaaagcctacgaccggcagctcgacagcggagacaacccgtacctcaagtacaaccacgccgacgcggagtttcaggagcgccttaaagaagatacgtcttttgggggcaacctcggacgagcagtcttccaggccaagaagagggttctcgaaccttttggtctggttgaggaaggtgctaagacggctcctggaaagaaacgtccggtagagcagtcgccacaagagccagactcctcctcgggcattggcaagacaggccagcagcccgctaaaaagagactcaattttggtcagactggcgactcagagtcagtccccgacccacaacctctcggagaacctccagcaacccccgctgctgtgggacctactacaatggcttcaggtggtggcgcaccagtggcagacaataacgaaggcgccgacggagtgggtagttcctcgggaaattggcattgcgattccacatggctgggcgacagagtcatcaccaccagcacccgaacatgggccttgcccacctataacaaccacctctacaagcaaatctccagtgcttcgacgggggccagcaacgacaaccactacttcggctacagcaccccctgggggtattttgatttcaacaggttccactgccatttctcaccacgtgactggcagcgactcatcaacaacaattggggattccggcccaaaagactcaacttcaagctgttcaacatccaggtcaaggaagtcacgacgaacgaaggcaccaagaccatcgccaataatctcaccagcaccgtgcaggtctttacggactcggagtaccagttaccgtacgtgctaggatccgctcaccagggatgtctgcctccgttcccggcggacgtcttcatggttcctcagtacggctatttaactttaaacaatggaagccaagccctgggacgttcctccttctactgtctggagtatttcccatcgcagatgctgagaacgggcaacaactttacctttagctacaccttcgaggacgtgcctttccacagcagctacgcgcacagccagagcctggacaggctgatgaatcccctcatcgaccagtacctgtactacctggtcagaacgcaaacgactggaactggagggacgcagactctggcattcagccaagcgggtcctagctcaatggccaaccaggctagaaattgggtgcccggaccttgctaccggcagcagcgcgtctccacgacaaccaaccagaacaacaacagcaactttgcctggacgggagctgccaagtttaagctgaacggccgagactctctaatgaatccgggcgtggcaatggcttcccacaaggatgacgacgaccgcttcttcccttcgagcggggtcctgatttttggcaagcaaggagccgggaacgatggagtggattacagccaagtgctgattacagatgaggaagaaatcaaggctaccaaccccgtggccacagaagaatatggagcagtggccatcaacaaccaggccgccaatacgcaggcgcagaccggactcgtgcacaaccagggggtgattcccggcatggtgtggcagaatagagacgtgtacctgcagggtcccatctgggccaaaattcctcacacggacggcaactttcacccgtctcccctgatgggcggctttggactgaagcacccgcctcctcaaattctcatcaagaacacaccggttccagcggacccgccgcttaccttcaaccaggccaagctgaactctttcatcacgcagtacagcaccggacaggtcagcgtggaaatcgagtgggagctgcagaaagaaaacagcaaacgctggaatccagagattcaatacacttccaactactacaaatctacaaatgtggactttgctgtcaacacggagggggtttatagcgagcctcgccccattggcacccgttacctcacccgcaacctgtaa

SEQ ID NO: 1628 - DNA, 2211 bp, Artificial Sequence
  source: /note="Description of Artificial Sequence: Synthetic polynucleotide"
  modified_base (337)..(337): a, c, t, or g
atggctgccgatggttatcttccagattggctcgaggacactctctctgaaggaataagacagtggtggaagctcaaacctggcccaccaccaccaaagcccgcagagcggcataaggacgacagcaggggtcttgtgcttcctggctacaagtacctcggacccttcaacggactcgacaagggggagcccgtcaacgcggcggacgcagcgaccctcgagcacgacaaggcctacgaccagcagctcaaagcgggtgacaatccgtacctgcggtataaccacgccgacgccgagtttcaggagcgtctgcaagaagatacgtcttttgggggcnacctcgggcgagcagtcttccaggccaagaagcgggttctcgaacctctcggtctggttgaggaagctgctaagacggctcctggaaagaagagaccagtagagccatcaccccagcgttctccagactcctctacgggcatcggcaagaaaggccaacagcccgccagaaaaagactcaattttggtcagactggcgactcagagtcagttccagaccctcaacctctcggagaacctccagcagcgccctctggtgtgggacctaatacaatggctgcaggcggtggcgcaccaatggcagacaataacgaaggcgccgacggagtgggtagttcctcgggaaattggcattgcgattccacatggctgggcgacagagtcatcaccaccagcacccgaacctgggccctgcccacctacaacaaccacctctacaagcaaatctccagtgcttcaacgggggccagcaacgacaaccactacttcggctacagcaccccctgggggtattttgatttcaacagattccactgccatttctcaccacgtgactggcagcgactcatcaacaacaattggggattccggcccaagagactcaacttcaagctcttcaacatccaagtcaaggaggtcacgacgaatgatggcgtcacgaccatcgctaataaccttaccagcacggttcaagtcttctcggactcagactatcagctcccgtacgtgctcgggtcggctcacgagggctgcctcccgccgttcccagcggacgttttcatgattcctcagtacggctatttaactttaaacaatggaagccaagccctgggacgttcctccttctactgtctggagtatttcccatcgcagatgctgagaaccggcaacaactttcagttcagctacaccttcgaggacgtgcctttccacagcagctacgcgcacagccagagcctggacaggctgatgaatcccctcatcgaccagtacctgtactacctggtcagaacgcaaacgactggaactggagggacgcagactctggcattcagccaagcgggtcctagctcaatggccaaccaggctagaaattgggtgcccggaccttgctaccggcagcagcgcgtctccacgacaaccaaccagaacaacaacagcaactttgcctggacgggagctgccaagtttaagctgaacggccgagactctctaatgaatccgggcgtggcaatggcttcccacaaggatgacgacgaccgcttcttcccttcgagcggggtcctgatttttggcaagcaaggagccgggaacgatggagtggattacagccaagtgctgattacagatgaggaagaaatcaaggctaccaaccccgtagccacagaagaatatggagcagtggccatcaacaaccaggccgccaatacgcaggcgcagaccggactcgtgcacaaccagggggtgattcccggaatggtgtggcaagacagagacgtatacctgcagggtcctatttgggccaaaattcctcacacggatggacactttcacccgtctcctctcatgggcggctttggacttaagcacccgcctcctcagatcctcatcaaaaacacgcctgttcctgcgaatcctccggcagagttttcggctacaaagtttgcttcattcatcacccagtattccacaggacaagtgagcgtggagattgaatgggagctgcagaaagaaaacagcaaacgctggaatcccgaagtgcagtatacatctaactatgcaaaatctgccaacgttgatttcactgtggacaacaatggactttatactgagcctcgccccattggcacccgttacctcacccgtcccctgtaa

SEQ ID NO: 1629 - DNA, 2214 bp, Artificial Sequence
  source: /note="Description of Artificial Sequence: Synthetic polynucleotide"
  modified_base (335)..(335): a, c, t, or g
atgactgacggttaccttccagattggctagaggacaacctctctgaaggcgttcgagagtggtgggcgctgcaacctggagccccgaagcccaaagccaaccagcaaaagcaggacgacggccggggtctggtgcttcctggctacaagtacctcggacccttcaacggactcgacaagggggagcccgtcaacgcggcggacgcagcggccctcgagcacgacaaggcctacgaccagcagctcaaagcgggtgacaatccgtacctgcggtataaccacgccgacgccgagtttcaggagcgtctgcaagaagatacgtcttttgggggcancctcgggcgagcagtcttccaggccaagaagcgggttctcgaacctctcggtctggttgaggaaggcgctaagacggctcctggaaagaaacgtccggtagagccatcaccccagcgttctccagactcctctacgggcatcggcaagaaaggccaacagcccgccagaaaaagactcaattttggtcagactggcgactcagagtcagttccagaccctcaacctctcggagaacctccagcagcgccctcaggtgtgggatctcttacaatggcttcaggtggtggcgcaccagtggcagacaataacgaaggtgccgatggagtgggtagttcctcgggaaattggcattgcgattcccaatggctgggggacagagtcatcaccaccagcacccgaacctgggccctgcccacctacaacaatcacctctacaagcaaatctccaacagcacatctggaggatcttcaaatgacaacgcctacttcggctacagcaccccctgggggtattttgacttcaacagattccactgccacttctcaccacgtgactggcagcgactcatcaacaacaactggggattccggcccaagagactcagcttcaagctcttcaacatccaggtcaaggaggtcacgcagaatgaaggcaccaagaccatcgccaataacctcaccagcaccatccaggtgtttacggactcggagtaccagctgccgtacgttctcggctctgcccaccagggctgcctgcctccgttcccggcggacgtgttcatgattccccagtacggctacctaacactcaacaacggtagtcaggccgtgggacgctcctccttctactgcctggaatactttccttcgcagatgctgagaaccggcaacaacttccagtttacttacaccttcgaggacgtgcctttccacagcagctacgcccacagccagagcttggaccggctgatgaatcctctgattgaccagtacctgtactacttgtctcggactcaaacaacaggaggcacggcaaatacgcagactctgggcttcagccaaggtgggcctaatacaatggccaatcaggcaaagaactggctgccaggaccctgttaccgccaacaacgcgtctcaacgacaaccgggcaaaacaacaatagcaactttgcctggactgctgggaccaaataccatctgaatggaagaaattcattggctaatcctggcatcgctatggcaacacacaaagacgacgaggagcgtttttttcccagtaacgggatcctgatttttggcaaacaaaatgctgccagagacaatgcggattacagcgatgtcatgctcaccagcgaggaagaaatcaaaaccactaaccctgtggctacagaggaatacggtatcgtggcagataacttgcagcagcaaaacacggctcctcaaattggaactgtcaacagccagggggccttacccggtatggtctggcagaaccgggacgtgtacctgcagggtcccatctgggccaagattcctcacacggacggcaacttccacccgtctccgctgatgggcggctttggcctgaaacatcctccgcctcagatcctgatcaagaacacgcctgtacctgcggatcctccgaccaccttaaaccaggccaagctgaactctttcatcacgcaatacagcaccggacaggtcagcgtggaaattgaatgggagctgcagaaggaaaacagcaagcgctggaacccagagattcagtacacttcaaactactacaaatctacaaatgtggactttgctgtcaatacagagggaacttatagtgaaccccgccccattggcaccagatttctgactcgtaatctgtaa

SEQ ID NO: 1630 - DNA, 2211 bp, Artificial Sequence
  source: /note="Description of Artificial Sequence: Synthetic polynucleotide"
  modified_base (338)..(338): a, c, t, or g
atggctgccgatggttatcttccagattggctcgaggacactctctctgaaggaataagacagtggtggaagctcaaacctggcccaccaccaccaaagcccgcagagcggcataaggacgacagcaggggtcttgtgcttcctgggtacaagtacctcggccccttcaacggactcgacaagggggagcccgtcaacgcggcggacgcagcggccctcgagcacgacaaggcctacgaccagcagctcgaagcgggtgacaatccgtacctgcggtataaccacgccgacgccgagtttcaggagcgtctgcaagaagatacgtcttttgggggcancctcgggcgagcagtcttccaggccaagaagcgggttctcgaacctctcggtctggttgaggaaggcgctaagacggctcctggaaagaagagaccagtagagcagtcaccccaagaaccagactcctcctcgggcatcggcaggaaaggccaacagcccgccagaaaaagactcaattttggccagactggcgactcagagtcagttccagaccctcaacctctcggagaacctccagcagcgccctctggtgtgggacctaatacaatggcttcaggcggtggcgctccaatggcagacaataacgaaggcgccgacggagtgggtaatgcctcaggaaattggcattgcgattccacatggctgggcgacagagtcatcaccaccagcacccgcacctgggccttgcccacctacaataaccacctctacaagcaaatctccagtgcttcaacgggggccagcaacgacaaccactacttcggctacagcaccccctgggggtattttgatttcaacagattccactgccacttttcaccacgtgactggcagcgactcatcaacaacaattggggattccggcccaagagactcaacttcaaactcttcaacatccaggtcaaggaggtcacgcagaatgaaggcactaagaccatcgccaataaccttaccagcacgattcaggtatttacggactcggaataccagctgccgtacgtcctcggctccgcgcaccagggctgcctgcctccgttcccggcggacgtcttcatgattccccagtacggctaccttacactgaacaatggaagtcaagccgtaggccgttcctccttctactgcctggaatattttccatctcaaatgctgcgaactggcaacaacttccagtttacctacaccttcgaggacgtgcctttccacagcagctacgcccacagccagagcttggaccggctgatgaatcctctgattgaccagtacctgtactacttgtctcggactcagtccacaggaggaactcaaggtacccagcaattgttattttctcaagctgggcctgcaaacatgtcggctcaggctaagaactggctacctggaccttgctaccggcagcagcgagtctctacgacactgtcgcaaaacaacaacagcaactttgcttggactggtgccaccaaatatcacctgaacggaagagactctttggtaaatcccggtgtcgccatggcaacccacaaggacgacgaggaacgcttcttcccgtcgagtggagtcctgatgtttggaaaacagggtgctggaagagacaatgtggactacagcagcgttatgctaaccagcgaagaagaaattaaaaccactaaccctgtagccacagaacaatacggtgtggtggttgataacttgcagcaaaccaatacggggcctattgtgggaaatgtcaacagccaaggagccttacctggtatggtctggcagaaccgggacgtgtacctgcagggtcccatctgggccaagattcctcacacggacggcaacttccacccgtctccgctgatgggcggctttggcctgaaacatcctccgcctcagatcctcatcaaaaacacacctgtacctgcggatcctccaacggccttcaacaaggacaagctgaactctttcatcacccagtattctactggccaagtcagcgtggagatcgagtgggagctgcagaaggaaaacagcaagcgctggaacccggagatccagtacacttccaactattacaagtctaataatgttgaatttgctgttaatactgaaggtgtatatagtgaaccccgccccattggcaccagatacctgactcgtaatctgtaa

SEQ ID NO: 1631 - protein, 735 aa, Artificial Sequence
  source: /note="Description of Artificial Sequence: Synthetic polypeptide"
MAADGYLPDWLEDNLSEGIREWWDLKPGAPKPKANQQKQDDGRGLVLPGYKYLGPFNGLDKGEPVNAADAAALEHDKAYDRQLDSGDNPYLKYNHADAEFQERLKEDTSFGGNLGRAVFQAKKRVLEPFGLVEEGAKTAPGKKRPVEQSPQEPDSSSGIGKTGQQPAKKRLNFGQTGDSESVPDPQPLGEPPATPAAVGPTTMASGGGAPVADNNEGADGVGSSSGNWHCDSTWLGDRVITTSTRTWALPTYNNHLYKQISSASTGASNDNHYFGYSTPWGYFDFNRFHCHFSPRDWQRLINNNWGFRPKRLNFKLFNIQVKEVTTNEGTKTIANNLTSTVQVFTDSEYQLPYVLGSAHQGCLPPFPADVFMVPQYGYLTLNNGSQALGRSSFYCLEYFPSQMLRTGNNFTFSYTFEDVPFHSSYAHSQSLDRLMNPLIDQYLYYLVRTQTTGTGGTQTLAFSQAGPSSMANQARNWVPGPCYRQQRVSTTTNQNNNSNFAWTGAAKFKLNGRDSLMNPGVAMASHKDDDDRFFPSSGVLIFGKQGAGNDGVDYSQVLITDEEEIKATNPVATEEYGAVAINNQAANTQAQTGLVHNQGVIPGMVWQNRDVYLQGPIWAKIPHTDGNFHPSPLMGGFGLKHPPPQILIKNTPVPADPPLTFNQAKLNSFITQYSTGQVSVEIEWELQKENSKRWNPEIQYTSNYYKSTNVDFAVNTEGVYSEPRPIGTRYLTRNL

SEQ ID NO: 1632 - protein, 736 aa, Artificial Sequence
  source: /note="Description of Artificial Sequence: Synthetic polypeptide"
  MOD_RES (113)..(113): Any naturally occurring amino acid
MAADGYLPDWLEDTLSEGIRQWWKLKPGPPPPKPAERHKDDSRGLVLPGYKYLGPFNGLDKGEPVNAADAATLEHDKAYDQQLKAGDNPYLRYNHADAEFQERLQEDTSFGGXLGRAVFQAKKRVLEPLGLVEEAAKTAPGKKRPVEPSPQRSPDSSTGIGKKGQQPARKRLNFGQTGDSESVPDPQPLGEPPAAPSGVGPNTMAAGGGAPMADNNEGADGVGSSSGNWHCDSTWLGDRVITTSTRTWALPTYNNHLYKQISSASTGASNDNHYFGYSTPWGYFDFNRFHCHFSPRDWQRLINNNWGFRPKRLNFKLFNIQVKEVTTNDGVTTIANNLTSTVQVFSDSDYQLPYVLGSAHEGCLPPFPADVFMIPQYGYLTLNNGSQALGRSSFYCLEYFPSQMLRTGNNFQFSYTFEDVPFHSSYAHSQSLDRLMNPLIDQYLYYLVRTQTTGTGGTQTLAFSQAGPSSMANQARNWVPGPCYRQQRVSTTTNQNNNSNFAWTGAAKFKLNGRDSLMNPGVAMASHKDDDDRFFPSSGVLIFGKQGAGNDGVDYSQVLITDEEEIKATNPVATEEYGAVAINNQAANTQAQTGLVHNQGVIPGMVWQDRDVYLQGPIWAKIPHTDGHFHPSPLMGGFGLKHPPPQILIKNTPVPANPPAEFSATKFASFITQYSTGQVSVEIEWELQKENSKRWNPEVQYTSNYAKSANVDFTVDNNGLYTEPRPIGTRYLTRPL

SEQ ID NO: 1633 - protein, 737 aa, Artificial Sequence
  source: /note="Description of Artificial Sequence: Synthetic polypeptide"
  MOD_RES (112)..(112): Any naturally occurring amino acid
MTDGYLPDWLEDNLSEGVREWWALQPGAPKPKANQQKQDDGRGLVLPGYKYLGPFNGLDKGEPVNAADAAALEHDKAYDQQLKAGDNPYLRYNHADAEFQERLQEDTSFGGXLGRAVFQAKKRVLEPLGLVEEGAKTAPGKKRPVEPSPQRSPDSSTGIGKKGQQPARKRLNFGQTGDSESVPDPQPLGEPPAAPSGVGSLTMASGGGAPVADNNEGADGVGSSSGNWHCDSQWLGDRVITTSTRTWALPTYNNHLYKQISNSTSGGSSNDNAYFGYSTPWGYFDFNRFHCHFSPRDWQRLINNNWGFRPKRLSFKLFNIQVKEVTQNEGTKTIANNLTSTIQVFTDSEYQLPYVLGSAHQGCLPPFPADVFMIPQYGYLTLNNGSQAVGRSSFYCLEYFPSQMLRTGNNFQFTYTFEDVPFHSSYAHSQSLDRLMNPLIDQYLYYLSRTQTTGGTANTQTLGFSQGGPNTMANQAKNWLPGPCYRQQRVSTTTGQNNNSNFAWTAGTKYHLNGRNSLANPGIAMATHKDDEERFFPSNGILIFGKQNAARDNADYSDVMLTSEEEIKTTNPVATEEYGIVADNLQQQNTAPQIGTVNSQGALPGMVWQNRDVYLQGPIWAKIPHTDGNFHPSPLMGGFGLKHPPPQILIKNTPVPADPPTTLNQAKLNSFITQYSTGQVSVEIEWELQKENSKRWNPEIQYTSNYYKSTNVDFAVNTEGTYSEPRPIGTRFLTRNL

SEQ ID NO: 1634 - protein, 736 aa, Artificial Sequence
  source: /note="Description of Artificial Sequence: Synthetic polypeptide"
  MOD_RES (113)..(113): Any naturally occurring amino acid
MAADGYLPDWLEDTLSEGIRQWWKLKPGPPPPKPAERHKDDSRGLVLPGYKYLGPFNGLDKGEPVNAADAAALEHDKAYDQQLEAGDNPYLRYNHADAEFQERLQEDTSFGGXLGRAVFQAKKRVLEPLGLVEEGAKTAPGKKRPVEQSPQEPDSSSGIGRKGQQPARKRLNFGQTGDSESVPDPQPLGEPPAAPSGVGPNTMASGGGAPMADNNEGADGVGNASGNWHCDSTWLGDRVITTSTRTWALPTYNNHLYKQISSASTGASNDNHYFGYSTPWGYFDFNRFHCHFSPRDWQRLINNNWGFRPKRLNFKLFNIQVKEVTQNEGTKTIANNLTSTIQVFTDSEYQLPYVLGSAHQGCLPPFPADVFMIPQYGYLTLNNGSQAVGRSSFYCLEYFPSQMLRTGNNFQFTYTFEDVPFHSSYAHSQSLDRLMNPLIDQYLYYLSRTQSTGGTQGTQQLLFSQAGPANMSAQAKNWLPGPCYRQQRVSTTLSQNNNSNFAWTGATKYHLNGRDSLVNPGVAMATHKDDEERFFPSSGVLMFGKQGAGRDNVDYSSVMLTSEEEIKTTNPVATEQYGVVVDNLQQTNTGPIVGNVNSQGALPGMVWQNRDVYLQGPIWAKIPHTDGNFHPSPLMGGFGLKHPPPQILIKNTPVPADPPTAFNKDKLNSFITQYSTGQVSVEIEWELQKENSKRWNPEIQYTSNYYKSNNVEFAVNTEGVYSEPRPIGTRYLTRNL

SEQ ID NO: 1635 - DNA, 2211 bp, Artificial Sequence
  source: /note="Description of Artificial Sequence: Synthetic polynucleotide"
atggccgccgacggctacctgcccgactggctggaggacaacctgagcgagggcatccgcgagtggtgggccctgaagcccggcgccccccagcccaaggccaaccagcagcaccaggacaacgcccgcggcctggtgctgcccggctacaagtacctgggccccggcaacggcctggacaagggcgagcccgtgaacgccgccgacgccgccgccctggagcacgacaaggcctacgaccagcagctgaaggccggcgacaacccctacctgaagtacaaccacgccgacgccgagttccaggagcgcctgaaggaggacaccagcttcggcggcaacctgggccgcgccgtgttccaggccaagaagcgcctgctggagcccctgggcctggtggaggaggccgccaagaccgcccccggcaagaagcgccccgtggagcagagcccccaggagcccgacagcagcgccggcatcggcaagagcggcgcccagcccgccaagaagcgcctgaacttcggccagaccggcgacaccgagagcgtgcccgacccccagcccatcggcgagccccccgccgcccccagcggcgtgggcagcctgaccatggccagcggcggcggcgcccccgtggccgacaacaacgagggcgccgacggcgtgggcagcagcagcggcaactggcactgcgacagccagtggctgggcgaccgcgtgatcaccaccagcacccgcacctgggccctgcccacctacaacaaccacctgtacaagcagatcagcaacagcaccagcggcggcagcagcaacgacaacgcctacttcggctacagcaccccctggggctacttcgacttcaaccgcttccactgccacttcagcccccgcgactggcagcgcctgatcaacaacaactggggcttccgccccaagcgcctgaacttcaagctgttcaacatccaggtgaaggaggtgaccgacaacaacggcgtgaagaccatcgccaacaacctgaccagcaccgtgcaggtgttcaccgacagcgactaccagctgccctacgtgctgggcagcgcccacgagggctgcctgccccccttccccgccgacgtgttcatgatcccccagtacggctacctgaccctgaacgacggcagccaggccgtgggccgcagcagcttctactgcctggagtacttccccagccagatgctgcgcaccggcaacaacttccagttcagctacgagttcgagaacgtgcccttccacagcagctacgcccacagccagagcctggaccgcctgatgaaccccctgatcgaccagtacctgtactacctgagcaagaccatcaacggcagcggccagaaccagcagaccctgaagttcagcgtggccggccccagcaacatggccgtgcagggccgcaactacatccccggccccagctaccgccagcagcgcgtgagcaccaccgtgacccagaacaacaacagcgagttcgcctggcccggcgccagcagctgggccctgaacggccgcaacagcctgatgaaccccggccccgccatggccagccacaaggagggcgaggaccgcttcttccccctgagcggcagcctgatcttcggcaagcagggcaccggccgcgacaacgtggacgccgacaaggtgatgatcaccaacgaggaggagatcaagaccaccaaccccgtggccaccgagagctacggccaggtggccaccaaccaccagagcgcccaggcccaggcccagaccggctgggtgcagaaccagggcatcctgcccggcatggtgtggcaggaccgcgacgtgtacctgcagggccccatctgggccaagatcccccacaccgacggcaacttccaccccagccccctgatgggcggcttcggcatgaagcacccccccccccagatcctgatcaagaacacccccgtgcccgccgacccccccaccgccttcaacaaggacaagctgaacagcttcatcacccagtacagcaccggccaggtgagcgtggagatcgagtgggagctgcagaaggagaacagcaagcgctggaaccccgagatccagtacaccagcaactactacaagagcaacaacgtggagttcgccgtgaacaccgagggcgtgtacagcgagccccgccccatcggcacccgctacctgacccgcaacctgtaa

SEQ ID NO: 1636 - DNA, 2211 bp, Artificial Sequence
  source: /note="Description of Artificial Sequence: Synthetic polynucleotide"
atggctgccgatggttatcttccagattggctcgaggacactctctctgaaggaataagacagtggtggaagctcaaacctggcccaccaccaccaaagcccgcagagcggcataaggacgacagcaggggtcttgtgcttcctgggtacaagtacctcggacccttcaacggactcgacaagggagagccggtcaacgaggcagacgccgcggccctcgagcacgacaaggcctacgaccagcagctcaaggccggagacaacccgtacctcaagtacaaccacgccgacgccgagttccaggagcggctcaaagaagatacgtcttttgggggcaacctcggacgagcagtcttccaggccaagaagcgggttctcgaacctctcggtctggttgaggaaggcgctaagacggctcctggaaagaaacgtccggtagagcagtcgccacaagagccagactcctcctcgggcattggcaagacaggccagcagcccgctaaaaagagactcaattttggtcagactggcgactcagagtcagtccccgacccacaacctctcggagaacctccagcaacccccgctgctgtgggacctactacaatggcttcaggcggtggcgcaccaatggcggacaataacgaaggcgccgatggagtgggtagttcctcgggaaattggcattgcgattcccaatggctgggggacagagtcatcaccaccagcacccgaacatgggccttgcccacctataacaaccacctctacaagcaaatctccagtgcttcaacgggggccagcaacgacaaccactacttcggctacagcaccccctgggggtattttgacttcaacagattccactgccacttctcaccacgtgactggcagcgactcatcaacaacaactggggattccgacccaagagactcaacttcaagctctttaacattcaagtcaaggaggtcacgcagaatgaaggcaccaagaccatcgccaataacctcaccagcaccatccaggtgtttacggactcggagtaccagctgccgtacgttctcggctccgcccaccagggctgcctgcctccgttcccggcggacgtgttcatgattccccagtacggctacctaacactcaacaacggtagtcaggccgtgggacgctcctccttctactgcctggaatactttccttcgcagatgctgagaaccggcaacaacttccagtttacttacaccttcgaggacgtgcctttccacagcagctacgcccacagccagagcttggaccggctgatgaatcctctgattgaccagtacctgtactacttgtctcggactcaaacaacaggaggcacggcaaatacgcagactctgggcttcagccaaggtgggcctaatacaatggccaatcaggcaaagaactggctgccaggaccctgttaccgccaacaacgcgtctcaacgacaaccgggcaaaacaacaatagcaactttgcctggactgctgggaccaaataccatctgaatggaagaaattcattggctaatcctggcatcgctatggcaacacacaaagacgacaaggagcgtttttttcccagtaacgggatcctgatttttggcaaacaaaatgctgccagagacaatgcggattacagcgatgtcatgctcaccagcgaggaagaaatcaaaaccactaaccctgtggctacagaggaatacggtatcgtggcagataacttgcagcagcaaaacacggctcctcaaattggaactgtcaacagccagggggccttacccggtatggtctggcagaaccgggacgtgtacctgcagggtcccatctgggccaagattcctcacacggacggcaacttccacccgtctccgctgatgggcggctttggcctgaaacatcctccgcctcagatcctgatcaagaacacgcctgtacctgcggatcctccgaccaccttcaaccagtcaaagctgaactctttcatcacgcaatacagcaccggacaggtcagcgtggaaattgaatgggagctgcagaaagaaaacagcaaacgctggaacccagagattcaatacacttccaactactacaaatctacaagtgtggactttgctgttaatacagaaggcgtgtactctgaaccccaccccattggcacccgttacctcacccgtcccctgtaa

SEQ ID NO: 1637 - DNA, 2211 bp, Artificial Sequence
  source: /note="Description of Artificial Sequence: Synthetic polynucleotide"
atggctgccgatggttatcttccagattggctcgaggacaacctctctgagggcattcgcgagtggtgggcgctgaaacctggagccccgaagcccaaagccaaccagcaaaagcaggacgacggccggggtctggtgcttcctggctacaagtacctcggacccttcaacggactcgacaagggggagccggtcaacgcagcagacgcggcggccctcgagcacgacaaggcctacgaccagcagctcaaggccggagacaacccgtacctcaagtacaaccacgccgacgccgagttccaggagcggctcaaagaagatacgtcttttgggggcaacctcgggcgagcagtcttccaggccaaaaagaggcttcttgaacctcttggtctggttgaggaagcggctaagacggctcctggaaagaagaggcctgtagagcagtctcctcaggaaccggactcctccgcgggtattggcaaatcgggtgcacagcccgctaaaaagagactcaattttggtcagactggcgactcagagtcagtccccgacccacaacctctcggagaacctccagcaacccccgctgctgtgggacctactacaatggcttcaggcggtggcgcaccaatggcagacaataacgaaggcgccgacggagtgggtaatgcctcaggaaattggcattgcgattccacatggctgggcgacagagtcatcaccaccagcacccgaacctgggccctgcccacctacaataaccacctctacaagcaaatctccagtgcttcaacgggggccagcaacgacaaccactacttcggctacagcaccccctgggggtattttgatttcaacagattccactgccacttttcaccacgtgactggcagcgactcatcaacaacaattggggattccggcccaagagactcaacttcaaactcttcaacatccaagtcaaggaggtcacgcagaatgaaggcaccaagaccatcgccaataacctcaccagcaccatccaggtgtttacggactcggagtaccagctgccgtacgttctcggctctgcccaccagggctgcctgcctccgttcccggcggacgtgttcatgattccccagtacggctacctaacactcaacaacggtagtcaggccgtgggacgctcctccttctactgcctggaatactttccttcgcagatgctgagaaccggcaacaacttccagtttacttacaccttcgaggacgtgcctttccacagcagctacgcccacagccagagcttggaccggctgatgaatcctctgattgaccagtacctgtactacttgtctcggactcaaacaacaggaggcacggcaaatacgcagactctgggcttcagccaaggtgggcctaatacaatggccaatcaggcaaagaactggctgccaggaccctgttaccgccaacaacgcgtctcaacgacaaccgggcaaaacaacaatagcaactttgcctggactgctgggaccaaataccatctgaatggaagaaattcattggctaatcctggcatcgctatggcaacacacaaagacgacaaggagcgtttttttcccagtaacgggatcctgatttttggcaaacaaaatgctgccagagacaatgcggattacagcgatgtcatgctcaccagcgaggaagaaatcaaagccactaaccctgtggctacagaggaatacggtatcgtggcagataacttgcagcagcaaaacacggctcctcaaattggaactgtcaacagccagggggccttacccggtatggtttggcagaaccgggacgtgtacctgcagggtcccatctgggccaagattcctcacacggacggcaacttccacccgtctccgctgatgggcggctttggcctgaaacatcctccgcctcagatcctgatcaagaacacgcctgtacctgcggatcctccgaccaccttcaaccagtcaaagctgaactctttcatcacgcaatacagcaccggacaggtcagcgtggaaattgaatgggagctgcagaaggaaaacagcaagcgctggaaccccgagatccagtacacctccaactactacaaatctacaagtgtggactttgctgttaatacagaaggcgtgtactctgaaccccaccccattggcacccgttacctcacccgtcccctgtaa

SEQ ID NO: 1638 - DNA, 2214 bp, Artificial Sequence
  source: /note="Description of Artificial Sequence: Synthetic polynucleotide"
atggctgccgatggttatcttccagattggctcgaggacaacctctctgagggcattcgcgagtggtgggacttgaaacctggagccccgaagcccaaagccaaccagcaaaagcaggacgacggccggggtctggtgcttcctggctacaagtacctcggacccttcaacggactcgacaagggggagcccgtcaacgcggcggacgcagcggccctcgagcacgacaaggcctacgaccagcagctcaaagcgggtgacaatccgtacctgcggtataaccacgccgacgccgagtttcaggagcgtctgcaagaagatacgtcttttgggggcaacctcgggcgagcagtcttccaggccaagaagcgggttctcgaacctctcggtctggttgaggaaggcgctaatacggctcctggaaagaaacgtccggtagagcagtcgccacaagagccagactcctccgcgggtattggcaaatcgggtgcacagcccgctaaaaagagactcaatttcggtcagactggcgacacagagtcagtcccagaccctcaaccaatcggagaacctcccgcagccccctcaggtgtgggatctcttacaatggcttcaggtggtggcgcaccagtggcagacaataacgaaggtgccgatggagtgggtagttcctcgggaaattggcattgcgattcccaatggctgggggacagagtcatcaccaccagcacccgaacctgggccctgcccacctacaacaatcacctctacaagcaaatctccaacagcacatctggaggatcttcaaatgacaacgcctacttcggctacagcaccccctgggggtattttgacttcaacagattccactgccacttctcaccacgtgactggcagcgactcatcaacaacaactggggattccggcctaagcgactcaacttcaagctcttcaacattcaggtcaaagaggttacggacaacaatggagtcaagaccatcgccaataacctcaccagcaccatccaggtgtttacggactcggagtaccagctgccgtacgttctcggctccgcccaccagggctgcctgcctccgttcccggcggacgtgttcatgattccccagtacggctacctaacactcaacaacggtagtcaggccgtgggacgctcctccttctactgcctggaatactttccttcgcagatgctgagaaccggcaacaacttccagtttacttacaccttcgaggacgtgcctttccacagcagctacgcccacagccagagcttggaccggctgatgaatcctctgattgaccagtacctgtactacttgtctcggactcaaacaacaggaggcacggcaaatacgcagactctgggcttcagccaaggtgggcctaatacaatggccaatcaggcaaagaactggctgccaggaccctgttaccgccaacaacgcgtctcaacgacaaccgggcaaaacaacaatagcaactttgcctggactgctgggaccaaataccatctgaatggaagaaattcattggctaatcctggcatcgctatggcctcacacaaagacgacaaggagcgtttttttcccagtaacgggatcctgatttttggcaaacaaaatgctgccagagacaatgcggattacagcgatgtcatgctcaccagcgaggaagaaatcaaaaccactaaccctgtggctacagaggaatacggtatcgtggcagataacttgcagcagcaaaacacggctcctcaaattggaactgtcaacagtcaaggagccttacctggcatggtctggcagaaccgggacgtgtacctgcagggtcccatctgggccaagattcctcacacggacggcaacttccacccgtctccgctgatgggcggctttggcctgaaacatcctccgcctcagatcctgatcaagaacacgcctgtacctgcggatcctccgaccaccttcaaccagtcaaagctgaactctttcatcacgcaatacagcaccggacaggtcagcgtggaaattgaatgggagctgcagaaggaaaacagcaagcgctggaaccccgagatccagtacaccaccaactactacaaatctacaagtgtggactttgctgttaatacagaaggcgtgtactctgaaccccaccccattggcacccgttacctcacccgtcccctgtaa

SEQ ID NO: 1639 - DNA, 2211 bp, Artificial Sequence
  source: /note="Description of Artificial Sequence: Synthetic polynucleotide"
atggctgccgatggttatcttccagattggctcgaggacaacctctctgagggcattcgcgagtggtgggcgctgaaacctggagccccgaagcccaaagccaaccagcaaaagcaggacgacggccggggtctggtgcttcctggctacaagtacctcggacccttcaacggactcgacaaaggagagccggtcaacgaggcggacgcggcagccctcgaacacgacaaagcttacgaccagcagctcaaggccggtgacaatccgtacctgcggtataaccacgccgacgccgagtttcaggagcgtcttcaagaagatacgtcttttgggggcaacctcgggcgagcagtcttccaggccaagaagcgggttctcgaacctctcggtctggttgaggaaggcgctaagacggctcctggaaagaaacgtccggtagagcagtcgccacaagagccagactcctcctcgggcatcggcaagacaggccagcagcccgctaaaaagagactcaattttggtcagactggcgactcagagtcagtccccgacccacaacctctcggagaacctccagcaacccccgctgctgtgggacctactacaatggcttcaggcggtggcgcaccaatggcagacaataacgaaggcgccgacggagtgggtaatgcctcaggaaattggcattgcgattccacatggctgggcgacagagtcatcaccaccagcacccgcacctgggccttgcccacctacaataaccacctctacaagcaaatctccagtgcttcaacgggggccagcaacgacaaccactacttcggctacagcaccccctgggggtattttgactttaacagattccactgccacttttcaccacgtgactggcaaagactcatcaacaacaactggggattccggcccaagagactcaacttcaagctcttcaacatccaggtcaaggaggtcacgcagaatgaaggcaccaagaccatcgccaataaccttaccagcacgattcaggtctttacggactcggaataccagctcccgtacgtcctcggctctgcgcaccagggctgcctccctccgttcccggcggacgtgttcatgattccgcagtacggctacctaacactcaacaacggtagtcaggccgtgggacgctcctccttctactgcctggaatactttccttcgcagatgctgagaaccggcaacaacttccagtttacttacaccttcgaggacgtgcctttccacagcagctacgcccacagccagagcttggaccggctgatgaatcctctgattgaccagtacctgtactacttgtctcggactcaaacaacaggaggcacggcaaatacgcagactctgggcttcagccaaggtgggcctaatacaatggccaatcaggcaaagaactggctgccaggaccctgttaccgccaacaacgcgtctcaacgacaaccgggcaaaacaacaatagcaactttgcctggactgctgggaccaaataccatctgaatggaagaaattcattggctaatcctggcatcgctatggcaacacacaaagacgacaaggagcgtttttttcccagtaacgggatcctgatttttggcaaacaaaatgctgccagagacaatgcggattacagcgatgtcatgctcaccagcgaggaagaaatcaaaaccactaaccctgtggctacagaggaatacggtatcgtggcagataacttgcagcagcaaaacacggctcctcaaattggaactgtcaacagccagggggccttacccggtatggtctggcagaaccgggacgtgtacctgcagggtcccatctgggccaagattcctcacacggacggcaacttccacccgtctccgctgatgggcggctttggcctgaaacatcctccgcctcagatcctgatcaagaacacgcctgtacctgcggatcctccgaccaccttcaaccagtcaaagctgaactctttcatcacgcaatacagcaccggacaggtcagcgtggaaattgaatgggagctgcagaaggaaaacagcaagcgctggaaccccgagatccagtacacctccaactactacaaatctacaagtgtggactttgctgttaatacagaaggcgtgtactctgaaccccaccccattggcacccgttacctcacccgtcccctgtaa

SEQ ID NO: 1640 - DNA, 2211 bp, Artificial Sequence
  source: /note="Description of Artificial Sequence: Synthetic polynucleotide"
atggctgccgatggttatcttccagattggctcgaggacaacctctctgagggcattcgcgagtggtgggcgctgaaacctggagccccgaagcccaaagccaaccagcaaaagcaggacgacggccggggtctggtgcttcctggctacaagtacctcggacccttcaacggactcgacaaaggagagccggtcaacgaggcggacgcggcagccctcgaacacgacaaagcttacgaccagcagctcaaagcgggtgacaatccgtacctgcggtataaccacgccgacgccgagtttcaggagcgtctgcaagaagatacgtcttttgggggcaacctcgggcgagcagtcttccaggccaagaagagggttctcgaaccttttggtctggttgaggaaggtgctaagacggctcctggaaagaaacgtccggtagagcagtcgccacaagagccagactcctcctcgggcattggcaagacaggccagcagcccgctaaaaagagactcaattttggtcagactggcgactcagagtcagtccccgacccacaacctctcggagaacctccagcaacccccgctgctgtgggacctactacaatggcttcaggcggtggcgcaccaatggcagacaataacgaaggcgccgacggagtgggtaatgcctcaggaaattggcattgcgattcccaatggctgggcgacagagtcatcaccaccagcaccagaacctgggccttgcccacctataacaaccacctctacaagcaaatctccagtgcttcaacgggggccagcaacgacaaccactacttcggctacagcaccccctgggggtattttgatttcaacagattccactgccacttctcaccacgtgactggcagcgactcatcaacaacaactggggattccggcctaagcgactcaacttcaagctcttcaacattcaggtcaaagaggttacggacaacaatggagtcaagaccatcgccaataaccttaccagcacggttcaagtcttctcggactcggagtaccagttgccgtacgtcctcggctctgcgcaccagggctgcctccctccgttcccggcggacgtgttcatgattccccagtacggctacctaacactcaacaacggtagtcaggccgtgggacgctcctccttctactgcctggaatactttccttcgcagatgctgagaaccggcaacaacttccagtttacttacaccttcgaggacgtgcctttccacagcagctacgcgcacagccagagcttggaccggctgatgaatcctctgattgaccagtacctgtactacttgtctcggactcaaacaacaggaggcacggcaaatacgcagactctgggcttcagccaaggtgggcctaatacaatggccaatcaggcaaagaactggctgccaggaccctgttaccgccaacaacgcgtctcaacgacaaccgggcaaaacaacaatagcaactttgcctggactgctgggaccaaataccatctgaatggaagaaattcattggctaatcctggcatcgctatggcaacacacaaagacgacaaggagcgtttttttcccagtaacgggatcctgatttttggcaaacaaaatgctgccagagacaatgcggattacagcgatgtcatgctcaccagcgaggaagaaatcaaaaccactaaccctgtggctacagaggaatacggtatcgtggcagataacttgcagcagcaaaacacggctcctcaaattggaactgtcaacagccagggggccttacccggtatggtctggcagaaccgggacgtgtacctgcagggtcccatctgggccaagattcctcacacggacggcaacttccacccgtctccgctgatgggcggctttggcctgaaacatcctccgcctcagatcctgatcaagaacacgcctgtacctgcggatcctccgaccaccttcaaccagtcaaagctgaactctttcatcacgcaatacagcaccggacaggtcagcgtggaaattgaatgggagctgcagaaggaaaacagcaagcgctggaaccccgagatccagtacacctccaactactacaaatctacaagtgtggactttgctgttaatacagaaggcgtgtactctgaaccccaccccattggcacccgttacctcacccgtcccctgtaa

SEQ ID NO: 1641 - DNA, 2244 bp, Artificial Sequence
  source: /note="Description of Artificial Sequence: Synthetic polynucleotide"
  modified_base (2241)..(2241): a, c, t, or g
atggctgccgatggttatcttccagattggctcgaggacactctctctgaaggaataagacagtggtggaagctcaaacctggcccaccaccaccaaagcccgcagagcggcataaggacgacagcaggggtcttgtgcttcctgggtacaagtacctcggacccttcaacggactcgacaagggagagccggtcaacgaggcagacgccgcggccctcgagcacgacaaagcctacgaccggcagctcgacagcggagacaacccgtacctcaagtacaaccacgccgacgcggagtttcaggagcgccttaaagaagatacgtcttttgggggcaacctcgggcgagcagtcttccaggccaagaagagggttctcgaaccttttggtctggttgaggaaggtgctaagacggctcctggaaagaaacgtccggtagagcagtcgccacaagagccagactcctcctcgggcattggcaagacaggccagcagcccgctaaaaagagactcaattttggtcagactggcgactcagagtcagtccccgacccacaacctctcggagaacctccagcaacccccgctgctgtgggacctactacaatggcttcaggcggtggcgcaccaatggcagacaataacgaaggcgccgacggagtgggtaatgcctcaggaaattggcattgcgattccacatggctgggcgacagagtcatcaccaccagcacccgaacatgggccttgcccacctataacaaccacctctacaagcaaatctccagtgcttcaacgggggccagcaacgacaaccactacttcggctacagcaccccctgggggtattttgacttcaacagattccactgccacttctcaccacgtgactggcagcgactcatcaacaacaactggggattccggcctaagcgactcaacttcaagctcttcaacattcaggtcaaagaggttacggacaacaatggagtcaagaccatcgccaataaccttaccagcacggtccaggtcttcacggactcagactatcagctcccgtacgtgctcgggtcggctcacgagggctgcctcccgccgttcccagcggacgttttcatgattcctcagtacggctacctaacactcaacaacggtagtcaggccgtgggacgctcctccttctactgcctggaatactttccttcgcagatgctgagaaccggcaacaacttccagtttacttacaccttcgaggacgtgcctttccacagcagctacgcgcacagccagagcttggaccggctgatgaatcctctgattgaccagtacctgtactacttgtctcggactcaaacaacaggaggcacggcaaatacgcagactctgggcttcagccaaggtgggcctaatacaatggccaatcaggcaaagaactggctgccaggaccctgttaccgccaacaacgcgtctcaacgacaaccgggcaaaacaacaatagcaactttgcctggactgctgggaccaaataccatctgaatggaagaaattcattggctaatcctggcatcgctatggcaacacacaaagacgacaaggagcgtttttttcccagtaacgggatcctgatttttggcaaacaaaatgctgccagagacaatgcggattacagcgatgtcatgctcaccagcgaggaagaaatcaaaaccactaaccctgtggctacagaggaatacggtatcgtggcagataacttgcagcagcaaaacacggctcctcaaattggaactgtcaacagccagggggccttacccggtatggtctggcagaaccgggacgtgtacctgcagggtcccatctgggccaagattcctcacacggacggcaacttccacccgtctccgctgatgggcggctttggcctgaaacatcctccgcctcagatcctgatcaagaacacgcctgtacctgcggatcctccgaccaccttcaaccagtcaaagctgaactctttcatcacgcaatacagcaccggacaggtcagcgtggaaattgaatgggagctgcagaaggaaaacagcaagcgctggaaccccgagatccagtacacctccaactactacaaatctacaagtgtggactttgctgttaatacagaaggcgtgtactctgaaccccaccccattggcaccagatacctgactcgtaatctgtaattgcttgttaatcaataaaccgtttaattnttt

SEQ ID NO: 1642 - DNA, 2217 bp, Artificial Sequence
  source: /note="Description of Artificial Sequence: Synthetic polynucleotide"
atggctgccgatggttatcttccagattggctcgaggacaacctctctgagggcattcgcgagtggtgggacttgaaacctggagccccgaaacccaaagccaaccagcaaaagcaggacgacggccggggtctggtgcttcctggctacaagtacctcggacccttcaacggactcgacaagggggagcccgtcaacgcggcggacgcagcggccctcgagcacgacaaggcctacgaccagcagctccaagcgggtgacaatccgtacctgcggtataaccacgccgacgccgagtttcaggagcgtctgcaagaagatacgtcttttgggggcaacctcggacgagcagtcttccaggcgaaaaagagggttctcgaacctctcggtctggttgaggaaggcgctaagacggctcctggaaagaagagaccggtagagccatcaccccagcgttctccagactcctctacgggcatcggcaagaaaggccaacagcccgccagaaaaagactcaattttggtcagactggcgactcagagtcagttccagaccctcaacctctcggagaacctccagcagcgccctctggtgtgggacctaatacaatggctgcaggcggtggcgcaccaatggcagacaataacgaaggcgccgacggagtgggtagttcctcgggaaattggcattgcgattcccaatggctgggggacagagtcatcaccaccagcacccgaacctgggccctgcccacctacaacaatcacctctacaagcaaatctccaacagcacatctggaggatcttcaaatgacaacgcctacttcggctacagcaccccctgggggtattttgacttcaaccgcttccactgccacttctcaccacgtgactggcagcgactcatcaacaacaactggggattccggcccaagagactcagcttcaaactcttcaacatccaggtcaaggaggtcacgcagaatgaaggcaccaagaccatcgccaataacctcaccagcaccatccaggtgtttacggactcggagtaccagctgccgtacgttctcggctctgcccaccagggctgcctgcctccgttcccggcggacgtgttcatgattcctcagtacggctacctaacgctcaacaatggcagccaggcagtgggacggtcatccttttactgcctggaatatttcccatcgcagatgctgagaacgggcaacaactttaccttcagctacacctttgaggacgttcctttccacagcagctacgctcacagccagagtctggaccgtctcatgaatcctctgattgaccagtacctgtactacttgtctcggactcaaacaacaggaggcacggcaaatacgcagactctgggcttcagccaaggtgggcctaatacaatggccaatcaggcaaagaactggctgccaggaccctgttaccgccaacaacgcgtctcaacgacaaccgggcaaaacaacaatagcaactttgcctggactgctgggaccaaataccatctgaatggaagaaattcattggctaatcctggcatcgctatggcaacacacaaagacgacaaggagcgtttttttcccagtaacgggatcctgatttttggcaaacaaaatgctgccagagacaatgcggattacagcgatgtcatgctcaccagcgaggaagaaatcaaaaccactaaccctgtggctacagaggaatacggtatcgtggcagataacttgcagcagcaaaacacggctcctcaaattggaactgtcaacagccagggggccttacccggtatggtctggcagaaccgggacgtgtacctgcagggtcccatctgggccaagattcctcacacggacggcaacttccacccgtctccgctgatgggcggctttggacttaagcacccgcctcctcagatcctcatcaaaaacacgcctgttcctgcggatcctccgaccaccttcaaccagtcaaagctgaactctttcatcacgcaatacagcaccggacaggtcagcgtggaaattgaatgggagctgcagaaggaaaacagcaagcgctggaaccccgagatccagtacacctccaactactacaaatctacaagtgtggactttgctgttaatacagaaggcgtgtactctgaaccccaccccattggcacccgttacctcacccgtcccctgtaa

SEQ ID NO: 1643 - DNA, 2214 bp, Artificial Sequence
  source: /note="Description of Artificial Sequence: Synthetic polynucleotide"
atggctgccgatggttatcttccagattggctcgaggacaacctctctgagggcattcgcgagtggtgggacttgaaacctggagccccgaagcccaaagccaaccagcaaaagcaggacgacggccggggtctggtgcttcctggctacaagtacctcggacccttcaacggactcgacaagggggagcccgtcaacgcggcggatgcagcggccctcgagcacgacaaagcctacgaccagcagctcaaagcgggtgacaatccgtacctgcggtataaccacgccgacgccgagtttcaggagcgtctgcaagaagatacgtcttttgggggcaacctcgggcgagcagtcttccaggccaagaagagggttctcgaaccttttggtctggttgaggaaggtgctaagacggctcctggaaagaaacgtccggtagagcagtcgccacaagagccagactcctcctcgggcattggcaagacaggccagcagcccgctaaaaagagactcaattttggtcagactggcgactcagagtcagtccccgacccacaacctctcggagaacctccagcaacccccgctgctgtgggacctactacaatggcttcaggcggtggcgcacccatgcaagacaataacgaaggcgccgacggagtgggtagttcctcgggaaattggcattgcgattccacatggctgggcgacagagtcatcaccaccagcacccgaacctgggccctgcccacctacaacaaccacctctacaagcaaatctccaacgggacatcgggaggagccaccaacgacaacacctacttcggctacagcaccccctgggggtattttgactttaacagattccactgccacttttcaccacgtgactggcagcgactcatcaacaacaactggggattccggcccaagagactcaacttcaagctcttcaacatccaggtcaaggaggtcacgcagaatgaaggcaccaagaccatcgccaataaccttaccagcacgattcaggtctttacggattcggaataccagctcccgtacgtcctcggctctgcgcaccagggctgcctccctccgttcccggcggacgtgttcatgattccgcagtacggctacctaacgctcaacaatggtagccaggcagtgggacggtcatccttttactgcctggaatatttcccatcgcagatgctgagaacgggcaacaactttaccttcagctacacctttgaggacgttcctttccacagcagctacgctcacagccagagtctggaccgtctcatgaatcctctgattgaccagtacctgtactacttgtctcggactcaaacaacaggaggcacggcaaatacgcagactctgggcttcagccaaggtgggcctaatacaatggccaatcaggcaaagaactggctgccaggaccctgttaccgccaacaacgcgtctcaacgacaaccgggcaaaacaacaatagcaactttgcctggactgctgggaccaaataccatctgaatggaagaaattcattggctaatcctggcatcgctatggcaacacacaaagacgacaaggagcgtttttttcccagtaacgggatcctgatttttggcaaacaaaatgctgccagagacaatgcggattacagcgatgtcatgctcaccagcgaggaagaaatcaaaaccactaaccctgtggctacagaggaatacggtatcgtggcagataacttgcagcagcaaaacacggctcctcaaattggaactgtcaacagccagggggccttacccggtatggtctggcagaaccgggacgtgtacctgcagggtcccatctgggccaagattcctcacacggacggcaacttccacccgtctccgctgatgggcggctttggcctgaaacatcctccgcctcagatcctgatcaagaacacgcctgtacctgcggatcctccgaccaccttcaaccagtcaaagctgaactctttcatcacgcaatacagcaccggacaggtcagcgtggaaattgaatgggagctgcagaaggaaaacagcaagcgctggaaccccgagatccagtacacctccaactactacaaatctacaagtgtggactttgctgttaatacagaaggcgtgtactctgaaccccaccccattggcacccgttacctcacccgtcccctgtaa

SEQ ID NO: 1644 - DNA, 2211 bp, Artificial Sequence
  source: /note="Description of Artificial Sequence: Synthetic polynucleotide"
atggctgccgatggttatcttccagattggctcgaggacaacctctctgagggcattcgcgagtggtgggcgctgaaacctggagccccgaagcccaaagccaaccagcaaaagcaggacgacggccggggtctggtgcttcctggctacaagtacctcggacccttcaacggactcgacaagggggagcccgtcaacgcggcggacgcagcggccctcgagcacgacaaggcctacgaccagcagctcaaagcgggtgacaatccgtacctgcggtataaccacgccgacgccgagtttcaggagcgtctgcaagaagatacgtcttttgggggcaacctcgggcgagcagtcttccaggccaagaagcgggttctcgaacctctcggtctggttgaggaaggcgctaagacggctcctggaaagaaacgtccggtagagcagtcgccacaagagccagactcctcctcgggcatcggcaagacaggccagcagcccgctaaaaagagactcaattttggtcagactggcgactcagagtcagtccccgacccacaacctctcggagaacctccagcaacccccgctgctgtgggacctactacaatggcttcaggcggtggcgcaccaatggcagacaataacgaaggcgccgacggagtgggtagttcctcgggaaattggcattgcgattccacatggctgggcgacagagtcatcaccaccagcacccgcacctgggccttgcccacctacaataaccacctctacaagcaaatctccagtgcttcaacgggggccagcaacgacaaccactacttcggctacagcaccccctgggggtattttgacttcaacagattccactgccacttctcaccacgtgactggcagcgactcatcaacaacaactggggattccggcctaagcgactcaacttcaagctcttcaacattcaggtcaaagaggttacggacaacaatggagtcaagaccatcgccaataaccttaccagcacggtccaggtcttcacggactcagactatcagctcccgtacgtgctcgggtcggctcacgagggctgcctcccgccgttcccagcggacgttttcatgattcctcagtacgggtatctgacgctcaacaatggcagccaggcagtgggacggtcatccttttactgcctggaatatttcccatcgcagatgctgagaacgggcaataactttaccttcagctacaccttcgaggacgtgcctttccacagcagctacgcgcacagccagagcctggaccggctgatgaatcctctgattgaccagtacctgtactacttgtctcggactcaaacaacaggaggcacggcaaatacgcagactctgggcttcagccaaggtgggcctaatacaatggccaatcaggcaaagaactggctgccaggaccctgttaccgccaacaacgcgtctcaacgacaaccgggcaaaacaacaatagcaactttgcctggactgctgggaccaaataccatctgaatggaagaaattcattggctaatcctggcatcgctatggcaacacacaaagacgacaaggagcgtttttttcccagtaacgggatcctgatttttggcaaacaaaatgctgccagagacaatgcggattacagcgatgtcatgctcaccagcgaggaagaaatcaaaaccactaaccctgtggctacagaggaatacggtatcgtggcagataacttgcagcagcaaaacacggctcctcaaattggaactgtcaacagccagggggccttacccggtatggtctggcagaaccgggacgtgtacctgcagggtcccatctgggccaagattcctcacacggacggcaacttccacccgtctccgctgatgggcggctttggcctgaaacatcctccgcctcagatcctgatcaagaacacgcctgtacctgcggatcctccgaccaccttcaaccagtcaaagctgaactctttcatcacgcaatacagcaccggacaggtcagcgtggaaattgaatgggagctgcagaaggaaaacagcaagcgctggaaccccgagatccagtacacctccaactactacaaatctacaagtgtggactttgctgttaatacagaaggcgtgtactctgaaccccaccccattggcacccgttacctcacccgtcccctgtaa

SEQ ID NO: 1645 - DNA, 2214 bp, Artificial Sequence
  source: /note="Description of Artificial Sequence: Synthetic polynucleotide"
atggctgccgatggttatcttccagattggctcgaggacaacctctctgagggcattcgcgagtggtgggacttgaaacctggagccccgaaacccaaagccaaccagcaaaagcaggacgacggccggggtctggtgcttcctggctacaagtacctcggacccttcaacggactcgacaagggggagcccgtcaacgcggcggatgcagcggccctcgagcacgacaaggcctacgaccagcagctcaaagcgggtgacaatccgtacctgcggtataaccacgccgacgccgagtttcaggagcgtctgcaagaagatacgtcttttgggggcaacctcgggcgagcagtcttccaggccaagaagcgggttctcgaacctctcggtctggttgaggaaggcgctaagacggctcctggaaagaagagaccggtagagccatcaccccagcgttctccagactcctctacgggcatcggcaagaaaggccaacagcccgccagaaaaagactcaattttggtcagactggcgactcagagtcagtccccgacccacaacctctcggagaacctccagcaacccccgctgctgtgggacctactacaatggcttcaggcggtggcgcaccaatggcagacaataacgaaggcgccgacggagtgggtaatgcctcaggaaattggcattgcgattccacatggctgggcgacagagtcatcaccaccagcacccgaacatgggccttgcccacctataacaaccacctctacaagcaaatctccagtgcttcaacgggggccagcaacgacaaccactacttcggctacagcaccccctgggggtattttgatttcaacagattccactgccatttctcaccacgtgactggcagcgactcatcaacaacaatttgggatcccggcccaagagactcaacttcaagctcttcatcatccaagtcaaggaggtcacgacgaatgatggcgtcacgaccatcgctaataaccttaccagcacggttcaagtcttctcggactcggagtaccagttgccgtacgtcctcggctctgcgcaccagggctgcctccctccgttcccggcggacgtgttcatgattccgcagtacggctacctaacgctcaacaatggcagccaggcagtgggacggtcatccttttactgcctggaatatttcccatcgcagatgctgagaacgggcaataactttaccttcagctacaccttcgaggacgtgcctttccacagcagctacgcgcacagccagagcctggaccggctgatgaatcctctcatcgaccagtacctgtattacctgaacagaactcagaatcagtccggaagtgcccaaaacaaggacttgctgtttagccgggggtctccagctggcatgtctgttcagcccaaaaactggctacctggaccctgttaccggcagcagcgcgtttctaaaacaaaaacagacaacaacaacagcaactttacctggactggtgcttcaaaatataaccttaatgggcgtgaatctataatcaaccctggcactgctatggcctcacacaaagacgacaaagacaagttctttcccatgagcggtgtcatgatttttggaaaggagagcgccggagcttcaaacactgcattggacaatgtcatgatcacagacgaagaggaaatcaaagccactaaccccgtggccaccgaaagatttgggactgtggcagtcaatctccagagcagcagcacagaccctgcgaccggagatgtgcatgttatgggagccttacctggaatggtgtggcaagacagagacgtatacctgcagggtcctatttgggccaaaattcctcacacggatggacactttcacccgtctcctctcatgggcggctttggacttaagcacccgcctcctcagatcctcatcaaaaacacgcctgttcctgcgaatcctccggcagagttttcggctacaaagtttgcttcattcatcacccagtattccacaggacaagtgagcgtggagattgaatgggagctgcagaaagaaaacagcaaacgctggaatcccgaagtgcagtatacatctaactatgcaaaatctgccaacgttgatttcactgtggacaacaatggactttatactgagcctcgccccattggcacccgttacctcacccgtcccctgtaa

SEQ ID NO: 1646 - DNA, 2211 bp, Artificial Sequence
  source: /note="Description of Artificial Sequence: Synthetic polynucleotide"
atggctgccgatggttatcttccagattggctcgaggacaacctctctgagggcattcgcgagtggtgggcgctgaaacctggagccccgaaacccaaagccaaccagcaaaagcaggacgacggccggggtctggtgcttcctggctacaagtacctcggacccttcaacggactcgacaagggggagcccgtcaacgcggcggacgcagcggccctcgagcacgacaaggcctacgaccagcagctcaaggcgggtgacaatccgtacctgcggtataaccacgccgacgccgagtttcaggagcgtctgcaagaagatacgtcttttgggggcaacctcgggcgagcagtcttccaggccaaaaagaggcttcttgaacctcttggtctggttgaggaagcggctaagacggctcctggaaagaaacgtccggtagagcagtcgccacaagagccagactcctcctcgggcattggcaagacaggccagcagcccgctaaaaagagactcaactttgggcagactggcgactcagagtcagtgcccgaccctcaaccaatcggagaacctccagcaacccccgctgctgtgggacctactacaatggcttcaggcggtggcgcaccaatggcggacaataacgaaggcgccgatggagtgggtaattcctcgggaaattggcattgcgattccacatggctgggcgacagagtcatcaccaccagcacccgaacctgggccctgcccacctacaacaatcacctctacaagcaaatctccagtgcttcaacgggggccagcaacgacaaccactacttcggctacagcaccccctgggggtattttgatttcaacagattccactgccacttttcaccacgtgactggcagcgactcatcaacaacaactggggattccggcccaagagactcaacttcaagctcttcaacatccaggtcaaggaggtcacgcagaatgaaggcaccaagaccatcgccaataacctcaccagcaccatccaggtgtttacggactcggagtaccagctgccgtacgttctcggctccgcccaccagggctgcctgcctccgttcccggcggacgtgttcatgattccgcagtacggctacctaacgctcaacaatggcagccaggcagtgggacggtcatccttttactgcctggaatatttcccatcgcagatgctgagaacgggcaacaactttaccttcagctacacctttgaggacgttcctttccacagcagctacgctcacagccagagtctggaccgtctcatgaatcctctgattgaccagtacctgtactacttgtctcggactcaaacaacaggaggcacggcaaatacgcagactctgggcttcagccaaggtgggcctaatacaatggccaatcaggcaaagaactggctgccaggaccctgttaccgccaacaacgcgtctcaacgacaaccgggcaaaacaacaatagcaactttgcctggactgctgggaccaaataccatctgaatggaagaaattcattggctaatcctggcatcgctatggcaacacacaaagacgacaaggagcgtttttttcccagtaacgggatcctgatttttggcaaacaaaatgctgccagagacaatgcggattacagcgatgtcatgctcaccagcgaggaagaaatcaaaaccactaaccctgtggctacagaggaatacggtatcgtggcagataacttgcagcagcaaaacacggctcctcaaattggaactgtcaacagccagggggccttacccggtatggtctggcagaaccgggacgtgtacctgcagggtcccatctgggccaagattcctcacacggacggcaacttccacccgtctccgctgatgggcggctttggcctgaaacatcctccgcctcagatcctgatcaagaacacgcctgtacctgcggatcctccgaccaccttcaaccagtcaaagctgaactctttcatcacgcaatacagcaccggacaggtcagcgtggaaattgaatgggagctgcagaaggaaaacagcaagcgctggaaccccgagatccagtacacctccaactactacaaatctacaagtgtggactttgctgttaatacagaaggcgtgtactctgatccccaccccattggcacccgttacctcacccgtcccctgtaa

SEQ ID NO: 1647 - DNA, 2211 bp, Artificial Sequence
  source: /note="Description of Artificial Sequence: Synthetic polynucleotide"
atggctgccgatggttatcttccagattggctcgaggacaacctctctgagggcattcgcgagtggtgggcgctgaaacctggagccccgaagcccaaagccaaccagcaagagcaggacgacggccggggtctggtgcttcctggctacaagtacctcggacccttcaacggactcgacaagggagagcccgtcaacgcggcggatgcagcggccctcgagcacgacaaagcctacgaccagcagctcaaagcgggtgacaatccgtacctgcggtataaccacgccgacgccgagtttcaggagcgtctgcaagaagatacgtcttttgggggcaacctcgggcgagcagtcttccaggccaagaagagggttctcgaaccttttggtctggttgaggaaggtgctaagacggctcctggaaagaaacgtccggtagagcagtcgccacaagagccagactcctcctcgggcattggcaagacaggccagcagcccgctaaaaagagactcaattttggtcagactggcgactcagagtcagttccagaccctcaacctctcggagaacctccagcagcgccctctggtgtgggacctaatacaatggctgcaggcggtggcgcaccaatggcagacaataacgaaggcgccgacggagtgggtagttcctcgggaaattggcattgcgattccacatggctgggcgacagagtcatcaccaccagcacccgaacctgggccctgcccacctacaacaaccacctctacaagcaaatctccagtgcttcaacgggggccagcaacgacaaccactacttcggctacagcaccccctgggggtattttgactttaacagattccactgccacttttcaccacgtgactggcagcgactcatcaacaacaactggggattccggcccaagagactcaacttcaagctcttcaacatccaggtcaaggaggtcacgcagaatgaaggcaccaagaccatcgccaataaccttaccagcacgattcaggtctttacggattcggaataccagctcccgtacgtcctcggctctgcgcaccagggctgcctccctccgttcccggcggacgtgttcatgattccgcagtacggctacctaacgctcaacaatggtagccaggcagtgggacggtcatcctttttctgcctggaatatttcccatcgcagatgctgagaacgggcaacaactttaccttcagctacacctttgaggacgttcctttccacagcagctacgctcacagccagagtctggaccgtctcatgaatcctctgattgaccagtacctgtactacttgtctcggactcaaacaacaggaggcacggcaaatacgcagactctgggcttcagccaaggtgggcctaatacaatggccaatcaggcaaagaactggctgccaggaccctgttaccgccaacaacgcgtctcaacgacaaccgggcaaaacaacaatagcaactttgcctggactgctgggaccaaataccatctgaatggaagaaattcattggctaatcctggcatcgctatggcaacacacaaagacgacaaggagcgtttttttcccagtaacgggatcctgatttttggcaaacaaaatgctgccagagacaatgcggattacagcgatgtcatgctcaccagcgaggaagaaatcaaaaccactaaccctgtggctacagaggaatacggtatcgtggcagataacttgcagcagcaaaacacggctcctcaaattggaactgtcaacagccagggggccttacccggtatggtctggcagaaccgagacgtgtacctgcagggtcccatctgggccaagattcctcacacggacggcaacttccacccgtctccgctgatgggcggctttggcctgaaacatcctccgcctcagatcctgatcaagaacacgcctgtacctgcggatcctccgaccaccttcaaccagtcaaagctgaactctttcatcacgcaatacagcaccggacaggtcagcgtggaaattgaatgggagctgcagaaggaaaacagcaagcgctggaaccccgagatccagtacacctccaactactacaaatctacaagtgtggactttgctgttaatacagaaggcgtgtactctgaaccccaccccattggcacccgttacctcacccgtcccctgtaa

SEQ ID NO: 1648 - DNA, 2211 bp, Artificial Sequence
  source: /note="Description of Artificial Sequence: Synthetic polynucleotide"
atggctgccgatggttatcttccagattggctcgaggacaacctctctgagggcattcgcgagtggtgggacttgaaacctggagccccgaagcccaaagccaaccagcaaaagcaggacgacggccggggtctggtgcttcctggctacaagtacctcggacccttcaacggactcgacaagggggagcccgtcaacgcggcggacgcagcggccctcgagcacgacaaggcctacgaccagcagctcaaagcgggtgacaatccgtacctgcggtataaccacgccgacgccgagtttcaggagcgtctgcaagaagatacgtcttttgggggcaacctcgggcgagcagtcttccaggccaagaagcgggttctcgaacctctcggtctggttgaggaaggcgctaagacggctcctggaaagaaacgtccggtagagcagtcaccacaagagccagactcctcctcgggcatcggcaagacaggccagcagcccgctaaaaagagactcaattttggtcagactggcgactcagagtcagtccccgacccacaacctctcggagaacctccagcaacccccgctgctgtgggacctactacaatggcttcaggcggtggcgcaccaatggcggacaataacgaaggcgccgacggagtgggtaatgcctcaggaaattggcattgcgattccacatggctgggcgacagagtcatcaccaccagcacccgaacatgggccttgcccacctataacaaccacctctacaagcaaatctccagtgcttcaacgggggccagcaacgacaaccactacttcggctacagcaccccctgggggtattttgatttcaacagattccactgccatttctcaccacgtgactggcagcgactcatcaacaacaattggggattccggcccaagagactcaacttcaagctcttcaacatccaagtcaaggaggtcacgacgaatgatggcgtcacgaccatcgctaataaccttaccagcacggttcaagtcttctcggactcggagtaccagttgccgtacgtcctcggctctgcgcaccagggctgcctccctccgttcccggcggacgtgttcatgattccgcagtacggctacctaacgctcaacaatggcagccaggcagtgggacggtcatccttttactgcctggaatatttcccatcgcagatgctgagaacgggcaataactttaccttcagctacaccttcgaggacgtgcctttccacagcagctacgcgcacagccagagcctggaccggctgatgaatcctctcatcgaccagtacctgtattacctgaacagaactcagaatcagtccggaagtgcccaaaacaaggacttgctgtttagccgggggtctccagctggcatgtctgttcagcccaaaaactggctacctggaccctgttaccggcagcagcgcgtttctaaaacaaaaacagacaacaacaacagcaactttacctggacaggtgcttcaaaatataaccttaatgggcgtgaatctataatcaaccctggcactgctatggcctcacacaaagacgacaaagacaagttctttcccatgagcggtgtcatgatttttggaaaggagagcgccggagcttcaaacactgcattggacaatgtcatgatcacagacgaagaggaaatcaaagccactaaccccgtggccaccgaaagatttgggactgtggcagtcaatctccagaacagcagcacagaccctgcgaccggagatgtgcatgttatgggagccttacctggaatggtgtggcaagacagagacgtatacctgcagggtcctatttgggccaaaattcctcacacggatggacactttcacccgtctcctctcatgggcggctttggacttaagcacccgcctcctcagatcctcatcaaaaacacgcctgttcctgcgaatcctccggcagagttttcggctacaaagtttgcttcattcatcacccagtattccacaggacaagtgagcgtggagattgaatgggagctgcagaaagaaaacagcaaacgctggaatcccgaagtgcagtatacatctaactatgcaaaatctgccaacgttgatttcactgtagacaacaatggactttatactgtgcctcgccccattggcacccgttacctcacccgtcccctgtaa

SEQ ID NO: 1649 - DNA, 2211 bp, Artificial Sequence
  source: /note="Description of Artificial Sequence: Synthetic polynucleotide"
atggctgccgatggttatcttccagattggctcgaggacaacctctctgagggcattcgcgagtggtgggcgctgaaacctggagccccgaagcccaaagccaaccagcaaaagcaggacgacggccggggtctggtgcttcctggctacaagtacctcggacccttcaacggactcgacaaaggagagccggtcaacgcggcggacgcggcggccctcgaacacgacaaggcttacgaccagcagctcaaggcgggtgacaacccctacctgcggtataaccacgccgacgccgagttccaggagcggctgcaagaagatacgtcttttgggggcaacctcgggcgagcagtcttccaggccaaaaagaggcttcttgaacctcttggtctggttgaggaaggcgctaagacggctcctggaaagaagaggcctgtagagcagtctcctcaagaaccggactcctcctcgggtattggcaaaacaggtgagcagcccgctaaaaagagactcaattttggtcagactggcgactcagagtcagtccccgacccacaacctctcggagaacctccagcaacccccgctgctgtgggacctactacaatggcttcaggcggtggcgcaccaatggcagacaataacgaaggcgccgacggagtgggtagtgcctcaggaaattggcattgcgattccacatggctgggcgacagagtcatcaccaccagcacccgaacctgggccctgcccacctataacaaccatctctacaagcaaatctccagtgcttcaacgggggccagcaacgacaaccactacttcggctacagcaccccctgggggtattttgacttcaacagattccactgccacttctcaccacgtgactggcagcgactcatcaacaacaactggggattccggcctaagcgactcaacttcaagctcttcaacattcaggtcaaagaggttacggacaacaatggagtcaagaccatcgccaataacctcaccagcaccatccaggtgttcacggactcagagtatcagctgccgtacgtgctcgggtcggctcaccagggctgcctccctccgttcccagcggacgtgttcatgattcctcagtacgggtatctgacactcaacaacggcagtcaggcagtgggacggtcatccttctactgcctggaatattttccatcgcagatgctgagaaccggcaacaactttccgttcagttacaccttcgaggacgtgcctttccacagcagctacgcgcacagccagagcctggaccggctgatgaatcctctgattgaccagtacctgtactacttgtctcggactcaaacaacaggaggcacggcaaatacgcagactctgggcttcagccaaggtgggcctaatacaatggccaatcaggcaaagaactggctgccaggaccctgttaccgccaacaacgcgtctcaacgacaaccgggcaaaacaacaatagcaactttgcctggactgctgggaccaaataccatctgaatggaagaaattcattggctaatcctggcatcgctatggcaacacacaaagacgacaaggagcgtttttttcccagtaacgggatcctgatttttggcaaacaaaatgctgccagagacaatgcggattacagcgatgtcatgctcaccagcgaggaagaaatcaaaaccactaaccctgtggctacagaggaatacggtatcgtggcagataacttgcagcagcaaaacacggctcctcaaattggaactgtcaacagccagggggccttacccggtatggtctggcagaaccgggacgtgtacctgcagggtcccatctgggccaagattcctcacacggacggcaacttccacccgtctccgctgatgggcggctttggcctgaaacatcctccgcctcagatcctgatcaagaacacgcctgtacctgcggatcctccgaccaccttcaaccagtcaaagctgaactctttcatcacgcaatacagcaccggacaggtcagcgtggaaattgaatgggagctgcagaaggaaaacagcaagcgctggaaccccgagatccagtacacctccaactactacaaatctacaagtgtggactttgctgttaatacagaaggcgtgtactctgaaccccaccccattggcacccgttacctcacccgtcccctgtaa

SEQ ID NO: 1650 - DNA, 2211 bp, Artificial Sequence
  source: /note="Description of Artificial Sequence: Synthetic polynucleotide"
atggctgccgatggttatcttccagattggctcgaggacaacctctctgagggcattcgcgagtggtgggcgctgaaacctggagccccgaagcccaaagccaaccagcaaaagcaggacgacggccggggtctggtgcttcctggctacaagtacctcggacccttcaacggactcgacaagggggagcccgtcaacgcggcggacgcagcggccctcgagcacgacaaggcctacgaccagcagctcaaagcgggtgacaatccgtacctgcggtataaccacgccgacgccgagtttcaggagcgtctgcaagaagatacgtcttttgggggcaacctcgggcgagcagtcttccaggccaagaagcgggttctcgaacctctcggtctggttgaggaaggcgctaagacggctcctggaaagaaacgtccggtagaacagtcgccacaagagccagactcctcctcgggcatcggcaagacaggccagcagcccgctaaaaagagactcaattttggtcagactggcgactcagagtcagtccccgatccacaacctctcggagaacctccagcaacccccgctgctgtgggacctactacaatggcttcaggcggtggcgcaccaatggcagacaataacgaaggcgccgacggagtgggtagttcctcgggaaattggcattgcgattcccaatggctgggggacagagtcatcaccaccagcacccgaacctgggccctgcccacctacaacaaccacctctacaagcaaatctccagtgcttcaacgggggccagcaacgacaaccactacttcggctacagcaccccctgggggtattttgatttcaacagattccactgccatttctcaccacgtgactggcagcgactcatcaacaacaactggggattccggcctaagcgactcaacttcaagctcttcaacattcaggtcaaagaggttacggacaacaatggagtcaagaccatcgccaataaccttaccagcacggtccaggtcttcacggactcggagtaccagttgccgtacgtcctcggctctgcgcaccaggactgcctccctccgttcccggcggacgtgttcatgattccgcagtacggctacctaacgctcaacaatggcagccaggcagtgggacggtcatccttttactgcctggaatatttcccatcgcagatgctgagaacgggcaacaactttaccttcagctacacctttgaggacgttcctttccacagcagctacgctcacagccagagtctggaccgtctcatgaatcctctgattgaccagtacctgtactacttgtctcggactcaaacaacaggaggcacggcaaatacgcagactctgggcttcagccaaggtgggcctaatacaatggccaatcaggcaaagaactggctgccaggaccctgttaccgccaacaacgcgtctcaacgacaaccggacaaaacaacaatagcaactttgcctggactgctgggaccaaataccatctgaatggaagaaattcattggctaatcctggcatcgctatggcaacacacaaagacgacaaggagcgtttttttcccagtaacgggatcctgatttttggcaaacaaaatgctgccagagacaatgcggattacagcgatgtcatgctcaccagcgaggaagaaatcaaaaccactaaccctgtggctacagaggaatacggtatcgtggcagataacttgcagcagcaaaacacggctcctcaaattggaactgtcaacagccagggggccttacccggtatggtctggcagaaccgggacgtgtacctgcagggtcccatctgggccaagattcctcacacggacggcaacttccacccgtctccgctgatgggcggctttggcctgaaacatcctccgcctcagatcctgatcaagaacacgcctgtacctgcggatcctccgaccaccttcaaccagtcaaagctgaactctttcatcacgcaatacagcaccggacaggtcagcgtggaaattgaatgggagctgcagaaggaaaacagcaagcgctggaaccccgagatccagtacacctccaactactacaaatctacaagtgtggactttgctgttaatacagaaggcgtgtactctgaaccccaccccattggcacccgttacctcacccgtcccctgtaa

SEQ ID NO: 1651 - DNA, 2211 bp, Artificial Sequence
  source: /note="Description of Artificial Sequence: Synthetic polynucleotide"
atggctgccgatggttatcttccagattggctcgaggacaacctctctgagggcattcgcgagtggtgggacttgaaacctggagccccgaagcccaaagccaaccagcaaaagcaggacgacggccggggtctggtgcttcctggctacaagtacctcggacccttcaacggactcgacaagggggagcccgtcaacgcggcggacgcagcggccctcgagcacgacaaggcctacgaccagcagctcaaagcgggtgacaatccgtacctgcggtataaccacgccgacgccgagtttcaggagcgtctgcaagaagatacgtcttttgggggcaacctcgggcgagcagtcttccaggccaagaagcgggttctcgaacctctcggtctggttgaggaaggcgctaagacggctcctggaaagaaacgtccggtagagcagtcaccacaagagccagactcctcctcgggcatcggcaagacaggccagcagcccgctaaaaagagactcaattttggtcagactggcgactcagagtcagtccccgacccacaacctctcggagaacctccagcaacccccgctgctgtgggacctactacaatggcttcaggcggtggcgcaccaatggcagacaataacgaaggtgccgacggagtgggtaatgcctcaggaaattggcattgcgattccacatggctgggcgactgagtcatcaccaccagcacccgcacctgggccttgcccacctacaataaccacctctacaagcaaatctccagtgcttcaacgggggccagcaacgacaaccactacttcggctacagcaccccctgggggtattttgatttcaacagattccactgccacttttcaccacgtgactggcagcgactcatcaacaacaattggggattccggcccaagagactcaacttcaaactcttcaacatccaagtcaaggaggtcacgcagaatgaaggcaccaagaccatcgccaataacctcaccagcaccatccaggtgtttacggactcggagtaccagctgccgtacgttctcggctctgcccaccagggctgcctgcctccgttcccggcggacgtgttcatgattccccagtacggctacctaacgctcaacaatggcagccaggcagtgggacggtcatccttttactgcctggaatactttccttcgcagatgctgagaaccggcaacaacttccagtttacttacaccttcgaggacgtgcctttccacagcagctacgcccacagccagagcttggaccggctgatgaatcctctgattgaccagtacctgtactacttgtctcggactcaaacaacaggaggcacggcaaatacgcagactctgggcttcagccaaggtgggcctaatacaatggccaatcaggcaaagaactggctgccaggaccctgttaccgccaacaacgcgtctcaacgacaaccgggcaaaacaacaatagcaactttgcctggactgctgggaccaaataccatctgaatggaagaaattcattggctaatcctggcatcgctatggcaacacacaaagacgacaaggagcgtttttttcccagtaacgggatcctgatttttggcaaacaaaatgctgccagagacaatgcggattacagcgatgtcatactcaccagcgaggaagaaatcaaaaccactaaccctgtggctacagaggaatacggtatcgtggcagataacttgcagcagcaaaacacggctcctcaaattggaactgtcaacagccagggggccttacccggtatggtctggcagaaccgggacgtgtacctgcagggtcccatctgggccaagattcctcacacggacggcaacttccacccgtctccgctgatgggcggctttggcctgaaacatcctccgcctcagatcctgatcaagaacacgcctgtacctgcggatcctccgaccaccttcaaccagtcaaagctgaactctttcatcacgcaatacagcaccggacaggtcagcgtggaaattgaatgggagctgcagaaggaaaacagcaagcgctggaaccccgagatccagtacacctccaactactacaaatctacaagtgtggactttgctgttaatacagaaggcgtgtactctgaaccccaccccattggcacccgttacctcacccgtcccctgtaa

SEQ ID NO: 1652 - DNA, 2211 bp, Artificial Sequence
  source: /note="Description of Artificial Sequence: Synthetic polynucleotide"
atggctgccgatggttatcttccagattggctcgaggacactctctctgaaggaataagacagtggtggaagctcaaacctggcccaccaccaccaaagcccgcagagcggcataaggacgacagcaggggtcttgtgcttcctgggtacaagtacctcggacccttcaacggactcgacaagggagagccggtcaacgaggcagacgccgcggccctcgagcacgacaaagcctacgaccggcagctcgacagcggagacaacccgtacctcaagtacaaccacgccgacgcggagtttcaggagcgccttaaagaagatacgtcttttgggggcaacctcgggcgagcagtcttccaggccaagaagagggttctcgaaccttttggtctggttgaggaaggtgctaagacggctcctggaaagaaacgtccggtagagcagtcgccacaagagccagactcctcctcgggcattggcaagacaggccagcagcccgctaaaaagagactcaattttggtcagactggcgactcagagtcagtccccgacccacaacctctcggagaacctccagcaacccccgctgctgtgggacctactacaatggcttcaggcggtggcgcaccaatggcagacaataacgaaggcgccgacggagtgggtaatgcctcaggaaattggcattgcgattccacatggctgggcgacagagtcatcaccaccagcacccgaacatgggccttgcccacctataacaaccacctctacaagcaaatctccagtacttcaacgggggccagtaacgacaaccactacttcggctacagcaccccctgggggtattttgacttcaacagattccactgccacttctcaccacgtgactggcagcgactcatcaacaacaactggggattccggcctaagcgactcaacttcaagctcttcaacattcaggtcaaagaggttacggacaacaatggagtcaagaccatcgccaataaccttaccagcacggtccaggtcttcacggactcggagtaccagttgccgtacgtcctcggctctgcgcaccagggctgcctgcctccgttcccggcggacgtgttcatgattccgcagtacggctacctaacgctcaacaatggcagccaggcagtgggacggtcatccttttactgcctggaatatttcccatcgcagatgctgagaacgggcaacaactttaccttcagctacacttttgaggacgttcctttccacagcagctacgctcacagccagagtctggaccgtctcatgaatcctctgattgaccagtacctgtactacttgtctcggactcaaacaacaggaggcacggcaaatacgcagactctgggcttcagccaaggtgggcctaatacaatggccaatcaggcaaagaactggctgccaggaccctgttaccgccaacaacgcgtctcaacgacaaccggacaaaacaacaatagcaactttgcctggactgctgggaccaaataccatctgaatggaagaaattcattggctaatcctggcatcgctatggcaacacacaaagacgacaaggagcgtttttttcccagtaacgggatcctgatttttggcaaacaaaatgctgccagagacaatgcggattacagcgatgtcatgctcaccagcgaggaagaaatcaaaaccactaaccctgtggctacagaggaatacggtatcgtggcagataacttgcagcagcaaaacacggctcctcaaattggaactgtcaacagccagggggccttacccggtatggtctggcagaaccgggacgtgtacctgcagggtcccatctgggccaagattcctcacacggacggcaacttccacccgtctccgctgatgggcggctttggcctgaaacatcctccgcctcagatcctgatcaagaacacgcctgtacctgcggatcctccgaccaccttcaaccagtcaaagctgaactctttcatcacgcaatacagcaccggacaggtcagcgtggaaattgaatgggagctgcagaaggaaaacagcaagcgctggaaccccgagatccagtacacctccaactactacaaatctacaagtgtggactttgctgttaatacagaaggcgtgtactctgaaccccaccccattggcacccgttacctcacccgtcccctgtaa

SEQ ID NO: 1653 - DNA, 2208 bp, Artificial Sequence
  source: /note="Description of Artificial Sequence: Synthetic polynucleotide"
atggctgccgatggttatcttccagattggctcgaggacaacctctctgagggcattcgcgagtggtgggacttgaaacctggagccccgaagcccaaagccaaccagcaaaagcaggacgacggccggggtctggtgcttcctggctacaagtacctcggacccttcaacggactcgacaagggggagcccgtcaacgcggcggatgcagcggccctcgagcacgacaaggcctacgaccggcagctcgacagcggagacaacccgtacctgcggtataaccacgccgacgcggagtttcaggagcgccttaaagaagatacgtcttttgggggcaacctcgggcgagcagtcttccaggccaagaagagggttctcgaaccttttggtctggttgaggaaggtgctaagacggctcctggaaagaaacgtccggtagagcagtcgccacaagagccagactcctcctcgggcattggcaagacaggccagcagcccgctaaaaagagactcaattttggtcagactggcgactcagagtcagtccccgacccacaacctctcggagaacctccagcaacccccgctgctgtgggacctactacaatggcttcaggcggtggcgcaccaatggcagacaataacgaaggcgccgacggagtgggtaatgcctcaggaaattggcattgcgattccacatggctgggcgacagagtcatcaccaccagcacccgcacctgggccttgcccacctacaataaccacctctacaagcaaatctccagtgcttcaacgggggccagcaacgacaaccactacttcggctacagcaccccctgggggtattttgactttaacagattccactgccacttttcaccacgtgactggcaaagactcatcaacaacaactggggattccggcccaagagactcaacttcaagctcttcaacatccaggtcaaggaggtcacgcagaatgaaggcaccaagaccatcgccaataaccttaccagcacgattcaggtctttacggactcggaataccagctcccgtacgtcctcggctctgcgcaccagggctgcctccctccgttcccggcggacgtgttcatgattccgcagtacggctacctaacactcaacaacggtagtcaggccgtgggacgctcctccttctactgcctggaatactttccttcgcagatgctgagaaccggcaacaacttccagtttacttacaccttcgaggacgtgcctttccacagcagctacgcccacagccagagcttggaccggctgatgaatcctctgattgaccagtacctgtactacttgtctcggactcaaacaacaggaggcacggcaaatacgcagactctgggcttcagccaaggtgggcctaatacaatggccaatcaggcaaagaactggctgccaggaccctgttaccgccaacaacgcgtctcaacgacaaccgggcaaaacaacaatagcaactttgcctggactgctgggaccaaataccatctgaatggaagaaattcactggctaatcctggcatcgctatggcaacacacaaagacgacaggagcgtttttttccagtaccgggatcctgattttggcaaacaaaatgctgccagagacaatgcggattacagcgatgtcatgctcaccagcgaggaagaaatcaaaaccactaaccctgtggctacagaggaatacggtatcgtggcagataacttgcagcagcaaaacacggctcctcaaattggaactgtcaacagccagggggccttacccggtatggtctggcagaaccgggacgtgtacctgcagggtcccatctgggccaagattcctcacacggacggcaacttccacccgtctccgctgatgggcggctttggcctgaaacatcctccgcctcagatcctgatcaagaacacgcctgtacctgcggatcctccgaccaccttcaaccagtcaaagctgaactctttcatcacgcaatacagcaccggacaggtcagcgtggaaattgaatgggagctgcagaaggaaaacagcaagcgctggaaccccgagatccagtacacctccaactactacaaatctacaagtgtggactttgctgttaatacagaaggcgtgtactctgaaccccaccccattggcacccgttacctcacccgtcccctgtaa

SEQ ID NO: 1654 - DNA, 2211 bp, Artificial Sequence
  source: /note="Description of Artificial Sequence: Synthetic polynucleotide"
atggctgccgatggttatcttccagattggctcgaggacaacctctctgagggcattcgcgagtggtgggcgctgaaacctggagccccgaagcccaaagccaaccagcaaaagcaggacgacggccggggtctggtgcttcctggctacaagtacctcggacccttcaacggactcgacaagggggagcccgtcaacgcggcggatgcagcagccctcgaacacgacaaagcttacgaccagcagctcaaggccggtgacaacccctacctcaagtataaccacgccgacgccgagtttcaggagcgtcttcaaggagatacgtcttttgggggcaacctcggacgagcagtcttccaggccaagaagcgggttctcgaacctcttggtctggttgaggaagcggctaagacggctcctggaaagaagaggcctgtagagcagtctcctcaggaaccggactcctccgcgggtattggcaaatcgggtgcacagcccgctaaaaagagactcaatttcggtcagactggcgacacagagtcagtcccagaccctcaacctctcggagaacctccagcagcgccctctggtgtgggacctaatacaatggctgcaggcggtggcgcaccaatggcagacaataacgaaggtgccgatggagtgggtagttcctcgggaaattggcattgcgattcccaatggctgggggacagagtcatcaccaccagcacccgaacctgggccctgcccacctacaacaaccacctctacaagcaaatctccagtgcttcaacgggggccagcaacgacaaccactacttcggctacagcaccccttgggggtattttgacttcaacagattccactgccacttttcaccacgtgactggcagcgactcatcaacaacaactggggattccggcctaagcgactcaacttcaagctcttcaacattcaggtcaaagaggttacggacaacaatggagtcaagaccatcgccaataaccttaccagcacggtccaggtcttcacggactcagactatcagctcccgtacgtgctcgggtcggctcacgagggctgcctccctccgttcccggcggacgtgttcatgattccgcagtacggctacctaacgctcaacaatggcagccaggcagtgggacggtcatccttttactgcctggaatactttccttcgcagatgctgagaaccggcaacaacttccagtttacttacaccttcgaggacgtgcctttccacagcagctacgctcacagccagagtctggaccgtctcatgaatcctctgattgaccagtacctgtactacttgtctcggactcaaacaacaggaggcacggcaaatacgcagactctgggcttcagccaaggtgggcctaatacaatggccaatcaggcaaagaactggctgccaggaccctgttaccgccaacaacgcgtctcaacgacaaccgggcaaaacaacaatagcaactttgcctggactgctgggaccaaataccatctgaatggaagaaattcattggctaatcctggcatcgctatggcaacacacaaagacgacaaggagcgtttttttcccagtaacgggatcctgatttttggcaaacaaaatgctgccagagacaatgcggattacagcgatgtcatgctcaccagcgaggaagaaatcaaaaccactaaccctgtggctacagaggaatacggtatcgtagcagataacttgcagcagcaaaacacggctcctcaaattggaactgtcaacagccagggggccttacccggtatggtctggcagaaccgggacgtgtacctgcagggtcccatctgggccaagattcctcacacggacggcaacttccacccgtctccgctgatgggcggctttggcctgaaacatcctccgcctcagatcctgatcaagaacacgcctgtacctgcggatcctccgaccaccttcaaccagtcaaagctgaactctttcatcacgcaatacagcaccggacaggtcagcgtggaaattgaatgggagctgcagaaggaaaacagcaagcgctggaaccccgagatccagtacacctccaactactacaaatctacaagtgtggactttgctgttaatacagaaggcgtgtactctgaaccccaccccattggcacccgttacctcacccgtcccctgtaa

SEQ ID NO: 1655 - DNA, 2211 bp, Artificial Sequence
  source: /note="Description of Artificial Sequence: Synthetic polynucleotide"
atggctgccgatggttatcttccagattggctcgaggacactctctctgaaggaataagacagtggtggaagctcaaacctggcccaccaccaccaaagcccgcagagcggcataaggacgacagcaggggtcttgtgcttcctgggtacaagtacctcggacccttcaacggactcgacaagggagagccggtcaacgaggcagacgccgcggccctcgagcacgacaaagcctacgaccggcagctcgacagcggagacaacccgtacctcaagtacaaccacgccgacgcggagtttcaggagcgccttaaagaagatacgtcttttgggggcaacctcgggcgagcagtcttccaggccaagaagagggttctcgaaccttttggtctggttgaggaagcggctaagacggctcctggaaagaaacgtccggtagagcagtcgccacaagagccagactcctcctcgggcattggcaagacaggccagcagcccgctaaaaagagactcaattttggtcagactggcgactcagagtcagtccccgacccacaacctctcggagaacctccagcaacccccgctgctgtgggacctactacaatggcttcaggcggtggcgcaccaatggcagacaataacgaaggcgccgacggagtgggtaatgcctcaggaaattggcattgcgattccacatggctgggcgacagagtcatcaccaccagcacccgaacatgggccttgcccacctataacaaccacctctacaagcaaatctccagtgcttcaacgggggccagcaacgacaaccactacttcggctacagcaccccctgggggtattttgacttcaacagattccactgccacttctcaccacgtgactggcagcgactcatcaacaacaactggggattccggcctaagcgactcaacttcaagctcttcaacattcaggtcaaagaggttacggacaacaatggagtcaagaccatcgccaataaccttaccagcacggtccaggtcttcacggactcagactatcagctcccgtacgtgctcgggtcggctcacgagggctgcctcccgccgttcccagcggacgttttcatgattcctcagtacggctacctaacactcaacaacggtagtcaggccgtgggacgctcctccttctactgcctggaatactttccttcgcagatgctgagaacgggcaacaactttaccttcagctacacctttgaggacgttcctttccacagcagctacgctcacagccagagtctggaccgtctcatgaatcctctgattgaccagtacctgtactacttgtctcggactcaaacaacaggaggcacggcaaatacgcagactctgggcttcagccaaggtgggcctaatacaatggccaatcaggcaaagaactggctgccaggaccctgttaccgccaacaacgcgtctcaacgacaaccgggcaaaacaacaatagcaactttgcctggactgctgggacaaaataccatctgaatggaagaaattcattggctaatcctggcatcgctatggcaacacacaaagacgacaaggagcgtttttttcccagtaacgggattctgatttttggcaaacaaaatgctgccagagacaatgcggattacagcgatgtcatgctcaccagcgaggaagaaatcaaaaccactaaccctgtggctacagaggaatacggtatcgtggcagataacttgcagcagcaaaacacggctcctcaaattggaactgtcaacagccagggggccttacccggtatggtctggcagaaccgggacgtgtacctgcagggtcccatctgggccaagattcctcacacggacggcaacttccacccgtctccgctgatgggcggctttggacttaagcacccgcctcctcagatcctcatcaaaaacacgcctgttcctgcggatcctccgaccaccttcaaccagtcaaagctgaactctttcatcacgcaatacagcaccggacaggtcagcgtggaaattgaatgggagctgcagaaggaaaacagcaagcgctggaaccccgagatccagtacacctccaactactacaaatctacaagtgtggactttgctgttaatacagaaggcgtgtactctgaaccccaccccattggcacccgttacctcacccgtcccctgtaa

SEQ ID NO: 1656 - DNA, 2211 bp, Artificial Sequence
  source: /note="Description of Artificial Sequence: Synthetic polynucleotide"
atggctgccgatggttatcttccagattggctcgaggacaacctctctgagggcattcgcgagtggtgggcgctgaaacctggagccccgaagcccaaagccaaccagcaaaagcaggacgacggccggggtctggtgcttcctggctacaagtacctcggacccttcaacggactcgacaaaggagagccggtcaacgcggcggacgcagcggccctcgagcacgacaaggcctacgaccagcagctcaaagcgggtgacaatccgtacctgcggtataaccacgccgacgccgagtttcaggagcgtctgcaagaagatacgtcttttgggggcaacctcgggcgagcagtcttccaggccaagaagcgggttctcgaacctctcggtctggttgaggaaggcgctaagacggctcctggaaagaaacgtccggtagagcagtcgccacaagagccagactcctcctcgggcatcggcaagacaggccagcagcccgctaaaaagagactcaattttggtcagactggcgactcagagtcagtccccgacccacaacctctcggagaacctccagcaacccccgctgctgtgggacctactacaatggcttcaggcggtggcgcaccaatggcagacaataacgaaggcgccgacggagtgggtagttcctcgggaaattggcattgcgattccacatggctgggcgacagagtcatcaccaccagcacccgcacctgggccttgcccacctacaataaccacctctacaagcaaatctccagtgcttcaacgggggccagcaacgacaaccactacttcggctacagcaccccctgggggtattttgacttcaacagattccactgccacttctcaccacgtgactggcagcgactcatcaacaacaactggggattccggcctaagcgactcaacttcaagctcttcaacattcaggtcaaagaggttacggacaacaatggagtcaagaccatcgccaataaccttaccagcacggtccaggtcttcacggactcggagtaccagttgccgtacgtcctcggctctgcgcaccagggctgcctccctccgttcccggcggacgtgttcatgattccgcagtacggctacctaacgctcaacaatggcagccaggcagtgggacggtcatccttttactgcctggaatatttcccatcgcagatgctgagaacgggcaacaactttaccttcagctacacctttgaggacgttcctttccacagcagctacgctcacagccagagtctggaccgtctcatgaatcctctgattgaccagtacctgtactacttgtctcggactcaaacaacaggaggcacggcaaatacgcagactctgggcttcagccaaggtgggcctaatacaatggccaatcaggcaaagaactggctgccaggaccctgttaccgccaacaacgcgtctcaacgacaaccgggcaaaacaacaatagcaactttgcctggactgctgggaccaaataccatctgaatggaagaaattcattggctaatcctggcatcgctatggcaacacacaaagacgacaaggagcgtttttttcccagtaacgggatcctgatttttggcaaacaaaatgctgccagagacaatgcggattacagcgatgtcatgctcaccagcgaggaagaaatcaaaaccactaaccctgtggctacagaggaatacggtatcgtggcagataacttgcagcagcaaaacacggctcctcaaattggaactgtcaacagccagggggccttacccggtatggtctggcagaaccgggatgtgtacctgcagggtcccatctgggccaagattcctcacacggacggcaacttccacccgtctccgctgatgggcggctttggcctgaaacatcctccgcctcagatcctgatcaagaacacgcctgtacctgcggatcctccgaccaccttcaaccagtcaaagctgaactctttcatcacgcaatacagcaccggacaggtcagcgtggaaattgaatgggagctgcagaaggaaaacagcaagcgctggaaccccgagatccagtacacctccaactactacaaatctacaagtgtggactttgctgttaatacagaaggcgtgtactctgaaccccaccccattggcacccgttacctcacccgtcccctgtaa

SEQ ID NO: 1657 - DNA, 2214 bp, Artificial Sequence
  source: /note="Description of Artificial Sequence: Synthetic polynucleotide"
atggctgccgatggttatcttccagattggctcgaggacaaccttagtgaaggaattcgcgagtggtgggcgctgaaacctggagccccgaagcccaaagccaaccagcaaaagcaggacgacggccggggtctggtgcttcctggctacaagtacctcggacccttcaacggactcgacaagggggagcccgtcaacgcggcggacgcagcggccctcgagcacgacaaggcctacgaccagcagctcaaagcgggtgacaatccgtacctgcggtataaccacgccgacgccgagtttcaggagcgtctgcaagaagatacgtcttttgggggcaacctcgggcgagcagtcttccaggccaagaagcgggttctcgaacctctcggtctggttgaggaaggcgctaagacggctcctggaaagaaacgtccggtagagcagtcgccacaagagccagactcctcctcgggcatcggcaagacaggccagcagcccgctaaaaagagactcaatttcggtcagactggcgacacagagtcagtcccagaccctcaaccaatcggagaacctcccgcagccccctcaggtgtgggatctcttacaatggcttcaggtggtggcgcaccagtggcagacaataacgaaggtgccgatggagtgggtagttcctcgggaaattggcattgcgattcccaatggctgggggacagagtcatcaccaccagcaccagaacctgggccttgcccacctacaataaccacctctacaagcaaatctccaacagcacatctggaggatcttcaaatgacaacgcctacttcggctacagcaccccctgggggtattttgactttaacagattccactgccacttttcaccacgtgactggcagcgactcatcaacaacaactggggattccgacccaagagactcaacttcaagctcttcaacatccaggtcaaggaggtcacgcagaacgaaggcaccaagaccatcgccaataacctcaccagcaccatccaggtgtttacggactcggagtaccagctgccgtacgttctcggctccgcccaccagggctgcctgcctccgttcccggcggacgtgttcatgattccccagtacggctacctaacgctcaacaacggtagtcaggccgtgggacgctcctccttctactgcctggaatactttccttcgcagatgctgagaaccggcaacaacttccagtttacttacaccttcgaggacgtgcctttccacagcagctacgcgcacagccagagcttggaccggctgatgaatcctctgattgaccagtacctgtactacttgtctcggactcaaacaacaggaggcacggcaaatacgcagactctgggcttcagccaaggtgggcctaatacaatggccaatcaggcaaagaactggctgccaggaccctgttaccgccaacaacgcgtctcaacgacaaccgggcaaaacaacaatagcaactttgcctggactgctgggaccaaataccatctgaatggaagaaattcattggctaatcctggcatcgctatggcaacacacaaagacgacaaggagcgtttttttcccagtaacgggatcctgatttttggcaaacaaaatgctgccagagacaatgcggattacagcgatgtcatgctcaccagcgaggaagaaatcaaaaccactaaccctgtggctacagaggaatacggtatcgtggcagataacttgcagcagcaaaacacggctcctcaaattggaactgtcaacagccagggggccttacccggtatggtctggcagaaccgggacgtgtacctgcagggtcccatctgggccaagattcctcacacggacggcaacttccacccgtctccgctgatgggcggctttggcctgaaacatcctccgcctcagatcctgatcaagaacacgcctgtacctgcggatcctccgaccaccttcaaccagtcaaagctgaactctttcatcacgcaatacagcaccggacaggtcagcgtggaaattgaatgggagctgcagaaggaaaacagcaagcgctggaaccccgagatccagtacacctccaactactacaaatctacaagtgtggactttgctgttaatacagaaggcgtgtactctgaaccccaccccattggcactcgttacctcacccgtcccctgtaa

SEQ ID NO: 1658 - DNA, 2211 bp, Artificial Sequence
  source: /note="Description of Artificial Sequence: Synthetic polynucleotide"
atggctgccgatggttatcttccagattggctcgaggacaacctctctgagggcattcgcgagtggtgggcgctgaaacctggagccccgaagcccaaagccaaccagcaaaagcaggacgacggccggggtctggtgcttcctggctacaagtacctcggacccttcaacggactcgacaagggggagcccgtcaacgcggcggatgcagcagccctcgaacacgacaaagcttacgaccagcagctcaaggccggtgacaacccctacctcaagtataaccacgccgacgccgagtttcaggagcgtcttcaaggagatacgtcttttgggggcaacctcggacgagcagtcttccaggccaagaagcgggttctcgaacctcttggtctggttgaggaagcggctaagacggctcctggaaagaagaggcctgtagagcagtctcctcaggaaccggactcctccgcgggtattggcaaatcgggtgcacagcccgctaaaaagagactcaatttcggtcagactggcgacacagagtcagtcccagaccctcaacctctcggagaacctccagcagcgccctctggtgtgggacctaatacaatggctgcaggcggtggcgcaccaatggcagacaataacgaaggtgccgatggagtgggtagttcctcgggaaattggcattgcgattcccaatggctgggggacagagtcatcaccaccagcacccgaacctgggccctgcccacctacaacaaccacctctacaagcaaatctccagtgcttcaacgggggccagcaacgacaaccactacttcggctacagcaccccttgggggtattttgacttcaacagattccactgccacttctcaccacgtgactggcagcgactcatcaacaacaactggggattccggcctaagcgactcaacttcaagctcttcaacattcaggtcaaagaggttacggacaacaatggagtcaagaccatcgccaataaccttaccagcacggtccaggtcttcacggactcggagtaccagttgccgtacgtcctcggctctgcgcaccagggctgcctccctccgttcccggcggacgtgttcatgattccgcagtacggctacctaacgctcaacaatggcagccaggcagtgggacggtcatccttttactgcctggaatatttcccatcgcagatgctgagaacgggcaacaactttaccttcagctacacctttgaggacgttcctttccacagcagctacgctcacagccagagtctggaccgtctcatgaatcctctgattgaccagtacctgtactacttgtctcggactcaaacaacaggaggcacggcaaatacgcagactctgggcttcagccaaggtgggcctaatacaatggccaatcaggcaaagaactggctgccaggaccctgttaccgccaacaacgcgtctcaacgacaaccgggcaaaacaacaatagcaactttgcctggactgctgggaccaaataccatctgaatggaagaaattcattggctaatcctggcatcgctatggcaacacacaaagacgacaaggagcgtttttttcccagtaacgggatcctgatttttgacaaacaaaatgctgccagagacaatgcggattacagcgatgtcatgctcaccagcgaggaagaaatcaaaaccactaaccctgtggctacagaggaatacggtatcgtggcagataacttgcagcagcaaaacacggctcctcaaattggaactgtcaacagccagggggccttacccggtatggtctggcagaaccgggatgtgtacctgcagggtcccatctgggccaagattcctcacacggacggcaacttccacccgtctccgctgatgggcggctttggcctgaaacatcctccgcctcagatcctgatcaagaacacgcctgtacctgcggatcctccgaccaccttcaaccagtcaaagctgaactctttcatcacgcaatacagcaccggacaggtcagcgtggaaattgaatgggagctgcagaaggaaaacagcaagcgctggaaccccgagatccagtacacctccaactactacaaatctacaagtgtggactttgctgttaatacagaaggcgtgtactctgaaccccaccccattggcacccgttacctcacccgtcccctgtaa

SEQ ID NO: 1659 - DNA, 2211 bp, Artificial Sequence
  source: /note="Description of Artificial Sequence: Synthetic polynucleotide"
atggctgccgatggttatcttccagattggctcgaggacactctctctgaaggaataagacagtggtggaagctcaaacctggcccaccaccaccaaagcccgcagagcggcataaggacgacagcaggggtcttgtgcttcctgggtacaagtacctcggacccttcaacggactcgacaagggagagccggtcaacgaggcagacgccgcggccctcgagcacgacaaagcctacgaccggcagctcgacagcggagacaacccgtacctcaagtacaaccacgccgacgcggagtttcaggagcgccttaaagaagatacgtcttttgggggcaacctcggacgagcagtcttccaggcgaaaaagagggttcttgaacctctgggcctggttgaggaacctgttaagacggctccgggaaaaaagaggccggtagagcactctcctgtggagccagactcctcctcgggaaccggaaaggcgggccagcagcctgcaagaaaaagattgaattttggtcagactggcgactcagagtcagtccccgacccacaacctctcggagaacctccagcaacccccgctgctgtgggacctaatacgatggctacaggcagtggcgcaccaatggcagacaataacgagggcgccgacggagtgggtaattcctcgggaaattggcattgcgattccacatggatgggcgacagagtcatcaccaccagcaccagaacctgggccctgcccacttacaacaaccatctctacaagcaaatctccagtgcttcaacgggggccagcaacgacaaccactacttcggctacagcaccccctgggggtattttgacttcaacagattccactgccacttctcaccacgtgactggcagcgactcatcaacaacaactggggattccggcctaagcgactcaacttcaagctcttcaacattcaggtcaaagaggttacggacaacaatggagtcaagaccatcgccaataaccttaccagcaccatccaggtctttacggactcggaataccagctgccgtacgttctcggctctgcccaccagggctgcctgcctccgttcccggcggacgtgttcatgattccccagtacggctacctaacactcaacaacggtagtcaggccgtgggacgctcctccttctactgcctggaatatttcccatcgcagatgctgagaacgggcaacaactttaccttcagctacacctttgaggacgttcctttccacagcagctacgctcacagccagagtctggaccgtctcatgaatcctctgattgaccagtacctgtactacttgtctcggactcaaacaacaggaggcaaggcaaatacgcagactctgggcttcagccaaggtgggcctaatacaatggccaatcaggcaaagaactggctgccaggaccctgttaccgccaacaacgcgtctcaacgacaaccgggcaaaacaacaatagcaactttgcctggactgctgggaccaaataccatctgaatggaagaaattcattggctaatcctggcatcgctatggcaacacacaaagacgacaaggagcgtttttttcccagtaacgggatcctgatttttggcaaacaaaatgctgccagagacaatgcggattacagcgatgtcatgctcaccagcgaggaagaaatcaaaaccactaaccctgtggctacagaggaatacggtatcgtggcagataacttgcagcagcaaaacacggctcctcaaattggaactgtcaacagccagggggccttacccggtatggtctggcagaaccgggacgtgtacctgcagggtcccatctgggccaagattcctcacacggacggcaacttccacccgtctccgctgatgggcggctttggcctgaaacatcctccgcctcagatcctgatcaagaacacgcctgtacctgcggatcctccgaccaccttcaaccagtcaaagctgaactctttcatcacgcaatacagcaccggacaggtcagcgtggaaattgaatgggagctgcagaaggaaaacagcaagcgctggaaccccgagatccagtacacctccaactactacaaatctacaagtgtggactttgctgttaatacagaaggcgtgtactctgaaccccaccccattggcacccgttacctcacccgtcccctgtaa

SEQ ID NO: 1660 - DNA, 2211 bp, Artificial Sequence
  source: /note="Description of Artificial Sequence: Synthetic polynucleotide"
atggctgccgatggttatcttccagattggctcgaggacaacctctctgagggcattcgcgagtggtgggcgctgaaacctggagccccgaagcccaaagccaaccagcaaaagcaggacgacggccggggtctggtgcttcctggctacaagtacctcggacccttcaacggactcgacaagggggagcccgtcaacgcggcggacgcagcggccctcgagcacgacaaggcctacgaccagcagctcaaagcgggtgacaatccgtacctgcggtataaccacgccgacgccgagtttcaggagcgtctgcaagaagatacgtcttttgggggcaacctcgggcgagcagtcttccaggccaagaagcgggttctcgaaccttttggtctggttgaggaaggtgctaagacggctcctggaaagaaacgtccggtagagcagtcgccacaagagccagactcctcctcgggcatcggcaagacaggccagcagcccgctaaaaagagactcaattttggtcagactggcgactcagagtcagtccccgacccacaacctctcggagaacctccagcaacccccgctgctgtgggacctactacaatggcttcaggcggtggcgcaccaatggcggacaataacgaaggcgccgacggagtgggtaatgcctcaggaaattggcattgcgattccacatggctgggcgacagagtcatcaccaccagcacccgcacctgggccttgcccacctacaataaccacctctacaagcaaatctccagtgcttcaacgggggccagcaacgacaaccactacttcggctacagcaccccctgggggtattttgacttcaacagattccactgccacttttcaccacgtgactggcaaagactcatcaacaacaactggggattccggcctaagcgactcaacttcaagctcttcaacattcaggtcaaagaggttacggacaacaatggagtcaagaccatcgccaataaccttaccagcacggtccaggtcttcacggactcggagtaccagttgccgtacgtcctcggctctgcgcaccagggctgcctccctccgttcccggcggacgtgttcatgattccgcagtacggctacctaacgctcaacaatggcagccaggcagtgggacggtcatccttttactgcctggaatatttcccatcgcagatgctgagaacgggcaacaactttaccttcagctacacctttgaggacgttcctttccacagcagctacgctcacagccagagtctggaccgtctcatgaatcctctgattgaccagtacctgtactacttgtctcggactcaaacaacaggaggcacgggaaatacgcagactctgggcttcagccaaggtgggcctaatacaatggccaatcaggcaaagaactggctgccaggaccctgttaccgccaacaacgcgtctcaacgacaaccgggcaaaacaacaatagcaactttgcctggactgctgggaccaaataccatctgaatggaagaaattcattggctaatcctggcatcgctatggcaacacacaaagacgacaaggagcgtttttttcccagtaacgggatcctgatttttggcaaacaaaatgctgccagagacaatgcggattacagcgatgtcatgctcaccagcgaggaagaaatcaaaaccactaaccctgtggctacagaggaatacggtatcgtggcagataacttgcagcagcaaaacacggctcctcaaattggaactgtcaacagccagggggccttacccggtatggtctggcagaaccgggacgtgtacctgcagggtcccatctgggccaagattcctcacacggacggcaacttccacccgtctccgctgatgggcggctttggcctgaaacatcctccgcctcagatcctgatcaagaacacgcctgtacctgcggatcctccgaccaccttcaaccagtcaaagctgaactctttcatcacgcaatacagcaccggacaggtcagcgtggaaattgaatgggagctgcagaaggaaaacagcaagcgctggaaccccgagatccagtacacctccaactactacaaatctacaagtgtggactttgctgttaatacagaaggcgtgtactctgaaccccaccccattggcacccgttacctcacccgtcccctgtaa

SEQ ID NO: 1661 - DNA, 2211 bp, Artificial Sequence
  source: /note="Description of Artificial Sequence: Synthetic polynucleotide"
atggctgccgatggttatcttccagattggctcgaggacaacctctctgagggcattcgcgagtggtgggacttgaaacctggagccccgaaacccaaagccaaccagcaaaagcaggacgacggccggggtctggtgcttcctggctacaagtacctcggacccttcaacggactcgacaagggggagcccgtcaacgcggcggacgcagcggccctcgagcacgacaaggcctacgaccagcagctcaaagcgggtgacaatccgtacctgcggtataaccacgccgacgccgagtttcaggagcgtctgcaagaagatacgtcttttgggggcaacctcgggcgagcagtcttccaggccaagaagcgggttctcgaacctctcggtctggttgaggaaggcgctaagacggctcctggaaagaagaggcctgtagagcagtcgccacaagagccagactcctcctcgggcatcggcaagacaggccagcagcccgctaaaaagagactcaattttggtcagactggcgactcagagtcagtccccgatccacaacctctcggagaacctccagcaacccccgctgctgtgggacctactacaatggcttcaggcggtggcgcaccaatggcagacaataacgaaggcgccgacggagtgggtagttcctcgggaaattggcattgcgattccacatggctgggcgacagagtcatcaccaccagcacccgaacatgggccttgcccacctataacaaccacctctacaagcaaatctccagtgcttcaacgggggccagcaacgacaaccactacttcggctacagcaccccctgggggtattttgacttcaacagattccactgccacttctcaccacgtgactggcagcgactcatcaacaacaactggggattccggcctaagcgactcaacttcaagctcttcaacatccaggtcaaggaggtcacgcagaatgaaggcaccaagaccatcgccaataacctcaccagcaccatccaggtgtttacggactcggagtaccagcttccgtacgtcctcggctctgcgcaccagggctgcctccctccgttcccggcggacgtgttcatgattccgcagtacggctacctaacgctcaacaatggcagccaggcagtgggacggtcatccttttactgcctggaatatttcccatcgcagatgctgagaacgggcaacaactttaccttcagctacacctttgaggacgttcctttccacagcagctacgcgcacagccagagcttggaccggctgatgaatcctctgattgaccagtacctgtactacttgtctcggactcaaacaacaggaggcacggcaaatacgcagactctgggcttcagccaaggtgggcctaatacaatggccaatcaggcaaagaactggctgccaggaccctgttaccgccaacaacgcgtctcaacgacaaccgggcaaaacaacaatagcaactttgcctggactgctgggaccaaataccatctgaatggaagaaattcattggctaatcctggcatcgctatggcaacacacaaagacgacaaggagcgtttttttcccagtaacgggatcctgatttttggcaaacaaaatgctgccagagacaatgcggattacagcgatgtcatgctcaccagcgaggaagaaatcaaaaccactaaccctgtggctacagaggaatacggtatcgtggcagataacttgcagcagcaaaacacggctcctcaaattggaactgtcaacagccagggggccttacccggtatggtctggcagaaccgggacgtgtacctgcagggtcccatctgggccaagattcctcacacggacggcaacttccacccgtctccgctgatgggcggctttggcctgaaacatcctccgcctcagatcctgatcaagaacacgcctgtacctgcggatcctccgaccaccttcaaccagtcaaagctgaactctttcatcacgcaatacagcaccggacaggtcagcgtggaaattgaatgggagctgcagaaggaaaacagcaagcgctggaaccccgagatccagtacacctccaactactacaaatctacaagtgtggactttgctgttaatacagaaggcgtgtactctgaaccccaccccattggcacccgttacctcacccgtcccctgtaa

SEQ ID NO: 1662 - DNA, 2211 bp, Artificial Sequence
  source: /note="Description of Artificial Sequence: Synthetic polynucleotide"
atggctgccgatggttatcttccagattggctcgaggacaacctctctgagggcattcgcgagtggtgggcgctgaaacctggagccccgaagcccaaagccaaccagcaaaagcaggacgacggccggggtctggtgcttcctggctacaagtacctcggacccttcaacggactcgacaagggggagcccgtcaacgcggcggatgcagcggccctcgagcacgacaaggcctacgaccagcagctcaaagcgggtgacaatccgtacctgcggtataaccacgccgacgccgagtttcaggagcgtctgcaagaagatacgtcttttgggggcaacctcgggcgagcagtcttccaggccaagaagcgggttctcgaacctctcggtctggttgaggaaggcgctaagacggctcctggaaagaaacgtccggtagagcagtcgccacaagagccagactcctcctcgggcatcggcaagacaggccagcagcccgctaaaaagagactcaattttggtcagactggcgactcagagtcagtccccgacccacaacctctcggagaacctccagcaacccccgctgctgtgggacctactacaatggctgcaggcggtggcgcaccaatggcagacaataacgaaggcgccgacggagtgggtagttcctcgggaaattggcattgcgattccacatggatgggcgacagagtcatcaccaccagcacccgaacctgggccttgcccacctataacaaccatctctacaagcaaatctccagtgcttcaacgggggccagcaacgacaaccactacttcggctacagcaccccctgggggtattttgacttcaacagattccactgccacttctcaccacgtgactggcagcgactcatcaacaacaactggggattccggcccaagagactcagcttcaagctcttcaacatccaggtcaaggaggtcacgcagaatgaaggcaccaagaccatcgccaataacctcaccagcaccatccaggtgtttacggactcggagtaccagctgccgtacgtcctcggctctgcgcaccagggctgcctccctccgttcccggcggacgtgttcatgattccgcagtacggctacctaacgctcaacaatggcagccaggcagtgggacggtcatccttttactgcctggaatatttcccatcgcagatgctgagaacgggcaacaactttaccttcagctacacctttgaggacgttcctttccacagcagctacgctcacagccagagcttggaccggctgatgaatcctctgattgaccagtacctgtactacttgtctcggactcaaacaacaggaggcacggcaaatacgcagactctgggtttcagccaaggtgggcctaatacaatggccaatcaggcaaagaactggctgcaaggaccctgttaccgccaacaacgcgtctcaacgacaaccgggcaaaacaacaatagcaactttgcctggactgctgggaccaaataccatctgaatggaagaaattcattggctaatcctggcatcgctatggcaacacacaaagacgacaaggagcgtttttttcccagtaacgggatcctgatttttggcaaacaaaatgctgccagagacaatgcggattacagcgatgtcatgctcaccagcgaggaagaaatcaaaaccactaaccctgtggctacagaggaatacggtatcgtggcagataacttgcagcagcaaaacacggctcctcaaattggaactgtcaacagccagggggccttacccggtatggtctggcagaacctggacgtgtacctgcagggtcccatctgggccaagattcctcacacggacggcaacttccacccgtctccgctgatgggcggctttggcctgaaacatcctccgcctcagatcctgatcaagaacacgcctgtacctgcggatcctccgaccaccttcaaccagtcaaagctgaactctttcatcacgcaatacagcaccggacaggtcagcgtggaaattgaatgggagctgcagaaggaaaacagcaagcgctggaaccccgagatccagtacacctccaactactacaaatctacaagtgtggactttgctgttaatacagaaggcgtgtactctgaaccccaccccattggcacccgttacctcacccgtcccctgtaa

SEQ ID NO: 1663 - DNA, 2214 bp, Artificial Sequence
  source: /note="Description of Artificial Sequence: Synthetic polynucleotide"
atggctgccgatggttatcttccagattggctcgaggacaacctctctgagggcattcgcgagtggtgggcgctgaaacctggagccccgaagcccaaagccaaccagcaaaagcaggacgacggccggggtctggtgcttcctggctacaagtacctcggacccttcaacggactcgacaagggagagcccgtcaacgcggcggacgcagcggccctcgagcacgacaaggcctacgaccagcagctcaaagcgggtgacaatccgtacctgcggtataaccacgccgacgccgagtttcaggagcgtctgcaagaagatacgtcttttgggggcaacctcgggcgagcagtcttccaggccaagaagcgggttctcgaacctctcggtctggttgaggaaggcgctaagacggctcctggaaagaagagaccggtagagccatcaccccagcgttctccagactcctcctcgggcatcggcaagacaggccagcagcccgctaaaaagagactcaattttggtcagactggcgactcagagtcagtccccgacccacaacctctcggagaacctccagcaacccccgctgctgtgggacctactacaatggcttcaggtggtggcgcaccaatggcagacaataacgaaggcgccgacggagtgggtaatgcctcaggaaattggcattgcgattcccaatggctgggcgacagagtcatcaccaccagcacccgaacatgggccttgcccacctataacaaccacctctacaagcaaatctccagtgcttcaacgggggccagcaacgacaaccactacttcggctacagcaccccctgggggtattttgacttcaacagattccactgccacttttcaccacgtgactggcagcgactcatcaacaacaactggggattccggcctaagcgactcaacttcaagctcttcaacattcaggtcaaagaggttacggacaacaatggagtcaagaccatcgccaataaccttaccagcacggtccaggtcttcacggactcagactatcagctcccgtacgtgctcgggtcggctcacgagggctgcctcccgccgttcccagcggacgttttcatgattccccagtacggctacctaacactcaacaacggtagtcaggccgtgggacgctcctccttctactgcctggaatactttccttcgcagatgctgagaaccggcaacaacttccagtttacttacaccttcgaggacgtgcctttccacagcagctacgctcacagccagagcttggaccggctgatgaatcctctgattgaccagtacctgtactacttgtctcggactcaaacaacaggaggcacggcaaatacgcagactttgggcttcagccaaggtgggcctaatacaatggccaatcaggcaaagaactgggtgccaggaccctgttaccgccaacaacgggtttcaacggcaaccgggcaaaacaacaatagcaactttgcctggactgctgggaccaaataccatctgaaaggaagaaattcattggctaatcctggcatcgctatggcaacacacaaagacgacaaggagcgtttttttcccagtaacgggatcctgatttttggcaaacaaaatgctgccagagacaatgcggattacagcgatgtcatgctcaccagcgaggaagaaatcaaaaccactaaccctgtggctacagaggaatacggtatcgtggcagataacttgcagcagcaaaacacggctcctcaaattggaactgtcaacagccagggggccttacccggtatggtctggcagaaccgggacgtgtacctgcagggtcccatctgggccaagattcctcacacggacggcaacttccacccgtctccgctgatgggcggctttggcctgaaacatcctccgcctcagatcctgatcaagaacacgcctgtacctgcggatcctccgaccaccttcaaccagtcaaagctgaactctttcatcacgcaatacagcaccggacaggtcagcgtggaaattgaatgggagctgcagaaggaaaacagcaaacgctggaacccagagattcaatacacttccaactactacaaatctacaagtgtggactttgctgttaatacagaaggcgtgtactctgaaccccaccccattggcacccgttacctcacccgtcccctgtaa

SEQ ID NO: 1664 - DNA, 2214 bp, Artificial Sequence
  source: /note="Description of Artificial Sequence: Synthetic polynucleotide"
  modified_base (676)..(676): a, c, t, or g
  modified_base (697)..(697): a, c, t, or g
  modified_base (715)..(715): a, c, t, or g
  modified_base (748)..(748): a, c, t, or g
  modified_base (750)..(750): a, c, t, or g
  modified_base (757)..(757): a, c, t, or g
  modified_base (763)..(763): a, c, t, or g
atggctgccgatggttatcttccagattggctcgaggacactctctctgaaggaataagacagtggtggaagctcaaacctggcccaccaccaccaaagcccgcagagcggcataaggacgacagcaggggtcttgtgcttcctgggtacaagtacctcggacccttcaacggactcgacaagggagagccggtcaacgaggcagacgccgcggccctcgagcacgacaaagcctacgaccggcagctcgacagcggagacaacccgtacctcaagtacaaccacgccgacgcggagtttcaggagcgccttaaagaagatacgtcttttgggggcaacctcggacgagcagtcttccaggcgaaaaagagggttcttgaacctctcggtctggttgaggaaggcgctaagacggctcctggaaagaaacgtccggtagagcagtcgccacaagagccagactcctcctcgggcatcggcaagacaggccagcagcccgctaaaaagagactcaattttggtcagactggcgactcagagtcagtccccgacccacaacctctcggagaacctccagcaacgccctctggtgtgggacctaatacaatggctgcaggcggtggcgctccaatggcagacaataacgaaggcgccgacggagtgggtagttcctcangaaattggcattgcgattccncatggctgggcgacagantcatcaccaccagcacccgaacctgggccctgncnacctacnacaacnacctctacaagcaaatctccaacagcacatctggaggagccaccaacgacaacacctacttcggctacagcaccccctgggggtattttgactttaacagattccactgccacttttcaccacgtgactggcagcgactcatcaacaacaactggggattccggcctaagcgactcaacttcaagctcttcaacatccaggtcaaggaggtcacgcagaatgaaggcaccaagaccatcgccaataacctcaccagcaccatccaggtgtttacggactcggagtaccagctgccgtacgttctcggctctgcccaccagggctgcctgcctccgttcccggcggacgtgttcatgattccccagtacggctacctaacactcaacaacggtagtcaggccgtgggacgctcctccttctactgcctggaatactttccttcgcagatgctgagaaccggcaacaacttccagtttacttacaccttcgaggacgtgcctttccacagcagctacgcccacagccagagcttggaccggctgatgaatcctctgattgaccagtacctgtactacttgtctcggactcaaacaacaggaggcacggcaaatacgcagactctgggcttcagccaaggtgggcctaatacaatggccaatcaggcaaagaactggctgccaggaccctgttaccgccaacaacgcgtctcaacgacaaccgggcaaaacaacaatagcaactttgcctggactgctgggaccaaataccatctgaatggaagaaattcattggctaatcctggcatcgctatggcaacacacaaagacgacaaggagcgtttttttcccagtaacgggatcctgatttttggcaaacaaaatgctgccagagacaatgcggattacagcgatgtcatgctcaccagcgaggaagaaatcaaaaccactaaccctgtggctacagaggaatacggtatcgtggcagataacttgcagcagcaaaacacggctcctcaaattggaactgtcaacagccagggggccttacccggtatggtttggcagaaccgggacgtgtacctgcagggtcctatctgggccaagattcctcacacggacggaaactttcatccctcgccgctgatgggaggctttggactgaaacacccgcctcctcagatcctgattaagaatacacctgttcccgcggatcctccaactaccttcagtcaagctaagctggcgtcgttcatcacgcaatacagcacaggacaagtgagtgtggaaattgaatgggagctgcagaaagaaaacagcaagcgctggaatcccgaagtgcagtacacatccaattatgcaaaatctgccaacgttgattttactgtggacaacaatggactttatactgagcctcgccccattggcacccgttaccttacccgtcccctgtaa

SEQ ID NO: 1665 - DNA, 2214 bp, Artificial Sequence
  source: /note="Description of Artificial Sequence: Synthetic polynucleotide"
atggctgccgatggttatcttccagattggctcgaggacaacctctctgagggcattcgcgagtggtgggacttgaaacctggagccccgaagcccaaagccaaccagcaaaagcaggacgacggccggggtctggtgcttcctggctacaagtacctcggacccttcaacggactcgacaagggggagcccgtcaacgcggcggacgcagcggccctcgagcacgacaaggcctacgaccagcagctcaaagcgggtgacaatccgtacctgcggtataaccacgccgacgccgagtttcaggagcgtctgcaagaagatacgtcttttgggggcaacctcgggcgagcagtcttccaggccaagaagcgggttctcgaacctctcggtctggttgaggaaggcgctaagacggctcctggaaagaagagaccggtagagccatcaccccagcgttctccagactcctctacgggcatcggcaagaaaggccagcagcccgcgaaaaagagactcaactttgggcagactggcgactcagagtcagtgcccgaccctcaaccaatcggagaaccccccgcaggcccctctggtgtgggatctcttacaatggcttcaggtggtggcgcaccagtggcagacaataacgaaggtgccgatggagtgggtagttcctcgggaaattggcattgcgattcccaatggctgggggacagagtcatcaccaccagcacccgaacatgggccttgcccacctataacaaccacctctacaagcaaatctccagtgcttcaacgggggccagcaacgacaaccactacttcggctacagcaccccctgggggtattttgactttaacagattccactgccacttctcaccacgtgactggcagcgactcatcaacaacaactggggattccggcccaagagactcaacttcaagctcttcaacatccaggtcaaggaggtcacggacaatgatggagtcaagaccatcgccaataaccttaccagcacgattcaggtctttacggactcggaataccagttgccgtacgtcctcggctctgcgcaccagggctgcctgcctccgttcccggcggacgtgttcatgattccgcagtacggctacctaacgctcaacaatggcagccaggcagtgggacggtcatccttttactgcctggaatatttcccatcgcagatgctgagaacgggcaacaactttaccttcagctacacttttgaggacgttcctttccacagcagctacgctcacagccagagtctggaccgtctcatgaatcctctgattgaccagtacctgtactacttgtctcggactcaaacaacaggaggcacggcaaatacgcagactctgggcttcagccaaggtgggcctaatacaatggccaatcacgcaaagaactggctgccaggaccctgttaccgccaacaacgcgtctcaacgacaaccggacaaaacaacaatagcaactttgcctggactgctgggaccaaataccatctgaatggaagaaattcattggctaatcctggcatcgctatggcaacacacaaagacgacaaggagcgtttttttcccagtaacgggatcctgatttttggcaaacaaaatgctgccagagacaatgcggattacagcgatgtcatgctcaccagcgaggaagaaatcaaaaccactaaccctgtggctacagaggaatacggtatcgtggcagataacttgcagcagcaaaacacggctcctcaaattggaactgtcaacagccagggggccttacccggtatggtctggcagaaccgggacgtgtacctgcagggtcccatctgggccaagattcctcacacggacggcaacttccacccgtctccgctgatgggcggctttggcctgaaacatcctccgcctcagatcctgatcaagaacacgcctgtacctgcggatcctccgaccaccttcaaccagtcaaagctgaactctttcatcacgcaatacagcaccggacaggtcagcgtggaaattgaatgggagctgcagaaggaaaacagcaagcgctggaaccccgagatccagtacacctccaactactacaaatctacaagtgtggactttgctgttaatacagaaggcgtgtactctgaaccccaccccattggcacccgttacctcacccgtcccctgtaa

SEQ ID NO: 1666 - DNA, 2211 bp, Artificial Sequence
  source: /note="Description of Artificial Sequence: Synthetic polynucleotide"
atggctgccgatggttatcttccagattggctcgaggacactctctctgaaggaataagacagtggtggaagctcaaacctggcccaccaccaccaaagcccgcagagcggcacaaggacgacagcaggggtcttgtgcttcctgggtacaagtacctcggacccttcaacggactcgacaagggagagccggtcaacgaggcagacgccgcggccctcgagcacgacaaagcctacgaccggcagctcgacagcggagacaacccgtacctcaagtacaaccacgccgacgcggagtttcaggagcgccttaaagaagatacgtcttttgggggcaacctcggacgagcagtcttccaggcgaaaaagagggttcttgaacctctgggcctggttgaggaacctgttaagacggctccgggaaaaaagaggccggtagagcactctcctgtggagccagactcctcctcgggaaccggaaaggcgggccagcagcctgctaaaaagagactcaattttggtcagactggcgactcagagtcagtccccgacccacaacctctcggagaacctccagcaacccccgctgctgtgggacctactacaatggcttcaggtggtggcgcaccaatggcagacaataacgaaggcgccgacggagtgggtaatgcctcaggaaattggcattgcgattccacatggctgggcgacagagtcatcaccaccagcacccgcacctgggccttgcccacctacaataaccacctctacaagcaaatctccagtgcttcaacgggggccagcaacgacaaccactacttcggctacagcaccccctgggggtattttgacttcaacagattccactgccacttctcaccacgtgactggcagcgactcatcaacaacaactggggattccggcccaagagactcaacttcaaactcttcaacatccaagtcaaggaggtcacgcagaatgaaggcaccaagaccatcgccaataacctcaccagcaccatccaggtgtttacggactcggagtaccagctgccgtacgttctcggctctgcccaccagggctgcctgcctccgttcccggcggacgtgttcatgattccccagtacggctacctaacactcaacaacggtagtcaggccgtgggacgctcctccttctactgcctggaatactttccttcgcagatgctgagaaccggcaacaacttccagtttacttacaccttcgaggacgtgcctttccacagcagctacgcgcacagccagagcttggaccggctgatgaatcctctgattgaccagtacctgtactacttgtctcggactcaaacaacaggaggcacggcaaatacgcagactctgggcttcagccaaggtgggcctaatacaatggccaatcaggcaaagaactggctgccaggaccctgttaccgccaacaacgcgtctcaacgacaaccgggcaaaacaacaatagcaactttgcctggactgctgggaccaaataccatctgaatggaagaaattcattggctaatcctggcatcgctatggcaacacacaaagacgacaaggagcgtttttttcccagtaacgggatcctgatttttggcaaacaaaatgctgccagagacaatgcggattacagcgatgtcatgctcaccagcgaggaagaaatcaaaaccactaaccctgtggctacagaggaatacggtatcgtggcagataacttgcagcagcaaaacacggctcctcaaattggaactgtcaacagccagggggccttacccggtatggtctggcagaaccgggacgtgtacctgcagggtcccatctgggccaagattcctcacacggacggcaacttccacccgtctccgctgatgggcggctttggcctgaaacatcctccgcctcagatcctgatcaagaacacgcctgtacctgcggatcctccgaccaccttcaaccagtcaaagctgaactctttcatcacgcaatacagcaccggacaggtcagcgtggaaattgaatgggagctgcagaaggaaaacagcaagcgctggaaccccgagatccagtacacctccaactactacaaatctacaagtgtggactttgctgttaatacagaaggcgtgtactctgaaccccaccccattggcacccgttacctcacccgtcccctgtaa

SEQ ID NO: 1667 - DNA, 2211 bp, Artificial Sequence
  source: /note="Description of Artificial Sequence: Synthetic polynucleotide"
atggctgccgatggttatcttccagattggctcgaggacaacctctctgagggcattcgcgagtggtgggcgctgaaacctggagccccgaagcccaaagccaaccagcaaaagcaggacgacggccggggtctggtgcttcctggctacaagtacctcggacccttcaacggactcgacaagggggagcccgtcaacgcggcggatgcagcggccctcgagcacgacaaggcctacgaccagcagctccaagcgggtgacaatccgtacctgcggtataaccacgccgacgccgagtttcaggagcgtcttcaaggagatacgtcttttgggggcaacctcggacgagcagtcttccaggccaagaagcgggttctcgaacctctcggtctggttgaggaaggcgctaagacggctcctggaaagaaacgtccggtagagcagtcgccacaagagccagactcctcctcgggcatcggcaagacaggccagcagcccgctaaaaagagactcaattttggtcagactggcgactcagagtcagtccccgacccacaacctctcggagaacctccagcaacccccgctgctgtgggacctactacaatggcttcaggcggtggcgcaccaatggcggacaataacgaaggcgccgatggagtgggtaatgcctcaggaaattggcattgcgattccacatggctgggcgacagagtcatcaccaccagcacccgcacctgggccttgcccacctacaataaccacctctacaagcaaatctccagtgcttcaacgggggccagcaacgacaaccactacttcggctacagcaccccctgggggtattttgacttcaacagattccactgccacttctcaccacgtgactggcagcgactcatcaacaacaactggggattccggcctaagcgactcaacttcaagctcttcaacattcaggtcaaagaggttacggacaacaatggagtcaagaccatcgccaataacctcaccagcaccatccaggtgtttacggactcggagtaccagctgccgtacgttctcggctctgcccaccagggctgcctgcctccgttcccggcggacgtgttcatgattccccagtacggctacctaacactcaacaacggtagtcaggccgtgggacgctcctccttctactgcctggaatactttccttcgcagatgctgagaaccggcaacaacttccagtttacttacaccttcgaggacgtgcctttccacagcagctacgcccacagccagagcttggaccggctgatgaatcctctgattgaccagtacctgtactacttgtctcggactcaaacaacaggaggcacggcaaatacgcagactctgggcttcagccaaggtgggcctaatacaatggccaatcaggcaaagaactggctgccaggaccctgttaccgccaacaacgcgtctcaacgacaaccgggcaaaacaacaatagcaactttgcctggactgctgggaccaaataccatctgaatggaagaaattcattggctaatcctggcatcgctatggcaacacacaaagacgacaaggagcgtttttttcccagtaacgggatcctgatttttggcaaacaaaatgctgccagagacaatgcggattacagcgatgtcatgctcaccagcgaggaagaaatcaaaaccactaaccctgtggctacagaggaatacggtatcgtggcagataacttgcagcagcaaaacacggctcctcaaattggaactgtcaacagccagggggccttacccggtatggtctggcagaaccgggacgtgtacctgcagggtcccatctgggccaagattcctcacacggacggcaacttccacccgtctccgctgatgggcggctttggcctgaaacatcctccgcctcagatcctgatcaagaacacgcctgtacctgcggatcctccgaccaccttcaaccagtcaaagctgaactctttcatcacgcaatacagcaccggacaggtcagcgtggaaattgaatgggagctgcagaaggaaaacagcaagcgctggaaccccgagatccagtacacctccaactactacaaatctacaagtgtggactttgctgttaatacagaaggcgtgtactctgaaccccaccccattggcacccgttacctcacccgtcccctgtaa

SEQ ID NO: 1668 - DNA, 2217 bp, Artificial Sequence
  source: /note="Description of Artificial Sequence: Synthetic polynucleotide"
atggctgccgatggttatcttccagattggctcgaggacactctctctgaaggaataagacagtggtggaagctcaaacctggcccaccaccaccaaagcccgcagagcggcataaggacgacagcaggggtcttgtgcttcctgggtacaagtacctcggacccttcaacggactcgacaagggggagcccgtcaacgcggcggatgcagcggccctcgagcacgacaaggcctacgaccagcagctcaaagcgggtgacaatccgtacctgcggtataaccacgccgacgcggagtttcaggagcgccttaaagaagatacgtcttttgggggcaacctcggacgagcagtcttccaggcgaaaaagagggttcttgaacctctcggtctggttgaggaaggcgctaagacggctcctggaaagaagagaccggtagagccatcaccccagcgttctccagactcctctacgggcatcggcaagaaaggccaacagcccgccagaaaaagactcaattttggtcagactggcgactcagagtcagttccagaccctcaacctctcggagaacctccagcagcgccctctggtgtgggacctaatacaatggctgcaggcggtggcgcaccaatggcagacaataacgaaggcgccgacggagtgggtagttcctcgggaaattggcattgcgattcccaatggctgggggacagagtcatcaccaccagcaccagaacctgggccctgcccacctacaacaatcacctctacaagcaaatctccaacagcacatctggaggatcttcaaatgacaacgcctacttcggctacagcaccccctgggggtattttgacttcaaccgcttccactgccacttctcaccacgtgactggcagcgactcatcaacaacaactggggattccggcccaagagactcaacttcaagctcttcaacattcaggtcaaagaggttacggacaacaatggagtcaagaccatcgccaataaccttaccagcacggtccaggtctttacggactcggagtaccagttgccgtacgtcctcggctctgcgcaccagggctgcctccctccgttcccggcggacgtgttcatgattccccagtacggctacctaacactcaacaacggtagtcaggccgtgggacgctcctccttctactgcctggaatatttcccttctcagatgctgagaacgggcaacaactttaccttcagctacacctttgaggacgttcctttccacagcagctacgctcacagccagagtctggaccgtctcatgaatcctctgattgaccagtacctgtactacttgtctcggactcaaacaacaggaggcacggcaaatacgcagactctgggcttcagccaaggtgggcctaatacaatggccaatcaggcaaagaactggctgccaggaccctgttaccgccaacaacgcgtctcaacgacaaccgggcaaaacaacaatagcaactttgcctggactgctgggaccaaataccatctgaatggaagaaattcattggctaatcctggcatcgctatggcaacacacaaagacgacaaggagcgtttttttcccagtaacgggatcctgatttttggcaaacaaaatgctgccagagacaatgcggattacagcgatgtcatgctcaccagcgaggaagaaatcaaaaccactaaccctgtggctacagaggaatacggtatcgtggcagataacttgcagcagcaaaacacggctcctcaaattggaactgtcaacagccagggggccttacccggtatggtctggcagaaccgggacgtgtacctgcagggtcccatctgggcaaagattccacacacggacggacattttcacccctctcccctcatgggtggattcggacttaaacaccctcctccacagattctcatcaagaacaccccggtacctgcgaatcctccgaccaccttcaaccagtcaaagctgaactctttcatcacgcaatacagcacaggacaagtgagtgtggaaattgaatgggagctgcagaaagaaaacagcaagcgctggaatcccgaagtgcagtacacatccaattatgcaaaatctgccaacgttgattttactgtggacaacaatggactttatactgagcctcgccccattggcacccgttaccttacccgtcccctgtaa

SEQ ID NO: 1669 - DNA, 2211 bp, Artificial Sequence
  source: /note="Description of Artificial Sequence: Synthetic polynucleotide"
atggctgccgatggttatcttccagattggctcgaggacaacctctctgagggcattcgcgagtggtgggcgctgaaacctggagccccgaaacccaaagccaaccagcaaaagcaggacgacggccggggtctggtgcttcctggctacaagtacctcggacccttcaacggactcgacaagggggagcccgtcaacgcggcggacgcagcggccctcgagcacgacaaggcctacgaccagcagctcaaggcgggtgacaatccgtacctgcggtataaccacgccgacgccgagtttcaggagcgtctgcaagaagatacgtcttttgggggcaacctcgggcgagcagtcttccaggccaaaaagaggcttcttgaacctcttggtctggttgaggaaggggctaagacggctcctggaaagaaacgtccggtagagcagtcgccacaagagccagactcctcctcgggcattggcaagacaggccagcagcccgctaaaaagagactcaactttgggcagactggcgactcagagtcagtgcccgatcctcaacctctcggagaacctccagcaacccccgctgctgtgggacctactacaatggcttcaggcggtggcgcaccaatggcggacaataacgaaggcgccgatggagtgggtaattcctcgggaaattggcattgcgattccacatggatgggcgacagagtcatcaccaccagcacccgaacctgggccctgcccacctacaacaatcacctctacaagcaaatctccagtgcttcaacgggggccagcaacgacaaccactacttcggctacagcaccccctgggggtattttgatttcaacagattccactgccatttttcaccacgtgactggcagcgactcatcaacaacaactggggattccggcccaagagactcaacttcaagctcttcaacatccaggtcaaggaggtcacgcagaatgaaggcaccaagaccatcgccaataaccttaccagcacgattcaggtctttacggattcggaataccagctcccgtacgtcctcggctctgcgcaccagggctgcctccctccgttcccggcggacgtgttcattattccgcagtacggctacctaacgctcaacaatggtagccaggcagtgggacggtcatccttttactgcctggaatatttcccatcgcagatgctgagaacgggcaacaactttaccttcagctacacctttgaggacgttcctttccacagcagctacgctcacagccagagtctggaccgtctcatgaatcctctgattgaccagtacctgtactacttgtctcggactcaaacaacaggaggcacggcaaatacgcagactctgggcttcagccaaggtgggcctaatacaatggccaatcaggcaaagaactggctgccaggaccctgttaccgccaacaacgcgtctcaacgacaaccgggcaaaacaacaatagcaactttgcctggactgctgggaccaaataccatctgaatggaagaaattcattggctaatcctggcatcgctatggcaacacacaaagacgacaaggagcgtttttttcccagtaacgggatcctgatttttggcaaacaaaatgctgccagagacaatgcggattacagcgatgtcatgctcaccagcgaggaagaaatcaaaaccactaaccctgtggctacagaggaatacggtatcgtggcagataacttgcagcagcaaaacacggctcctcaaattggaactgtcaacagccagggggccttacccggtatggtctggcagaaccgggacgtgtacctgcagggtcccatctgggccaagattcctcacacggacggcaacttccacccgtctccgctgatgggcggctttggcctgaaacatcctccgcctcagatcctgatcaagaacacgccagtacctgcggatcctccgaccaccttcaaccagtcaaagctgaactctttcatcacgcaatacagcaccggacaggtcagcgtggaaattgaatgggagctgcagaaggaaaacagcaagcgctggaaccccgagatccagtacacctccaactactacaaatctacaagtgtggactttgctgttaatacagaaggcgtgtactctgaaccccaccccattggcacccgttacctcacccgtcccctgtaa

SEQ ID NO: 1670 - DNA, 2211 bp, Artificial Sequence
  source: /note="Description of Artificial Sequence: Synthetic polynucleotide"
atggctgccgatggttatcttccagattggctcgaggacaacctctctgagggcattcgcgagtggtgggcgctgaaacctggagccccgaaacccaaagccaaccagcaaaagcaggacgacggccggggtctggtgcttcctggctacaagtacctcggacccttcaacggactcgacaagggggagcccgtcaacgcggcggatgcagcggccctcgagcacgacaaggcctacgaccagcagctcaaggcgggtgacaatccgtacctgcggtataaccacgccgacgccgagtttcaggagcgtctgcaagaagatacgtcttttgggggcaacctcgggcgagcagtcttccaggccaaaaagagggttcttgaaccttttggtctggttgaggaagctgctaagacggctcctggaaagaaacgtccggtagagcagtcgccacaagagccagactcctcctcgggcattggcaagacaggccagcagcccgctaaaaagagactcaattttggtcagactggcgactcagagtcagtgcccgaccctcaacctctcggagaacctccagcaacccccgctgctgtgggacctactacaatggcttcaggcggtggcgcaccaatggcagacaataacgaaggcgccgatggagtgggtaatgcctcaggaaattggcattgcgattccacatggctgggcgacagagtcatcaccaccagcacccgaacctgggccctgcccacctacaacaatcacctctacaagcaaatctccagtgcttcaacgggggccagcaacgacaaccactacttcggctacagcaccccctgggggtattttgactttaacagattccactgccacttttcaccacgtgactggcagcgactcatcaacaacaactggggattccggcccaagagactcaacttcaagctcttcaacatccaggtcaaggaggtcacgcagaatgaaggcaccaagaccatcgccaataacctcaccagcaccattcaggtctttacggattcggaataccagctcccgtacgtcctcggctctgcccaccagggctgcctccctccgttcccggcggacgtgttcatgattccgcagtacggctacctaacgctcaacaatggtagccaggcagtgggacggtcatccttttactgcctggaatatttcccatcgcagatgctgagaacgggcaacaactttaccttcagctacacctttgaggacgttcctttccacagcagctacgctcacagccagagtctggaccgtctcatgaatcctctgattgaccagtacctgtactacttgtctcggactcaaacaacaggaggcacggcaaatacgcagactctgggcttcagccaaggtgggcctaatacaatggccaatcacgcaaagaactggctgccaggaccctgttaccgccaacaacgcgtctcaacgacaaccgggcaaaacaacaatagcaactttgcctggactgctgggaccaaataccatctgaatggaagaaattcattggctaatcctggcatcgctatggcaacacacaaagacgacaaggagcgtttttttcccagtaacgggatcctgatttttggcaaacaaaatgctgccagagacaatgcggattacagcgatgtcatgctcaccagcgaggaagaaatcaaaaccactaaccctgtggctacagaggaatacggtatcgtggcagataacttgcagcagcaaaacacggctcctcaaattggaactgtcaacagccagggggccttacccggtatggtctggcagaaccgggacgtgtacctgcagggtcccatctgggccaagattcctcacacggacggcaacttccacccgtctccgctgatgggcggctttggcctgaaacatcctccgcctcagatcctgatcaagaacacgcctgtacctgcggatcctccgaccaccttcaaccagtcaaagctgaactctttcatcacgcaatacagcaccggacaggtcagcgtggaaattgaatgggagctgcagaaggaaaacagcaagcgctggaaccccgagatccagtacacctccaactactacaaatctacaagtgtggactttgctgttaatacagaaggcgtgtactctgaaccccaccccattggcacccgttacctcacccgtcccctgtaa

SEQ ID NO: 1671 - DNA, 2211 bp, Artificial Sequence
  source: /note="Description of Artificial Sequence: Synthetic polynucleotide"
atggctgccgatggttatcttccagattggctcgaggacaacctctctgagggcattcgcgagtggtgggcgctgaaacctggagccccgaagcccaaagccaaccagcaaaagcaggacgacggccggggtctggtgcttcctggctacaagtacctcggacccttcaacggactcgacaaaggagagcccgtcaacgaggcggacgcggcggccctcgaacacgacaaggcttacgaccagcagctcaaggccggtgacaacccctacctgcggtacaaccacgccgacgccgagttccaggagcggctgcaagaagatacgtcttttgggggcaacctcgggcgagcagtcttccaggccaagaagaggcttcttgaacctcttggtctggttgaggaagcggctaagacggctcctggaaagaagaggcctgtagagcagtctcctcaggaaccggactcctccgcgggtattggcaaatcaggtgcacagcccgctaaaaagagactcaattttggtcagactggcgactcagagtcagtccccgacccacaacctctcggagaacctccagcaacccccgctgctgtgggacctactacaatggcttcaggcggtggcgcaccaatggcagacaataacgaaggcgccgatggagtgggtaatgcctcaggaaattggcattgcgattccacatggctgggcgacagagtcatcaccaccagcacccgaacctgggccctgcccacctataacaaccatctctacaagcaaatctccagtgcttcaacgggggccagtaacgacaaccactacttcggctacagcaccccctgggggtattttgactttaacagattccactgccacttctcaccacgtgactggcagcgactcatcaacaacaactggggattccggcccaagcgactcaacttcaagctcttcaacattcaggtcaaagaggttacggacaacgatggagtcaagaccatcgccaataaccttaccagcaccattcaggtgtttacggactcggaataccagctgccgtacgttctcggctccgcccaccagggctgcctgcctccgttcccggcggacgtgttcatgattccccagtacggctacctaacactcaacaacggtagtcaggccgtgggacgctcctccttctactgcctggaatactttccttcgcagatgctgagaactggcaacaacttccagtttacttacaccttcgaggacgtgcctttccacagcagctacgcccacagccagagcttggaccggctgatgaatcctctgattgaccagtacctgtactacttgtctcggactcaaacaacaggaggcacggcaaatacgcagactctgggcttcagccaaggtgggcctaatacaatggccaatcaggcaaagaactggctgccaggaccctgttaccgccaacaacgcgtctcaacgacaaccgggcaaaacaacaatagcaactttgcctggactgctgggaccaaataccatctgaatggaagaaattcattggctaatcctggcatcgctatggcaacacacaaagacgacaaggagcgtttttttcccagtaacgggatcctgatttttggcaaacaaaatgctgccagagacaatgcggattacagcgatgtcatgctcaccagcgaggaagaaatcaaaaccactaaccctgtggctacagaggaatacggtatcgtggcagataacttgcagcagcaaaacacggctcctcaaattggaactgtcaacagccagggggccttacccggtatggtctggcagaaccgggacgtgtacctgcagggtcccatctgggccaagattcctcacacggacggcaacttccacccgtctccgctgatgggcggctttggcctgaaacatcctccgcctcagatcctgatcaagaacacgcctgtacctgcggatcctccgaccaccttcaaccagtcaaagctgaactctttcatcacgcaatacagcaccggacaggtcagcgtggaaattgaatgggagctgcagaaggaaaacagcaagcgctggaaccccgagatccagtacacctccaactactacaaatctacaagtgtggactttgctgttaatacagaaggcgtgtactctgaaccccaccccattggcacccgttacctcacccgtcccctgtaa

SEQ ID NO: 1672 - DNA, 2211 bp, Artificial Sequence
  source: /note="Description of Artificial Sequence: Synthetic polynucleotide"
atggctgccgatggttatcttccagattggctcgaggacaacctctctgagggcattcgcgagtggtgggcgctgaaacctggagccccgaagcccaaagccaaccagcaaaagcaggacgacggccggggtctggtgcttcctggctacaagtacctcggacccttcaacggactcgacaagggggagcccgtcaacgcggcggatgcagcggccctcgagcacgacaaagcctacgaccagcagctcaaagcgggtgacaatccgtacctgcggtataaccacgccgacgccgagtttcaggagcgtctgcaagaagatacgtcttttgggggcaacctcgggcgagcagtcttccaggccaagaagagggttctcgaacctttgggtctggttgaggaaggggctaagacggctcctggaaagaaaaggccggtagagcagtctcctcaggaaccggactcctccgcgggtattggcaagacaggtgcacagcccgctaaaaagagactcaattttggtcagactggcgactcagagtcagtccccgacccacaacctctcggagaacctccagcaacccccgctgctgtgggacctactacaatggcttcaggcggtggcgcaccaatggcagacaataacgaaggcgccgacggagtgggtagtgcctcgggaaattggcattgcgattccacatggctgggcgacagagtcatcaccaccagcacccgaacctgggccctgcccacctataacaaccatctctacaagcaaatctccagtgcttcaacgggggccagtaacgacaaccactacttcggctacagcaccccctgggggtattttgacttcaacagattccactgccacttctcaccacgtgactggcagcgactcatcaacaacaactggggattccggcccaagcgactcaacttcaagctcttcaacattcaggtcaaagaggttacggacaacaatggagtcaagaccatcgccaataaccttaccagcacgatccaggtctttacggactcggagtaccagctgccgtacgtcctcggctctgcgcaccagggctgcctgcctccgttcccggcggacgtgttcatgattccgcagtacggctacctaacgctcaacaatggtagccaggcagtgggacggtcatccttttactgcctggaatatttcccatcgcagatgctgagaacgggcaacaactttaccttcagctacacctttgaggacgttcctttccacagcagctacgctcacagccagagtctggaccgtctcatgaatcctctgattgaccagtacctgtactacttgtctcggactcaaacaacaggaggcacggcaaatacgcagactctgggcttcagccaaggtgggcctaatacaatggccaatcaggcaaagaactggctgccaggaccctgttaccgccaacaacgcgtctcaacgacaaccgggcaaaacaacaatagcaactttgcctggactgctgggaccaaataccatctgaatggaagaaattcattggctaatcctggcatcgctatggcaacacacaaagacgacaaggagcgtttttttcccagtaacgggatcctgatttttggcaaacaaaatgctgccagagacaatgcggattacagcgatgtcatgctcaccagcgaggaagaaatcaaaaccactaaccctgtggctacagaggaatacggtatcgtggcagataacttgcagcagcaaaacacggctcctcaaattggaactgtcaacagccagggggccttacccggtatggtctggcagaaccgggacgtgtacctgcagggtcccatctgggccaagattcctcacacggacggcaacttccacccgtctccgctgatgggcggctttggcctgaaacatcctccgcctcagatcctgatcaagaacacgcctgtacctgcggatcctccgaccaccttcaaccagtcaaagctgaactctttcatcacgcaatacagcaccggacaggtcagcgtggaaattgaatgggagctgcagaaggaaaacagcaagcgctggaaccccgagatccagtacacctccaactactacaaatctacaagtgtggactttgctgttaatacagaaggcgtgtactctgaaccccaccccattggcacccgttacctcacccgtcccctgtaa

SEQ ID NO: 1673 - DNA, 2211 bp, Artificial Sequence
  source: /note="Description of Artificial Sequence: Synthetic polynucleotide"
atggctgccgatggttatcttccagattggctcgaggacaacctctctgagggcattcgcgagtggtgggacttgaaacctggagccccgaagcccaaagccaaccagcaaaagcaggacgacggccggggtctggtgcttcctggctacaagtacctcggacccttcaacggactcgacaagggggagcccgtcaacgcggcggacgcagcggccctcgagcacgacaaggcctacgaccagcagctcaaagcgggtgacaatccgtacctgcggtataaccacgccgacgccgagtttcaggagcgtctgcaagaagatacgtcttttgggggcaacctcggacgagcagtcttccaggccaaaaagaggcttcttgaacctcttggtctggttgaggaagcggctaagacggctcctggaaagaagaggcctgtagagcagtctcctcaggaaccggactcctccgcgggtattggcaaatcgggtgcacagcccgctaaaaagagactcaatttcggtcagactggcgacacagagtcagtcccagaccctcaaccaatcggagaacctccagcagcgccctctggtgtgggacctaatacaatggctgcaggcggtggcgcaccaatggcagacaataacgaaggtgccgatggagtgggtagttcctcgggaaattggcattgcgattcccaatggctgggggacagagtcatcaccaccagcacccgaacctgggccctgcccacctataacaaccacctctacaagcaaatctccagtgcttcaacgggggccagcaacgacaaccactactttggctacagcaccccttgggggtattttgacttcaacagattccactgccacttttcaccacgtgactggcaaagactcatcaacaacaactggggattccgacccaagagactcaacttcaagctcttcaacatccaggtcaaggaggtcacgcagaatgaaggcaccaagaccatcgccaataacctcaccagcaccatccaggtgtttacggactcggagtaccagctgccgtacgttctcggctctgcccaccagggctgcctgcctccgttcccggcggacgtgttcatgattccccagtacggctacctaacactcaacaacggtagtcaggccgtgggacgctcctccttctactgcctggaatactttccttcgcagatgctgagaaccggcaacaacttccagtttacttacaccttcgaggacgtgcctttccacagcagctacgcgcacagccagagcttggaccggctgatgaatcctctgattgaccagtacctgtactacttgtctcggactcaaacaacaggaggcacggcaaatacgcagactctgggcttcagccaaggtgggcctaatacaatggccaatcacgcaaagaactggctgccaggaccctgttaccgccaacaacgcgtctcaacgacaaccgggcaaaacaacaatagcaactttgcctggactgctgggaccaaataccatctgaatggaagaaattcattggctaatcctggcatcgctatggcaacacacaaagacgacaaggagcgtttttttcccagtaacgggatcctgatttttggcaaacaaaatgctgccagagacaatgcggattacagcgatgtcatgctcaccagcgaggaagaaatcaaaaccactaaccctgtggctacagaggaatacggtatcgtggcagataacttgcagcagcaaaacacggctcctcaaattggaactgtcaacagccagggggccttacccggtatggtctggcagaaccgggacgtgtacctgcagggtcccatctgggccaagattcctcacacggacggcaacttccacccgtctccgctgatgggcggctttggcctgaaacatcctccgcctcagatcctgatcaagaacacgcctgtacctgcggatcctccgaccaccttcaaccagtcaaagctgaactctttcatcacgcaatacagcaccggacaggtcagcgtggaaattgaatgggagctgcagaaggaaaacagcaagcgctggaaccccgagatccagtacacctccaactactacaaatctacaagtgtggactttgctgttaatacagaaggcgtgtactctgaaccccaccccattggcacccgttacctcacccgtcccctgtaa

SEQ ID NO: 1674 - DNA, 2214 bp, Artificial Sequence
  source: /note="Description of Artificial Sequence: Synthetic polynucleotide"
atggctgccgatggttatcttccagattggctcgaggacaaccttagtgaaggaattcgcgagtggtgggcgctgaaacctggagccccgaagcccaaagccaaccagcaaaagcaggacgacggccggggtctggtgcttcctggctacaagtacctcggacccttcaacggactcgacaagggggagcccgtcaacgcggcggacgcagcggccctcgagcacgacaaggcctacgaccagcagctcaaagcgggtgacaatccgtacctgcggtataaccacgccgacgccgagtttcaggagcgtctgcaagaagatacgtcttttgggggcaacctcgggcgagcagtcttccaggccaagaagcgggttctcgaacctctcggtctggttgaggaaggcgctaagacggctcctggaaagaaacgtccggtagagcagtcgccacaagagccagactcctcctcgggcatcggcaagacaggccagcagcccgctaaaaagagactcaatttcggtcagactggcgacacagagtcagtcccagaccctcaaccaatcggagaacctcccgcagccccctcaggtgtgggatctcttacaatggcttcaggtggtggcgcaccagtggcagacaataacgaaggtgccgatggagtgggtagttcctcgggaaattggcattgcgattcccaatggctgggggacagagtcatcaccaccagcaccagaacctgggccttgcccacctacaataaccacctctacaagcaaatctccaacagcacatctggaggatcttcaaatgacaacgcctacttcggctacagcaccccctgggggtattttgactttaacagattccactgccacttttcaccacgtgactggcagcgactcatcaacaacaactggggattccgacccaagagactcaacttcaagctcttcaacatccaggtcaaggaggtcacgcagaacgaaggcaccaagaccatcgccaataacctcaccagcaccatccaggtgtttacggactcggagtaccagctgccgtacgttctcggctccgcccaccagggctgcctgcctccgttcccggcggacgtgttcatgattccccagtacggctacctaacgctcaacaacggtagtcaggccgtgggacgctcctccttctactgcctggaatactttccttcgcagatgctgagaaccggcaacaacttccagtttacttacaccttcgaggacgtgcctttccacagcagctacgcgcacagccagagcttggaccggctgatgaatcctctgattgaccagtacctgtactacttgtctcggactcaaacaacaggaggcacggcaaatacgcagactctgggcttcagccaaggtgggcctaatacaatggccaatcaggcaaagaactggctgccaggaccctgttaccgccaacaacgcgtctcaacgacaaccgggcaaaacaacaatagcaactttgcctggactgctgggaccaaataccatctgaatggaagaaattcattggctaatcctggcatcgctatggcaacacacaaagacgacaaggagcgtttttttcccagtaacgggatcctgatttttggcaaacaaaatgctgccagagacaatgcggattacagcgatgtcatgctcaccagcgaggaagaaatcaaaaccactaaccctgtggctacagaggaatacggtatcgtggcagataacttgcagcagcaaaacacggctcctcaaattggaactgtcaacagccagggggccttacccggtatggtctggcagaaccgggacgtgtacctgcagggtcccatctgggccaagattcctcacacggacggcaacttccacccgtctccgctgatgggcggctttggcctgaaacatcctccgcctcagatcctgatcaagaacacgcctgtacctgcggatcctccgaccaccttcaaccagtcaaagctgaactctttcatcacgcaatacagcaccggacaggtcagcgtggaaattgaatgggagctgcagaaggaaaacagcaagcgctggaaccccgagatccagtacacctccaactactacaaatctacaagtgtggactttgctgttaatacagaaggcgtgtactctgaaccccaccccattggcacccgttacctcacccgtcccctgtaa

SEQ ID NO: 1675 - DNA, 2214 bp, Artificial Sequence
  source: /note="Description of Artificial Sequence: Synthetic polynucleotide"
atggctgccgatggttatcttccagattggctcgaggacaaccttagtgaaggaattcgcgagtggtgggcgctgaaacctggagccccgaagcccaaagccaaccagcaaaagcaggacgacggccggggtctggtgcttcctggctacaagtacctcggacccttcaacggactcgacaagggggagcccgtcaacgcggcggacgcagcggccctcgagcacgacaaggcctacgaccagcagctcaaagcgggtgacaatccgtacctgcggtataaccacgccgacgcggagtttcaggagcgccttaaagaagatacgtcttttgggggcaacctcgggcgagcagtcttccaggccaagaagagggttctcgaaccttttggtctggttgaggaaggtgctaagacggctcctggaaagaaacgtccggtagagcagtcgccacaagagccagactcctcctcgggcatcggcaagacaggccagcagcccgctaaaaagagactcaattttggtcagactggcgactcagagtcagttccagaccctcaacctctcggagaacctccagcagcgccctctggtgtgggacctaatacaatggctgcaggcggtggcgcaccaatggcagacaataacgaaggtgccgatggagtgggtagttcctcgggaaattggcattgcgattcccaatggctggggaacagagtcatcaccaccagcacccgaacctgggccctgcccacctacaacaatcacctctacaagcaaatctccaacagcacatctggaggatcttcaaatgacaacgcctacttcggctacagcaccccctgggggtattttgacttcaacagattccactgccacttctcaccacgtgactggcagcgactcatcaacaacaactggggattccggcccaagagactcaacttcaagctcttcaacattcaggtcaaagaggttacggacaacaatggagtcaagaccatcgccaataaccttaccagcacggtccaggtcttcacggactcggagtaccagttgccgtacgtcctcggctctgcgcaccagggctgcctccctccgttcccggcggacgtgttcatgattccgcaatacggctacctgacgctcaacaacggtagccaagccgtgggacgttcatccttttactgcctggaatatttcccttctcagatgctgagaaccggcaacaacttccagtttacttacaccttcgaggacgtgcctttccacagcagctacgcgcacagccagagcttggaccggctgatgaatcctctgattgaccagtacctgtactacttgtctcggactcaaacaacaggaggcacggcaaatacgcagactctgggcttcagccaaggtgggcctaatacaatggccaatcaggcaaagaactggctgccaggaccctgttaccgccaacaacgcgtctcaacgacaaccgggcaaaacaacaatagcaactttgcctggactgctgggaccaaataccatctgaatggaagaaattcattggctaatcctggcatcgctatggcaacacacaaagacgacaaggagcgtttttttcccagtaacgggatcctgatttttggcaaacaaaatgctgccagagacaatgcggattacagcgatgtcatgctcaccagcgaggaagaaatcaaaaccactaaccctgtggctacagaggaatacggtatcgtggcagataacttgcagcagcaaaacacggctcctcaaattggaactgtcaacagccagggggccttacccggtatggtctggcagaaccgggacgtgtacctgcagggtcccatctgggccaagattcctcacacggacggcaacttccacccgtctccgctgatgggcggctttggcctgaaacatcctccgcctcagatcctgatcaagaacacgcctgtacctgcggatcctccgaccaccttcaaccagtcaaagctgaactctttcatcacgcaatacagcaccggacaggtcagcgtggaaattgaatgggagctgcagaaggaaaacagcaagcgctggaaccccgagatccagtacacctccaactactacaaatctacaagtgtggactttgctgttaatacagaaggcgtgtactctgaaccccaccccattggcacccgttacctcacccgtcccctgtaa

SEQ ID NO: 1676 - DNA, 2211 bp, Artificial Sequence
  source: /note="Description of Artificial Sequence: Synthetic polynucleotide"
atggctgccgatggttatcttccagattggctcgaggacaacctctctgagggcattcgcgagtggtgggacttgaaacctggagccccgaagcccaaagccaaccagcaaaagcaggacgacggccggggtctggtgcttcctggctacaagtacctcggacccttcaacggactcgacaggggggagcccgtcaacgcggcggacgcagcggccctcgagcacgacaaggcctacgaccagcagctcaaagcgggtgacaatccgtacctgcggtataaccacgccgacgccgagtttcaggagcgtctgcaagaagatacgtcttttgggggcaacctcgggcgagcagtcttccaggccaagaagcgggttctcgaacctctcggtctggttgaggaaggcgctaagacggctcctggaaagaaacgtccggtagagcagtcgccacaagagccagactcctcctcgggcatcggcaagacaggccagcagcccgctaaaaagagactcaattttggtcagactggcgactcagagtcagtccccgacccacaacctctcggagaacctccagcaacccccgctgctgtgggacctactacaatggcttcaggcggtggcgcaccaatggcagacaataacgaaggcgccgacggagtgggtaatgcctcaggaaattggcattgcgattccacatggctgggcgacagagtcatcaccaccagcacccgaacctgggccttgcccacctataacaaccacctctacaagcaaatctccagtgcttcaacgggggccagcaacgacaaccactacttcggctacagcaccccctgggggtattttgacttcaacagattccactgccacttctcaccacgtgactggcagcgactcatcaacaacaactggggattccggcctaagcgactcaacttcaagctcttcaacattcaggtcaaagaggttacggacaacaatggagtcaagaccatcgccaataacctcaccagcaccatccaggtgtttacggactcggagtaccagctgccgtacgttctcggctctgcccaccagggctgcctgcctccgttcccggcggacgtgttcatgattccccagtacggctacctaacactcaacaacggtagtcaggccgtgggacgctcctccttctactgcctggaatactttccttcgcagatgctgagaaccggcaacaacttccagtttacttacaccttcgaggacgtgcctttccacagcagctacgcccacagccagagcttggaccggctgatgaatcctctgattgaccagtacctgtactacttgtctcggactcaaacaacaggaggcacggcaaatacgcagactctgggcttcagccaaggtgggcctaatacaatggccaatcaggcaaagaactggctgccaggaccctgttaccgccaacaacgcgtctcaacgacaaccgggcaaaacaacaatagcaactttgcctggactgctgggaccaaataccatctgaatggaagaaattcattggctaatcctggcatcgctatggcaacacacaaagacgacaaggagcgtttttttcccagtaacgggatcctgatttttggcaaacaaaatgctgccagagacaatgcggattacagcgatgtcatgctcaccagcgaggaagaaatcaaaaccactaaccctgtggctacagaggaatacggtatcgtggcagataacttgcagcagcaaaacacggctcctcaaattggaactgtcaacagccagggggccttacccggtatggtctggcagaaccgggacgtgtacctgcagggtcccatctgggccaagattcctcacacggacggcaacttccacccgtctccgctgatgggcggctttggcctgaaacatcctccgcctcagatcctgatcaagaacacgcctgtacctgcggatcctccgaccaccttcaaccagtcaaagctgaactctttcatcacgcaatacagcaccggacaggtcagcgtggaaattgaatgggagctgcagaaggaaaacagcaagcgctggaaccccgagatccagtacacctccaactactacaaatctacaagtgtggactttgctgttaatacagaaggcgtgtactctgaaccccaccccattggcacccgttacctcacccgtcccctgtaa

SEQ ID NO: 1677 - DNA, 2211 bp, Artificial Sequence
  source: /note="Description of Artificial Sequence: Synthetic polynucleotide"
atggctgccgatggttatcttccagattggctcgaggacaacctctctgagggcattcgcgagtggtgggacttgaaacctggagccccgaagcccaaagccaaccagcaaaagcaggacgacggccggggtctggtgcttcctggctacaagtacctcggacccttcaacggactcgacaagggggagcccgtcaacgcggcggacgcagcggccctcgagcacgacaaggcctacgaccagcagctcaaagcgggtgacaatccgtacctgcggtataaccacgccgacgccgagtttcaggagcgtctgcaagaagatacgtcttttgggggcaacctcgggcgagcagtcttccaggccaagaagcgggttctcgaacctctcggtctggttgaggaaggcgctaagacggctcctggaaagaaacgtccggtagagcagtcgccacaagagccagactcctcctcgggcatcggcaagaaaggccaacagcccgccagaaaaagactcaattttggtcagactggcgactcagagtcagttccagaccctcaacctctcggagaacctcccgcagccccctcaggtgtgggatctcttacaatggcttcaggcggtggcgcaccaatggcagacaataacgaaggcgccgacggagtgggtaatgcctcaggaaattggcattgcgattccacatggctgggcgacagagtcatcaccaccagcacccgaacatgggccttgcccacttacaacaaccatctctacaagcaaatctccagtgcttcaacgggggccagcaacgacaaccactacttcggctacagcaccccctgggggtattttgatttcaacagattccactgccacttttcaccacgtgactggcaaagactcatcaacaacaactggggattccgacccaagagactcaacttcaagctctttaacattcaagtcaaagaggtcacgcagaatgaaggcaccaagaccatcgccaataaccttaccagcacggtccaggtcttcacggactcagactatcagctcccgtacgttctcggctccgcccaccagggctgcctgcctccgttcccggcggacgtgttcatgattccccagtacggctacctaacactcaacaacggtagtcaggccgtgggacgctcctccttctactgcctggaatactttccttcgcagatgctgagaaccggcaacaacttccagtttacttacacctttgaggacgttcctttccacagcagctacgctcacagccagagtctggaccgtctcatgaatcctctgattgaccagtacctgtactacttgtctcggactcaaacaacaggaggcacggcaaatacgcagactctgggcttcagccaaggtgggcctaatacaatggccaatcaggcaaagaactggctgccaggaccctgttaccgccaacaacgcgtctcaacgacaaccgggcaaaacaacaatagcaactttgcctggactgctggaaccaaataccatctgaatggaagaaattcattgtctaatcctggcatcgctatggcgacacacaaagacgacaaggagcgtttttttcccagtaacgggatcctgatttttggcaaacaaaatgctgccagagacaatgcggattacagcgatgtcatgctcaccagcgaggaagaaatcaaaaccactaaccctgtggctacagaggaatacggtatcgtggcagataacttgcagcagcaaaacacggctcctcaaattggaactgtcaacagccagggggccttacccggtatggtctggcagaaccgggacatgtacctgcagggtcccatctgggccaagattcctcacacggacggcaacttccacccgtctccgctgatgggcggctttggcctgaaacatcctccgcctcagatcctgatcaagaacacgcctgtacctgcggatcctccgaccaccttcaaccagtcaaagctgaactctttcatcacgcaatacagcaccggacaggtcagcgtggaaattgaatgggagctgcagaaggaaaacagcaagcgctggaaccccgagatccagtacacctccaactactacaaatctacaagtgtggactttgctgttaatacagaaggcgtgtactctgaaccccaccccattggcacccgttacctcacccgtcccctgtaa

SEQ ID NO: 1678 - DNA, 2211 bp, Artificial Sequence
  source: /note="Description of Artificial Sequence: Synthetic polynucleotide"
atggctgccgatggttatcttccagattggctcgaggacaacctctctgagggcattcgcgagtggtgggcgctgaaacctggagccccgaagcccaaagccaaccagcaaaagcaggacgacggccggggtctggtgcttcctggctacaagtacctcggacccttcaacggactcgacaagggggagcccgtcaacgcggcggatgcagcggccctcgagcacgacaaggcctacgaccagcagctcaaagcgggtgacaatccgtacctgcggtataaccacgccgacgccgagtttcaggagcgtctgcaggaagatacgtcttttgggggcaacctcgggcgagcagtcttccaggccaagaagagggttctcgaaccttttggtctggttgaggaaggcgctaagacggctcctggaaagaaacgtccggtagagcagtcgccacaagagccagactcctcctcgggcatcggcaagacaggccagcagcccgctaaaaagagactcaattttggtcagactggcggctcagagtcagtccccgacccacaacctctcggagaacctccagcaacccccgctgctgtgggacctactacaatggctgcaggcggtggcgcaccaatggcagacaataacgaaggcgccgacggagtgggtagttcctcgggaaattggcattgcgattccacatggctgggcgacagagtcatcaccaccagcaccagaacctgggccttgcccacctataacaaccacctctacaagcaaatctccagtgcttcaacgggggccagcaacgacaaccactacttcggctacagcaccccctgggggtattttgatttcaacagattccactgccatttctcaccacgtgactggcagcgactcatcaacaacaactggggattccggcccaagagactcaacttcaaactcttcaacattcaggtcaaagaggttacggacaacaatggagtcaagaccatcgccaataaccttaccagcacggtccaggtgtttacggactcggagtaccagctgccgtacgttctcggctctgcccaccagggctgcctccctccgttcccggcggacgtgttcatgattccgcagtacggctacctaacgctcaacaatggcagccaggcagtgggacggtcatccttttactgcctggaatatttcccttctcagatgctgagaacgggcaacaactttaccttcagctacacctttgaggaagtgcctttccacagcagctacgcgcacagccagagcctggaccggctgatgaatcctctgattgaccagtacctgtactacttgtctcggactcaaacaacaggaggcacggcaaatacgcagactctgggcttcagccaaggtgggcctaatacaatggccaatcaggcaaagaactggctgccaggaccctgttaccgccaacaacgcgtctcaacgacaaccgggcaaaacaacaatagcaactttgcctggactgctgggaccaaataccatctgaatggaagaaattcattggctaatcctggcatcgctatggcctcacacaaagacgacaaggagcgtttttttcccagtaacgggatcctgatttttggcaaacaaaatgctgccagagacaatgcggattacagcgatgtcatgctcaccagcgaggaagaaatcaaaaccactaaccctgtggctacagaggaatacggtatcgtggcagataacttgcagcagcaaaacacggctcctcaaattggaactgtcaacagccagggggccttacccggtatggtctggcagaaccgggacgtgtacctgcagggtcccatctgggccaagattcctcacacggacggcaacttccacccgtctccgctgatgggcggctttggcctgaaacatcctccgcctcagatcctgatcaagaacacgcctgtacctgcggatcctccgaccaccttcaaccagtcaaagctgaactctttcatcacgcaatacagcaccggacaggtcagcgtggaaattgaatgggagctgcagaaggaaaacagcaagcgctggaaccccgagatccagtacacctccaactactacaaatctacaagtgtggactttgctgttaatacagaaggcgtgtactctgaaccccaccccattggcacccgttacctcacccgtcccctgtaa

SEQ ID NO: 1679 - protein, 736 aa, Artificial Sequence
  source: /note="Description of Artificial Sequence: Synthetic polypeptide"
MAADGYLPDWLEDTLSEGIRQWWKLKPGPPPPKPAERHKDDSRGLVLPGYKYLGPFNGLDKGEPVNEADAAALEHDKAYDQQLKAGDNPYLKYNHADAEFQERLKEDTSFGGNLGRAVFQAKKRVLEPLGLVEEGAKTAPGKKRPVEQSPQEPDSSSGIGKTGQQPAKKRLNFGQTGDSESVPDPQPLGEPPATPAAVGPTTMASGGGAPMADNNEGADGVGSSSGNWHCDSQWLGDRVITTSTRTWALPTYNNHLYKQISSASTGASNDNHYFGYSTPWGYFDFNRFHCHFSPRDWQRLINNNWGFRPKRLNFKLFNIQVKEVTQNEGTKTIANNLTSTIQVFTDSEYQLPYVLGSAHQGCLPPFPADVFMIPQYGYLTLNNGSQAVGRSSFYCLEYFPSQMLRTGNNFQFTYTFEDVPFHSSYAHSQSLDRLMNPLIDQYLYYLSRTQTTGGTANTQTLGFSQGGPNTMANQAKNWLPGPCYRQQRVSTTTGQNNNSNFAWTAGTKYHLNGRNSLANPGIAMATHKDDKERFFPSNGILIFGKQNAARDNADYSDVMLTSEEEIKTTNPVATEEYGIVADNLQQQNTAPQIGTVNSQGALPGMVWQNRDVYLQGPIWAKIPHTDGNFHPSPLMGGFGLKHPPPQILIKNTPVPADPPTTFNQSKLNSFITQYSTGQVSVEIEWELQKENSKRWNPEIQYTSNYYKSTSVDFAVNTEGVYSEPHPIGTRYLTRPL

SEQ ID NO: 1680 - protein, 736 aa, Artificial Sequence
  source: /note="Description of Artificial Sequence: Synthetic polypeptide"
MAADGYLPDWLEDNLSEGIREWWALKPGAPKPKANQQKQDDGRGLVLPGYKYLGPFNGLDKGEPVNAADAAALEHDKAYDQQLKAGDNPYLKYNHADAEFQERLKEDTSFGGNLGRAVFQAKKRLLEPLGLVEEAAKTAPGKKRPVEQSPQEPDSSAGIGKSGAQPAKKRLNFGQTGDSESVPDPQPLGEPPATPAAVGPTTMASGGGAPMADNNEGADGVGNASGNWHCDSTWLGDRVITTSTRTWALPTYNNHLYKQISSASTGASNDNHYFGYSTPWGYFDFNRFHCHFSPRDWQRLINNNWGFRPKRLNFKLFNIQVKEVTQNEGTKTIANNLTSTIQVFTDSEYQLPYVLGSAHQGCLPPFPADVFMIPQYGYLTLNNGSQAVGRSSFYCLEYFPSQMLRTGNNFQFTYTFEDVPFHSSYAHSQSLDRLMNPLIDQYLYYLSRTQTTGGTANTQTLGFSQGGPNTMANQAKNWLPGPCYRQQRVSTTTGQNNNSNFAWTAGTKYHLNGRNSLANPGIAMATHKDDKERFFPSNGILIFGKQNAARDNADYSDVMLTSEEEIKATNPVATEEYGIVADNLQQQNTAPQIGTVNSQGALPGMVWQNRDVYLQGPIWAKIPHTDGNFHPSPLMGGFGLKHPPPQILIKNTPVPADPPTTFNQSKLNSFITQYSTGQVSVEIEWELQKENSKRWNPEIQYTSNYYKSTSVDFAVNTEGVYSEPHPIGTRYLTRPL

SEQ ID NO: 1681 - protein, 737 aa, Artificial Sequence
  source: /note="Description of Artificial Sequence: Synthetic polypeptide"
MAADGYLPDWLEDNLSEGIREWWDLKPGAPKPKANQQKQDDGRGLVLPGYKYLGPFNGLDKGEPVNAADAAALEHDKAYDQQLKAGDNPYLRYNHADAEFQERLQEDTSFGGNLGRAVFQAKKRVLEPLGLVEEGANTAPGKKRPVEQSPQEPDSSAGIGKSGAQPAKKRLNFGQTGDTESVPDPQPIGEPPAAPSGVGSLTMASGGGAPVADNNEGADGVGSSSGNWHCDSQWLGDRVITTSTRTWALPTYNNHLYKQISNSTSGGSSNDNAYFGYSTPWGYFDFNRFHCHFSPRDWQRLINNNWGFRPKRLNFKLFNIQVKEVTDNNGVKTIANNLTSTIQVFTDSEYQLPYVLGSAHQGCLPPFPADVFMIPQYGYLTLNNGSQAVGRSSFYCLEYFPSQMLRTGNNFQFTYTFEDVPFHSSYAHSQSLDRLMNPLIDQYLYYLSRTQTTGGTANTQTLGFSQGGPNTMANQAKNWLPGPCYRQQRVSTTTGQNNNSNFAWTAGTKYHLNGRNSLANPGIAMASHKDDKERFFPSNGILIFGKQNAARDNADYSDVMLTSEEEIKTTNPVATEEYGIVADNLQQQNTAPQIGTVNSQGALPGMVWQNRDVYLQGPIWAKIPHTDGNFHPSPLMGGFGLKHPPPQILIKNTPVPADPPTTFNQSKLNSFITQYSTGQVSVEIEWELQKENSKRWNPEIQYTTNYYKSTSVDFAVNTEGVYSEPHPIGTRYLTRPL

SEQ ID NO: 1682 - protein, 736 aa, Artificial Sequence
  source: /note="Description of Artificial Sequence: Synthetic polypeptide"
MAADGYLPDWLEDNLSEGIREWWALKPGAPKPKANQQKQDDGRGLVLPGYKYLGPFNGLDKGEPVNEADAAALEHDKAYDQQLKAGDNPYLRYNHADAEFQERLQEDTSFGGNLGRAVFQAKKRVLEPLGLVEEGAKTAPGKKRPVEQSPQEPDSSSGIGKTGQQPAKKRLNFGQTGDSESVPDPQPLGEPPATPAAVGPTTMASGGGAPMADNNEGADGVGNASGNWHCDSTWLGDRVITTSTRTWALPTYNNHLYKQISSASTGASNDNHYFGYSTPWGYFDFNRFHCHFSPRDWQRLINNNWGFRPKRLNFKLFNIQVKEVTQNEGTKTIANNLTSTIQVFTDSEYQLPYVLGSAHQGCLPPFPADVFMIPQYGYLTLNNGSQAVGRSSFYCLEYFPSQMLRTGNNFQFTYTFEDVPFHSSYAHSQSLDRLMNPLIDQYLYYLSRTQTTGGTANTQTLGFSQGGPNTMANQAKNWLPGPCYRQQRVSTTTGQNNNSNFAWTAGTKYHLNGRNSLANPGIAMATHKDDKERFFPSNGILIFGKQNAARDNADYSDVMLTSEEEIKTTNPVATEEYGIVADNLQQQNTAPQIGTVNSQGALPGMVWQNRDVYLQGPIWAKIPHTDGNFHPSPLMGGFGLKHPPPQILIKNTPVPADPPTTFNQSKLNSFITQYSTGQVSVEIEWELQKENSKRWNPEIQYTSNYYKSTSVDFAVNTEGVYSEPHPIGTRYLTRPL

SEQ ID NO: 1683 - protein, 736 aa, Artificial Sequence
  source: /note="Description of Artificial Sequence: Synthetic polypeptide"
MAADGYLPDWLEDNLSEGIREWWALKPGAPKPKANQQKQDDGRGLVLPGYKYLGPFNGLDKGEPVNEADAAALEHDKAYDQQLKAGDNPYLRYNHADAEFQERLQEDTSFGGNLGRAVFQAKKRVLEPFGLVEEGAKTAPGKKRPVEQSPQEPDSSSGIGKTGQQPAKKRLNFGQTGDSESVPDPQPLGEPPATPAAVGPTTMASGGGAPMADNNEGADGVGNASGNWHCDSQWLGDRVITTSTRTWALPTYNNHLYKQISSASTGASNDNHYFGYSTPWGYFDFNRFHCHFSPRDWQRLINNNWGFRPKRLNFKLFNIQVKEVTDNNGVKTIANNLTSTVQVFSDSEYQLPYVLGSAHQGCLPPFPADVFMIPQYGYLTLNNGSQAVGRSSFYCLEYFPSQMLRTGNNFQFTYTFEDVPFHSSYAHSQSLDRLMNPLIDQYLYYLSRTQTTGGTANTQTLGFSQGGPNTMANQAKNWLPGPCYRQQRVSTTTGQNNNSNFAWTAGTKYHLNGRNSLANPGIAMATHKDDKERFFPSNGILIFGKQNAARDNADYSDVMLTSEEEIKTTNPVATEEYGIVADNLQQQNTAPQIGTVNSQGALPGMVWQNRDVYLQGPIWAKIPHTDGNFHPSPLMGGFGLKHPPPQILIKNTPVPADPPTTFNQSKLNSFITQYSTGQVSVEIEWELQKENSKRWNPEIQYTSNYYKSTSVDFAVNTEGVYSEPHPIGTRYLTRPL

SEQ ID NO: 1684 - protein, 736 aa, Artificial Sequence
  source: /note="Description of Artificial Sequence: Synthetic polypeptide"
MAADGYLPDWLEDTLSEGIRQWWKLKPGPPPPKPAERHKDDSRGLVLPGYKYLGPFNGLDKGEPVNEADAAALEHDKAYDRQLDSGDNPYLKYNHADAEFQERLKEDTSFGGNLGRAVFQAKKRVLEPFGLVEEGAKTAPGKKRPVEQSPQEPDSSSGIGKTGQQPAKKRLNFGQTGDSESVPDPQPLGEPPATPAAVGPTTMASGGGAPMADNNEGADGVGNASGNWHCDSTWLGDRVITTSTRTWALPTYNNHLYKQISSASTGASNDNHYFGYSTPWGYFDFNRFHCHFSPRDWQRLINNNWGFRPKRLNFKLFNIQVKEVTDNNGVKTIANNLTSTVQVFTDSDYQLPYVLGSAHEGCLPPFPADVFMIPQYGYLTLNNGSQAVGRSSFYCLEYFPSQMLRTGNNFQFTYTFEDVPFHSSYAHSQSLDRLMNPLIDQYLYYLSRTQTTGGTANTQTLGFSQGGPNTMANQAKNWLPGPCYRQQRVSTTTGQNNNSNFAWTAGTKYHLNGRNSLANPGIAMATHKDDKERFFPSNGILIFGKQNAARDNADYSDVMLTSEEEIKTTNPVATEEYGIVADNLQQQNTAPQIGTVNSQGALPGMVWQNRDVYLQGPIWAKIPHTDGNFHPSPLMGGFGLKHPPPQILIKNTPVPADPPTTFNQSKLNSFITQYSTGQVSVEIEWELQKENSKRWNPEIQYTSNYYKSTSVDFAVNTEGVYSEPHPIGTRYLTRNL

SEQ ID NO: 1685 - protein, 738 aa, Artificial Sequence
  source: /note="Description of Artificial Sequence: Synthetic polypeptide"
MAADGYLPDWLEDNLSEGIREWWDLKPGAPKPKANQQKQDDGRGLVLPGYKYLGPFNGLDKGEPVNAADAAALEHDKAYDQQLQAGDNPYLRYNHADAEFQERLQEDTSFGGNLGRAVFQAKKRVLEPLGLVEEGAKTAPGKKRPVEPSPQRSPDSSTGIGKKGQQPARKRLNFGQTGDSESVPDPQPLGEPPAAPSGVGPNTMAAGGGAPMADNNEGADGVGSSSGNWHCDSQWLGDRVITTSTRTWALPTYNNHLYKQISNSTSGGSSNDNAYFGYSTPWGYFDFNRFHCHFSPRDWQRLINNNWGFRPKRLSFKLFNIQVKEVTQNEGTKTIANNLTSTIQVFTDSEYQLPYVLGSAHQGCLPPFPADVFMIPQYGYLTLNNGSQAVGRSSFYCLEYFPSQMLRTGNNFTFSYTFEDVPFHSSYAHSQSLDRLMNPLIDQYLYYLSRTQTTGGTANTQTLGFSQGGPNTMANQAKNWLPGPCYRQQRVSTTTGQNNNSNFAWTAGTKYHLNGRNSLANPGIAMATHKDDKERFFPSNGILIFGKQNAARDNADYSDVMLTSEEEIKTTNPVATEEYGIVADNLQQQNTAPQIGTVNSQGALPGMVWQNRDVYLQGPIWAKIPHTDGNFHPSPLMGGFGLKHPPPQILIKNTPVPADPPTTFNQSKLNSFITQYSTGQVSVEIEWELQKENSKRWNPEIQYTSNYYKSTSVDFAVNTEGVYSEPHPIGTRYLTRPL

SEQ ID NO: 1686 - protein, 737 aa, Artificial Sequence
  source: /note="Description of Artificial Sequence: Synthetic polypeptide"
MAADGYLPDWLEDNLSEGIREWWDLKPGAPKPKANQQKQDDGRGLVLPGYKYLGPFNGLDKGEPVNAADAAALEHDKAYDQQLKAGDNPYLRYNHADAEFQERLQEDTSFGGNLGRAVFQAKKRVLEPFGLVEEGAKTAPGKKRPVEQSPQEPDSSSGIGKTGQQPAKKRLNFGQTGDSESVPDPQPLGEPPATPAAVGPTTMASGGGAPMQDNNEGADGVGSSSGNWHCDSTWLGDRVITTSTRTWALPTYNNHLYKQISNGTSGGATNDNTYFGYSTPWGYFDFNRFHCHFSPRDWQRLINNNWGFRPKRLNFKLFNIQVKEVTQNEGTKTIANNLTSTIQVFTDSEYQLPYVLGSAHQGCLPPFPADVFMIPQYGYLTLNNGSQAVGRSSFYCLEYFPSQMLRTGNNFTFSYTFEDVPFHSSYAHSQSLDRLMNPLIDQYLYYLSRTQTTGGTANTQTLGFSQGGPNTMANQAKNWLPGPCYRQQRVSTTTGQNNNSNFAWTAGTKYHLNGRNSLANPGIAMATHKDDKERFFPSNGILIFGKQNAARDNADYSDVMLTSEEEIKTTNPVATEEYGIVADNLQQQNTAPQIGTVNSQGALPGMVWQNRDVYLQGPIWAKIPHTDGNFHPSPLMGGFGLKHPPPQILIKNTPVPADPPTTFNQSKLNSFITQYSTGQVSVEIEWELQKENSKRWNPEIQYTSNYYKSTSVDFAVNTEGVYSEPHPIGTRYLTRPL

SEQ ID NO: 1687 - protein, 736 aa, Artificial Sequence
  source: /note="Description of Artificial Sequence: Synthetic polypeptide"
MAADGYLPDWLEDNLSEGIREWWALKPGAPKPKANQQKQDDGRGLVLPGYKYLGPFNGLDKGEPVNAADAAALEHDKAYDQQLKAGDNPYLRYNHADAEFQERLQEDTSFGGNLGRAVFQAKKRVLEPLGLVEEGAKTAPGKKRPVEQSPQEPDSSSGIGKTGQQPAKKRLNFGQTGDSESVPDPQPLGEPPATPAAVGPTTMASGGGAPMADNNEGADGVGSSSGNWHCDSTWLGDRVITTSTRTWALPTYNNHLYKQISSASTGASNDNHYFGYSTPWGYFDFNRFHCHFSPRDWQRLINNNWGFRPKRLNFKLFNIQVKEVTDNNGVKTIANNLTSTVQVFTDSDYQLPYVLGSAHEGCLPPFPADVFMIPQYGYLTLNNGSQAVGRSSFYCLEYFPSQMLRTGNNFTFSYTFEDVPFHSSYAHSQSLDRLMNPLIDQYLYYLSRTQTTGGTANTQTLGFSQGGPNTMANQAKNWLPGPCYRQQRVSTTTGQNNNSNFAWTAGTKYHLNGRNSLANPGIAMATHKDDKERFFPSNGILIFGKQNAARDNADYSDVMLTSEEEIKTTNPVATEEYGIVADNLQQQNTAPQIGTVNSQGALPGMVWQNRDVYLQGPIWAKIPHTDGNFHPSPLMGGFGLKHPPPQILIKNTPVPADPPTTFNQSKLNSFITQYSTGQVSVEIEWELQKENSKRWNPEIQYTSNYYKSTSVDFAVNTEGVYSEPHPIGTRYLTRPL

SEQ ID NO: 1688 - protein, 737 aa, Artificial Sequence
  source: /note="Description of Artificial Sequence: Synthetic polypeptide"
MAADGYLPDWLEDNLSEGIREWWDLKPGAPKPKANQQKQDDGRGLVLPGYKYLGPFNGLDKGEPVNAADAAALEHDKAYDQQLKAGDNPYLRYNHADAEFQERLQEDTSFGGNLGRAVFQAKKRVLEPLGLVEEGAKTAPGKKRPVEPSPQRSPDSSTGIGKKGQQPARKRLNFGQTGDSESVPDPQPLGEPPATPAAVGPTTMASGGGAPMADNNEGADGVGNASGNWHCDSTWLGDRVITTSTRTWALPTYNNHLYKQISSASTGASNDNHYFGYSTPWGYFDFNRFHCHFSPRDWQRLINNNLGSRPKRLNFKLFIIQVKEVTTNDGVTTIANNLTSTVQVFSDSEYQLPYVLGSAHQGCLPPFPADVFMIPQYGYLTLNNGSQAVGRSSFYCLEYFPSQMLRTGNNFTFSYTFEDVPFHSSYAHSQSLDRLMNPLIDQYLYYLNRTQNQSGSAQNKDLLFSRGSPAGMSVQPKNWLPGPCYRQQRVSKTKTDNNNSNFTWTGASKYNLNGRESIINPGTAMASHKDDKDKFFPMSGVMIFGKESAGASNTALDNVMITDEEEIKATNPVATERFGTVAVNLQSSSTDPATGDVHVMGALPGMVWQDRDVYLQGPIWAKIPHTDGHFHPSPLMGGFGLKHPPPQILIKNTPVPANPPAEFSATKFASFITQYSTGQVSVEIEWELQKENSKRWNPEVQYTSNYAKSANVDFTVDNNGLYTEPRPIGTRYLTRPL

SEQ ID NO: 1689 - protein, 736 aa, Artificial Sequence
  source: /note="Description of Artificial Sequence: Synthetic polypeptide"
MAADGYLPDWLEDNLSEGIREWWALKPGAPKPKANQQKQDDGRGLVLPGYKYLGPFNGLDKGEPVNAADAAALEHDKAYDQQLKAGDNPYLRYNHADAEFQERLQEDTSFGGNLGRAVFQAKKRLLEPLGLVEEAAKTAPGKKRPVEQSPQEPDSSSGIGKTGQQPAKKRLNFGQTGDSESVPDPQPIGEPPATPAAVGPTTMASGGGAPMADNNEGADGVGNSSGNWHCDSTWLGDRVITTSTRTWALPTYNNHLYKQISSASTGASNDNHYFGYSTPWGYFDFNRFHCHFSPRDWQRLINNNWGFRPKRLNFKLFNIQVKEVTQNEGTKTIANNLTSTIQVFTDSEYQLPYVLGSAHQGCLPPFPADVFMIPQYGYLTLNNGSQAVGRSSFYCLEYFPSQMLRTGNNFTFSYTFEDVPFHSSYAHSQSLDRLMNPLIDQYLYYLSRTQTTGGTANTQTLGFSQGGPNTMANQAKNWLPGPCYRQQRVSTTTGQNNNSNFAWTAGTKYHLNGRNSLANPGIAMATHKDDKERFFPSNGILIFGKQNAARDNADYSDVMLTSEEEIKTTNPVATEEYGIVADNLQQQNTAPQIGTVNSQGALPGMVWQNRDVYLQGPIWAKIPHTDGNFHPSPLMGGFGLKHPPPQILIKNTPVPADPPTTFNQSKLNSFITQYSTGQVSVEIEWELQKENSKRWNPEIQYTSNYYKSTSVDFAVNTEGVYSDPHPIGTRYLTRPL

SEQ ID NO: 1690 - protein, 736 aa, Artificial Sequence
  source: /note="Description of Artificial Sequence: Synthetic polypeptide"
MAADGYLPDWLEDNLSEGIREWWALKPGAPKPKANQQEQDDGRGLVLPGYKYLGPFNGLDKGEPVNAADAAALEHDKAYDQQLKAGDNPYLRYNHADAEFQERLQEDTSFGGNLGRAVFQAKKRVLEPFGLVEEGAKTAPGKKRPVEQSPQEPDSSSGIGKTGQQPAKKRLNFGQTGDSESVPDPQPLGEPPAAPSGVGPNTMAAGGGAPMADNNEGADGVGSSSGNWHCDSTWLGDRVITTSTRTWALPTYNNHLYKQISSASTGASNDNHYFGYSTPWGYFDFNRFHCHFSPRDWQRLINNNWGFRPKRLNFKLFNIQVKEVTQNEGTKTIANNLTSTIQVFTDSEYQLPYVLGSAHQGCLPPFPADVFMIPQYGYLTLNNGSQAVGRSSFFCLEYFPSQMLRTGNNFTFSYTFEDVPFHSSYAHSQSLDRLMNPLIDQYLYYLSRTQTTGGTANTQTLGFSQGGPNTMANQAKNWLPGPCYRQQRVSTTTGQNNNSNFAWTAGTKYHLNGRNSLANPGIAMATHKDDKERFFPSNGILIFGKQNAARDNADYSDVMLTSEEEIKTTNPVATEEYGIVADNLQQQNTAPQIGTVNSQGALPGMVWQNRDVYLQGPIWAKIPHTDGNFHPSPLMGGFGLKHPPPQILIKNTPVPADPPTTFNQSKLNSFITQYSTGQVSVEIEWELQKENSKRWNPEIQYTSNYYKSTSVDFAVNTEGVYSEPHPIGTRYLTRPL

SEQ ID NO: 1691 - protein, 736 aa, Artificial Sequence
  source: /note="Description of Artificial Sequence: Synthetic polypeptide"
MAADGYLPDWLEDNLSEGIREWWDLKPGAPKPKANQQKQDDGRGLVLPGYKYLGPFNGLDKGEPVNAADAAALEHDKAYDQQLKAGDNPYLRYNHADAEFQERLQEDTSFGGNLGRAVFQAKKRVLEPLGLVEEGAKTAPGKKRPVEQSPQEPDSSSGIGKTGQQPAKKRLNFGQTGDSESVPDPQPLGEPPATPAAVGPTTMASGGGAPMADNNEGADGVGNASGNWHCDSTWLGDRVITTSTRTWALPTYNNHLYKQISSASTGASNDNHYFGYSTPWGYFDFNRFHCHFSPRDWQRLINNNWGFRPKRLNFKLFNIQVKEVTTNDGVTTIANNLTSTVQVFSDSEYQLPYVLGSAHQGCLPPFPADVFMIPQYGYLTLNNGSQAVGRSSFYCLEYFPSQMLRTGNNFTFSYTFEDVPFHSSYAHSQSLDRLMNPLIDQYLYYLNRTQNQSGSAQNKDLLFSRGSPAGMSVQPKNWLPGPCYRQQRVSKTKTDNNNSNFTWTGASKYNLNGRESIINPGTAMASHKDDKDKFFPMSGVMIFGKESAGASNTALDNVMITDEEEIKATNPVATERFGTVAVNLQNSSTDPATGDVHVMGALPGMVWQDRDVYLQGPIWAKIPHTDGHFHPSPLMGGFGLKHPPPQILIKNTPVPANPPAEFSATKFASFITQYSTGQVSVEIEWELQKENSKRWNPEVQYTSNYAKSANVDFTVDNNGLYTVPRPIGTRYLTRPL

SEQ ID NO: 1692 - protein, 736 aa, Artificial Sequence
  source: /note="Description of Artificial Sequence: Synthetic polypeptide"
MAADGYLPDWLEDNLSEGIREWWALKPGAPKPKANQQKQDDGRGLVLPGYKYLGPFNGLDKGEPVNAADAAALEHDKAYDQQLKAGDNPYLRYNHADAEFQERLQEDTSFGGNLGRAVFQAKKRLLEPLGLVEEGAKTAPGKKRPVEQSPQEPDSSSGIGKTGEQPAKKRLNFGQTGDSESVPDPQPLGEPPATPAAVGPTTMASGGGAPMADNNEGADGVGSASGNWHCDSTWLGDRVITTSTRTWALPTYNNHLYKQISSASTGASNDNHYFGYSTPWGYFDFNRFHCHFSPRDWQRLINNNWGFRPKRLNFKLFNIQVKEVTDNNGVKTIANNLTSTIQVFTDSEYQLPYVLGSAHQGCLPPFPADVFMIPQYGYLTLNNGSQAVGRSSFYCLEYFPSQMLRTGNNFPFSYTFEDVPFHSSYAHSQSLDRLMNPLIDQYLYYLSRTQTTGGTANTQTLGFSQGGPNTMANQAKNWLPGPCYRQQRVSTTTGQNNNSNFAWTAGTKYHLNGRNSLANPGIAMATHKDDKERFFPSNGILIFGKQNAARDNADYSDVMLTSEEEIKTTNPVATEEYGIVADNLQQQNTAPQIGTVNSQGALPGMVWQNRDVYLQGPIWAKIPHTDGNFHPSPLMGGFGLKHPPPQILIKNTPVPADPPTTFNQSKLNSFITQYSTGQVSVEIEWELQKENSKRWNPEIQYTSNYYKSTSVDFAVNTEGVYSEPHPIGTRYLTRPL

SEQ ID NO: 1693 - protein, 736 aa, Artificial Sequence
  source: /note="Description of Artificial Sequence: Synthetic polypeptide"
MAADGYLPDWLEDNLSEGIREWWALKPGAPKPKANQQKQDDGRGLVLPGYKYLGPFNGLDKGEPVNAADAAALEHDKAYDQQLKAGDNPYLRYNHADAEFQERLQEDTSFGGNLGRAVFQAKKRVLEPLGLVEEGAKTAPGKKRPVEQSPQEPDSSSGIGKTGQQPAKKRLNFGQTGDSESVPDPQPLGEPPATPAAVGPTTMASGGGAPMADNNEGADGVGSSSGNWHCDSQWLGDRVITTSTRTWALPTYNNHLYKQISSASTGASNDNHYFGYSTPWGYFDFNRFHCHFSPRDWQRLINNNWGFRPKRLNFKLFNIQVKEVTDNNGVKTIANNLTSTVQVFTDSEYQLPYVLGSAHQDCLPPFPADVFMIPQYGYLTLNNGSQAVGRSSFYCLEYFPSQMLRTGNNFTFSYTFEDVPFHSSYAHSQSLDRLMNPLIDQYLYYLSRTQTTGGTANTQTLGFSQGGPNTMANQAKNWLPGPCYRQQRVSTTTGQNNNSNFAWTAGTKYHLNGRNSLANPGIAMATHKDDKERFFPSNGILIFGKQNAARDNADYSDVMLTSEEEIKTTNPVATEEYGIVADNLQQQNTAPQIGTVNSQGALPGMVWQNRDVYLQGPIWAKIPHTDGNFHPSPLMGGFGLKHPPPQILIKNTPVPADPPTTFNQSKLNSFITQYSTGQVSVEIEWELQKENSKRWNPEIQYTSNYYKSTSVDFAVNTEGVYSEPHPIGTRYLTRPL

SEQ ID NO: 1694 - protein, 735 aa, Artificial Sequence
  source: /note="Description of Artificial Sequence: Synthetic polypeptide"
MAADGYLPDWLEDNLSEGIREWWDLKPGAPKPKANQQKQDDGRGLVLPGYKYLGPFNGLDKGEPVNAADAAALEHDKAYDQQLKAGDNPYLRYNHADAEFQERLQEDTSFGGNLGRAVFQAKKRVLEPLGLVEEGAKTAPGKKRPVEQSPQEPDSSSGIGKTGQQPAKKRLNFGQTGDSESVPDPQPLGEPPATPAAVGPTTMASGGGAPMADNNEGADGVGNASGNWHCDSTWLGDVITTSTRTWALPTYNNHLYKQISSASTGASNDNHYFGYSTPWGYFDFNRFHCHFSPRDWQRLINNNWGFRPKRLNFKLFNIQVKEVTQNEGTKTIANNLTSTIQVFTDSEYQLPYVLGSAHQGCLPPFPADVFMIPQYGYLTLNNGSQAVGRSSFYCLEYFPSQMLRTGNNFQFTYTFEDVPFHSSYAHSQSLDRLMNPLIDQYLYYLSRTQTTGGTANTQTLGFSQGGPNTMANQAKNWLPGPCYRQQRVSTTTGQNNNSNFAWTAGTKYHLNGRNSLANPGIAMATHKDDKERFFPSNGILIFGKQNAARDNADYSDVILTSEEEIKTTNPVATEEYGIVADNLQQQNTAPQIGTVNSQGALPGMVWQNRDVYLQGPIWAKIPHTDGNFHPSPLMGGFGLKHPPPQILIKNTPVPADPPTTFNQSKLNSFITQYSTGQVSVEIEWELQKENSKRWNPEIQYTSNYYKSTSVDFAVNTEGVYSEPHPIGTRYLTRPL

SEQ ID NO: 1695 - protein, 736 aa, Artificial Sequence
  source: /note="Description of Artificial Sequence: Synthetic polypeptide"
MAADGYLPDWLEDTLSEGIRQWWKLKPGPPPPKPAERHKDDSRGLVLPGYKYLGPFNGLDKGEPVNEADAAALEHDKAYDRQLDSGDNPYLKYNHADAEFQERLKEDTSFGGNLGRAVFQAKKRVLEPFGLVEEGAKTAPGKKRPVEQSPQEPDSSSGIGKTGQQPAKKRLNFGQTGDSESVPDPQPLGEPPATPAAVGPTTMASGGGAPMADNNEGADGVGNASGNWHCDSTWLGDRVITTSTRTWALPTYNNHLYKQISSTSTGASNDNHYFGYSTPWGYFDFNRFHCHFSPRDWQRLINNNWGFRPKRLNFKLFNIQVKEVTDNNGVKTIANNLTSTVQVFTDSEYQLPYVLGSAHQGCLPPFPADVFMIPQYGYLTLNNGSQAVGRSSFYCLEYFPSQMLRTGNNFTFSYTFEDVPFHSSYAHSQSLDRLMNPLIDQYLYYLSRTQTTGGTANTQTLGFSQGGPNTMANQAKNWLPGPCYRQQRVSTTTGQNNNSNFAWTAGTKYHLNGRNSLANPGIAMATHKDDKERFFPSNGILIFGKQNAARDNADYSDVMLTSEEEIKTTNPVATEEYGIVADNLQQQNTAPQIGTVNSQGALPGMVWQNRDVYLQGPIWAKIPHTDGNFHPSPLMGGFGLKHPPPQILIKNTPVPADPPTTFNQSKLNSFITQYSTGQVSVEIEWELQKENSKRWNPEIQYTSNYYKSTSVDFAVNTEGVYSEPHPIGTRYLTRPL

SEQ ID NO: 1696 - protein, 735 aa, Artificial Sequence
  source: /note="Description of Artificial Sequence: Synthetic polypeptide"
MAADGYLPDWLEDNLSEGIREWWDLKPGAPKPKANQQKQDDGRGLVLPGYKYLGPFNGLDKGEPVNAADAAALEHDKAYDRQLDSGDNPYLRYNHADAEFQERLKEDTSFGGNLGRAVFQAKKRVLEPFGLVEEGAKTAPGKKRPVEQSPQEPDSSSGIGKTGQQPAKKRLNFGQTGDSESVPDPQPLGEPPATPAAVGPTTMASGGGAPMADNNEGADGVGNASGNWHCDSTWLGDRVITTSTRTWALPTYNNHLYKQISSASTGASNDNHYFGYSTPWGYFDFNRFHCHFSPRDWQRLINNNWGFRPKRLNFKLFNIQVKEVTQNEGTKTIANNLTSTIQVFTDSEYQLPYVLGSAHQGCLPPFPADVFMIPQYGYLTLNNGSQAVGRSSFYCLEYFPSQMLRTGNNFQFTYTFEDVPFHSSYAHSQSLDRLMNPLIDQYLYYLSRTQTTGGTANTQTLGFSQGGPNTMANQAKNWLPGPCYRQQRVSTTTGQNNNSNFAWTAGTKYHLNGRNSLANPGIAMATHKDDRSVFFQYRDPDFGKQNAARDNADYSDVMLTSEEEIKTTNPVATEEYGIVADNLQQQNTAPQIGTVNSQGALPGMVWQNRDVYLQGPIWAKIPHTDGNFHPSPLMGGFGLKHPPPQILIKNTPVPADPPTTFNQSKLNSFITQYSTGQVSVEIEWELQKENSKRWNPEIQYTSNYYKSTSVDFAVNTEGVYSEPHPIGTRYLTRPL

SEQ ID NO: 1697 - protein, 736 aa, Artificial Sequence
  source: /note="Description of Artificial Sequence: Synthetic polypeptide"
MAADGYLPDWLEDNLSEGIREWWALKPGAPKPKANQQKQDDGRGLVLPGYKYLGPFNGLDKGEPVNAADAAALEHDKAYDQQLKAGDNPYLKYNHADAEFQERLQGDTSFGGNLGRAVFQAKKRVLEPLGLVEEAAKTAPGKKRPVEQSPQEPDSSAGIGKSGAQPAKKRLNFGQTGDTESVPDPQPLGEPPAAPSGVGPNTMAAGGGAPMADNNEGADGVGSSSGNWHCDSQWLGDRVITTSTRTWALPTYNNHLYKQISSASTGASNDNHYFGYSTPWGYFDFNRFHCHFSPRDWQRLINNNWGFRPKRLNFKLFNIQVKEVTDNNGVKTIANNLTSTVQVFTDSDYQLPYVLGSAHEGCLPPFPADVFMIPQYGYLTLNNGSQAVGRSSFYCLEYFPSQMLRTGNNFQFTYTFEDVPFHSSYAHSQSLDRLMNPLIDQYLYYLSRTQTTGGTANTQTLGFSQGGPNTMANQAKNWLPGPCYRQQRVSTTTGQNNNSNFAWTAGTKYHLNGRNSLANPGIAMATHKDDKERFFPSNGILIFGKQNAARDNADYSDVMLTSEEEIKTTNPVATEEYGIVADNLQQQNTAPQIGTVNSQGALPGMVWQNRDVYLQGPIWAKIPHTDGNFHPSPLMGGFGLKHPPPQILIKNTPVPADPPTTFNQSKLNSFITQYSTGQVSVEIEWELQKENSKRWNPEIQYTSNYYKSTSVDFAVNTEGVYSEPHPIGTRYLTRPL

SEQ ID NO: 1698 - protein, 736 aa, Artificial Sequence
  source: /note="Description of Artificial Sequence: Synthetic polypeptide"
MAADGYLPDWLEDTLSEGIRQWWKLKPGPPPPKPAERHKDDSRGLVLPGYKYLGPFNGLDKGEPVNEADAAALEHDKAYDRQLDSGDNPYLKYNHADAEFQERLKEDTSFGGNLGRAVFQAKKRVLEPFGLVEEAAKTAPGKKRPVEQSPQEPDSSSGIGKTGQQPAKKRLNFGQTGDSESVPDPQPLGEPPATPAAVGPTTMASGGGAPMADNNEGADGVGNASGNWHCDSTWLGDRVITTSTRTWALPTYNNHLYKQISSASTGASNDNHYFGYSTPWGYFDFNRFHCHFSPRDWQRLINNNWGFRPKRLNFKLFNIQVKEVTDNNGVKTIANNLTSTVQVFTDSDYQLPYVLGSAHEGCLPPFPADVFMIPQYGYLTLNNGSQAVGRSSFYCLEYFPSQMLRTGNNFTFSYTFEDVPFHSSYAHSQSLDRLMNPLIDQYLYYLSRTQTTGGTANTQTLGFSQGGPNTMANQAKNWLPGPCYRQQRVSTTTGQNNNSNFAWTAGTKYHLNGRNSLANPGIAMATHKDDKERFFPSNGILIFGKQNAARDNADYSDVMLTSEEEIKTTNPVATEEYGIVADNLQQQNTAPQIGTVNSQGALPGMVWQNRDVYLQGPIWAKIPHTDGNFHPSPLMGGFGLKHPPPQILIKNTPVPADPPTTFNQSKLNSFITQYSTGQVSVEIEWELQKENSKRWNPEIQYTSNYYKSTSVDFAVNTEGVYSEPHPIGTRYLTRPL

SEQ ID NO: 1699 - protein, 736 aa, Artificial Sequence
  source: /note="Description of Artificial Sequence: Synthetic polypeptide"
MAADGYLPDWLEDNLSEGIREWWALKPGAPKPKANQQKQDDGRGLVLPGYKYLGPFNGLDKGEPVNAADAAALEHDKAYDQQLKAGDNPYLRYNHADAEFQERLQEDTSFGGNLGRAVFQAKKRVLEPLGLVEEGAKTAPGKKRPVEQSPQEPDSSSGIGKTGQQPAKKRLNFGQTGDSESVPDPQPLGEPPATPAAVGPTTMASGGGAPMADNNEGADGVGSSSGNWHCDSTWLGDRVITTSTRTWALPTYNNHLYKQISSASTGASNDNHYFGYSTPWGYFDFNRFHCHFSPRDWQRLINNNWGFRPKRLNFKLFNIQVKEVTDNNGVKTIANNLTSTVQVFTDSEYQLPYVLGSAHQGCLPPFPADVFMIPQYGYLTLNNGSQAVGRSSFYCLEYFPSQMLRTGNNFTFSYTFEDVPFHSSYAHSQSLDRLMNPLIDQYLYYLSRTQTTGGTANTQTLGFSQGGPNTMANQAKNWLPGPCYRQQRVSTTTGQNNNSNFAWTAGTKYHLNGRNSLANPGIAMATHKDDKERFFPSNGILIFGKQNAARDNADYSDVMLTSEEEIKTTNPVATEEYGIVADNLQQQNTAPQIGTVNSQGALPGMVWQNRDVYLQGPIWAKIPHTDGNFHPSPLMGGFGLKHPPPQILIKNTPVPADPPTTFNQSKLNSFITQYSTGQVSVEIEWELQKENSKRWNPEIQYTSNYYKSTSVDFAVNTEGVYSEPHPIGTRYLTRPL

SEQ ID NO: 1700 - protein, 737 aa, Artificial Sequence
  source: /note="Description of Artificial Sequence: Synthetic polypeptide"
MAADGYLPDWLEDNLSEGIREWWALKPGAPKPKANQQKQDDGRGLVLPGYKYLGPFNGLDKGEPVNAADAAALEHDKAYDQQLKAGDNPYLRYNHADAEFQERLQEDTSFGGNLGRAVFQAKKRVLEPLGLVEEGAKTAPGKKRPVEQSPQEPDSSSGIGKTGQQPAKKRLNFGQTGDTESVPDPQPIGEPPAAPSGVGSLTMASGGGAPVADNNEGADGVGSSSGNWHCDSQWLGDRVITTSTRTWALPTYNNHLYKQISNSTSGGSSNDNAYFGYSTPWGYFDFNRFHCHFSPRDWQRLINNNWGFRPKRLNFKLFNIQVKEVTQNEGTKTIANNLTSTIQVFTDSEYQLPYVLGSAHQGCLPPFPADVFMIPQYGYLTLNNGSQAVGRSSFYCLEYFPSQMLRTGNNFQFTYTFEDVPFHSSYAHSQSLDRLMNPLIDQYLYYLSRTQTTGGTANTQTLGFSQGGPNTMANQAKNWLPGPCYRQQRVSTTTGQNNNSNFAWTAGTKYHLNGRNSLANPGIAMATHKDDKERFFPSNGILIFGKQNAARDNADYSDVMLTSEEEIKTTNPVATEEYGIVADNLQQQNTAPQIGTVNSQGALPGMVWQNRDVYLQGPIWAKIPHTDGNFHPSPLMGGFGLKHPPPQILIKNTPVPADPPTTFNQSKLNSFITQYSTGQVSVEIEWELQKENSKRWNPEIQYTSNYYKSTSVDFAVNTEGVYSEPHPIGTRYLTRPL

SEQ ID NO: 1701 - protein, 736 aa, Artificial Sequence
  source: /note="Description of Artificial Sequence: Synthetic polypeptide"
MAADGYLPDWLEDNLSEGIREWWALKPGAPKPKANQQKQDDGRGLVLPGYKYLGPFNGLDKGEPVNAADAAALEHDKAYDQQLKAGDNPYLKYNHADAEFQERLQGDTSFGGNLGRAVFQAKKRVLEPLGLVEEAAKTAPGKKRPVEQSPQEPDSSAGIGKSGAQPAKKRLNFGQTGDTESVPDPQPLGEPPAAPSGVGPNTMAAGGGAPMADNNEGADGVGSSSGNWHCDSQWLGDRVITTSTRTWALPTYNNHLYKQISSASTGASNDNHYFGYSTPWGYFDFNRFHCHFSPRDWQRLINNNWGFRPKRLNFKLFNIQVKEVTDNNGVKTIANNLTSTVQVFTDSEYQLPYVLGSAHQGCLPPFPADVFMIPQYGYLTLNNGSQAVGRSSFYCLEYFPSQMLRTGNNFTFSYTFEDVPFHSSYAHSQSLDRLMNPLIDQYLYYLSRTQTTGGTANTQTLGFSQGGPNTMANQAKNWLPGPCYRQQRVSTTTGQNNNSNFAWTAGTKYHLNGRNSLANPGIAMATHKDDKERFFPSNGILIFDKQNAARDNADYSDVMLTSEEEIKTTNPVATEEYGIVADNLQQQNTAPQIGTVNSQGALPGMVWQNRDVYLQGPIWAKIPHTDGNFHPSPLMGGFGLKHPPPQILIKNTPVPADPPTTFNQSKLNSFITQYSTGQVSVEIEWELQKENSKRWNPEIQYTSNYYKSTSVDFAVNTEGVYSEPHPIGTRYLTRPL

SEQ ID NO: 1702 - protein, 736 aa, Artificial Sequence
  source: /note="Description of Artificial Sequence: Synthetic polypeptide"
MAADGYLPDWLEDTLSEGIRQWWKLKPGPPPPKPAERHKDDSRGLVLPGYKYLGPFNGLDKGEPVNEADAAALEHDKAYDRQLDSGDNPYLKYNHADAEFQERLKEDTSFGGNLGRAVFQAKKRVLEPLGLVEEPVKTAPGKKRPVEHSPVEPDSSSGTGKAGQQPARKRLNFGQTGDSESVPDPQPLGEPPATPAAVGPNTMATGSGAPMADNNEGADGVGNSSGNWHCDSTWMGDRVITTSTRTWALPTYNNHLYKQISSASTGASNDNHYFGYSTPWGYFDFNRFHCHFSPRDWQRLINNNWGFRPKRLNFKLFNIQVKEVTDNNGVKTIANNLTSTIQVFTDSEYQLPYVLGSAHQGCLPPFPADVFMIPQYGYLTLNNGSQAVGRSSFYCLEYFPSQMLRTGNNFTFSYTFEDVPFHSSYAHSQSLDRLMNPLIDQYLYYLSRTQTTGGKANTQTLGFSQGGPNTMANQAKNWLPGPCYRQQRVSTTTGQNNNSNFAWTAGTKYHLNGRNSLANPGIAMATHKDDKERFFPSNGILIFGKQNAARDNADYSDVMLTSEEEIKTTNPVATEEYGIVADNLQQQNTAPQIGTVNSQGALPGMVWQNRDVYLQGPIWAKIPHTDGNFHPSPLMGGFGLKHPPPQILIKNTPVPADPPTTFNQSKLNSFITQYSTGQVSVEIEWELQKENSKRWNPEIQYTSNYYKSTSVDFAVNTEGVYSEPHPIGTRYLTRPL

SEQ ID NO: 1703 - protein, 736 aa, Artificial Sequence
  source: /note="Description of Artificial Sequence: Synthetic polypeptide"
MAADGYLPDWLEDNLSEGIREWWALKPGAPKPKANQQKQDDGRGLVLPGYKYLGPFNGLDKGEPVNAADAAALEHDKAYDQQLKAGDNPYLRYNHADAEFQERLQEDTSFGGNLGRAVFQAKKRVLEPFGLVEEGAKTAPGKKRPVEQSPQEPDSSSGIGKTGQQPAKKRLNFGQTGDSESVPDPQPLGEPPATPAAVGPTTMASGGGAPMADNNEGADGVGNASGNWHCDSTWLGDRVITTSTRTWALPTYNNHLYKQISSASTGASNDNHYFGYSTPWGYFDFNRFHCHFSPRDWQRLINNNWGFRPKRLNFKLFNIQVKEVTDNNGVKTIANNLTSTVQVFTDSEYQLPYVLGSAHQGCLPPFPADVFMIPQYGYLTLNNGSQAVGRSSFYCLEYFPSQMLRTGNNFTFSYTFEDVPFHSSYAHSQSLDRLMNPLIDQYLYYLSRTQTTGGTGNTQTLGFSQGGPNTMANQAKNWLPGPCYRQQRVSTTTGQNNNSNFAWTAGTKYHLNGRNSLANPGIAMATHKDDKERFFPSNGILIFGKQNAARDNADYSDVMLTSEEEIKTTNPVATEEYGIVADNLQQQNTAPQIGTVNSQGALPGMVWQNRDVYLQGPIWAKIPHTDGNFHPSPLMGGFGLKHPPPQILIKNTPVPADPPTTFNQSKLNSFITQYSTGQVSVEIEWELQKENSKRWNPEIQYTSNYYKSTSVDFAVNTEGVYSEPHPIGTRYLTRPL

SEQ ID NO: 1704 - protein, 736 aa, Artificial Sequence
  source: /note="Description of Artificial Sequence: Synthetic polypeptide"
MAADGYLPDWLEDNLSEGIREWWDLKPGAPKPKANQQKQDDGRGLVLPGYKYLGPFNGLDKGEPVNAADAAALEHDKAYDQQLKAGDNPYLRYNHADAEFQERLQEDTSFGGNLGRAVFQAKKRVLEPLGLVEEGAKTAPGKKRPVEQSPQEPDSSSGIGKTGQQPAKKRLNFGQTGDSESVPDPQPLGEPPATPAAVGPTTMASGGGAPMADNNEGADGVGSSSGNWHCDSTWLGDRVITTSTRTWALPTYNNHLYKQISSASTGASNDNHYFGYSTPWGYFDFNRFHCHFSPRDWQRLINNNWGFRPKRLNFKLFNIQVKEVTQNEGTKTIANNLTSTIQVFTDSEYQLPYVLGSAHQGCLPPFPADVFMIPQYGYLTLNNGSQAVGRSSFYCLEYFPSQMLRTGNNFTFSYTFEDVPFHSSYAHSQSLDRLMNPLIDQYLYYLSRTQTTGGTANTQTLGFSQGGPNTMANQAKNWLPGPCYRQQRVSTTTGQNNNSNFAWTAGTKYHLNGRNSLANPGIAMATHKDDKERFFPSNGILIFGKQNAARDNADYSDVMLTSEEEIKTTNPVATEEYGIVADNLQQQNTAPQIGTVNSQGALPGMVWQNRDVYLQGPIWAKIPHTDGNFHPSPLMGGFGLKHPPPQILIKNTPVPADPPTTFNQSKLNSFITQYSTGQVSVEIEWELQKENSKRWNPEIQYTSNYYKSTSVDFAVNTEGVYSEPHPIGTRYLTRPL

SEQ ID NO: 1705 - protein, 736 aa, Artificial Sequence
  source: /note="Description of Artificial Sequence: Synthetic polypeptide"
MAADGYLPDWLEDNLSEGIREWWALKPGAPKPKANQQKQDDGRGLVLPGYKYLGPFNGLDKGEPVNAADAAALEHDKAYDQQLKAGDNPYLRYNHADAEFQERLQEDTSFGGNLGRAVFQAKKRVLEPLGLVEEGAKTAPGKKRPVEQSPQEPDSSSGIGKTGQQPAKKRLNFGQTGDSESVPDPQPLGEPPATPAAVGPTTMAAGGGAPMADNNEGADGVGSSSGNWHCDSTWMGDRVITTSTRTWALPTYNNHLYKQISSASTGASNDNHYFGYSTPWGYFDFNRFHCHFSPRDWQRLINNNWGFRPKRLSFKLFNIQVKEVTQNEGTKTIANNLTSTIQVFTDSEYQLPYVLGSAHQGCLPPFPADVFMIPQYGYLTLNNGSQAVGRSSFYCLEYFPSQMLRTGNNFTFSYTFEDVPFHSSYAHSQSLDRLMNPLIDQYLYYLSRTQTTGGTANTQTLGFSQGGPNTMANQAKNWLQGPCYRQQRVSTTTGQNNNSNFAWTAGTKYHLNGRNSLANPGIAMATHKDDKERFFPSNGILIFGKQNAARDNADYSDVMLTSEEEIKTTNPVATEEYGIVADNLQQQNTAPQIGTVNSQGALPGMVWQNLDVYLQGPIWAKIPHTDGNFHPSPLMGGFGLKHPPPQILIKNTPVPADPPTTFNQSKLNSFITQYSTGQVSVEIEWELQKENSKRWNPEIQYTSNYYKSTSVDFAVNTEGVYSEPHPIGTRYLTRPL

SEQ ID NO: 1706 - protein, 737 aa, Artificial Sequence
  source: /note="Description of Artificial Sequence: Synthetic polypeptide"
MAADGYLPDWLEDNLSEGIREWWALKPGAPKPKANQQKQDDGRGLVLPGYKYLGPFNGLDKGEPVNAADAAALEHDKAYDQQLKAGDNPYLRYNHADAEFQERLQEDTSFGGNLGRAVFQAKKRVLEPLGLVEEGAKTAPGKKRPVEPSPQRSPDSSSGIGKTGQQPAKKRLNFGQTGDSESVPDPQPLGEPPATPAAVGPTTMASGGGAPMADNNEGADGVGNASGNWHCDSQWLGDRVITTSTRTWALPTYNNHLYKQISSASTGASNDNHYFGYSTPWGYFDFNRFHCHFSPRDWQRLINNNWGFRPKRLNFKLFNIQVKEVTDNNGVKTIANNLTSTVQVFTDSDYQLPYVLGSAHEGCLPPFPADVFMIPQYGYLTLNNGSQAVGRSSFYCLEYFPSQMLRTGNNFQFTYTFEDVPFHSSYAHSQSLDRLMNPLIDQYLYYLSRTQTTGGTANTQTLGFSQGGPNTMANQAKNWVPGPCYRQQRVSTATGQNNNSNFAWTAGTKYHLKGRNSLANPGIAMATHKDDKERFFPSNGILIFGKQNAARDNADYSDVMLTSEEEIKTTNPVATEEYGIVADNLQQQNTAPQIGTVNSQGALPGMVWQNRDVYLQGPIWAKIPHTDGNFHPSPLMGGFGLKHPPPQILIKNTPVPADPPTTFNQSKLNSFITQYSTGQVSVEIEWELQKENSKRWNPEIQYTSNYYKSTSVDFAVNTEGVYSEPHPIGTRYLTRPL

SEQ ID NO: 1707 - protein, 737 aa, Artificial Sequence
  source: /note="Description of Artificial Sequence: Synthetic polypeptide"
  MOD_RES (226)..(226): Any naturally occurring amino acid
  MOD_RES (233)..(233): Any naturally occurring amino acid
  MOD_RES (239)..(239): Any naturally occurring amino acid
  MOD_RES (250)..(250): Any naturally occurring amino acid
  MOD_RES (253)..(253): Any naturally occurring amino acid
  MOD_RES (255)..(255): Any naturally occurring amino acid
MAADGYLPDWLEDTLSEGIRQWWKLKPGPPPPKPAERHKDDSRGLVLPGYKYLGPFNGLDKGEPVNEADAAALEHDKAYDRQLDSGDNPYLKYNHADAEFQERLKEDTSFGGNLGRAVFQAKKRVLEPLGLVEEGAKTAPGKKRPVEQSPQEPDSSSGIGKTGQQPAKKRLNFGQTGDSESVPDPQPLGEPPATPSGVGPNTMAAGGGAPMADNNEGADGVGSSSXNWHCDSXWLGDRXITTSTRTWALXTYXNXLYKQISNSTSGGATNDNTYFGYSTPWGYFDFNRFHCHFSPRDWQRLINNNWGFRPKRLNFKLFNIQVKEVTQNEGTKTIANNLTSTIQVFTDSEYQLPYVLGSAHQGCLPPFPADVFMIPQYGYLTLNNGSQAVGRSSFYCLEYFPSQMLRTGNNFQFTYTFEDVPFHSSYAHSQSLDRLMNPLIDQYLYYLSRTQTTGGTANTQTLGFSQGGPNTMANQAKNWLPGPCYRQQRVSTTTGQNNNSNFAWTAGTKYHLNGRNSLANPGIAMATHKDDKERFFPSNGILIFGKQNAARDNADYSDVMLTSEEEIKTTNPVATEEYGIVADNLQQQNTAPQIGTVNSQGALPGMVWQNRDVYLQGPIWAKIPHTDGNFHPSPLMGGFGLKHPPPQILIKNTPVPADPPTTFSQAKLASFITQYSTGQVSVEIEWELQKENSKRWNPEVQYTSNYAKSANVDFTVDNNGLYTEPRPIGTRYLTRPL

SEQ ID NO: 1708 - protein, 737 aa, Artificial Sequence
  source: /note="Description of Artificial Sequence: Synthetic polypeptide"
MAADGYLPDWLEDNLSEGIREWWDLKPGAPKPKANQQKQDDGRGLVLPGYKYLGPFNGLDKGEPVNAADAAALEHDKAYDQQLKAGDNPYLRYNHADAEFQERLQEDTSFGGNLGRAVFQAKKRVLEPLGLVEEGAKTAPGKKRPVEPSPQRSPDSSTGIGKKGQQPAKKRLNFGQTGDSESVPDPQPIGEPPAGPSGVGSLTMASGGGAPVADNNEGADGVGSSSGNWHCDSQWLGDRVITTSTRTWALPTYNNHLYKQISSASTGASNDNHYFGYSTPWGYFDFNRFHCHFSPRDWQRLINNNWGFRPKRLNFKLFNIQVKEVTDNDGVKTIANNLTSTIQVFTDSEYQLPYVLGSAHQGCLPPFPADVFMIPQYGYLTLNNGSQAVGRSSFYCLEYFPSQMLRTGNNFTFSYTFEDVPFHSSYAHSQSLDRLMNPLIDQYLYYLSRTQTTGGTANTQTLGFSQGGPNTMANHAKNWLPGPCYRQQRVSTTTGQNNNSNFAWTAGTKYHLNGRNSLANPGIAMATHKDDKERFFPSNGILIFGKQNAARDNADYSDVMLTSEEEIKTTNPVATEEYGIVADNLQQQNTAPQIGTVNSQGALPGMVWQNRDVYLQGPIWAKIPHTDGNFHPSPLMGGFGLKHPPPQILIKNTPVPADPPTTFNQSKLNSFITQYSTGQVSVEIEWELQKENSKRWNPEIQYTSNYYKSTSVDFAVNTEGVYSEPHPIGTRYLTRPL

SEQ ID NO: 1709 - protein, 736 aa, Artificial Sequence
  source: /note="Description of Artificial Sequence: Synthetic polypeptide"
MAADGYLPDWLEDTLSEGIRQWWKLKPGPPPPKPAERHKDDSRGLVLPGYKYLGPFNGLDKGEPVNEADAAALEHDKAYDRQLDSGDNPYLKYNHADAEFQERLKEDTSFGGNLGRAVFQAKKRVLEPLGLVEEPVKTAPGKKRPVEHSPVEPDSSSGTGKAGQQPAKKRLNFGQTGDSESVPDPQPLGEPPATPAAVGPTTMASGGGAPMADNNEGADGVGNASGNWHCDSTWLGDRVITTSTRTWALPTYNNHLYKQISSASTGASNDNHYFGYSTPWGYFDFNRFHCHFSPRDWQRLINNNWGFRPKRLNFKLFNIQVKEVTQNEGTKTIANNLTSTIQVFTDSEYQLPYVLGSAHQGCLPPFPADVFMIPQYGYLTLNNGSQAVGRSSFYCLEYFPSQMLRTGNNFQFTYTFEDVPFHSSYAHSQSLDRLMNPLIDQYLYYLSRTQTTGGTANTQTLGFSQGGPNTMANQAKNWLPGPCYRQQRVSTTTGQNNNSNFAWTAGTKYHLNGRNSLANPGIAMATHKDDKERFFPSNGILIFGKQNAARDNADYSDVMLTSEEEIKTTNPVATEEYGIVADNLQQQNTAPQIGTVNSQGALPGMVWQNRDVYLQGPIWAKIPHTDGNFHPSPLMGGFGLKHPPPQILIKNTPVPADPPTTFNQSKLNSFITQYSTGQVSVEIEWELQKENSKRWNPEIQYTSNYYKSTSVDFAVNTEGVYSEPHPIGTRYLTRPL

SEQ ID NO: 1710 - protein, 736 aa, Artificial Sequence
  source: /note="Description of Artificial Sequence: Synthetic polypeptide"
MAADGYLPDWLEDNLSEGIREWWALKPGAPKPKANQQKQDDGRGLVLPGYKYLGPFNGLDKGEPVNAADAAALEHDKAYDQQLQAGDNPYLRYNHADAEFQERLQGDTSFGGNLGRAVFQAKKRVLEPLGLVEEGAKTAPGKKRPVEQSPQEPDSSSGIGKTGQQPAKKRLNFGQTGDSESVPDPQPLGEPPATPAAVGPTTMASGGGAPMADNNEGADGVGNASGNWHCDSTWLGDRVITTSTRTWALPTYNNHLYKQISSASTGASNDNHYFGYSTPWGYFDFNRFHCHFSPRDWQRLINNNWGFRPKRLNFKLFNIQVKEVTDNNGVKTIANNLTSTIQVFTDSEYQLPYVLGSAHQGCLPPFPADVFMIPQYGYLTLNNGSQAVGRSSFYCLEYFPSQMLRTGNNFQFTYTFEDVPFHSSYAHSQSLDRLMNPLIDQYLYYLSRTQTTGGTANTQTLGFSQGGPNTMANQAKNWLPGPCYRQQRVSTTTGQNNNSNFAWTAGTKYHLNGRNSLANPGIAMATHKDDKERFFPSNGILIFGKQNAARDNADYSDVMLTSEEEIKTTNPVATEEYGIVADNLQQQNTAPQIGTVNSQGALPGMVWQNRDVYLQGPIWAKIPHTDGNFHPSPLMGGFGLKHPPPQILIKNTPVPADPPTTFNQSKLNSFITQYSTGQVSVEIEWELQKENSKRWNPEIQYTSNYYKSTSVDFAVNTEGVYSEPHPIGTRYLTRPL

SEQ ID NO: 1711 - protein, 738 aa, Artificial Sequence
  source: /note="Description of Artificial Sequence: Synthetic polypeptide"
MAADGYLPDWLEDTLSEGIRQWWKLKPGPPPPKPAERHKDDSRGLVLPGYKYLGPFNGLDKGEPVNAADAAALEHDKAYDQQLKAGDNPYLRYNHADAEFQERLKEDTSFGGNLGRAVFQAKKRVLEPLGLVEEGAKTAPGKKRPVEPSPQRSPDSSTGIGKKGQQPARKRLNFGQTGDSESVPDPQPLGEPPAAPSGVGPNTMAAGGGAPMADNNEGADGVGSSSGNWHCDSQWLGDRVITTSTRTWALPTYNNHLYKQISNSTSGGSSNDNAYFGYSTPWGYFDFNRFHCHFSPRDWQRLINNNWGFRPKRLNFKLFNIQVKEVTDNNGVKTIANNLTSTVQVFTDSEYQLPYVLGSAHQGCLPPFPADVFMIPQYGYLTLNNGSQAVGRSSFYCLEYFPSQMLRTGNNFTFSYTFEDVPFHSSYAHSQSLDRLMNPLIDQYLYYLSRTQTTGGTANTQTLGFSQGGPNTMANQAKNWLPGPCYRQQRVSTTTGQNNNSNFAWTAGTKYHLNGRNSLANPGIAMATHKDDKERFFPSNGILIFGKQNAARDNADYSDVMLTSEEEIKTTNPVATEEYGIVADNLQQQNTAPQIGTVNSQGALPGMVWQNRDVYLQGPIWAKIPHTDGHFHPSPLMGGFGLKHPPPQILIKNTPVPANPPTTFNQSKLNSFITQYSTGQVSVEIEWELQKENSKRWNPEVQYTSNYAKSANVDFTVDNNGLYTEPRPIGTRYLTRPL

SEQ ID NO: 1712 - protein, 738 aa, Artificial Sequence; identical to SEQ ID NO: 1711
  source: /note="Description of Artificial Sequence: Synthetic polypeptide"

SEQ ID NO: 1713 - protein, 736 aa, Artificial Sequence
  source: /note="Description of Artificial Sequence: Synthetic polypeptide"
MAADGYLPDWLEDNLSEGIREWWALKPGAPKPKANQQKQDDGRGLVLPGYKYLGPFNGLDKGEPVNAADAAALEHDKAYDQQLKAGDNPYLRYNHADAEFQERLQEDTSFGGNLGRAVFQAKKRLLEPLGLVEEGAKTAPGKKRPVEQSPQEPDSSSGIGKTGQQPAKKRLNFGQTGDSESVPDPQPLGEPPATPAAVGPTTMASGGGAPMADNNEGADGVGNSSGNWHCDSTWMGDRVITTSTRTWALPTYNNHLYKQISSASTGASNDNHYFGYSTPWGYFDFNRFHCHFSPRDWQRLINNNWGFRPKRLNFKLFNIQVKEVTQNEGTKTIANNLTSTIQVFTDSEYQLPYVLGSAHQGCLPPFPADVFIIPQYGYLTLNNGSQAVGRSSFYCLEYFPSQMLRTGNNFTFSYTFEDVPFHSSYAHSQSLDRLMNPLIDQYLYYLSRTQTTGGTANTQTLGFSQGGPNTMANQAKNWLPGPCYRQQRVSTTTGQNNNSNFAWTAGTKYHLNGRNSLANPGIAMATHKDDKERFFPSNGILIFGKQNAARDNADYSDVMLTSEEEIKTTNPVATEEYGIVADNLQQQNTAPQIGTVNSQGALPGMVWQNRDVYLQGPIWAKIPHTDGNFHPSPLMGGFGLKHPPPQILIKNTPVPADPPTTFNQSKLNSFITQYSTGQVSVEIEWELQKENSKRWNPEIQYTSNYYKSTSVDFAVNTEGVYSEPHPIGTRYLTRPL

SEQ ID NO: 1714 - protein, 736 aa, Artificial Sequence
  source: /note="Description of Artificial Sequence: Synthetic polypeptide"
MAADGYLPDWLEDNLSEGIREWWALKPGAPKPKANQQKQDDGRGLVLPGYKYLGPFNGLDKGEPVNAADAAALEHDKAYDQQLKAGDNPYLRYNHADAEFQERLQEDTSFGGNLGRAVFQAKKRVLEPFGLVEEAAKTAPGKKRPVEQSPQEPDSSSGIGKTGQQPAKKRLNFGQTGDSESVPDPQPLGEPPATPAAVGPTTMASGGGAPMADNNEGADGVGNASGNWHCDSTWLGDRVITTSTRTWALPTYNNHLYKQISSASTGASNDNHYFGYSTPWGYFDFNRFHCHFSPRDWQRLINNNWGFRPKRLNFKLFNIQVKEVTQNEGTKTIANNLTSTIQVFTDSEYQLPYVLGSAHQGCLPPFPADVFMIPQYGYLTLNNGSQAVGRSSFYCLEYFPSQMLRTGNNFTFSYTFEDVPFHSSYAHSQSLDRLMNPLIDQYLYYLSRTQTTGGTANTQTLGFSQGGPNTMANHAKNWLPGPCYRQQRVSTTTGQNNNSNFAWTAGTKYHLNGRNSLANPGIAMATHKDDKERFFPSNGILIFGKQNAARDNADYSDVMLTSEEEIKTTNPVATEEYGIVADNLQQQNTAPQIGTVNSQGALPGMVWQNRDVYLQGPIWAKIPHTDGNFHPSPLMGGFGLKHPPPQILIKNTPVPADPPTTFNQSKLNSFITQYSTGQVSVEIEWELQKENSKRWNPEIQYTSNYYKSTSVDFAVNTEGVYSEPHPIGTRYLTRPL

SEQ ID NO: 1715 - protein, 736 aa, Artificial Sequence
  source: /note="Description of Artificial Sequence: Synthetic polypeptide"
MAADGYLPDWLEDNLSEGIREWWALKPGAPKPKANQQKQDDGRGLVLPGYKYLGPFNGLDKGEPVNEADAAALEHDKAYDQQLKAGDNPYLRYNHADAEFQERLQEDTSFGGNLGRAVFQAKKRLLEPLGLVEEAAKTAPGKKRPVEQSPQEPDSSAGIGKSGAQPAKKRLNFGQTGDSESVPDPQPLGEPPATPAAVGPTTMASGGGAPMADNNEGADGVGNASGNWHCDSTWLGDRVITTSTRTWALPTYNNHLYKQISSASTGASNDNHYFGYSTPWGYFDFNRFHCHFSPRDWQRLINNNWGFRPKRLNFKLFNIQVKEVTDNDGVKTIANNLTSTIQVFTDSEYQLPYVLGSAHQGCLPPFPADVFMIPQYGYLTLNNGSQAVGRSSFYCLEYFPSQMLRTGNNFQFTYTFEDVPFHSSYAHSQSLDRLMNPLIDQYLYYLSRTQTTGGTANTQTLGFSQGGPNTMANQAKNWLPGPCYRQQRVSTTTGQNNNSNFAWTAGTKYHLNGRNSLANPGIAMATHKDDKERFFPSNGILIFGKQNAARDNADYSDVMLTSEEEIKTTNPVATEEYGIVADNLQQQNTAPQIGTVNSQGALPGMVWQNRDVYLQGPIWAKIPHTDGNFHPSPLMGGFGLKHPPPQILIKNTPVPADPPTTFNQSKLNSFITQYSTGQVSVEIEWELQKENSKRWNPEIQYTSNYYKSTSVDFAVNTEGVYSEPHPIGTRYLTRPL

SEQ ID NO: 1716 - protein, 736 aa, Artificial Sequence
  source: /note="Description of Artificial Sequence: Synthetic polypeptide"
MAADGYLPDWLEDNLSEGIREWWALKPGAPKPKANQQKQDDGRGLVLPGYKYLGPFNGLDKGEPVNAADAAALEHDKAYDQQLKAGDNPYLRYNHADAEFQERLQEDTSFGGNLGRAVFQAKKRVLEPLGLVEEGAKTAPGKKRPVEQSPQEPDSSAGIGKTGAQPAKKRLNFGQTGDSESVPDPQPLGEPPATPAAVGPTTMASGGGAPMADNNEGADGVGSASGNWHCDSTWLGDRVITTSTRTWALPTYNNHLYKQISSASTGASNDNHYFGYSTPWGYFDFNRFHCHFSPRDWQRLINNNWGFRPKRLNFKLFNIQVKEVTDNNGVKTIANNLTSTIQVFTDSEYQLPYVLGSAHQGCLPPFPADVFMIPQYGYLTLNNGSQAVGRSSFYCLEYFPSQMLRTGNNFTFSYTFEDVPFHSSYAHSQSLDRLMNPLIDQYLYYLSRTQTTGGTANTQTLGFSQGGPNTMANQAKNWLPGPCYRQQRVSTTTGQNNNSNFAWTAGTKYHLNGRNSLANPGIAMATHKDDKERFFPSNGILIFGKQNAARDNADYSDVMLTSEEEIKTTNPVATEEYGIVADNLQQQNTAPQIGTVNSQGALPGMVWQNRDVYLQGPIWAKIPHTDGNFHPSPLMGGFGLKHPPPQILIKNTPVPADPPTTFNQSKLNSFITQYSTGQVSVEIEWELQKENSKRWNPEIQYTSNYYKSTSVDFAVNTEGVYSEPHPIGTRYLTRPL

SEQ ID NO: 1717 - protein, 736 aa, Artificial Sequence
  source: /note="Description of Artificial Sequence: Synthetic polypeptide"
MAADGYLPDWLEDNLSEGIREWWDLKPGAPKPKANQQKQDDGRGLVLPGYKYLGPFNGLDKGEPVNAADAAALEHDKAYDQQLKAGDNPYLRYNHADAEFQERLQEDTSFGGNLGRAVFQAKKRLLEPLGLVEEAAKTAPGKKRPVEQSPQEPDSSAGIGKSGAQPAKKRLNFGQTGDTESVPDPQPIGEPPAAPSGVGPNTMAAGGGAPMADNNEGADGVGSSSGNWHCDSQWLGDRVITTSTRTWALPTYNNHLYKQISSASTGASNDNHYFGYSTPWGYFDFNRFHCHFSPRDWQRLINNNWGFRPKRLNFKLFNIQVKEVTQNEGTKTIANNLTSTIQVFTDSEYQLPYVLGSAHQGCLPPFPADVFMIPQYGYLTLNNGSQAVGRSSFYCLEYFPSQMLRTGNNFQFTYTFEDVPFHSSYAHSQSLDRLMNPLIDQYLYYLSRTQTTGGTANTQTLGFSQGGPNTMANHAKNWLPGPCYRQQRVSTTTGQNNNSNFAWTAGTKYHLNGRNSLANPGIAMATHKDDKERFFPSNGILIFGKQNAARDNADYSDVMLTSEEEIKTTNPVATEEYGIVADNLQQQNTAPQIGTVNSQGALPGMVWQNRDVYLQGPIWAKIPHTDGNFHPSPLMGGFGLKHPPPQILIKNTPVPADPPTTFNQSKLNSFITQYSTGQVSVEIEWELQKENSKRWNPEIQYTSNYYKSTSVDFAVNTEGVYSEPHPIGTRYLTRPL

SEQ ID NO: 1718 - protein, 737 aa, Artificial Sequence; identical to SEQ ID NO: 1700
  source: /note="Description of Artificial Sequence: Synthetic polypeptide"

SEQ ID NO: 1719 - protein, 737 aa, Artificial Sequence
  source: /note="Description of Artificial Sequence: Synthetic polypeptide"
MAADGYLPDWLEDNLSEGIREWWALKPGAPKPKANQQKQDDGRGLVLPGYKYLGPFNGLDKGEPVNAADAAALEHDKAYDQQLKAGDNPYLRYNHADAEFQERLKEDTSFGGNLGRAVFQAKKRVLEPFGLVEEGAKTAPGKKRPVEQSPQEPDSSSGIGKTGQQPAKKRLNFGQTGDSESVPDPQPLGEPPAAPSGVGPNTMAAGGGAPMADNNEGADGVGSSSGNWHCDSQWLGNRVITTSTRTWALPTYNNHLYKQISNSTSGGSSNDNAYFGYSTPWGYFDFNRFHCHFSPRDWQRLINNNWGFRPKRLNFKLFNIQVKEVTDNNGVKTIANNLTSTVQVFTDSEYQLPYVLGSAHQGCLPPFPADVFMIPQYGYLTLNNGSQAVGRSSFYCLEYFPSQMLRTGNNFQFTYTFEDVPFHSSYAHSQSLDRLMNPLIDQYLYYLSRTQTTGGTANTQTLGFSQGGPNTMANQAKNWLPGPCYRQQRVSTTTGQNNNSNFAWTAGTKYHLNGRNSLANPGIAMATHKDDKERFFPSNGILIFGKQNAARDNADYSDVMLTSEEEIKTTNPVATEEYGIVADNLQQQNTAPQIGTVNSQGALPGMVWQNRDVYLQGPIWAKIPHTDGNFHPSPLMGGFGLKHPPPQILIKNTPVPADPPTTFNQSKLNSFITQYSTGQVSVEIEWELQKENSKRWNPEIQYTSNYYKSTSVDFAVNTEGVYSEPHPIGTRYLTRPL

SEQ ID NO: 1720 - protein, 736 aa, Artificial Sequence
  source: /note="Description of Artificial Sequence: Synthetic polypeptide"
MAADGYLPDWLEDNLSEGIREWWDLKPGAPKPKANQQKQDDGRGLVLPGYKYLGPFNGLDRGEPVNAADAAALEHDKAYDQQLKAGDNPYLRYNHADAEFQERLQEDTSFGGNLGRAVFQAKKRVLEPLGLVEEGAKTAPGKKRPVEQSPQEPDSSSGIGKTGQQPAKKRLNFGQTGDSESVPDPQPLGEPPATPAAVGPTTMASGGGAPMADNNEGADGVGNASGNWHCDSTWLGDRVITTSTRTWALPTYNNHLYKQISSASTGASNDNHYFGYSTPWGYFDFNRFHCHFSPRDWQRLINNNWGFRPKRLNFKLFNIQVKEVTDNNGVKTIANNLTSTIQVFTDSEYQLPYVLGSAHQGCLPPFPADVFMIPQYGYLTLNNGSQAVGRSSFYCLEYFPSQMLRTGNNFQFTYTFEDVPFHSSYAHSQSLDRLMNPLIDQYLYYLSRTQTTGGTANTQTLGFSQGGPNTMANQAKNWLPGPCYRQQRVSTTTGQNNNSNFAWTAGTKYHLNGRNSLANPGIAMATHKDDKERFFPSNGILIFGKQNAARDNADYSDVMLTSEEEIKTTNPVATEEYGIVADNLQQQNTAPQIGTVNSQGALPGMVWQNRDVYLQGPIWAKIPHTDGNFHPSPLMGGFGLKHPPPQILIKNTPVPADPPTTFNQSKLNSFITQYSTGQVSVEIEWELQKENSKRWNPEIQYTSNYYKSTSVDFAVNTEGVYSEPHPIGTRYLTRPL

SEQ ID NO: 1721 - protein, 736 aa, Artificial Sequence
  source: /note="Description of Artificial Sequence: Synthetic polypeptide"
MAADGYLPDWLEDNLSEGIREWWDLKPGAPKPKANQQKQDDGRGLVLPGYKYLGPFNGLDKGEPVNAADAAALEHDKAYDQQLKAGDNPYLRYNHADAEFQERLQEDTSFGGNLGRAVFQAKKRVLEPLGLVEEGAKTAPGKKRPVEQSPQEPDSSSGIGKKGQQPARKRLNFGQTGDSESVPDPQPLGEPPAAPSGVGSLTMASGGGAPMADNNEGADGVGNASGNWHCDSTWLGDRVITTSTRTWALPTYNNHLYKQISSASTGASNDNHYFGYSTPWGYFDFNRFHCHFSPRDWQRLINNNWGFRPKRLNFKLFNIQVKEVTQNEGTKTIANNLTSTVQVFTDSDYQLPYVLGSAHQGCLPPFPADVFMIPQYGYLTLNNGSQAVGRSSFYCLEYFPSQMLRTGNNFQFTYTFEDVPFHSSYAHSQSLDRLMNPLIDQYLYYLSRTQTTGGTANTQTLGFSQGGPNTMANQAKNWLPGPCYRQQRVSTTTGQNNNSNFAWTAGTKYHLNGRNSLSNPGIAMATHKDDKERFFPSNGILIFGKQNAARDNADYSDVMLTSEEEIKTTNPVATEEYGIVADNLQQQNTAPQIGTVNSQGALPGMVWQNRDMYLQGPIWAKIPHTDGNFHPSPLMGGFGLKHPPPQILIKNTPVPADPPTTFNQSKLNSFITQYSTGQVSVEIEWELQKENSKRWNPEIQYTSNYYKSTSVDFAVNTEGVYSEPHPIGTRYLTRPL

SEQ ID NO: 1722 - protein, 736 aa, Artificial Sequence
  source: /note="Description of Artificial Sequence: Synthetic polypeptide"
MAADGYLPDWLEDNLSEGIREWWALKPGAPKPKANQQKQDDGRGLVLPGYKYLGPFNGLDKGEPVNAADAAALEHDKAYDQQLKAGDNPYLRYNHADAEFQERLQEDTSFGGNLGRAVFQAKKRVLEPFGLVEEGAKTAPGKKRPVEQSPQEPDSSSGIGKTGQQPAKKRLNFGQTGGSESVPDPQPLGEPPATPAAVGPTTMAAGGGAPMADNNEGADGVGSSSGNWHCDSTWLGDRVITTSTRTWALPTYNNHLYKQISSASTGASNDNHYFGYSTPWGYFDFNRFHCHFSPRDWQRLINNNWGFRPKRLNFKLFNIQVKEVTDNNGVKTIANNLTSTVQVFTDSEYQLPYVLGSAHQGCLPPFPADVFMIPQYGYLTLNNGSQAVGRSSFYCLEYFPSQMLRTGNNFTFSYTFEEVPFHSSYAHSQSLDRLMNPLIDQYLYYLSRTQTTGGTANTQTLGFSQGGPNTMANQAKNWLPGPCYRQQRVSTTTGQNNNSNFAWTAGTKYHLNGRNSLANPGIAMASHKDDKERFFPSNGILIFGKQNAARDNADYSDVMLTSEEEIKTTNPVATEEYGIVADNLQQQNTAPQIGTVNSQGALPGMVWQNRDVYLQGPIWAKIPHTDGNFHPSPLMGGFGLKHPPPQILIKNTPVPADPPTTFNQSKLNSFITQYSTGQVSVEIEWELQKENSKRWNPEIQYTSNYYKSTSVDFAVNTEGVYSEPHPIGTRYLTRPL

SEQ ID NO: 1723 - DNA, 2211 bp, Artificial Sequence
  source: /note="Description of Artificial Sequence: Synthetic polynucleotide"
atggctgccgatggttatcttccagattggctcgaggacaacctctctgagggcattcgcgagtggtgggacttgaaacctgcatccccgaaacccaaagccaaccagcaaaagcaggacgacggccggggtctggtgcttcctggctacaagtacctcggacccttcaacggactcgacaagggggagcccgtcaacgcggcggacgcagcggccctcgagcacgacaaggcctacgaccagcagctcaaagcgggtgacaatccgtacctgcggtataaccacgccgacgccgagtttcaggagcgtctgcaagaagatacgtcttttgggggcaacctcgggcgagcagtcttccaggccaaaaagaggcttcttgaacctcttggtctggttgaggaagcggctaagacggctcctggaaagaagaggcctgtagagcagtctcctcaggaaccggactcctccgcgggtattggcaaatcgggtgcacagcccgccaaaaagagactcaatttcggtcagactggcggcacagagtcagttccagaccctcaacctctcggagaacctccagcagcgccctctggtgtgggacctaatacaatggctgcaggcggtggcgcaccaatggcagacaataacgaaggcgccgacggagtgggtagttcctcgggaaattggcattgcgattccacatggctgggcgacagagtcatcaccaccagcaccagaacctgggccctgcccacttacaacaaccatctctacaagcaaatctccagtgcttcaacgggggccagcaacgacaaccactacttcggctacagcaccccctgggggtattttgatttcaacagattccactgccacttctcaccacgtgactggcagcgactcatcaacaacaactggggattccggcccaagagactcagcttcaagctcttcaacatccaggtcaaggaggtcacgcagaatgaaggcaccaagaccatcgccaataacctcaccagcaccatccaggtgtttacggactcggagtaccagctgccgtacgttctcggctctgcccaccagggctgcctgcctccgttcccggcggacgtgttcatgattccccagtacggatacctaacactcaacaacggtagtcaggccgtgggacgctcctccttctactgcctggaatactttccttcgcagatgctgagaaccggcaacaacttccagtttacttacaccttcgaggacgtgcctttccacagcagctacgcccacagccagagcttggaccggctgatgaatcctctgattgaccagtacctgtactacttgtctcggactcaaacaacaggaggcacggcaaatacgcagactctgggcttcagccaaggtgggcctaatacaatggccaatcaggcaaagaactggctgccaggaccctgttaccgccaacaacgcgtctcaacgacaaccgggcaaaacaacaatagcaactttgcctggactgctgggaccaaataccatctgaatggaagaaattcattggctaatcctggcatcgctatggcaacacacaaagacgacaaggagcgtttttttcccagtaacgggatcctgatttttggcaaacaaaatgctgccagagacaatgcggattacagcgatgtcatgctcaccagcgaggaagaaatcaaaaccactaaccctgtggctacagaggaatacggtatcgtggcagataacttgcagcagcaaaacacggctcctcaaattggaactgtcaacagccagggggccttacccggtatggtctggcagaaccgggacgtgtacctgcagggtcccatctgggccaagattcctcacacggacggcaacttccacccgtctccgctgatgggcggctttggcctgaaacatcctccgcctcagatcctgatcaagaacacgcctgtacctgcggatcctccgaccaccttcaaccagtcaaagctgaactctttcatcacgcaatacagcaccggacaggtcagcgtggaaattgaatgggagctgcagaaggaaaacagcaagcgctggaaccccgagatccagtacacctccaactactacaaatctacaagtgtggactttgctgttaatacagaaggcgtgtactctgaaccccaccccattggcacccgttacctcacccgtcccctgtaa

SEQ ID NO: 1724 - DNA, 2211 bp, Artificial Sequence
  source: /note="Description of Artificial Sequence: Synthetic polynucleotide"
atggctgccgatggttatcttccagattggctcgaggacaacctctctgagggcattcgcgagtggtgggacttgaaacctggagccccgaaacccaaagccaaccagcaaaagcaggacgacggccggggtctggtgcttcctggctacaagtacctcggacccttcaacggactcgacaagggggagcccgtcaacgcggcggacgcagcggccctcgagcacgacaaggcctacgaccagcagctcaaagcgggtgacaatccgtacctgcggtataaccacgccgacgccgagtttcaggagcgtctgcaagaagatacgtcttttgggggcaacctcgggcgagcagtcttccaggccaagaagagggttctcgaaccttttggtctggttgaggaaggcgctaagacggctcctggaaagaaacgtccggtagagcagtcgccacaagagccagactcctcctcgggcattggcaagacaggccagcagcccgctaaaaagagactcaattttggtcagactggcgactcagagtcagtccccgacccacaacctctcggagaacctccagcaacccccgctgctgtgggacctactacaatggcttcaggtggtggcgcaccaatggcagacaataacgaaggcgccgacggagtgggtaatgcctcaggaaattggcattgcgattcccaatggctgggggacagagtcatcaccaccagcacccgaacctgggccctgcccacctacaacaatcacctctacaagcaaatctccagtgcttcaacgggggccagcaacgacaaccactacttcggctacagcaccccctgggggtattttgatttcaacagattccactgccatttctcaccacgtgactggcagcgactcatcaacaacaattggggattccggcccaagagactcaacttcaaactcttcaacatccaagtcaaggaggtcacgcagaatgaaggcaccaagaccatcgccaataacctcaccagcaccatccaggtgtttacggactcggagtaccagctgccgtacgttctcggctccgcccaccagggctgcctgcctccgttcccggcggacgtgttcatgattccccagtacggctacctaacactcaacaacggtagtcaggccgtgggacgctcctccttctactgcctggaatactttccttcgcagatgctgagaaccggcaacaacttccagtttacttacaccttcgaggacgtgcctttccacagcagctacgcccacagccagagcttggaccggctgatgaatcctctgattgaccagtacctgtactacttgtctcggactcaaacaacaggaggcacggcaaatacgcagactctgggcttcagccaaggtgggcctaatacaatggccaatcaggcaaagaactggctgccaggaccctgttaccgccaacaacgcgtctcaacgacaaccgggcaaaacaacaatagcaactttgcctggactgctgggaccaaataccatctgaatggaagaaattcattggctaatcctggcatcgctatggcaacacacaaagacgacaaggagcgtttttttcccagtaacgggatcctgatttttggcaaacaaaatgctgccagagacaatgcggattacagcgatgtcatgctcaccagcgaggaagaaatcaaaaccactaaccctgtggctacagaggaatacggtatcgtggcagataacttgcagcagcaaaacacggctcctcaaattggaactgtcaacagccagggggccttacccggtatggtctggcagaaccgggacgtgtacctgcagggtcccatctgggccaagattcctcacacggacggcaacttccacccgtctccgctgatgggcggctttggcctgaaacatcctccgcctcagatcctgatcaagaacacgcctgtacctgcggatcctccgaccaccttcaaccagtcaaagctgaactctttcatcacgcaatacagcaccggacaggtcagcgtggaaattgaatgggagctgcagaaggaaaacagcaagcgctggaaccccgagatccagtacacctccaactactacaaatctacaagtgtggactttgctgttaatacagaaggcgtgtactctgaaccccaccccattggcacccgttacctcacccgtcccctgtaa

SEQ ID NO: 1725 - DNA, 2211 bp, Artificial Sequence
  source: /note="Description of Artificial Sequence: Synthetic polynucleotide"
atggctgccgatggttatcttccagattggctcgaggacaacctctctgagggcattcgcgagtggtgggacttggaacctggagccccgaagcccaaagccaaccagcaaaagcaggacgacggccggggtctggtgcttcctggctacaagtacctcggacccttcaacggactcgacaagggggagcccgtcaacgcggcggacgcagcggccctcgagcacgacaaggcctacgaccagcagctcaaagcgggtgacaatccgtacctgcggtataaccacgccgacgccgagtttcaggagcgtctgcaagaagatacgtcttttgggggcaacctcgggcgagcagtcttccaggccaagaagcgggttctcgaacctctcggtctggttgaggaaggcgctaagacggctcctggaaagaaacgtccggtagagcagtcgccacaagagccagactcctcctcgggcatcggcaagacaggccagcagcccgctaaaaagagactcaattttggtcagactggcgactcagagtcagtccccgatccacaacctctcggagaacctccagcaacccccgctgctgtgggacctactacaatggcttcaggcggtggcgcaccaatggcagacaataacgaaggcgccgacggagtgggtaatgcctcaggaaattggcattgcgattccacatggctgggcgacagagtcatcaccaccagcacccgcacctgggccttgcccacctacaataaccacctctacaagcaaatctccagtgcttcaacaggggccagcaacgacaaccactacttcggctacagcaccccctgggggtattttgacttcaacagattccactgccacttctcaccacgtgactggcagcgactcatcaacaacaactggggattccggcctaagcgactcaacttcaagctcttcaacattcaggtcaaagaggttacggacaacaatggagtcaagaccatcgccaataaccttaccagcacggtccaggtcttcacggactcggagtaccagttgccgtacgtcctcggctctgcgcaccagggctgcctccctccgttcccggcggacgtgttcatgattccgcagtacggctacctaacgctcaacaacggtagtcaggccgtgggacgctcctccttctactgcctggaatactttccttcgcagatgctgagaaccggcaacaacttccagtttacttacaccttcgaggacgtgcctttccacagcagctacgcccacagccagagcttggaccggctgatgaatcctctgattgaccagtacctgtactacttgtctcggactcaaacaacaggaggcacggcaaatacgcagactctgggcttcagccaaggtgggcctaatacaatggccaatcaggcaaagaactggctgccaggaccctgttaccgccaacaacgcgtctcaacgacaaccgggcaaaacaacaatagcaactttgcctggactgctgggaccaaataccatctgaatggaagaaattcattggctaatcctggcatcgctatggcaacacacaaagacgacaaggagcgtttttttcccagtaacgggatcctgatttttggcaaacaaaatgctgccagagacaatgcggattacagcgatgtcatgctcaccagcgaggaagaaatcaaaaccactaaccctgtggctacagaggaatacggtatcgtggcagataacttgcagcagcaaaacacggctcctcaaattggaactgtcaacagccagggggccttacccggtatggtctggcagaaccgggacgtgtacctgcagggtcccatctgggccaagattcctcacacggacggcaacttccacccgtctccgctgatgggcggctttggcctgaaacatcctccgcctcagatcctgatcaagaacacgcctgtacctgcggatcctccgaccaccttcaaccagtcaaagctgaactctttcatcacgcaatacagcaccggacaggtcagcgtggaaattgaatgggagctgcagaaggaaaacagcaagcgctggaaccccgagatccagtacacctccaactactacaaatctacaagtgtggactttgctgttaatacagaaggcgtgtactctgaaccccaccccattggcacccgttacctcacccgtcccctgtaa

SEQ ID NO: 1726 - DNA, 2211 bp, Artificial Sequence
  source: /note="Description of Artificial Sequence: Synthetic polynucleotide"
atggctgccgatggttatcttccagattggctcgaggacactctctctgaaggaataagacagtggtggaagctcaaacctggcccaccaccaccaaagcccgcagagcggcataaggacgacagcaggggtcttgtgcttcctgggtacaagtacctcggacccttcaacggactcgacaagggagagccggtcaacgaggcagacgccgcggccctcgagcacgacaaagcctacgaccggcagctcgacagcggagacaacccgtacctcaagtacaaccacgccgacgcggagtttcaggagcgccttaaagaagatacgtcttttgggggcaacctcgggcgagcagtcttccaggccaagaagagggttctcgaaccttttggtctggttgaggaaggtgctaagacggctcctggaaagaaacgtccggtagagcagtcgccacaagagccagactcctcctcgggcattggcaagacaggccagcagcccgctaaaaagagactcaattttggtcagactggcgactcagagtcagtccccgacccacaacctctcggagaacctccagcaacccccgctgctgtgggacctactacaatggcttcaggcggtggcgcaccaatggcagacaataacgaaggcgccgacggagtgggtaatgcctcaggaaattggcattgcgattccacatggctgggcgacagagtcatcaccaccagcacccgaacatgggccttgcccacctataacaaccacctctacaagcaaatctccagtgcttcaacgggggccagcaacgacaaccactacttcggctacagcaccccctgggggtattttgacttcaacagattccactgccacttctcaccacgtgactggcagcgactcatcaacaacaactggggattccggcctaagcgactcaacttcaagctcttcaacattcaggtcaaagaggttacggacaacaatggagtcaagaccatcgccaataaccttaccagcacggtccaggtcttcacggactcagactatcagctcccgtacgtgctcgggtcggctcacgagggctgcctcccgccgttcccagcggacgttttcatgattcctcagtacggctacctaacactcaacaacggtagtcaggccgtgggacgctcctccttctactgcctggaatactttccttcgcagatgctgagaaccggcaacaacttccagtttacttacaccttcgaggacgtgcctttccacagcagctacgcgcacagccagagtctggaccggctgatgaatcctctgattgaccagtacctgtactacttgtctcggactcaaacaacaggaggcacggcaaatacgcagactctgggcttcagccaaggtgggcctaatacaatggccaatcaggcaaagaactggctgccaggaccctgttaccgccaacaacgcgtctcaacgacaaccgggcaaaacaacaatagcaactttgcctggactgctgggaccaaataccatctgaatggaagaaattcattggctaatcctggcatcgctatggcaacacacaaagacgacaaggagcgtttttttcccagtaacgggatcctgattttcggcaaacaaaatgctgccagagacaatgcggattacagcgatgtcatgctcaccagcgaggaagaaatcaaaaccactaaccctgtggctacagaggaatacggtatcgtggcagataacttgcagcagcaaaacacggctcctcaaattggaactgtcaacagccagggggccttacccggtatggtctggcagaaccgggacgtgtacctgcagggtcccatctgggccaagattcctcacacggacggcaacttccacccgtctccgctgatgggcggctttggcctgaaacatcctccgcctcagatcctgatcaagaacacgcctgtacctgcggatcctccgaccaccttcaaccagtcaaagctgaactctttcatcacgcaatacagcaccggacaggtcagcgtggaaattgaatgggagctgcagaaggaaaacagcaagcgctggaaccccgagatccagtacacctccaactactacaaatctacaagtgtggactttgctgttaatacagaaggcgtgtactctgaaccccaccccattggcaccagatacctgactcgtaatctgtaa

SEQ ID NO: 1727 - DNA, 2208 bp, Artificial Sequence
  source: /note="Description of Artificial Sequence: Synthetic polynucleotide"
atggctgccgatggttatcttccagattggctcgaggacactctctctgaaggaataagacagtggtggaagctcaaacctggcccaccaccaccaaagcccgcagagcggcataaggacgacagcaggggtcttgtgcttcctgggtacaagtacctcggacccttcaacggactcgacaagggagagccggtcaacgaggcagacgccgcggccctcgagcacgacaaagcctacgaccggcagctcgacagcggagacaacccgtacctcaagtacaaccacgccgacgcggagtttcaggagcgccttaaagaagatacgtcttttgggggcaacctcggacgagcagtcttccaggcgaaaaagagggttcttgaacctctgggcctggttgaggaacctgttaagacggctccgggaaaaaagaggccggtagagcagtcgccacaagagccagactcctcctcgggcatcggcaagaaaggccagcagcccgctaaaaagagactcaattttggtcagactggcgactcagagtcagtccccgacccacaacctctcggagaacctccagcaacccccgctgctgtgggacctactacaatggcttcaggcggtggcgcaccaatggcggacaataacgaaggcgccgatggagtgggtaatgcctcaggaaattggcattgcgattccacatggctgggcgacagagtcatcaccaccagcacccgaacatgggccttgcccacctataacaaccacctctacaagcaaatctccagtgcttcaacgggggccagcaacgacaaccactacttcggctacagcaccccctgggggtattttgacttcaacagattccactgccacttctcaccacgtgactggcagcgactcatcaacaacaactggggattccggcctaagcgactcaacttcaagctcttcaacattcaggtcaaagaggttacggacaacaatggagtcaagaccatcgccaataaccttaccagcacggtccaggtcttcacggactcagactatcagctcccgtacgttctcggctctgcccaccagggctgcctgcctccgttcccggcggacgtgttcatgattccccagtacggctacctaacactcaacaacggtagtcaggccgtgggacgctcctccttctactgcctggaatactttccttcgcagatgctgagaaccggcaacaacttccagtttacttacaccttcgaggacgtgcctttccacagcagctacgcccacagccagagcttggaccggctgatgaatcctctgattgaccagtacctgtactacttgtctcggactcaaacaacaggaggcacggcaaatacgcagactctgggcttcagccaaggtgggcctaatacaatggccaatcaggcaaagaactggctgccaggaccctgttaccgccaacaacgcgtctcaacgacaaccgggcaaaacaacaatagcaactttgcctggactgctgggaccaaataccatctgaatggaagaaattcattggctaatcctggcatcgctatggcaacacacaaagacgacaaggagcgtttttttcccagtaacgggatcctgatttttggcaaacaaaatgctgccagagacaatgcggattacagcgatgtcatgctcaccagcgaggaagaaatcaaaaccactaaccctgtggctacagaggaatacggtatcgtggcagataacttgcagcagcaaaacacggctcctcaaattggaactgtcaacagccagggggccttacccggtatggtctggcagaaccgggacgtgtacctgcagggtcccatctgggccaagattcctcacacggacggcaacttccacccgtctccgctgatgggcggctttggcctgaaacatcctccgcctcagatcctgatcaagaacacgcctgtacctgcggatcctccgaccaccttcaaccagtcaaagctgaactctttcatcacgcaatacagcaccggacaggtcagcgtggaaattgaatgggagctgcagaaggaaaacagcaagcgctggaaccccgagatccagtacacctccaactactacaaatctacaagtgtggactttgctgttaatacagaaggcgtgtactctgaaccccaccccattggcacccgttacctcacccgtcccctg

SEQ ID NO: 1728 - DNA, 2211 bp, Artificial Sequence
  source: /note="Description of Artificial Sequence: Synthetic polynucleotide"
atggctgccgatggttatcttccagattggctcgaggacactctctctgaaggaataagacagtggtggaagctcaaacctggcccaccaccaccaaagcccgcagagcggcataaggacgacagcaggggtcttgtgcttcctgggtacaagtacctcggacccttcaacggactcgacaagggagagccggtcaacgaggcagacgccgcggccctcgagcacgacaaagcctacgaccagcagctccaagcgggtgacaatccgtacctgcggtataaccacgccgacgccgagtttcaggagcgtcttcaaggagatacgtcttttgggggcaacctcggacgagcagtcttccaggccaaaaagaggcttcttgaacctcttggtctggttgaggaagcggctaagacggctcctggaaagaagaggcctgtagagcagtctcctcaggaaccggactcctccgcgggtattggcaaatcgggtgcacagcccgctaaaaagagactcaatttcggtcagactggcgacacagagtcagtcccagaccctcaaccaatcggagaacctcccgcagccccctcaggtgtgggatctcttacaatggcttcaggtggtggcgcaccagtggcagacaataacgaaggtgccgatggagtgggtagttcctcgggaaattggcattgcgattcccaatggctgggggacagagtcatcaccaccagcacccgaacatgggccttgcccacctataacaaccacctctacaagcaaatctccagtgcttcaacgggggccagcaacgacaaccactacttcggctacagcaccccctgggggtattttgacttcaaccgcttccactgccacttctcaccacgtgactggcagcgactcatcaacaacaactggggattccggcccaagagactcagcttcaagctcttcaaccatccaggtcaaggaggtcacgcagaatgaaggcaccaagaccatcgccaataacctcaccagcacatccaggtgtttacggactcggagtaccagctgccgtacgttctcggctctgcccaccagggctgcctgcctccgttcccggcggacgtgttcatgattccccagtacggctacctaacactcaacaacggtagtcaggccgtgggacgctcctccttctactgcctggaatactttccttcgcagatgctgagaaccggcaacaacttccagttcacttacaccttcgaggacgtgcctttccacagcagctacgcgcacagccagagcttggaccggctgatgaatcctctgattgaccagtacctgtactacttgtctcggactcaaacaacaggaggcacggcaaatacgcagactctgggcttcagccaaggtgggcctaatacaatggccaatcaggcaaagaactggctgccaggaccctgttaccgccaacaacgcgtctcaacgacaaccgggcaaaacaacaatagcaactttgcctggactgctgggaccaaataccatctgaatggaagaaattcattgggtaatcctggcatcgctatggcaacacacaaagacgacaaggagcgtttttttcccagtaacgggatcctgatttttggcaaacaaaatgctgccagagacaatgcggattacagcgatgtcatgctcaccagcgaggaagaaatcaaaaccactaaccctgtggctacagaggaatacggtatcgtggcagataacttgcagcagcaaaacacggctcctcaaattggaactgtcaacagccagggggccttacccggtatggtctggcagaaccgggacgtgtacctgcagggtcccatctgggccaagattcctcacacggacggcaacttccacccgtctccgctgatgggcggctttggcctgaaacatcctccgcctcagatcctcatcaaaaacacacctgtacctgcggatcctccaacggccttcaaccagtcaaagctgaactctttcatcacgcaatacagcaccggacaggtcagcgtggaaattgaatgggagctgcagaaggaaaacagcaagcgctggaaccccgagatccagtacacctccaactactacaaatctacaagtgtggactttgctgttaatacagaaggcgtgtactctgaaccccaccccattggcacccgttacctcacccgtcccctgtaa

SEQ ID NO: 1729 - DNA, 2214 bp, Artificial Sequence
  source: /note="Description of Artificial Sequence: Synthetic polynucleotide"
atggctgccgatggttatcttccagattggctcgaggacaacctctctgagggcattcgcgagtggtgggacttgaaacatggagccccgaaacccaaagccaaccagcaaaagcaggacgacggccggggtctggtgcttcctggctacaagtacctcggacccttcaacggactcgacaagggggagcccgtcaacgcggcggatgcagcggccctcgagcacgacaaggcctacgaccagcagctcaaagcgggtgacaatccgtacctgcggtataaccacgccgacgccgagtttcaggagcgtctgcaagaagatacgtcttttgggggcaacctcgggcgagcagtcttccaggccaagaagagggttctcgaaccttttggtctggttgaggaaggtgctaagacggctcctggaaagaaacgtccggtagagcagtcgccacaagagccagactcctcctcgggcattggcaagacaggccagcagcccgctaaaaagagactcaattttggtcagactggcgactcagagtcagtccccgacccacaacctctcggagaacctccagcaacccccgctgctgtgggacctactacaatggcttcaggcggtggcgcaccaatggcagacaataacgaaggcgccgacggagtgggtaatgcctcaggaaattggcattgcgattccacatggctgggcgacagagtcatcaccaccagcacccgaacatgggccttgcccacctataacaaccacctctacaagcaaatctccaacgggacttcgggaggaagcaccaacgacaacacctacttcggctacagcaccccctgggggtattttgactttaacagattccactgccacttctcaccacgtgactggcagcgactcatcaacaacaactggggattccggcccaagagactcaacttcaaactcttcaacatccaagtcaaggaggtcacgcagaatgaaggcaccaagaccatcgccaataacctcaccagcaccatccaggtgtttacggactcggagtaccagctgccgtacgttctcggctccgcccaccagggctgcctgcctccgttcccggcggacgtgttcatgattccccagtacggctacctaacactcaacaacggtagtcaggccgtgggacgctcctccttctactgcctggaatactttccttcgcagatgctgagaacgggcaacaactttaccttcagctacacctttgaggacgttcctttccacagcagctacgctcacagccagagtctggaccgtctcatgaatcctctgattgaccagtacctgtactacttgtctcggactcaaacaacaggaggcacggcaaatacgcagactctgggcttcagccaaggtgggcctaatacaatggccaatcaggcaaagaactggctgccaggaccctgttaccgccaacaacgcgtctcaacgacaaccgggcaaaacaacaatagcaactttgcctggactgctgggaccaaataccatctgaatggaagaaattcattggctaatcctggcatcgctatggcaacacacaaagacgacaaggagcgtttttttcccagtaacgggatcctgatttttggcaaacaaaatgctgccagagacaatgcggattacagcgatgtcatgctcaccagcgaggaagaaatcaaaaccactaaccctgtggctacagaggaatacggtatcgtggcagataacttgcagcagcaaaacacggctcctcaaattggaactgtcaacagccagggggccttacccggtatggtctggcagaaccgggacgtgtacctgcagggtcccatctgggccaagattcctcacacggacggcaacttccacccgtctccgctgatgggcggctttggcctgaaacatcctccgcctcagatcctgatcaagaacacgcctgtacctgcggatcctccgaccaccttcaaccagtcaaagctgaactctttcatcacgcaatacagcaccggacaggtcagcgtggaaattgaatgggagctgcagaaggaaaacagcaagcgctggaaccccgagatccagtacacctccaactactacaaatctacaagtgtggactttgctgttaatacagaaggcgtgtactctgatccccaccccattggcacccgttacctcacccgtcccctgtaa

SEQ ID NO: 1730 - DNA, 2214 bp, Artificial Sequence
  source: /note="Description of Artificial Sequence: Synthetic polynucleotide"
atggctgccgatggttatcttccagattggctcgaggacaacctctctgagggcattcgcgagtggtgggcgctgaaacctggagccccgaagcccaaagccaaccagcaaaagcaggacgacggccggggtctggtgcttcctggctacaagtacctcggacccttcaacggactcgacaaaggagagccggtcaacgaggcggacgcggcagccctcgaacacgacaaggcctacgaccagcagctcaaagcgggtgacaatccgtacctgcggtataaccacgccgacgccgagtttcaggagcgtctgcaagaagatacgtcttttgggggcaacctcgggcgagcagtcttccaggccaagaagcgggttctcgaacctctcggtctggttgaggaaggcgctaagacggctcctggaaagaagagaccggtagagccatcaccccagcgttctccagactcctctacgggcatcggcaagaaaggccagcagcccgccagaaaaagactcaattttggtcagactggcgactcagagtcagttccagaccctcaacctctcggagaacctccagcagcgccctctggtgtgggacctaatacaatggcttcaggcggtggcgcaccaatggcagacaataacgagggcgccgacggagtgggtaattcctcgggaaattggcattgcgattccacatggatgggcgacagagtcatcaccaccagcacccgaacctgggccctgcccacctacaacaaccacctctacaagcaaatctccagtgcttcaacgggggccagcaacgacaaccactacttcggctacagcaccccctgggggtattttgactttaacagattccactgccacttttcaccacgtgactggcagcgactcatcaacaacaactggggattccggcccaagagactcaacttcaagctcttcaacatccaagtcaaggaggtcacgcagaatgaaggcaccaagaccatcgccaataacctcaccagcaccatccaggtgtttacggactcggagtaccagctgccgtacgttctcggctctgcccaccagggctgcctgcctccgttcccggcggacgtgttcatgattccccagtacggctacctaacactcaacaacggtagtcaggccgtgggacgctcctccttctactgcctggaatactttccttcgcagatgctgagaaccggcaacaacttccagtttacttacaccttcgaggacgtgcctttccacagcagctacgcgcacagccagagcttggaccggctgatgaatcctctgattgaccagtacctgtactacttgtctcggactcaaacaacaggaggcacggcaaatacgcagactctgggcttcagccaaggtgggcctaatacaatggccaatcaggcaaagaactggctgccaggaccctgttaccgccaacaacgcgtctcaacgacaaccgggcaaaacaacaatagcaactttgcctggactgctgggaccaaataccatctgaatggaagaaattcattggctaatcctggcatcgctatggcaacacacaaagacgacaaggagcgtttttttcccagtaacgggatcctgatttttggcaaacaaaatgctgccagagacaatgcggattacagcgatgtcatgctcaccagcgaggaagaaatcaaaaccactaaccctgtggctacagaggaatacggtatcgtggcagataacttgcagcagcaaaacacggctcctcaaattggaactgtcaacagccagggggccttacccggtatggtctggcagaaccgggacgtgtacctgcagggtcccatctgggccaagattcctcacacggacggcaacttccacccgtctccgctgatgggcggctttggcctgaaacatcctccgcctcagatcctgatcaagaacacgcctgtacctgcggatcctccgaccaccttcaaccagtcaaagctgaactctttcatcacacaatacagcaccggacaggtcagcgtggaaattgaatgggagctgcagaaggaaaacagcaagcgctggaaccccgagatccagtacacctccaactactacaaatctacaagtgtggactttgctgttaatacagaaggcgtgtactctgaaccccaccccattggcacccgttacctcacccgtcccctgtaa

SEQ ID NO: 1731 - DNA, 2211 bp, Artificial Sequence
  source: /note="Description of Artificial Sequence: Synthetic polynucleotide"
  modified_base (676)..(676): a, c, t, or g
atggctgccgatggttatcttccagattggctcgaggacactctctctgaaggaataagacagtggtggaagctcaaacctggcccaccaccaccaaagcccgcagagcggcataaggacgacagcaggggtcttgtgcttcctgggtacaagtacctcggacccttcaacggactcgacaagggagagccggtcaacgaggcagacgccgcggccctcgagcacgacaaagcctacgaccggcagctcgacagcggagacaacccgtacctcaagtacaaccacgccgacgcggagtttcaggagcgccttaaagaagatacgtcttttgggggcaacctcggacgagcagtcttccaggcgaaaaagagggttcttgaacctctgggcctggttgaggaacctgttaagacggctccgggaaaaaagaggccggtagagcagtcgccacaagagccagactcctcctcgggcatcggcaagaaaggccagcagcccgctaaaaagagactcaattttggtcagactggcgactcagagtcagtccccgacccacaacctctcggagaacctccagcaacccccgctgctgtgggacctactacaatggcttcaggcggtggcgcaccaatggcggacaataacgaaggcgccgatggagtgggtaatgcctcangaaattggcattgcgattccacatggctgggcgacagagtcatcaccaccagcacccgaacatgggccttgccacctataacaaccacctctacaagcaaatctccagtgcttcaacgggggcgcagcaacgacaaccactacttcggctacagcaccccctgggggtattttgacttcaacagattccactgccacttctcaccacgtgactggcagcgactcatcaacaacaactggggattccggcctaagcgactcaacttcaagctcttcaacattcaggtcaaagaggttacggacaacaatggagtcaagaccatcgccaataaccttaccagcacggtccaggtcttcacggactcagactatcagctcccgtacgttctcggctctgcccaccagggctgcctgcctccgttcccggcggacgtgttcatgattccccagtacggctacctaacactcaacaacggtagtcaggccgtgggacgctcctccttctactgcctggaatactttccttcgcagatgctgagaaccggcaacaacttccagtttacttacaccttcgaggacgtgcctttccacagcagctacgcccacagccagagcttggaccggctgatgaatcctctgattgaccagtacctgtactacttgtctcggactcaaacaacaggaggcacggcaaatacgcagactctgggcttcagccaaggtgggcctaatacaatggccaatcaggcaaagaactggctgccaggaccctgttaccgccaacaacgcgtctcaacgacaaccgggcaaaacaacaatagcaactttgcctggactgctgggaccaaataccatctgaatggaagaaattcattggctaatcctggcatcgctatggcaacacacaaagacgacaaggagcgtttttttcccagtaacgggatcctgatttttggcaaacaaaatgctgccagagacaatgcggattacagcgatgtcatgctcaccagcgaggaagaaatcaaaaccactaaccctgtggctacagaggaatacggtatcgtggcagataacttgcagcagcaaaacacggctcctcaaattggaactgtcaacagccagggggccttacccggtatggtttggcagaaccgggacgtgtacctgcagggtcccatctgggccaagattcctcacacggacggcaacttccacccgtctccgctgatgggcggctttggcctgaaacatcctccgcctcagatcctgatcaagaacacgcctgtacctgcggatcctccgaccaccttcaaccagtcaaagctgaactctttcatcacacagtactccacgggacaggtcagcgtggaaattgaatgggagctgcagaaggaaaacagcaagcgctggaacccggagatccagtacacttccaactactacaaatctacaaatgtggactttgctgttaacacagaaggcgtgtactctgaaccccaccccattggcacccgttacctcacccgtcccctgtaa

SEQ ID NO: 1732 - DNA, 2211 bp, Artificial Sequence
  source: /note="Description of Artificial Sequence: Synthetic polynucleotide"
  modified_base (715)..(715): a, c, t, or g
atggctgccgatggttatcttccagattggctcgaggacaacctctctgagggcattcgcgagtggtgggacttgaaacctggagccccgaaacccaaagccaaccagcaaaagcaggacgacggccggggtctggtgcttcctggctacaagtacctcggacccttcaacggactcgacaagggggagcccgtcaacgcggcggatgcagcggccctcgagcacgacaaggcctacgaccagcagctccaagcgggtgacaatccgtacctgcggtataaccacgccgacgccgagtttcaggagcgtcttcaaggagatacgtcttttgggggcaacctcggacgagcagtcttccaggccaagaagcgggttctcgaacctctcggtctggttgaggaagcggctaagacggctcctggaaagaagaggcctgtagagcagtctcctcaggaaccggactcctccgcgggtattggcaaatcgggtgcacagcccgctaaaaagagactcaatttcggtcagactggcgacacagagtcagtcccagaccctcaaccaatcggagaacctcccgcagccccctctggtgtgggacctaatacaatggctgcaggcggtggcgcaccaatggcagacaataacgaaggcgccgatggagtgggtagttcctcgggaaattggcattgcgattccacatggctgggcgacagantcatcaccaccagcacccgaacctgggccctgcccacctataacaaccatctctacaagcaaatctccagtgcttcaacgggggccagcaacgacaaccactacttcggctacagcaccccctgggggtattttgacttcaacagattccactgccacttctcaccacgtgactggcagcgactcatcaacaacaactggggattccggcctaagcgactcaacttcaagctcttcaacattcaggtcaaagaggttacggacaacaatggagtcaagaccatcgccaataaccttaccagcacggtccaggtcttcacggactcggagtaccagttgccgtacgtcctcggctctgcgcaccagggctgcctgcctccgttcccggcggacgtgttcatgattccgcagtacggctacctaacgctcaacaatggcagccaggcagtgggacggtcatccttttactgcctggaatatttcccatcgcagatgctgagaacgggcaacaactttaccttcagctacacttttgaggacgttcctttccacagcagctacgctcacagccagagtctggaccgtctcatgaatcctctgattgaccagtacctgtactacttgtctcggactcaaacaacaggaggcacggcaaatacgcagactctgggcttcagccaaggtgggcctaatacaatggccaatcaggcaaagaactggctgccaggaccctgttaccgccaacaacgcgtctcaacgacaaccggacaaaacaacaatagcaactttgcctggactgctgggaccaaataccatctgaatggaagaaattcattggctaatcctggcatcgctatggcaacacacaaagacgacaaggagcgtttttttcccagtaacgggatcctgatttttggcaaacaaaatgctgccagagacaatgcggattacagcgatgtcatgctcaccagcgaggaagaaatcaaaaccactaaccctgtggctacagaggaatacggtatcgtggcagataactttcagcagcaaaacacggctcctcaaattggaactgtcaacagccagggggccttacccggtatggtctggcagaaccgggacgtgtacctgcagggtcccatctgggccaagattcctcacacggacggcaacttccacccgtctccgctgatgggcggctttggcctgaaacatcctccgcctcagatcctgatcaagaacacgcctgtacctgcggatcctccgaccaccttcaaccagtcaaagctgaactctttcatcacgcaatacagcaccggacaggtcagcgtggaaattgaatgggagctgcagaaggaaaacagcaagcgctggaaccccgagatccagtacacctccaactactacaaatctacaagtgtggactttgctgttaatacagaaggcgtgtactctgaaccccaccccattggcacccgttacctcacccgtcccctgtaa

SEQ ID NO: 1733 - DNA, 2211 bp, Artificial Sequence
  source: /note="Description of Artificial Sequence: Synthetic polynucleotide"
atggctgccgatggttatcttccagattggctcgaggacaacctctctgagggcattcgcgagtggtgggcgctgaaacctggagccccgaagcccaaagccaaccagcaaaagcaggacgacggccggggtctggtgcttcctggctacaagtacctcggacccttcaacggactcgacaaaggagagccggtcaacgaggcggacgcggcagccctcgaacacgacaaagcttacgaccagcagctcaaggccggtgacaacccctacctcaagtataaccacgccgacgccgagtttcaggagcgtctgcaagaagatacgtcttttgggggcaacctcgggcgagcagtcttccaggccaaaaagaggcttcttgaacctcttggtctggttgaggaagcggctaagacggctcctggaaagaagaggcctgtagagcagtctcctcaggaaccggactcctccgcgggtattggcaaatcgggtgcacagcccgctaaaaagagactcaatttcggtcagactggcgacacagagtcagtcccagacccacaacctctcggagaacctccagcaacccccgctgctgtgggacctactacaatggcttcaggcggtggcgcaccaatggcggacaataacgaaggcgccgatggagtgggtaatgcctcaggaaattggcattgcgattccacatggctgggcgacagagtcatcaccaccagcacccgaacatgggccttgcccacctataacaaccacctctacaagcaaatctccagtgcttcaacgggggccagcaacgacaaccactacttcggctacagcaccccctgggggtattttgacttcaacagattccactgccacttctcaccacgtgactggcagcgactcatcaacaacaactggggattccggcccaagagactcagcttcaagctcttcaacatccaggtcaaggaggtcacgcagaatgaaggcaccaagaccatcgccaataacctcaccagcaccatccaggtgtttacggactcggagtaccagctgccgtacgttctcggctccgcccaccagggctgcctgcctccgttcccggcggacgtgttcatgattccccagtacggctacctaacactcaacaacggtagtcaggccgtgggacgctcctccttctactgcctggaatactttccttcgcagatgctgagaaccggcaacaacttccagtttacttacaccttcgaggacgtgcctttccacagcagctacgcccacagccagagcttggaccggctgatgaatcctctgattgaccagtacctgtactacttgtctcggactcaaacaacaggaggcacggcaaatacgcagactctgggcttcagccaaggtgggcctaatacaatggccaatcaggcaaagaactggctgccaggaccctgttaccgccaacaacgcgtctcaacgacaaccgggcaaaacaacaatagcaactttgcctggactgctgggaccaaataccatctgaatggaagaaattcattggctaatcctggcatcgctatggcaacacacaaagacgacaaggagcgtttttttcccagtaacgggatcctgatttttggcaaacaaaatgctgccagagacaatgcggattacagcgatgtcatgctcaccagcgaggaagaaatcaaaaccactaaccctgtggctacagaggaatacggtatcgtggcagataacttgcagcagcaaaacacggctcctcaaattggaactgtcaacagccagggggccttacccggtatggtctggcagaaccgggacgtgtacctgcagggtcccatctgggccaagattcctcacacggacggcaacttccacccgtctccgctgatgggcggctttggcctgaaacatcctccgcctcagatcctgatcaagaacacgcctgtacctgcggatcctccgaccaccttcaaccagtcaaagctgaactctttcatcacgcaatacagcaccggacaggtcagcgtggaaattgaatgggagctgcagaaggaaaacagcaagcgctggaaccccgagatccagtacacctccaactactacaaatctacaagtgtggactttgctgttaatacagaaggcgtgtactctgaaccccaccccattggcacccgttacctcacccgtcccctgtaa

SEQ ID NO: 1734 - DNA, 2211 bp, Artificial Sequence
  source: /note="Description of Artificial Sequence: Synthetic polynucleotide"
atggctgccgatggttatcttccagattggctcgaggacactctctctgaaggaataagacagtggtggaagctcaaacctggcccaccaccaccaaagcccgcagagcggcataaggacgacagcaggggtcttgtgcttcctgggtacaagtacctcggacccttcaacggactcgacaagggagagccggtcaacgaggcagacgccgcggccctcgagcacgacaaagcctacgaccagcagctccaagcgggtgacaatccgtacctgcggtataaccacgccgacgccgagtttcaggagcgtcttcaaggagatacgtcttttgggggcaacctcggacgagcagtcttccaggccaaaaagaggcttcttgaacctcttggtctggttgaggaagcggctaagacggctcctggaaagaagaggcctgtagagcagtctcctcaggaaccggactcctccgcgggtattggcaaatcgggtgcacagcccgctaaaaagagactcaatttcggtcagactggcgacacagagtcagtcccagaccctcaaccaatcggagaacctcccgcagccccctcaggtgtgggatctcttacaatggcttcaggtggtggcgcaccagtggcagacaataacgaaggtgccgatggagtgggtagttcctcgggaaattggcattgcgattcccaatggctgggggacagagtcatcaccaccagcacccgaacatgggccttgcccacctataacaaccacctctacaagcaaatctccagtgcttcaacgggggccagcaacgacaaccactacttcggctacagcaccccctgggggtattttgacttcaaccgcttccactgccacttctcaccacgtgactggcagcgactcatcaacaacaactggggattccggcccaagagactcagcttcaagctcttcaacatccaggtcaaggaggtcacgcagaatgaaggcaccaagaccatcgccaataacctcaccagcaccatccaggtgtttacggactcggagtaccagctgccgtacgttctcggctctgcccaccagggctgcctgcctccgttcccggcggacgtgttcatgattccccagtacggctacctaacactcaacaacggtagtcaggccgtgggacgctcctccttctactgcctggaatactttccttcgcagatgctgagaaccggcaacaacttccagtttacttacaccttcgaggacgtgcctttccacagcagctacgcccacagccagagcttggaccggctgatgaatcctctgattgaccagtacctgtactacttgtctcggactcaaacaacaggaggcacggcaaatacgcagactctgggcttcagccaaggtgggcctaatacaatggccaatcaggcaaagaactggctgccaggaccctgttaccgccaacaacgcgtctcaacgacaaccgggcaaaacaacaatagcaactttgcctggactgctgggaccaaataccatctgaatggaagaaattcattggctaatcctggcatcgctatggcaacacacaaagacgacaaggagcgtttttttcccagtaacgggatcctgatttttggcaaacaaaatgctgccagagacaatgcggattacagcgatgtcatgctcaccagcgaggaagaaatcaaaaccactaaccctgtggctacagaggaatacggtatcgtggcagataacttgcagcagcaaaacacggctcctcaaattggaactgtcaacagccagggggccttacccggtatggtctggcagaaccgggacgtgtacctgcagggtcccatctgggccaagattcctcacacggacggcaacttccacccgtctccgctgatgggcggctttggcctgaaacatcctccgcctcagatcctgatcaagaacacgcctgtacctgcggatcctccgaccaccttcaaccagtcaaagctgaactctttcatcacgcaatacagcaccggacaggtcagcgtggaaattgaatgggagctgcagaaggaaaacagcaagcgctggaaccccgagatccagtacacctccaactactacaaatctacaagtgtggactttgctgttaatacagaaggcgtgtactctgaaccccaccccattggcacccgttacctcacccgtcccctgtaa

SEQ ID NO: 1735 - DNA, 2217 bp, Artificial Sequence
  source: /note="Description of Artificial Sequence: Synthetic polynucleotide"
atggctgccgatggttatcttccagattggctcgaggacaacctctctgagggaataagacagtggtggaagctcaaacctggcccaccaccaccaaagcccgcagagcggcataaggacgacagcaggggtcttgtgcttcctgggtacaagtacctcggacccttcaacggactcgacaagggagagccggtcaacgcggcggacgcagcggccctcgagcacgacaaggcctacgaccagcagctcaaagcgggtgacaatccgtacctgcggtataaccacgccgacgccgagtttcaggagcgtctgcaagaagatacgtcttttgggggcaacctcgggcgagcagtcttccaggccaagaagcgggttctcgaacctctcggtctggttgaggaaggcgctaagacggctcctggaaagaagagaccggtagagccatcaccccagcgttctccagactcctctacgggcatcggcaagaaaggccagcagcccgctaaaaagagactcaattttggtcagactggcgactcagagtcagtccccgacccacaacctctcggagaacctccagcaacccccgctgctgtgggacctactacaatggcttcaggcggtggcgcaccaatggcagacaataacgaaggcgccgacggagtgggtaatgcctcaggaaattggcattgcgattccacatggctgggggacagagtcatcaccaccagcacccgaacctgggccctgcccacctacaacaaccacctctacaagcaaatctccaacgggacttcgggaggaagcaccaacgacaacacctacttcggctgcgtcacgccctgggggtattttgactttaacaaattccactgccacttttcaccggatgactggcaacgactcatcaacaacggctggggattccggactaagcgactcaacttcaagctcttcagcatgaaagtcaaaaagggtacggacaacactggaatcaagaccatcgcgaataaccttaccaacacggtccatgtcttcgcggactcggagtaccagttgccgtacgtcctcggctctgcgcaccagggctgcctccctccgttcccggcggacgtgttcatgattccgcagtacggctacctaacgctcaacaatggcagccaggcagtgggacggtcatccttttactgcctggaatatttcccatcgcagatgctgagaacgggcaacaactttaccttcagctacacctttgaggacgttcctttccacagcagctacgctcacagccagagtctggaccgtctcatgaatcctctgattgaccagtacctgtactacttgtctcggactcaaacaacaggaggcacggcaaatacgcagactctgggcttcagccaaggtgggcctaatacaatggccaatcaggcaaagaactggctgccaggaccctgttaccgccaacaacgcgtctcaacgacaaccgggcaaaacaacaatagcaactttgcctggactgctgggaccaaataccatctgaatggaagaaattcattggctaatcctggcatcgctatggcaacacacaaagacgacaaggagcgtttttttcccagtaacgggatcctgatttttggcaaacaaaatgctgccagagacaatgcggattacagcgatgtcatgctcaccagcgaggaagaaatcaaaaccactaaccctgtggctacagaggaatacggtatcgtggcagataacttgcagcagcaaaacacggctcctcaaattggaactgtcaacagccagggggccttacccggtatggtctggcagaaccgggacgtgtacctgcagggtcccatctgggccaagattcctcacacggacggcaacttccacccgtctccgctgatgggcggctttggcctgaaacatcctccgcctcagatcctgatcaagaacacgcctgtacctgcggatcctccgaccaccttcaaccagtcaaagctgaactctttcatcacgcaatacagcaccggacaggtcagcgtggagatcgagtgggagctgcagaaggaaaacagcaagcgctggaacccggagatccagtacacctccaactactacaaatctacaagtgtggactttgctgttaatacagaaggcgtgtactctgaaccccaccccattggcacccgttacctcacccgtcccctgtaa

SEQ ID NO: 1736 - DNA, 2214 bp, Artificial Sequence
  source: /note="Description of Artificial Sequence: Synthetic polynucleotide"
atggctgccgatggttatcttccagattggctcgaggacactctctctgaaggaataagacagtggtggaagctcaaacctggcccaccaccaccaaagcccgcagagcggcataaggacgacagcaggggtcttgtgcttcctgggtacaagtacctcggacccttcaacggactcgacaagggggagcccgtcaacgcggcggacgcagcggccctcgagcacgacaaggcctacgaccagcagctcaaagcgggtgacaatccgtacctgcggtataaccacgccgacgccgagtttcaggagcgtctgcaagaagatacgtcttttgggggcaacctcgggcgagcagtcttccaggccaagaagcgggttctcgaacctctcggtctggttgaggaaggcgctaagacggctcctggaaagaagagaccggtagagccatcaccccagcgttctccagactcctctacgggcatcggcaagaaaggccagcagcccgcgaaaaagagactcaactttgggcagactggcgactcagagtcagtgcccgaccctcaaccaatcggagaaccccccgcaggcccctctggtctgggatctggtacaatggctgcaggcggtggcgctccaatggcagacaataacgaaggcgccgatggagtgggtagttcctcgggaaattggcattgcgattccacatggctgggggacagagtcatcaccaccagcacccgaacctgggccctgcccacctacaacaaccacctctacaaacaaatttccagcgcttcaacgggagcctcgaacgacaatcactactttggctacagcaccccctgggggtattttgacttcaacagattccactgccacttctcaccacgtgactggcagcgactcatcaacaacaactggggattccggcctaagcgactcaacttcaagctcttcaacattcaggtcaaagaggttacggacaacaatggagtcaagaccatcgccaataaccttaccagcacggtccaggtcttcacggactcggagtaccagttgccgtacgtcctcggctctgcgcaccagggctgcctccctccgttcccggcggacgtgttcatgattccgcagtacggctacctaacgctcaacaatggcagccaggcagtgggacggtcatccttttactgcctggaatatttcccatcgcagatgctgagaacgggcaacaactttaccttcagctacacctttgaggacgttcctttccacagcagctacgctcacagccagagtctggaccgtctcatgaatcctctgattgaccagtacctgtactacttgtctcggactcaaacaacaggaggcacggcaaatacgcagactctgggcttcagccaaggtgggcctaatacaatggccaatcaggcaaagaactggctgccaggaccctgttaccgccaacaacgcgtctcaacgacaaccgggcaaaacaacaatagcaactttgcctggactgctgggaccaaataccatctgaatggaagaaattcattggctaatcctggcatcgctatggcaacacacaaagacgacaaggagcgtttttttcccagtaacgggatcctgatttttggcaaacaaaatgctgccagagacaatgcggattacagcgatgtcatgctcaccagcgaggaagaaatcaaaaccactaaccctgtggctacagaggaatacggtatcgtggcagataacctgcagcagcaaaacacggctcctcaaattggaactgtcaacagccagggggccttacccggtatggtctggcagaaccgggacgtgtacctgcagggtcccatctgggccaagattcttcacacggacggcaactttcacccttctccgctgatgggagggtttggaatgaagcacccgcctcctccgatcctgatcaagaacacgcctgtacctgcggatcctccgaccaccttcaaccagtcaaagctgaactctttcatcacgcaatacagcaccggacaggtcagcgtggaaattgaatgggagctgccgaaggaaaacagcaagcgctggaaccccgagatccagtacacctccaactactacaaatctacaagtgtggactttgctgttaatacagaaggtgtgtactatgaaccccaccccattggcacccgttacctcacccctcccctgtaa

SEQ ID NO: 1737 - DNA, 2214 bp, Artificial Sequence
  source: /note="Description of Artificial Sequence: Synthetic polynucleotide"
atggctgccgatggttatcttccagattggctcgaggacaacctctctgagggcattcgcgagtggtgggcgctgaaacctggagccccgaagcccaaagccaaccagcaaaagcaggacgacggccggggtctggtgcttcctggctacaagtacctcggacccttcaacggactcgacaagggggagcccgtcaacgcggcggacgcagcggccctcgagcacgacaaggcctacgaccagcagctcaaagcgggtgacaatccgtacctgcggtataaccacgccgacgccgagtttcaggagcgtctgcaagaagatacgtcttttgggggcaacctcgggcgagcagtcttccaggccaagaagcgggttctcgaacctctcggtctggttgaggaaggcgctaagacggctcctggaaagaagagaccggtagagccatcaccccagcgctctccagactcctctacgggcatcggcaagaaaggccaacagcccgccagaaaaagactcaattttggtcagactggcgactcagagtcagttccagaccctcaacctctcggagaacctccagcagcgccctctggtgtggcacctaatacaatggctgcaggcggtggcgcaccaatggcagacaataacgaaggcgccgacggagtgggtaatgcctcaggaaattggcattgcgattccacatggctgggcgacagagtcatcaccaccagcacccgaacatgggccttgcccacctataacaaccacctctacaagcaaatctccagtgcttcaacgggggccagcaacgacaaccactacttcggctacagcaccccctgggggtattttgatttcaacagattccactgccacttttcaccacgtgactggcagcgactcatcacaacaattgggggattccggcctaagcgactcaacttcaagctcttcaacattcaggtcaaagaggttacggacaacaatggagtcaagaccatcgccaataaccttaccagcacggtccaggtcttcacggactcggagtaccagttgccgtacgtcctcggctctgcgcaccagggctgcctccctccgttcccggcggacgtgttcatgattccgcagtacggctacctaacgctcaacaatggcagccaggcagtgggacggtcatccttttactgcctggaatatttcccatcgcagatgctgagaacgggcaacaactttaccttcagctacacctttgaggacgttcctttccacagcagctacgctcacagccagagtctggaccggctgatgaatcctctgattgaccagtacctgtactacttgtctcggactcaaacaacaggaggcacggcaaatacgcagactctgggcttcagccaaggtgggcctaatacaatggccaatcaggcaaagaactggctgccaggaccctgttaccgccaacaacgcgtctcaacgacaaccgggcaaaacaacaatagcaactttgcctggactgctgggaccaaataccatctgaatggaagaaattcattggctaatcctggcatcgctatggcaacacacaaagacgacaaggagcgtttttttcccagtaacgggatcctgatttttggcaaacaaaatgctgccagagacaatgcggattacagcgatgtcatgctcaccagcgaggaagaaatcaaaaccactaaccctgtggctacagaggaatacggtatcgtggcagataacttgcagcagcaaaacacggctcctcaaattggaactgtcaacagccagggggccttacccggtatggtctggcagaaccgggacgtgtacctgcagggtcccatctgggccaagattcctcacacggacggcaacttccacccgtctccgctgatgggcggctttggcctgaaacatcctccgcctcagatcctgatcaagaacacgcctgtacctgcggatcctccgaccaccttcaaccagtcaaagctgaactctttcatcacgcaatacagcaccggacaggtcagcgtggaaattgaatgggagctgcagaaggaaaacagcaagcgctggaaccccgagatccagtacacctccaactactacaaatctacaagtgtggactttgctgttaatacagaaggcgtgtactctgaaccccaccccattggcacccgttacctcacccgtcccctgtaa

SEQ ID NO: 1738 - DNA, 2211 bp, Artificial Sequence
  source: /note="Description of Artificial Sequence: Synthetic polynucleotide"
atggctgccgatggttatcttccagattggctcgaggacactctctctgaaggaataagacagtggtggaagctcaaacctggcccaccaccaccaaagcccgcagagcggcataaggacgacggccggggtctggtgcttcctggctacaagtacctcggacccttcaacggactcgacaagggggagcccgtcaacgcggcggacgcagcggccctcgagcacgacaaggcctacgaccagcagctcaaagcgggtgacaatccgtacctgcggtataaccacgccgacgccgagtttcaggagcgtctgcaagaagatacgtcttttgggggcaacctcggacgagcagtcttccaggcgaaaaagagggttcttgaacctctgggcctggttgaggaacctgttaagacggctccgggaaaaaagaggccggtagagcagtcgccacaagagccagactcctcctcgggcatcggcaagaaaggccagcagcccgctaaaaagagactcaattttggtcagactggcgactcagagtcagtccccgacccacaacctctcggagaacctccagcaacccccgctgctgtgggacctactacaatggcttcaggcggtggcgcaccaatggcagacaataacgaaggcgccgacggagtgggtaatgcctcaggaaattggcattgcgattccacatggatgggcgacagagtcatcaccaccagcacccgaacatgggccttgcccacctataacaaccacctctacaagcaaatctccagtgcttcaacgggggccagcaacgacaaccactacttcggctacagcaccccctgggggtattttgactttaacagattccactgccacttttcaccacgtgactggcagcgactcatcaacaacaactggggattccggcctaagcgactcaacttcaagctcttcaacattcaggtcaaggaggtcacgcagaatgaaggcaccaagaccatcgccaataacctcaccagcaccatccaggtgtttacggactcggagtaccagctgccgtacgttctcggctccgcccaccagggctgcctgcctccgttcccggcggacgtgttcatgatcccccagtacggctacctaacactcaacaacggtagtcaggccgtgggacgctcctccttctactgcctggaatactttccttcgcagatgctgagaaccggcaacaacttccagtttacttacaccttcgaggacgtgcctttccacagcagctacgcgcacagccagagcttggaccggctgatgaatcctctgattgaccagtacctgtactacttgtctcggactcaaacaacaggaggcacggcaaatacgcagactctgggcttcagccaaggtgggcctaatacaatggccaatcacgcaaagaactggctgccaggaccctgttaccgccaacaacgcgtctcaacgacaaccgggcaaaacaacaatagcaactttgcctggactgctgggaccaaataccatctgaatggaagaaattcattggctaatcctggcatcgctatggcaacacacaaagacgacaaggagcgtttttttcccagtaacgggatcctgatttttggcaaacaaaatgctgccagagacaatgcggattacagcgatgtcatgctcaccagcgaggaagaaatcaaaaccactaaccctgtggctacagaggaatacggtatcgtggcagataacttgcagcagcaaaacacggctcctcaaattggaactgtcaacagccagggggccttacccggtatggtctggcagaaccgggacgtgtacctgcagggtcccatctgggccaagattcctcacacggacggcaacttccacccgtctccgctgatgggcggcttcggcctgaaacatcctccgcctcagatcctgatcaagaacacgcctgtacctgcggatcctccgaccaccttcaaccagtcaaagctgaactctttcatcacgcaatacagcaccggacaggtcagcgtggaaattgaatgggagctgcagaaggaaaacagcaagcgctggaaccccgagatccagtacacctccaactactacaaatctacaagtgtggactttgctgttaatacagaaggcgtgtactctgaaccccaccccattggcacccgttacctcacccgtcccctgtaa

SEQ ID NO: 1739 - DNA, 2214 bp, Artificial Sequence
  source: /note="Description of Artificial Sequence: Synthetic polynucleotide"
atggctgccgatggttatcttccagattggctcgaggacaacctctctcagggcattcgcgagtggtgggacttgaaacctggagccccgaaacccaaagccaaccagcaaaagcaggacgacggccggggtctggtgcttcctggctacaagtacctcggacccttcaacggactcgacaagggggagcccgtcaacgcggcggacgcagcggccctcgagcacgacaaggcctacgaccagcagctcaaagcgggtgacaatccgtacctgcggtataaccacgccgacgccgagtttcaggagcgtctgcaagaagatacgtcttttgggggcaacctcggacgagcagtcttccaggccaagaagcgggttctcgaacctctcggtctggttgaggaaggcgctaagacggctcctggaaagaagagaccggtagagccatcaccccagcgttctccagactcctctacgggcatcggcaagaaaggccaacagcccgccagaaaaagactcaattttggtcagactggcgactcagagtcagttccagaccctcaacctctcggagaacctccagcagcgcccgctgctgtgggacctactacaatggcttcaggcggtggcgcaccaatggcagacaataacgaaggcgccgacggagtgggtagttcctcgggaaattggcattgcgattcccaatggctgggggacagagtcatcaccaccagcacccgaacctgggccctgcccacctacaacaaccacctctacaagcaaatctccagtgcttcaacgggggccagcaacgacaaccactacttcggctacagcaccccctgggggtattttgacttcaacagattccactgccacttttcaccacgtgactggcaaagactcatcaacaacaactggggattccggcccaagagactcagcttcaagctcttcaacatccaggtcaaggaggtcacgcagaatgaaggcaccaagaccatcgccaataacctcaccagcaccatccaggtgtttacggactcggagtaccagctgccgtacgttctcggctctgcccaccagggctgcctgcctccgttcccggcggacgtgttcatgattccccagtacgggtacctgactctgaacaatggcagtcaggccgtgggccgttcctccttctactgcctggagtactttccttctcaaatgctgagaaccggcaacaacttccagtttacttacaccttcgaggacgtgcctttccacagcagctacgcccacagccagagcttggaccggctgatgaatcctctgattgaccagtacctgtactacttgtctcggactcaaacaacaggaggcacgacaaatgcgcagactctgggcttcagccaaggtgggcctaatacaatggccaatcaggcaaagaactggctgccaggaccctgttaccgccaacaacgcgtctcaacgacaaccgggcaaaacaacaatagcaactttgcctggactgctgggaccaaataccatctgaatggaagaaattcattggctaatcctggcatcgctatggcaacacacaaagacgacaaggagcgtttttttcccagtaacgggatcctgatttttggcaaacaaaatgctgccagagacaatgcggattacagcgatgtcatgctcaccagcgaggaagaaatcaaaaccactaaccctgtggctacagaggaatacggtatcgtggcagataacttgcagcagcaaaacacggctcctcaaattggaactgtcaacagccagggggccttacccggtatggtctggcagaaccgggacgtgtacctgcagggtcccatctgggccaagattcctcacacggacggcaacttccacccgtctccgctgatgggcggctttggcctgaaacatcctccgcctcagatcctgatcaagaacacgcctgtacctgcggatcctccgaccaccttcaaccagtcaaagctgaactctttcatcacacagtactccacgggacaggtcagcgtggaaattgaatgggagctgcagaaggaaaacagcaagcgctggaacccggagatccagtacacttccaactactacaaatctacaaatgtggactttgctgttaacacagaaggcgtgtactctgaaccccaccccattggcacccgttacctcacccgtcccctgtaa

SEQ ID NO: 1740 - DNA, 2211 bp, Artificial Sequence
  source: /note="Description of Artificial Sequence: Synthetic polynucleotide"
atggctgccgatggttatcttccagattggctcgaggacaacctctctgagggcattcgcgagtggtgggacttgaaacctggagccccgaaacccaaagccaaccagcaaaagcaggacgacggccggggtctggtgcttcctggctacaagtacctcggacccttcaacggactcgacaagggggagcccgtcaacgcggcggacgcagcggccctcgagcacgacaaggcctacgaccagcagctcaaagcgggtgacaatccgtacctgcggtataaccacgccgacgccgagtttcaggagcgtctgcaagaagatacgtcttttgggggcaacctcgggcgagcagtcttccaggccaagaagagggttctcgaaccttttggtctggttgaggaaggcgctaagacggctcctggaaagaaacgtccggtagagcagtcgccacaagagccagactcctcctcgggcatcggcaagacaggccagcagcccgctaaaaagagactcaatttcggtcagactggcgacacagagtcagtcccagaccctcaaccaatcggagaacctcccgcagccccctcaggtgtgggacctaatacaatggctgcaggcggtggcgcaccaatggcagacaataacgaaggcgccgacggagtgggtagttcctcgggaaattggcattgcgattccacatggatgggtgacagagtcatcaccaccagcacccgaacctgggccctgcccacctacaataaccacctctacaagcaaatctccagtgcttcaacgggggccagcaacgacaaccactacttcggctacagcaccccctgggggtattttgacttcaacagattccactgccacttctcaccacgtgactggcagcgactcatcaacaacaactggggattccggcctaagcgactcaacttcaagctcttcaacattcaggtcaaggaggtcacgcagaatgaaggcaccaagaccatcgccaataacctcaccagcaccatccaggtgtttacggactcggagtaccagctgccgtacgttctcggctctgcccaccagggctgcctgcctccgttcccggcggacgtgttcatgattccccagtacggctacctaacactcaacaacggtagtcaggccgtgggacgctcctccttctactgcctggaatactttccttcgcagatgctgagaaccggcaacaacttccagtttacttacaccttcgaggacgtgcctttccacagcagctacgcccacagccagagcttggaccggctgatgaatcctctgattgaccagtacctgtactacttgtctcggactcaaacaacaggaggcacggcaaatacgcagactctgggcttcagccaaggtgggcctaatacaatggccaatcaggcaaagaactggctgccaggaccctgttaccgccaacaacgcgtctcaacgacaaccgggcaaaacaacaatagcaactttgcctggactgctgggaccaaataccatctgaatggaagaaattcattggctaatcctggcatcgctatggcaacacacaaagacgacaaggagcgtttttttcccagtaacgggatcctgatttttggcaaacaaaatgctgccagagacaatgcggattacagcgatgtcatgctcaccagcgaggaagaaatcaaaaccactaaccctgtggctacagaggaatacggtatcgtggcagataacttgcagcagcaaaacacggctcctcaaattggaactgtcaacagccagggggccttacccggtatggtctggcagaaccgggacgtgtacctgcagggtcccatctgggccaagattcctcacacggacggcaacttccacccgtctccgctgatgggcggctttggcctgaaacatcctccgcctcagatcctgatcaagaacacgcctgtacctgcggatcctccgaccaccttcaaccagtcaaagctgaactctttcatcacacagtactccacgggacaggtcagcgtggaaattgaatgggagctgcagaaggaaaacagcaagcgctggaacccggagatccagtacacttccaactactacaaatctacaaatgtggactttgctgttaacacagaaggcgtgtactctgaaccccaccccattggcacccgttacttcacccgtcccctgtaa

SEQ ID NO: 1741 - DNA, 2211 bp, Artificial Sequence
  source: /note="Description of Artificial Sequence: Synthetic polynucleotide"
atggctgccgatggttatcttccagattggctcgaggacaacctctctgagggcattcgcgagtggtgggacttgaaacctggagccccgaaacccaaagccaaccagcaaaagcaggacgacggccggggtctggtgcttcctggctacaagtacctcggacccttcaacggactcgacaagggggagcccgtcaacgcggcggacgcagcggccctcgagcacgacaaggcctacgaccagcagctcaaagcgggtgacaatccgtacctgcggtataaccacgccgacgccgagtttcaggagcgtctgcaagaagatacgtcttttgggggcaacctcgggcgagcagtcttccaggccaagaagcgggttctcgaacctctcggtctggttgaggaaggcgctaagacggctcctggaaagaaacgtccggtagagcagtcgccacaagagccagactcctcctcgggcatcggcaagacaggccagcagcccgctaaaaaaagactcaattttggtcagactggcgactcagagtcagttccagaccctcaacctctcggagaacctccagcaacccccgctgctgtgggacctactacaatggcttcaggtggtggcgcaccaatggcagacaataacgagggcgccgacggagtgggtaattcctcgggaaattggcattgcgattccacatggatgggcgacagagtcatcaccaccagcacccgaacctgggccctgcccacctacaacaatcacctctacaagcaaatctccagtgcttcaacgggggccagcaacgacaaccactacttcggctacagcaccccctgggggtattttgacttcaacagattccactgccacttctcaccacgtgactggcagcgactcatcaacaacaactggggattccggcctaagcgactcaacttcaagctcttcaacattcaggtcaaagaggttacggacaacaatggagtcaagaccatcgccaataaccttaccagcacggtccaggtcttcacggactcggagtaccagttgccgtacgtcctcggctctgcgcaccagggctgcctccctccgttcccggcggacgtgttcatgattccgcagtacggctacctaacgctcaacaacggtagtcaggccgtgggacgctcctccttctactgcctggaatactttccttcgcagatgctgagaaccggcaacaacttccagtttacttacaccttcgaggacgtgcctttccacagcagctacgcccacagccagagcttggaccggctgatgaatcctctgattgaccagtacctgtactacttgtctcggactcaaacaacaggaggcacggcaaatacgcagactctgggcttcagccaaggtgggcctaatacaatggccaatcaggcaaagaactggctgccaggaccctgttaccgccaacaacgcgtctcgacgacaaccgggcaaaacaacaatagcaactttgcctggactgctgggaccaaataccatctgaatggaagaaattcattggctaatcctggcatcgctatggcaacacacaaagacgacaaggagcgtttttttcccagtaacgggatcctgatttttggcaaacaaaatgctgccagagacaatgcggattacagcgatgtcatgctcaccagcgaggaagaaatcaaaaccactaaccctgtggctacagaggaatacggtatcgtggcagataacttgcagcagcaaaacacggctcctcaaattggaactgtcaacagccagggggccttacccggtatggtttggcagaaccgggacgtgtacctgcagggtcccatctgggccaagattcctcacacggacggcaacttccacccgtctccgctgatgggcggctttggcctgaaacatcctccgcctcagatcctgatcaagaacacgcctgtacctgcggatcctccgaccaccttcaaccagtcaaagctgaactctttcatcacacagtactccacgggacaggtcagcgtggaaattgaatgggagctgcagaaggaaaacagcaagcgctggaacccggagatccagtacacttccaactactacaaatctacaaatgtggactttgctgttaacacagaaggcgtgtactctgaaccccaccccattggcacccgttacctcacccgtcccctgtaa

SEQ ID NO: 1742 - DNA, 2211 bp, Artificial Sequence
  source: /note="Description of Artificial Sequence: Synthetic polynucleotide"
atggctgccgatggttatcttccagattggctcgaggacaacctctctgagggcattcgcgagtggtgggacttgaaacctggagccccgaagcccaaagccaaccagcaaaagcaggacgacggccggggtctggtgcttcctggctacaagtacctcggacccttcaacggactcgacaagggggagcccgtcaacgcggcggacgcagcggccctcgagcacgacaaggcctacgaccagcagctcaaagcgggtgacaatccgtacctgcggtataaccacgccgacgccgagtttcaggagcgtctgcaagaagatacgtcttttgggggcaacctcgggcgagcagtcttccaggccaagaagcgggttctcgaacctctcggtctggttgaggaaggcgctaagacggctcctggaaagaaacgtccggtagagcagtcaccacaagagccagactcctcctcgggcatcggcaagacaggccagcagcccgctaaaaagagactcaattttggtcagactggcgactcagagtcagtccccgacccacaacctctcggagaacctccagcaacccccgctgctgtgggacctactacaatggcttcaggcggtggcgcaccaatggcggacaataacgaaggcgccgatggagtgggtaatgcctcaggaaattggcattgcgattccacatggctgggcgacagagtcatcaccaccagcacccgaacatgggccttgcccacctataacaaccacctctacaagcaaatctccagtgcttcaacgggggccagcaacgacaaccactacttcggctacagcaccccctgggggtattttgactttaacagattccactgccacttctcaccacgtgactggcagcgactcatcaacaacaactggggattccggcccaagagactcaacttcaagctcttcaacatccaggtcaaggaggtcacgcagaatgaaggcaccaagaccatcgccaataacctcaccagcaccatccaggtgtttacggactcggagtaccagctgccgtacgttctcggctctgcccaccagggctgcctgcctccgttcccggcggacgtgttcatgattccccagtacggctacctgactctgaacaatggcagtcaggccgtgggccgttcctccttctactgcctagagtactttccttctcaaatgctgagaacgggcaacaactttgagttcagctaccagtttgaggacgtgccttttcacagcagctacgcgcacagccaaagcctggaccggctgatgaatcctctgattgaccagtacctgtactacttgtctcggactcaaacaacaggaggcacggcaaatacgcagactctgggcttcagccaaggtgggcctaatacaatggccaatcaggcaaagaactggctgccaggaccctgttaccgccaacaacgcgtctcaacgacaaccgggcaaaacaacaatagcaactttgcctggactgctgggaccaaataccatatgaatggaagaaattcattggttaatcctggcatcgctatggcaacacacaaagacgacaaggagcgtttttttcccagtaacgggatcctgatttttggcaaacaaaatgttgccagagacaatgcggattacagcgatgtcatgctcaccagcgaggaagaaatcaaaaccactaaccctgtggctacagaggaatacggtattgtggcagataacttgcagcagcaaaacacggctcctcaaattggaactgtcaacagccagggggccttacccggtatggtctggcagaaccgggacgtgtacctgcagggtcccatctgggccaagattcctcacacggacggcaacttccacccgtcgccgctgatgggcggctttggcctgaaacatcctccgcctcagatcctgatcaagaacacgcctgtacctgcggatcctccgaccaccttcaaccagtcaaagctgaactctttcatcacgcaatacagcaccggacaggtcagcgtggaaattgaatgggagctgcagaaggaaaacagcaagcgctggaaccccgagatccagtacacctccaactactacaaatctacaagtgtggactttgctgttaatacagaaggcgtgtactctgaaccccaccccattggcacccgttacctcacccgtcccctgtaa

SEQ ID NO: 1743 - protein, 736 aa, Artificial Sequence
  source: /note="Description of Artificial Sequence: Synthetic polypeptide"
MAADGYLPDWLEDTLSEGIRQWWKLKPGPPPPKPAERHKDDSRGLVLPGYKYLGPFNGLDKGEPVNEADAAALEHDKAYDRQLDSGDNPYLKYNHADAEFQERLKEDTSFGGNLGRAVFQAKKRVLEPLGLVEEPVKTAPGKKRPVEQSPQEPDSSSGIGKKGQQPAKKRLNFGQTGDSESVPDPQPLGEPPATPAAVGPTTMASGGGAPMADNNEGADGVGNASGNWHCDSTWMGDRVITTSTRTWALPTYNNHLYKQISSASTGASNDNHYFGYSTPWGYFDFNRFHCHFSPRDWQRLINNNWGFRPKRLNFRLFNIQVKEVTDNNGVKTIANNLTSTVQVFTDSEYQLPYVLGSAHQGCLPPFPADVFMIPQYGYLTLNNGSQAVGRSSFYCLEYFPSQMLRTGNNFTFSYTFEEVPFHSSYAHSQSLDRLMNPLIDQYLYYLSRTQTTGGTANTQTLGFSQGGPNTMANQAKNWLPGPCYRQQRVSTTTGQNNNSNFAWTAGTKYHLNGRNSLANPGIAMATHKDDKERFFPSNGILIFGKQNAARDNADYSDVMLTSEEEIKTTNPVATEEYGIVADNLQQQNTAPQIGTVNSQGALPGMVWQNRDVYLQGPIWAKIPHTDGNFHPSPLMGGFGLKHPPPQILIKNTPVPADPPTTFNQSKLNSFITQYSTGQVSVEIEWELQKENSKRWNPEIQYTSNYYKSTSVDFAVNTEGVYSEPHPIGTRYLTRPL

SEQ ID NO: 1744 - protein, 736 aa, Artificial Sequence
  source: /note="Description of Artificial Sequence: Synthetic polypeptide"
MAADGYLPDWLEDNLSEGIREWWDLKPASPKPKANQQKQDDGRGLVLPGYKYLGPFNGLDKGEPVNAADAAALEHDKAYDQQLKAGDNPYLRYNHADAEFQERLQEDTSFGGNLGRAVFQAKKRLLEPLGLVEEAAKTAPGKKRPVEQSPQEPDSSAGIGKSGAQPAKKRLNFGQTGGTESVPDPQPLGEPPAAPSGVGPNTMAAGGGAPMADNNEGADGVGSSSGNWHCDSTWLGDRVITTSTRTWALPTYNNHLYKQISSASTGASNDNHYFGYSTPWGYFDFNRFHCHFSPRDWQRLINNNWGFRPKRLSFKLFNIQVKEVTQNEGTKTIANNLTSTIQVFTDSEYQLPYVLGSAHQGCLPPFPADVFMIPQYGYLTLNNGSQAVGRSSFYCLEYFPSQMLRTGNNFQFTYTFEDVPFHSSYAHSQSLDRLMNPLIDQYLYYLSRTQTTGGTANTQTLGFSQGGPNTMANQAKNWLPGPCYRQQRVSTTTGQNNNSNFAWTAGTKYHLNGRNSLANPGIAMATHKDDKERFFPSNGILIFGKQNAARDNADYSDVMLTSEEEIKTTNPVATEEYGIVADNLQQQNTAPQIGTVNSQGALPGMVWQNRDVYLQGPIWAKIPHTDGNFHPSPLMGGFGLKHPPPQILIKNTPVPADPPTTFNQSKLNSFITQYSTGQVSVEIEWELQKENSKRWNPEIQYTSNYYKSTSVDFAVNTEGVYSEPHPIGTRYLTRPL

SEQ ID NO: 1745 - protein, 736 aa, Artificial Sequence; identical to SEQ ID NO: 1684
  source: /note="Description of Artificial Sequence: Synthetic polypeptide"

SEQ ID NO: 1746 - protein, 736 aa, Artificial Sequence
  source: /note="Description of Artificial Sequence: Synthetic polypeptide"
MAADGYLPDWLEDNLSEGIREWWDLEPGAPKPKANQQKQDDGRGLVLPGYKYLGPFNGLDKGEPVNAADAAALEHDKAYDQQLKAGDNPYLRYNHADAEFQERLQEDTSFGGNLGRAVFQAKKRVLEPLGLVEEGAKTAPGKKRPVEQSPQEPDSSSGIGKTGQQPAKKRLNFGQTGDSESVPDPQPLGEPPATPAAVGPTTMASGGGAPMADNNEGADGVGNASGNWHCDSTWLGDRVITTSTRTWALPTYNNHLYKQISSASTGASNDNHYFGYSTPWGYFDFNRFHCHFSPRDWQRLINNNWGFRPKRLNFKLFNIQVKEVTDNNGVKTIANNLTSTVQVFTDSEYQLPYVLGSAHQGCLPPFPADVFMIPQYGYLTLNNGSQAVGRSSFYCLEYFPSQMLRTGNNFQFTYTFEDVPFHSSYAHSQSLDRLMNPLIDQYLYYLSRTQTTGGTANTQTLGFSQGGPNTMANQAKNWLPGPCYRQQRVSTTTGQNNNSNFAWTAGTKYHLNGRNSLANPGIAMATHKDDKERFFPSNGILIFGKQNAARDNADYSDVMLTSEEEIKTTNPVATEEYGIVADNLQQQNTAPQIGTVNSQGALPGMVWQNRDVYLQGPIWAKIPHTDGNFHPSPLMGGFGLKHPPPQILIKNTPVPADPPTTFNQSKLNSFITQYSTGQVSVEIEWELQKENSKRWNPEIQYTSNYYKSTSVDFAVNTEGVYSEPHPIGTRYLTRPL

SEQ ID NO: 1747 - protein, 736 aa, Artificial Sequence; identical to SEQ ID NO: 1684
  source: /note="Description of Artificial Sequence: Synthetic polypeptide"

SEQ ID NO: 1748 - protein, 736 aa, Artificial Sequence
  source: /note="Description of Artificial Sequence: Synthetic polypeptide"
MAADGYLPDWLEDTLSEGIRQWWKLKPGPPPPKPAERHKDDSRGLVLPGYKYLGPFNGLDKGEPVNEADAAALEHDKAYDRQLDSGDNPYLKYNHADAEFQERLKEDTSFGGNLGRAVFQAKKRVLEPLGLVEEPVKTAPGKKRPVEQSPQEPDSSSGIGKKGQQPAKKRLNFGQTGDSESVPDPQPLGEPPATPAAVGPTTMASGGGAPMADNNEGADGVGNASGNWHCDSTWLGDRVITTSTRTWALPTYNNHLYKQISSASTGASNDNHYFGYSTPWGYFDFNRFHCHFSPRDWQRLINNNWGFRPKRLNFKLFNIQVKEVTDNNGVKTIANNLTSTVQVFTDSDYQLPYVLGSAHQGCLPPFPADVFMIPQYGYLTLNNGSQAVGRSSFYCLEYFPSQMLRTGNNFQFTYTFEDVPFHSSYAHSQSLDRLMNPLIDQYLYYLSRTQTTGGTANTQTLGFSQGGPNTMANQAKNWLPGPCYRQQRVSTTTGQNNNSNFAWTAGTKYHLNGRNSLANPGIAMATHKDDKERFFPSNGILIFGKQNAARDNADYSDVMLTSEEEIKTTNPVATEEYGIVADNLQQQNTAPQIGTVNSQGALPGMVWQNRDVYLQGPIWAKIPHTDGNFHPSPLMGGFGLKHPPPQILIKNTPVPADPPTTFNQSKLNSFITQYSTGQVSVEIEWELQKENSKRWNPEIQYTSNYYKSTSVDFAVNTEGVYSEPHPIGTRYLTRPL

SEQ ID NO: 1749 - protein, 734 aa, Artificial Sequence
  source: /note="Description of Artificial Sequence: Synthetic polypeptide"
MAADGYLPDWLEDTLSEGIRQWWKLKPGPPPPKPAERHKDDSRGLVLPGYKYLGPFNGLDKGEPVNEADAAALEHDKAYDQQLQAGDNPYLRYNHADAEFQERLQGDTSFGGNLGRAVFQAKKRLLEPLGLVEEAAKTAPGKKRPVEQSPQEPDSSAGIGKSGAQPAKKRLNFGQTGDTESVPDPQPIGEPPAAPSGVGSLTMASGGGAPVADNNEGADGVGSSSGNWHCDSQWLGDRVITTSTRTWALPTYNNHLYKQISSASTGASNDNHYFGYSTPWGYFDFNRFHCHFSPRDWQRLINNNWGFRPKRLSFKLFNHPGQGGHAERHQDHRQPHQHIQVFTDSEYQLPYVLGSAHQGCLPPFPADVFMIPQYGYLTLNNGSQAVGRSSFYCLEYFPSQMLRTGNNFQFTYTFEDVPFHSSYAHSQSLDRLMNPLIDQYLYYLSRTQTTGGTANTQTLGFSQGGPNTMANQAKNWLPGPCYRQQRVSTTTGQNNNSNFAWTAGTKYHLNGRNSLGNPGIAMATHKDDKERFFPSNGILIFGKQNAARDNADYSDVMLTSEEEIKTTNPVATEEYGIVADNLQQQNTAPQIGTVNSQGALPGMVWQNRDVYLQGPIWAKIPHTDGNFHPSPLMGGFGLKHPPPQILIKNTPVPADPPTAFNQSKLNSFITQYSTGQVSVEIEWELQKENSKRWNPEIQYTSNYYKSTSVDFAVNTEGVYSEPHPIGTRYLTRPL

SEQ ID NO: 1750 - protein, 737 aa, Artificial Sequence
  source: /note="Description of Artificial Sequence: Synthetic polypeptide"
MAADGYLPDWLEDNLSEGIREWWDLKHGAPKPKANQQKQDDGRGLVLPGYKYLGPFNGLDKGEPVNAADAAALEHDKAYDQQLKAGDNPYLRYNHADAEFQERLQEDTSFGGNLGRAVFQAKKRVLEPFGLVEEGAKTAPGKKRPVEQSPQEPDSSSGIGKTGQQPAKKRLNFGQTGDSESVPDPQPLGEPPATPAAVGPTTMASGGGAPMADNNEGADGVGNASGNWHCDSTWLGDRVITTSTRTWALPTYNNHLYKQISNGTSGGSTNDNTYFGYSTPWGYFDFNRFHCHFSPRDWQRLINNNWGFRPKRLNFKLFNIQVKEVTQNEGTKTIANNLTSTIQVFTDSEYQLPYVLGSAHQGCLPPFPADVFMIPQYGYLTLNNGSQAVGRSSFYCLEYFPSQMLRTGNNFTFSYTFEDVPFHSSYAHSQSLDRLMNPLIDQYLYYLSRTQTTGGTANTQTLGFSQGGPNTMANQAKNWLPGPCYRQQRVSTTTGQNNNSNFAWTAGTKYHLNGRNSLANPGIAMATHKDDKERFFPSNGILIFGKQNAARDNADYSDVMLTSEEEIKTTNPVATEEYGIVADNLQQQNTAPQIGTVNSQGALPGMVWQNRDVYLQGPIWAKIPHTDGNFHPSPLMGGFGLKHPPPQILIKNTPVPADPPTTFNQSKLNSFITQYSTGQVSVEIEWELQKENSKRWNPEIQYTSNYYKSTSVDFAVNTEGVYSDPHPIGTRYLTRPL

SEQ ID NO: 1751 - protein, 737 aa, Artificial Sequence
  source: /note="Description of Artificial Sequence: Synthetic polypeptide"
MAADGYLPDWLEDNLSEGIREWWALKPGAPKPKANQQKQDDGRGLVLPGYKYLGPFNGLDKGEPVNEADAAALEHDKAYDQQLKAGDNPYLRYNHADAEFQERLQEDTSFGGNLGRAVFQAKKRVLEPLGLVEEGAKTAPGKKRPVEPSPQRSPDSSTGIGKKGQQPARKRLNFGQTGDSESVPDPQPLGEPPAAPSGVGPNTMASGGGAPMADNNEGADGVGNSSGNWHCDSTWMGDRVITTSTRTWALPTYNNHLYKQISSASTGASNDNHYFGYSTPWGYFDFNRFHCHFSPRDWQRLINNNWGFRPKRLNFKLFNIQVKEVTQNEGTKTIANNLTSTIQVFTDSEYQLPYVLGSAHQGCLPPFPADVFMIPQYGYLTLNNGSQAVGRSSFYCLEYFPSQMLRTGNNFQFTYTFEDVPFHSSYAHSQSLDRLMNPLIDQYLYYLSRTQTTGGTANTQTLGFSQGGPNTMANQAKNWLPGPCYRQQRVSTTTGQNNNSNFAWTAGTKYHLNGRNSLANPGIAMATHKDDKERFFPSNGILIFGKQNAARDNADYSDVMLTSEEEIKTTNPVATEEYGIVADNLQQQNTAPQIGTVNSQGALPGMVWQNRDVYLQGPIWAKIPHTDGNFHPSPLMGGFGLKHPPPQILIKNTPVPADPPTTFNQSKLNSFITQYSTGQVSVEIEWELQKENSKRWNPEIQYTSNYYKSTSVDFAVNTEGVYSEPHPIGTRYLTRPL

SEQ ID NO: 1752 - protein, 736 aa, Artificial Sequence
  source: /note="Description of Artificial Sequence: Synthetic polypeptide"
  MOD_RES (226)..(226): Any naturally occurring amino acid
MAADGYLPDWLEDTLSEGIRQWWKLKPGPPPPKPAERHKDDSRGLVLPGYKYLGPFNGLDKGEPVNEADAAALEHDKAYDRQLDSGDNPYLKYNHADAEFQERLKEDTSFGGNLGRAVFQAKKRVLEPLGLVEEPVKTAPGKKRPVEQSPQEPDSSSGIGKKGQQPAKKRLNFGQTGDSESVPDPQPLGEPPATPAAVGPTTMASGGGAPMADNNEGADGVGNASXNWHCDSTWLGDRVITTSTRTWALPPITTTSTSKSPVLQRGRSNDNHYFGYSTPWGYFDFNRFHCHFSPRDWQRLINNNWGFRPKRLNFKLFNIQVKEVTDNNGVKTIANNLTSTVQVFTDSDYQLPYVLGSAHQGCLPPFPADVFMIPQYGYLTLNNGSQAVGRSSFYCLEYFPSQMLRTGNNFQFTYTFEDVPFHSSYAHSQSLDRLMNPLIDQYLYYLSRTQTTGGTANTQTLGFSQGGPNTMANQAKNWLPGPCYRQQRVSTTTGQNNNSNFAWTAGTKYHLNGRNSLANPGIAMATHKDDKERFFPSNGILIFGKQNAARDNADYSDVMLTSEEEIKTTNPVATEEYGIVADNLQQQNTAPQIGTVNSQGALPGMVWQNRDVYLQGPIWAKIPHTDGNFHPSPLMGGFGLKHPPPQILIKNTPVPADPPTTFNQSKLNSFITQYSTGQVSVEIEWELQKENSKRWNPEIQYTSNYYKSTNVDFAVNTEGVYSEPHPIGTRYLTRPL

SEQ ID NO: 1753 - protein, 736 aa, Artificial Sequence
  source: /note="Description of Artificial Sequence: Synthetic polypeptide"
  MOD_RES (239)..(239): Any naturally occurring amino acid
MAADGYLPDWLEDNLSEGIREWWDLKPGAPKPKANQQKQDDGRGLVLPGYKYLGPFNGLDKGEPVNAADAAALEHDKAYDQQLQAGDNPYLRYNHADAEFQERLQGDTSFGGNLGRAVFQAKKRVLEPLGLVEEAAKTAPGKKRPVEQSPQEPDSSAGIGKSGAQPAKKRLNFGQTGDTESVPDPQPIGEPPAAPSGVGPNTMAAGGGAPMADNNEGADGVGSSSGNWHCDSTWLGDRXITTSTRTWALPTYNNHLYKQISSASTGASNDNHYFGYSTPWGYFDFNRFHCHFSPRDWQRLINNNWGFRPKRLNFKLFNIQVKEVTDNNGVKTIANNLTSTVQVFTDSEYQLPYVLGSAHQGCLPPFPADVFMIPQYGYLTLNNGSQAVGRSSFYCLEYFPSQMLRTGNNFTFSYTFEDVPFHSSYAHSQSLDRLMNPLIDQYLYYLSRTQTTGGTANTQTLGFSQGGPNTMANQAKNWLPGPCYRQQRVSTTTGQNNNSNFAWTAGTKYHLNGRNSLANPGIAMATHKDDKERFFPSNGILIFGKQNAARDNADYSDVMLTSEEEIKTTNPVATEEYGIVADNFQQQNTAPQIGTVNSQGALPGMVWQNRDVYLQGPIWAKIPHTDGNFHPSPLMGGFGLKHPPPQILIKNTPVPADPPTTFNQSKLNSFITQYSTGQVSVEIEWELQKENSKRWNPEIQYTSNYYKSTSVDFAVNTEGVYSEPHPIGTRYLTRPL

SEQ ID NO: 1754 - protein, 736 aa, Artificial Sequence
  source: /note="Description of Artificial Sequence: Synthetic polypeptide"
MAADGYLPDWLEDNLSEGIREWWALKPGAPKPKANQQKQDDGRGLVLPGYKYLGPFNGLDKGEPVNEADAAALEHDKAYDQQLKAGDNPYLKYNHADAEFQERLQEDTSFGGNLGRAVFQAKKRLLEPLGLVEEAAKTAPGKKRPVEQSPQEPDSSAGIGKSGAQPAKKRLNFGQTGDTESVPDPQPLGEPPATPAAVGPTTMASGGGAPMADNNEGADGVGNASGNWHCDSTWLGDRVITTSTRTWALPTYNNHLYKQISSASTGASNDNHYFGYSTPWGYFDFNRFHCHFSPRDWQRLINNNWGFRPKRLSFKLFNIQVKEVTQNEGTKTIANNLTSTIQVFTDSEYQLPYVLGSAHQGCLPPFPADVFMIPQYGYLTLNNGSQAVGRSSFYCLEYFPSQMLRTGNNFQFTYTFEDVPFHSSYAHSQSLDRLMNPLIDQYLYYLSRTQTTGGTANTQTLGFSQGGPNTMANQAKNWLPGPCYRQQRVSTTTGQNNNSNFAWTAGTKYHLNGRNSLANPGIAMATHKDDKERFFPSNGILIFGKQNAARDNADYSDVMLTSEEEIKTTNPVATEEYGIVADNLQQQNTAPQIGTVNSQGALPGMVWQNRDVYLQGPIWAKIPHTDGNFHPSPLMGGFGLKHPPPQILIKNTPVPADPPTTFNQSKLNSFITQYSTGQVSVEIEWELQKENSKRWNPEIQYTSNYYKSTSVDFAVNTEGVYSEPHPIGTRYLTRPL

SEQ ID NO: 1755 - protein, 736 aa, Artificial Sequence
  source: /note="Description of Artificial Sequence: Synthetic polypeptide"
MAADGYLPDWLEDTLSEGIRQWWKLKPGPPPPKPAERHKDDSRGLVLPGYKYLGPFNGLDKGEPVNEADAAALEHDKAYDQQLQAGDNPYLRYNHADAEFQERLQGDTSFGGNLGRAVFQAKKRLLEPLGLVEEAAKTAPGKKRPVEQSPQEPDSSAGIGKSGAQPAKKRLNFGQTGDTESVPDPQPIGEPPAAPSGVGSLTMASGGGAPVADNNEGADGVGSSSGNWHCDSQWLGDRVITTSTRTWALPTYNNHLYKQISSASTGASNDNHYFGYSTPWGYFDFNRFHCHFSPRDWQRLINNNWGFRPKRLSFKLFNIQVKEVTQNEGTKTIANNLTSTIQVFTDSEYQLPYVLGSAHQGCLPPFPADVFMIPQYGYLTLNNGSQAVGRSSFYCLEYFPSQMLRTGNNFQFTYTFEDVPFHSSYAHSQSLDRLMNPLIDQYLYYLSRTQTTGGTANTQTLGFSQGGPNTMANQAKNWLPGPCYRQQRVSTTTGQNNNSNFAWTAGTKYHLNGRNSLANPGIAMATHKDDKERFFPSNGILIFGKQNAARDNADYSDVMLTSEEEIKTTNPVATEEYGIVADNLQQQNTAPQIGTVNSQGALPGMVWQNRDVYLQGPIWAKIPHTDGNFHPSPLMGGFGLKHPPPQILIKNTPVPADPPTTFNQSKLNSFITQYSTGQVSVEIEWELQKENSKRWNPEIQYTSNYYKSTSVDFAVNTEGVYSEPHPIGTRYLTRPL

SEQ ID NO: 1756 - protein, 738 aa, Artificial Sequence
  source: /note="Description of Artificial Sequence: Synthetic polypeptide"
MAADGYLPDWLEDNLSEGIRQWWKLKPGPPPPKPAERHKDDSRGLVLPGYKYLGPFNGLDKGEPVNAADAAALEHDKAYDQQLKAGDNPYLRYNHADAEFQERLQEDTSFGGNLGRAVFQAKKRVLEPLGLVEEGAKTAPGKKRPVEPSPQRSPDSSTGIGKKGQQPAKKRLNFGQTGDSESVPDPQPLGEPPATPAAVGPTTMASGGGAPMADNNEGADGVGNASGNWHCDSTWLGDRVITTSTRTWALPTYNNHLYKQISNGTSGGSTNDNTYFGCVTPWGYFDFNKFHCHFSPDDWQRLINNGWGFRTKRLNFKLFSMKVKKGTDNTGIKTIANNLTNTVHVFADSEYQLPYVLGSAHQGCLPPFPADVFMIPQYGYLTLNNGSQAVGRSSFYCLEYFPSQMLRTGNNFTFSYTFEDVPFHSSYAHSQSLDRLMNPLIDQYLYYLSRTQTTGGTANTQTLGFSQGGPNTMANQAKNWLPGPCYRQQRVSTTTGQNNNSNFAWTAGTKYHLNGRNSLANPGIAMATHKDDKERFFPSNGILIFGKQNAARDNADYSDVMLTSEEEIKTTNPVATEEYGIVADNLQQQNTAPQIGTVNSQGALPGMVWQNRDVYLQGPIWAKIPHTDGNFHPSPLMGGFGLKHPPPQILIKNTPVPADPPTTFNQSKLNSFITQYSTGQVSVEIEWELQKENSKRWNPEIQYTSNYYKSTSVDFAVNTEGVYSEPHPIGTRYLTRPL

SEQ ID NO: 1757 - protein, 737 aa, Artificial Sequence
  source: /note="Description of Artificial Sequence: Synthetic polypeptide"
MAADGYLPDWLEDTLSEGIRQWWKLKPGPPPPKPAERHKDDSRGLVLPGYKYLGPFNGLDKGEPVNAADAAALEHDKAYDQQLKAGDNPYLRYNHADAEFQERLQEDTSFGGNLGRAVFQAKKRVLEPLGLVEEGAKTAPGKKRPVEPSPQRSPDSSTGIGKKGQQPAKKRLNFGQTGDSESVPDPQPIGEPPAGPSGLGSGTMAAGGGAPMADNNEGADGVGSSSGNWHCDSTWLGDRVITTSTRTWALPTYNNHLYKQISSASTGASNDNHYFGYSTPWGYFDFNRFHCHFSPRDWQRLINNNWGFRPKRLNFKLFNIQVKEVTDNNGVKTIANNLTSTVQVFTDSEYQLPYVLGSAHQGCLPPFPADVFMIPQYGYLTLNNGSQAVGRSSFYCLEYFPSQMLRTGNNFTFSYTFEDVPFHSSYAHSQSLDRLMNPLIDQYLYYLSRTQTTGGTANTQTLGFSQGGPNTMANQAKNWLPGPCYRQQRVSTTTGQNNNSNFAWTAGTKYHLNGRNSLANPGIAMATHKDDKERFFPSNGILIFGKQNAARDNADYSDVMLTSEEEIKTTNPVATEEYGIVADNLQQQNTAPQIGTVNSQGALPGMVWQNRDVYLQGPIWAKILHTDGNFHPSPLMGGFGMKHPPPPILIKNTPVPADPPTTFNQSKLNSFITQYSTGQVSVEIEWELPKENSKRWNPEIQYTSNYYKSTSVDFAVNTEGVYYEPHPIGTRYLTPPL

SEQ ID NO: 1758 - protein, 737 aa, Artificial Sequence
  source: /note="Description of Artificial Sequence: Synthetic polypeptide"
MAADGYLPDWLEDNLSEGIREWWALKPGAPKPKANQQKQDDGRGLVLPGYKYLGPFNGLDKGEPVNAADAAALEHDKAYDQQLKAGDNPYLRYNHADAEFQERLQEDTSFGGNLGRAVFQAKKRVLEPLGLVEEGAKTAPGKKRPVEPSPQRSPDSSTGIGKKGQQPARKRLNFGQTGDSESVPDPQPLGEPPAAPSGVAPNTMAAGGGAPMADNNEGADGVGNASGNWHCDSTWLGDRVITTSTRTWALPTYNNHLYKQISSASTGASNDNHYFGYSTPWGYFDFNRFHCHFSPRDWQRLITTIGGFRPKRLNFKLFNIQVKEVTDNNGVKTIANNLTSTVQVFTDSEYQLPYVLGSAHQGCLPPFPADVFMIPQYGYLTLNNGSQAVGRSSFYCLEYFPSQMLRTGNNFTFSYTFEDVPFHSSYAHSQSLDRLMNPLIDQYLYYLSRTQTTGGTANTQTLGFSQGGPNTMANQAKNWLPGPCYRQQRVSTTTGQNNNSNFAWTAGTKYHLNGRNSLANPGIAMATHKDDKERFFPSNGILIFGKQNAARDNADYSDVMLTSEEEIKTTNPVATEEYGIVADNLQQQNTAPQIGTVNSQGALPGMVWQNRDVYLQGPIWAKIPHTDGNFHPSPLMGGFGLKHPPPQILIKNTPVPADPPTTFNQSKLNSFITQYSTGQVSVEIEWELQKENSKRWNPEIQYTSNYYKSTSVDFAVNTEGVYSEPHPIGTRYLTRPL

SEQ ID NO: 1759 - protein, 736 aa, Artificial Sequence
  source: /note="Description of Artificial Sequence: Synthetic polypeptide"
MAADGYLPDWLEDTLSEGIRQWWKLKPGPPPPKPAERHKDDGRGLVLPGYKYLGPFNGLDKGEPVNAADAAALEHDKAYDQQLKAGDNPYLRYNHADAEFQERLQEDTSFGGNLGRAVFQAKKRVLEPLGLVEEPVKTAPGKKRPVEQSPQEPDSSSGIGKKGQQPAKKRLNFGQTGDSESVPDPQPLGEPPATPAAVGPTTMASGGGAPMADNNEGADGVGNASGNWHCDSTWMGDRVITTSTRTWALPTYNNHLYKQISSASTGASNDNHYFGYSTPWGYFDFNRFHCHFSPRDWQRLINNNWGFRPKRLNFKLFNIQVKEVTQNEGTKTIANNLTSTIQVFTDSEYQLPYVLGSAHQGCLPPFPADVFMIPQYGYLTLNNGSQAVGRSSFYCLEYFPSQMLRTGNNFQFTYTFEDVPFHSSYAHSQSLDRLMNPLIDQYLYYLSRTQTTGGTANTQTLGFSQGGPNTMANHAKNWLPGPCYRQQRVSTTTGQNNNSNFAWTAGTKYHLNGRNSLANPGIAMATHKDDKERFFPSNGILIFGKQNAARDNADYSDVMLTSEEEIKTTNPVATEEYGIVADNLQQQNTAPQIGTVNSQGALPGMVWQNRDVYLQGPIWAKIPHTDGNFHPSPLMGGFGLKHPPPQILIKNTPVPADPPTTFNQSKLNSFITQYSTGQVSVEIEWELQKENSKRWNPEIQYTSNYYKSTSVDFAVNTEGVYSEPHPIGTRYLTRPL

SEQ ID NO: 1760 - protein, 737 aa, Artificial Sequence
  source: /note="Description of Artificial Sequence: Synthetic polypeptide"
MAADGYLPDWLEDNLSQGIREWWDLKPGAPKPKANQQKQDDGRGLVLPGYKYLGPFNGLDKGEPVNAADAAALEHDKAYDQQLKAGDNPYLRYNHADAEFQERLQEDTSFGGNLGRAVFQAKKRVLEPLGLVEEGAKTAPGKKRPVEPSPQRSPDSSTGIGKKGQQPARKRLNFGQTGDSESVPDPQPLGEPPAAPAAVGPTTMASGGGAPMADNNEGADGVGSSSGNWHCDSQWLGDRVITTSTRTWALPTYNNHLYKQISSASTGASNDNHYFGYSTPWGYFDFNRFHCHFSPRDWQRLINNNWGFRPKRLSFKLFNIQVKEVTQNEGTKTIANNLTSTIQVFTDSEYQLPYVLGSAHQGCLPPFPADVFMIPQYGYLTLNNGSQAVGRSSFYCLEYFPSQMLRTGNNFQFTYTFEDVPFHSSYAHSQSLDRLMNPLIDQYLYYLSRTQTTGGTTNAQTLGFSQGGPNTMANQAKNWLPGPCYRQQRVSTTTGQNNNSNFAWTAGTKYHLNGRNSLANPGIAMATHKDDKERFFPSNGILIFGKQNAARDNADYSDVMLTSEEEIKTTNPVATEEYGIVADNLQQQNTAPQIGTVNSQGALPGMVWQNRDVYLQGPIWAKIPHTDGNFHPSPLMGGFGLKHPPPQILIKNTPVPADPPTTFNQSKLNSFITQYSTGQVSVEIEWELQKENSKRWNPEIQYTSNYYKSTNVDFAVNTEGVYSEPHPIGTRYLTRPL

SEQ ID NO: 1761 - protein, 736 aa, Artificial Sequence
  source: /note="Description of Artificial Sequence: Synthetic polypeptide"
MAADGYLPDWLEDNLSEGIREWWDLKPGAPKPKANQQKQDDGRGLVLPGYKYLGPFNGLDKGEPVNAADAAALEHDKAYDQQLKAGDNPYLRYNHADAEFQERLQEDTSFGGNLGRAVFQAKKRVLEPFGLVEEGAKTAPGKKRPVEQSPQEPDSSSGIGKTGQQPAKKRLNFGQTGDTESVPDPQPIGEPPAAPSGVGPNTMAAGGGAPMADNNEGADGVGSSSGNWHCDSTWMGDRVITTSTRTWALPTYNNHLYKQISSASTGASNDNHYFGYSTPWGYFDFNRFHCHFSPRDWQRLINNNWGFRPKRLNFKLFNIQVKEVTQNEGTKTIANNLTSTIQVFTDSEYQLPYVLGSAHQGCLPPFPADVFMIPQYGYLTLNNGSQAVGRSSFYCLEYFPSQMLRTGNNFQFTYTFEDVPFHSSYAHSQSLDRLMNPLIDQYLYYLSRTQTTGGTANTQTLGFSQGGPNTMANQAKNWLPGPCYRQQRVSTTTGQNNNSNFAWTAGTKYHLNGRNSLANPGIAMATHKDDKERFFPSNGILIFGKQNAARDNADYSDVMLTSEEEIKTTNPVATEEYGIVADNLQQQNTAPQIGTVNSQGALPGMVWQNRDVYLQGPIWAKIPHTDGNFHPSPLMGGFGLKHPPPQILIKNTPVPADPPTTFNQSKLNSFITQYSTGQVSVEIEWELQKENSKRWNPEIQYTSNYYKSTNVDFAVNTEGVYSEPHPIGTRYFTRPL

SEQ ID NO: 1762 - protein, 736 aa, Artificial Sequence
  source: /note="Description of Artificial Sequence: Synthetic polypeptide"
MAADGYLPDWLEDNLSEGIREWWDLKPGAPKPKANQQKQDDGRGLVLPGYKYLGPFNGLDKGEPVNAADAAALEHDKAYDQQLKAGDNPYLRYNHADAEFQERLQEDTSFGGNLGRAVFQAKKRVLEPLGLVEEGAKTAPGKKRPVEQSPQEPDSSSGIGKTGQQPAKKRLNFGQTGDSESVPDPQPLGEPPATPAAVGPTTMASGGGAPMADNNEGADGVGNSSGNWHCDSTWMGDRVITTSTRTWALPTYNNHLYKQISSASTGASNDNHYFGYSTPWGYFDFNRFHCHFSPRDWQRLINNNWGFRPKRLNFKLFNIQVKEVTDNNGVKTIANNLTSTVQVFTDSEYQLPYVLGSAHQGCLPPFPADVFMIPQYGYLTLNNGSQAVGRSSFYCLEYFPSQMLRTGNNFQFTYTFEDVPFHSSYAHSQSLDRLMNPLIDQYLYYLSRTQTTGGTANTQTLGFSQGGPNTMANQAKNWLPGPCYRQQRVSTTTGQNNNSNFAWTAGTKYHLNGRNSLANPGIAMATHKDDKERFFPSNGILIFGKQNAARDNADYSDVMLTSEEEIKTTNPVATEEYGIVADNLQQQNTAPQIGTVNSQGALPGMVWQNRDVYLQGPIWAKIPHTDGNFHPSPLMGGFGLKHPPPQILIKNTPVPADPPTTFNQSKLNSFITQYSTGQVSVEIEWELQKENSKRWNPEIQYTSNYYKSTNVDFAVNTEGVYSEPHPIGTRYLTRPL

SEQ ID NO: 1763 - protein, 736 aa, Artificial Sequence
  source: /note="Description of Artificial Sequence: Synthetic polypeptide"
MAADGYLPDWLEDNLSEGIREWWDLKPGAPKPKANQQKQDDGRGLVLPGYKYLGPFNGLDKGEPVNAADAAALEHDKAYDQQLKAGDNPYLRYNHADAEFQERLQEDTSFGGNLGRAVFQAKKRVLEPLGLVEEGAKTAPGKKRPVEQSPQEPDSSSGIGKTGQQPAKKRLNFGQTGDSESVPDPQPLGEPPATPAAVGPTTMASGGGAPMADNNEGADGVGNASGNWHCDSTWLGDRVITTSTRTWALPTYNNHLYKQISSASTGASNDNHYFGYSTPWGYFDFNRFHCHFSPRDWQRLINNNWGFRPKRLNFKLFNIQVKEVTQNEGTKTIANNLTSTIQVFTDSEYQLPYVLGSAHQGCLPPFPADVFMIPQYGYLTLNNGSQAVGRSSFYCLEYFPSQMLRTGNNFEFSYQFEDVPFHSSYAHSQSLDRLMNPLIDQYLYYLSRTQTTGGTANTQTLGFSQGGPNTMANQAKNWLPGPCYRQQRVSTTTGQNNNSNFAWTAGTKYHMNGRNSLVNPGIAMATHKDDKERFFPSNGILIFGKQNVARDNADYSDVMLTSEEEIKTTNPVATEEYGIVADNLQQQNTAPQIGTVNSQGALPGMVWQNRDVYLQGPIWAKIPHTDGNFHPSPLMGGFGLKHPPPQILIKNTPVPADPPTTFNQSKLNSFITQYSTGQVSVEIEWELQKENSKRWNPEIQYTSNYYKSTSVDFAVNTEGVYSEPHPIGTRYLTRPL

SEQ ID NO: 1764 - DNA, 2217 bp, Artificial Sequence
  source: /note="Description of Artificial Sequence: Synthetic polynucleotide"
atggctgccgatggttatcttccagattggctcgaggacaacctctctgagggcattcgcgagtggtgggcgctgaaacctggagccccgaagcccaaagccaaccagcaaaagcaggacgacggccggggtctggtgcttcctggctacaagtacctcggacccttcaacggactcgacaagggggagcccgtcaacgcggcggacgcagcggccctcgagcacgacaaggcctacgaccagcagctgcaggcgggtgacaatccgtacctgcggtataaccacgccgacgccgagtttcaggagcgtctgcaagaagatacgtcttttgggggcaacctcgggcgagcagtcttccaggccaagaagcgggttctcgaacctctcggtctggttgaggaaggcgctaagacggctcctggaaagaagagaccggtagagccatcaccccagcgttctccagactcctctacgggcatcggcaagaaaggccaacagcccgccagaaaaagactcaattttggtcagactggcgactcagagtcagttccagaccctcaacctctcggagaacctccagcagcgccctctggtgtgggacctaatacaatggctgcaggcggtggcgcaccaatggcagacaataacgaaggcgccgacggagtgggtagttcctcgggaaattggcattgcgattccacatggctgggcgacagagtcatcaccaccagcacccgaacctgggccctgcccacctacaacaaccacctctacaagcaaatctccaacgggacatcgggaggagccaccaacgacaacacctacttcggctacagcaccccctgggggtattttgactttaacagattccactgccacttttcaccacgtgactggcagcgactcatcaacaacaactggggattccggcccaagagactcagcttcaagctcttcaacatccaggtcaaggaggtcacgcagaatgaaggcaccaagaccatcgccaataacctcaccagcaccatccaggtgtttacggactcggagtaccagctgccgtacgttctcggctctgcccaccagggctgcctgcctccgttcccggcggacgtgttcatgattccccagtacggctacctaacactcaacaacggtagtcaggccgtgggacgctcctccttctactgcctggaatactttccttcgcagatgctgagaaccggcaacaacttccagtttacttacaccttcgaggacgtgcctttccacagcagctacgcccacagccagagcttggaccggctgatgaatcctctgattgaccagtacctgtactacttgtctcggactcaaacaacaggaggcacggcaaatacgcagactctgggcttcagccaaggtgggcctaatacaatggccaatcaggcaaagaactggctgccaggaccctgttaccgccaacaacgcgtctcaacgacaaccgggcaaaacaacaatagcaactttgcctggactgctgggaccaaataccatctgaatggaagaaattcattggctaatcctggcatcgctatggcaacacacaaagacgacgaggagcgtttttttcccagtaacgggatcctgatttttggcaaacaaaatgctgccagagacaatgcggattacagcgatgtcatgctcaccagcgaggaagaaatcaaaaccactaaccctgtggctacagaggaatacggtatcgtggcagataacttgcagcagcaaaacacggctcctcaaattggaactgtcaacagccagggggccttacccggtatggtttggcagaaccgggacgtgtacctgcagggtcccatctgggccaagattcctcacacggacggcaacttccacccgtctccgctgatgggcggctttggcctgaaacatcctccgcctcagatcctgatcaagaacacgcctgtacctgcggatcctccgaccaccttcaaccagtcaaagctgaactctttcatcacgcaatacagcaccggacaggtcagcgtggaaattgaatgggagctgcagaaggaaaacagcaagcgctggaaccccgagatccagtacacctccaactactacaaatctacaagtgtggactttgctgttaatacagaaggcgtgtactctgaaccccgccccattggcacccgttacctcacccgtaatctgtaa

SEQ ID NO: 1765 - protein, 738 aa, Artificial Sequence; identical to SEQ ID NO: 105
  source: /note="Description of Artificial Sequence: Synthetic polypeptide"

SEQ ID NO: 1766 - protein, 735 aa, Artificial Sequence
  source: /note="Description of Artificial Sequence: Synthetic polypeptide"
MAADGYLPDWLEDNLSEGVREWWALQPGAPKPKANQQHQDNARGLVLPGYKYLGPGNGLDKGEPVNAADAAALEHDKAYDQQLKAGDNPYLKYNHADAEFQQRLQGDTSFGGNLGRAVFQAKKRVLEPLGLVEQAGETAPGKKRPLIESPQQPDSSTGIGKKGKQPAKKKLVFEDETGAGDGPPEGSTSGAMSDDSEMRAAAGGAAVEGGQGADGVGNASGDWHCDSTWSEGHVTTTSTRTWVLPTYNNHLYKRLGESLQSNTYNGFSTPWGYFDFNRFHCHFSPRDWQRLINNNWGMRPKAMRVKIFNIQVKEVTTSNGETTVANNLTSTVQIFADSSYELPYVMDAGQEGSLPPFPNDVFMVPQYGYCGLVTGNTSQQQTDRNAFYCLEYFPSQMLRTGNNFEITYSFEKVPFHSMYAHSQSLDRLMNPLIDQYLWGLQSTTTGTTLNAGTATTNFTKLRPTNFSNFKKNWLPGPSIKQQGFSKTANQNYKIPATGSDSLIKYETHSTLDGRWSALTPGPPMATAGPADSKFSNSQLIFAGPKQNGNTATVPGTLIFTSEEELAATNATDTDMWGNLPGGDQSNSNLPTVDRLTALGAVPGMVWQNRDIYYQGPIWAKIPHTDGHFHPSPLIGGFGLKHPPPQIFIKNTPVPANPATTFSSTPVNSFITQYSTGQVSVQIDWEIQKERSKRWNPEVQFTSNYGQQNSLLWAPDAAGKYTEPRAIGTRYLTHHL

SEQ ID NO: 1767 - protein, 735 aa, Artificial Sequence
  source: /note="Description of Artificial Sequence: Synthetic polypeptide"
MAADGYLPDWLEDNLSEGVREWWALQPGAPKPKANQQHQDNARGLVLPGYKYLGPGNGLDKGEPVNAADAAALEHDKAYDQQLKAGDNPYLKYNHADAEFQQRLQGDTSFGGNLGRAVFQAKKRVLEPLGLVEQAGETAPGKKRPLIESPQQPDSSTGIGKKGKQPAKKKLVFEDETGAGDGPPEGSTSGAMSDDSEMRAAAGGAAVEGGQGADGVGNASGDWHCDSTWSEGHVTTTSTRTWVLPTYNNHLYKRLGESLQSNTYNGFSTPWGYFDFNRFHCHFSPRDWQRLINNNWGMRPKAMRVKIFNIQVKEVTTSNGETTVANNLTSTVQIFADSSYELPYVMDAGQEGSLPPFPNDVFMVPQYGYCGLVTGNTSQQQTDRNAFYCLEYFPSQMLRTGNNFEITYSFEKVPFHSMYAHSQSLDRLMNPLIDQYLWGLQSTTTGTTLNAGTATTNFTKLRPTNFSNFKKNWLPGPSIKQQGFSKTANQNYLIPATGSDSLIRYETHSTLDGRWSALTPGPPMATAGPADSKFSNSQLIFAGPKQNGNTATVPGTLIFTSEEELAATNATDTDMWGNLPFRDLSSSNLPTVDRSTPLGAVPGMVWQNRDIYYQGPIWAKIPHTDGHFHPSPLIGGFGLKHPPPQIFIKNTPVPANPATTFSSTPVNSFITQYSTGQVSVQIDWEIQKERSKRWNPEVQFTSNYGQQNSLLWAPDAAGKYTEPRAIGTRYLTHHL

SEQ ID NO: 1768 - protein, 735 aa, Artificial Sequence
  source: /note="Description of Artificial Sequence: Synthetic polypeptide"
MAADGYLPDWLEDNLSEGVREWWALQPGAPKPKANQQHQDNARGLVLPGYKYLGPGNGLDKGEPVNAADAAALEHDKAYDQQLKAGDNPYLKYNHADAEFQQRLQGDTSFGGNLGRAVFQAKKRVLEPLGLVEQAGETAPGKKRPLIESPQQPDSSTGIGKKGKQPAKKKLVFEDETGAGDGPPEGSTSGAMSDDSEMRAAAGGAAVEGGQGADGVGNASGDWHCDSTWSEGHVTTTSTRTWVLPTYNNHLYKRLGESLQSNTYNGFSTPWGYFDFNRFHCHFSPRDWQRLINNNWGMRPKAMRVKIFNIQVKEVTTSNGETTVANNLTSTVQIFADSSYELPYVMDAGQEGSLPPFPNDVFMVPQYGYCGLVTGNTSQQQTDRNAFYCLEYFPSQMLRTGNNFEITYSFEKVPFHSMYAHSQSLDRLMNPLIDQYLWGLQSTTTGTTLNAGTATTNFTKLRPTNFSNFKKNWLPGPSIKQQGFSKTANQNYYIPATGSDSLILYETHSTLDGRWSALTPGPPMATAGPADSKFSNSQLIFAGPKQNGNTATVPGTLIFTSEEELAATNATDTDMWGNLPGGDQSNSNLPTVDRLTALGAVPGMVWQNRDIYYQGPIWAKIPHTDGHFHPSPLIGGFGLKHPPPQIFIKNTPVPANPATTFSSTPVNSFITQYSTGQVSVQIDWEIQKERSKRWNPEVQFTSNYGQQNSLLWAPDAAGKYTEPRAIGTRYLTHHL

SEQ ID NO: 1769 - protein, 735 aa, Artificial Sequence
  source: /note="Description of Artificial Sequence: Synthetic polypeptide"
MAADGYLPDWLEDNLSEGVREWWALQPGAPKPKANQQHQDNARGLVLPGYKYLGPGNGLDKGEPVNAADAAALEHDKAYDQQLKAGDNPYLKYNHADAEFQQRLQGDTSFGGNLGRAVFQAKKRVLEPLGLVEQAGETAPGKKRPLIESPQQPDSSTGIGKKGKQPAKKKLVFEDETGAGDGPPEGSTSGAMSDDSEMRAAAGGAAVEGGQGADGVGNASGDWHCDSTWSEGHVTTTSTRTWVLPTYNNHLYKRLGESLQSNTYNGFSTPWGYFDFNRFHCHFSPRDWQRLINNNWGMRPKAMRVKIFNIQVKEVTTSNGETTVANNLTSTVQIFADSSYELPYVMDAGQEGSLPPFPNDVFMVPQYGYCGLVTGNTSQQQTDRNAFYCLEYFPSQMLRTGNNFEITYSFEKVPFHSMYAHSQSLDRLMNPLIDQYLWGLQSTTTGTTLNAGTATTNFTKLRPTNFSNFKKNWLPGPSIKQQGFSKTANQNYGIPATGSDSLIKYETHSTLDGRWSALTPGPPIATAGPADSKFSNSQLIFAGPKQNGNTATVPGTLIFTSEEELAATNATDTDMWGNLPLYDASSSNLPTVDRLTLLGAVPGMVWQNRDIYYQGPIWAKIPHTDGHFHPSPLIGGFGLKHPPPQIFIKNTPVPANPATTFSSTPVNSFITQYSTGQVSVQIDWEIQKERSKRWNPEVQFTSNYGQQNSLLWAPDAAGKYTEPRAIGTRYLTHHL

SEQ ID NO: 1770 - protein, 735 aa, Artificial Sequence
  source: /note="Description of Artificial Sequence: Synthetic polypeptide"
MAADGYLPDWLEDNLSEGVREWWALQPGAPKPKANQQHQDNARGLVLPGYKYLGPGNGLDKGEPVNAADAAALEHDKAYDQQLKAGDNPYLKYNHADAEFQQRLQGDTSFGGNLGRAVFQAKKRVLEPLGLVEQAGETAPGKKRPLIESPQQPDSSTGIGKKGKQPAKKKLVFEDETGAGDGPPEGSTSGAMSDDSEMRAAAGGAAVEGGQGADGVGNASGDWHCDSTWSEGHVTTTSTRTWVLPTYNNHLYKRLGESLQSNTYNGFSTPWGYFDFNRFHCHFSPRDWQRLINNNWGMRPKAMRVKIFNIQVKEVTTSNGETTVANNLTSTVQIFADSSYELPYVMDAGQEGSLPPFPNDVFMVPQYGYCGLVTGNTSQQQTDRNAFYCLEYFPSQMLRTGNNFEITYSFEKVPFHSMYAHSQSLDRLMNPLIDQYLWGLQSTTTGTTLNAGTATTNFTKLRPTNFSNFKKNWLPGPSIKQQGFSKTANQNYTIPATGSDSLITYETHSTLDGRWSALTPGPPGATAGPADSKFSNSQLIFAGPKQNGNTATVPGTLIFTSEEELAATNATDTDMWGNLPRVDTSASNLPTVDRYTNLGAVPGMVWQNRDIYYQGPIWAKIPHTDGHFHPSPLIGGFGLKHPPPQIFIKNTPVPANPATTFSSTPVNSFITQYSTGQVSVQIDWEIQKERSKRWNPEVQFTSNYGQQNSLLWAPDAAGKYTEPRAIGTRYLTHHL

SEQ ID NO: 1771 - protein, 735 aa, Artificial Sequence
  source: /note="Description of Artificial Sequence: Synthetic polypeptide"
MAADGYLPDWLEDNLSEGVREWWALQPGAPKPKANQQHQDNARGLVLPGYKYLGPGNGLDKGEPVNAADAAALEHDKAYDQQLKAGDNPYLKYNHADAEFQQRLQGDTSFGGNLGRAVFQAKKRVLEPLGLVEQAGETAPGKKRPLIESPQQPDSSTGIGKKGKQPAKKKLVFEDETGAGDGPPEGSTSGAMSDDSEMRAAAGGAAVEGGQGADGVGNASGDWHCDSTWSEGHVTTTSTRTWVLPTYNNHLYKRLGESLQSNTYNGFSTPWGYFDFNRFHCHFSPRDWQRLINNNWGMRPKAMRVKIFNIQVKEVTTSNGETTVANNLTSTVQIFADSSYELPYVMDAGQEGSLPPFPNDVFMVPQYGYCGLVTGNTSQQQTDRNAFYCLEYFPSQMLRTGNNFEITYSFEKVPFHSMYAHSQSLDRLMNPLIDQYLWGLQSTTTGTTLNAGTATTNFTKLRPTNFSNFKKNWLPGPSIKQQGFSKTANQNYSIPATGSDSLIKYETHSTLDGRWSALTPGPPFATAGPADSKFSNSQLIFAGPKQNGNTATVPGTLIFTSEEELAATNATDTDMWGNLPDYDSSLSNLPTVDRDTTLGAVPGMVWQNRDIYYQGPIWAKIPHTDGHFHPSPLIGGFGLKHPPPQIFIKNTPVPANPATTFSSTPVNSFITQYSTGQVSVQIDWEIQKERSKRWNPEVQFTSNYGQQNSLLWAPDAAGKYTEPRAIGTRYLTHHL

SEQ ID NO: 1772 - protein, 735 aa, Artificial Sequence
  source: /note="Description of Artificial Sequence: Synthetic polypeptide"
MAADGYLPDWLEDNLSEGVREWWALQPGAPKPKANQQHQDNARGLVLPGYKYLGPGNGLDKGEPVNAADAAALEHDKAYDQQLKAGDNPYLKYNHADAEFQQRLQGDTSFGGNLGRAVFQAKKRVLEPLGLVEQAGETAPGKKRPLIESPQQPDSSTGIGKKGKQPAKKKLVFEDETGAGDGPPEGSTSGAMSDDSEMRAAAGGAAVEGGQGADGVGNASGDWHCDSTWSEGHVTTTSTRTWVLPTYNNHLYKRLGESLQSNTYNGFSTPWGYFDFNRFHCHFSPRDWQRLINNNWGMRPKAMRVKIFNIQVKEVTTSNGETTVANNLTSTVQIFADSSYELPYVMDAGQEGSLPPFPNDVFMVPQYGYCGLVTGNTSQQQTDRNAFYCLEYFPSQMLRTGNNFEITYSFEKVPFHSMYAHSQSLDRLMNPLIDQYLWGLQSTTTGTTLNAGTATTNFTKLRPTNFSNFKKNWLPGPSIKQQGFSKTANQNYSIPATGSDSLIWYETHSTLDGRWSALTPGPPCATAGPADSKFSNSQLIFAGPKQNGNTATVPGTLIFTSEEELAATNATDTDMWGNLPQGDSSLSNLPTVDRMTVLGAVPGMVWQNRDIYYQGPIWAKIPHTDGHFHPSPLIGGFGLKHPPPQIFIKNTPVPANPATTFSSTPVNSFITQYSTGQVSVQIDWEIQKERSKRWNPEVQFTSNYGQQNSLLWAPDAAGKYTEPRAIGTRYLTHHL

SEQ ID NO: 1773 - protein, 735 aa, Artificial Sequence
  source: /note="Description of Artificial Sequence: Synthetic polypeptide"
MAADGYLPDWLEDNLSEGVREWWALQPGAPKPKANQQHQDNARGLVLPGYKYLGPGNGLDKGEPVNAADAAALEHDKAYDQQLKAGDNPYLKYNHADAEFQQRLQGDTSFGGNLGRAVFQAKKRVLEPLGLVEQAGETAPGKKRPLIESPQQPDSSTGIGKKGKQPAKKKLVFEDETGAGDGPPEGSTSGAMSDDSEMRAAAGGAAVEGGQGADGVGNASGDWHCDSTWSEGHVTTTSTRTWVLPTYNNHLYKRLGESLQSNTYNGFSTPWGYFDFNRFHCHFSPRDWQRLINNNWGMRPKAMRVKIFNIQVKEVTTSNGETTVANNLTSTVQIFADSSYELPYVMDAGQEGSLPPFPNDVFMVPQYGYCGLVTGNTSQQQTDRNAFYCLEYFPSQMLRTGNNFEITYSFEKVPFHSMYAHSQSLDRLMNPLIDQYLWGLQSTTTGTTLNAGTATTNFTKLRPTNFSNFKKNWLPGPSIKQQGFSKTANQNYCIPATGSDSLIRYETHSTLDGRWSALTPGPPLATAGPADSKFSNSQLIFAGPKQNGNTATVPGTLIFTSEEELAATNATDTDMWGNLPYKDSSRSNLPTVDRETSLGAVPGMVWQNRDIYYQGPIWAKIPHTDGHFHPSPLIGGFGLKHPPPQIFIKNTPVPANPATTFSSTPVNSFITQYSTGQVSVQIDWEIQKERSKRWNPEVQFTSNYGQQNSLLWAPDAAGKYTEPRAIGTRYLTHHL

SEQ ID NO: 1774 - protein, 735 aa, Artificial Sequence
  source: /note="Description of Artificial Sequence: Synthetic polypeptide"
MAADGYLPDWLEDNLSEGVREWWALQPGAPKPKANQQHQDNARGLVLPGYKYLGPGNGLDKGEPVNAADAAALEHDKAYDQQLKAGDNPYLKYNHADAEFQQRLQGDTSFGGNLGRAVFQAKKRVLEPLGLVEQAGETAPGKKRPLIESPQQPDSSTGIGKKGKQPAKKKLVFEDETGAGDGPPEGSTSGAMSDDSEMRAAAGGAAVEGGQGADGVGNASGDWHCDSTWSEGHVTTTSTRTWVLPTYNNHLYKRLGESLQSNTYNGFSTPWGYFDFNRFHCHFSPRDWQRLINNNWGMRPKAMRVKIFNIQVKEVTTSNGETTVANNLTSTVQIFADSSYELPYVMDAGQEGSLPPFPNDVFMVPQYGYCGLVTGNTSQQQTDRNAFYCLEYFPSQMLRTGNNFEITYSFEKVPFHSMYAHSQSLDRLMNPLIDQYLWGLQSTTTGTTLNAGTATTNFTKLRPTNFSNFKKNWLPGPSIKQQGFSKTANQNYIIPATGSDSLIYYETHSTLDGRWSALTPGPPRATAGPADSKFSNSQLIFAGPKQNGNTATVPGTLIFTSEEELAATNATDTDMWGNLPWIDNSRSNLPTVDRPTSLGAVPGMVWQNKNIYYQGPIWAKIPHTDGHFHPSPLIGGFGLKHPPPQIFIKNTPVPANPATTFTSTPVNSFITQYSTGQVSVQIDWEIQKERSKRWNPEVQFTSNYGQQNSLLWAPDAAGKYTEPRAIGTRYLTHHL

SEQ ID NO: 1775 - protein, 735 aa, Artificial Sequence
  source: /note="Description of Artificial Sequence: Synthetic polypeptide"
MAADGYLPDWLEDNLSEGVREWWALQPGAPKPKANQQHQDNARGLVLPGYKYLGPGNGLDKGEPVNAADAAALEHDKAYDQQLKAGDNPYLKYNHADAEFQQRLQGDTSFGGNLGRAVFQAKKRVLEPLGLVEQAGETAPGKKRPLIESPQQPDSSTGIGKKGKQPAKKKLVFEDETGAGDGPPEGSTSGAMSDDSEMRAAAGGAAVEGGQGADGVGNASGDWHCDSTWSEGHVTTTSTRTWVLPTYNNHLYKRLGESLQSNTYNGFSTPWGYFDFNRFHCHFSPRDWQRLINNNWGMRPKAMRVKIFNIQVKEVTTSNGETTVANNLTSTVQIFADSSYELPYVMDAGQEGSLPPFPNDVFMVPQYGYCGLVTGNTSQQQTDRNAFYCLEYFPSQMLRTGNNFEITYSFEKVPFHSMYAHSQSLDRLMNPLIDQYLWGLQSTTTGTTLNAGTATTNFTKLRPTNFSNFKKNWLPGPSIKQQGFSKTANQNYGIPATGSDSLIIYETHSTLDGRWSALTPGPPRATAGPADSKFSNSQLIFAGPKQNGNTATVPGTLIFTSEEELAATNATDTDMWGNLPGGDQSNSNLPTVDRLTALGAVPGMVWQNRDIYYQGPIWAKIPHTDGHFHPSPLIGGFGLKHPPPQIFIKNTPVPANPATTFSSTPVNSFITQYSTGQVSVQIDWEIQKERSKRWNPEVQFTSNYGQQNSLLWAPDAAGKYTEPRAIGTRYLTHHL

SEQ ID NO: 1776 - protein, 735 aa, Artificial Sequence
  source: /note="Description of Artificial Sequence: Synthetic polypeptide"
MAADGYLPDWLEDNLSEGVREWWALQPGAPKPKANQQHQDNARGLVLPGYKYLGPGNGLDKGEPVNAADAAALEHDKAYDQQLKAGDNPYLKYNHADAEFQQRLQGDTSFGGNLGRAVFQAKKRVLEPLGLVEQAGETAPGKKRPLIESPQQPDSSTGIGKKGKQPAKKKLVFEDETGAGDGPPEGSTSGAMSDDSEMRAAAGGAAVEGGQGADGVGNASGDWHCDSTWSEGHVTTTSTRTWVLPTYNNHLYKRLGESLQSNTYNGFSTPWGYFDFNRFHCHFSPRDWQRLINNNWGMRPKAMRVKIFNIQVKEVTTSNGETTVANNLTSTVQIFADSSYELPYVMDAGQEGSLPPFPNDVFMVPQYGYCGLVTGNTSQQQTDRNAFYCLEYFPSQMLRTGNNFEITYSFEKVPFHSMYAHSQSLDRLMNPLIDQYLWGLQSTTTGTTLNAGTATTNFTKLRPTNFSNFKKNWLPGPSIKQQGFSKTANQNYVIPATESDSLIYYETHSTLDGRWSALTPGPPYATAGPADSKFSNSQLIFAGPKQNGNTATVPGTLIFTSEEELAATNATDTDMWGNLPPRDDSTSNLPTVDRKTYLGAVPGMVWQNRDIYYQGPIWAKIPHTDGHFHPSPLIGGFGLKHPPPQIFIKNTPVPANPATTFSSTPVNSFITQYSTGQVSVQIDWEIQKERSKRWNPEVQFTSNYGQQNSLLWAPDAAGKYTEPRAIGTRYLTHHL

SEQ ID NO: 1777 - protein, 735 aa, Artificial Sequence
  source: /note="Description of Artificial Sequence: Synthetic polypeptide"
MAADGYLPDWLEDNLSEGVREWWALQPGAPKPKANQQHQDNARGLVLPGYKYLGPGNGLDKGEPVNAADAAALEHDKAYDQQLKAGDNPYLKYNHADAEFQQRLQGDTSFGGNLGRAVFQAKKRVLEPLGLVEQAGETAPGKKRPLIESPQQPDSSTGIGKKGKQPAKKKLVFEDETGAGDGPPEGSTSGAMSDDSEMRAAAGGAAVEGGQGADGVGNASGDWHCDSTWSEGHVTTTSTRTWVLPTYNNHLYKRLGESLQSNTYNGFSTPWGYFDFNRFHCHFSPRDWQRLINNNWGMRPKAMRVKIFNIQVKEVTTSNGETTVANNLTSTVQIFADSSYELPYVMDAGQEGSLPPFPNDVFMVPQYGYCGLVTGNTSQQQTDRNAFYCLEYFPSQMLRTGNNFEITYSFEKVPFHSMYAHSQSLDRLMNPLIDQYLWGLQSTTTGTTLNAGTATTNFTKLRPTNFSNFKKNWLPGPSIKQQGFSKTANQNYYIPATGSDSLIIYETHSTLDGRWSALTPGPPIATAGPADSKFSNSQLIFAGPKQNGNTATVPGTLIFTSEEELAATNSTDTDMWGNLPTDDDSRSNLPTVDRMTLLGAVPGMVWQNRDIYYQGPIWAKIPHTDGHFHPSPLIGGFGLKHPPPQIFIKNTPVPANPATTFSSTPVNSFITQYSTGQVSVQIDWEIQKERSKRWNPEVQFTSNYGQQNSLLWAPDAAGKYTEPRAIGTRYLTHHL

SEQ ID NO: 1778 - protein, 735 aa, Artificial Sequence
  source: /note="Description of Artificial Sequence: Synthetic polypeptide"
MAADGYLPDWLEDNLSEGVREWWALQPGAPKPKANQQHQDNARGLVLPGYKYLGPGNGLDKGEPVNAADAAALEHDKAYDQQLKAGDNPYLKYNHADAEFQQRLQGDTSFGGNLGRAVFQAKKRVLEPLGLVEQAGETAPGKKRPLIESPQQPDSSTGIGKKGKQPAKKKLVFEDETGAGDGPPEGSTSGAMSDDSEMRAAAGGAAVEGGQGADGVGNASGDWHCDSTWSEGHVTTTSTRTWVLPTYNNHLYKRLGESLQSNTYNGFSTPWGYFDFNRFHCHFSPRDWQRLINNNWGMRPKAMRVKIFNIQVKEVTTSNGETTVANNLTSTVQIFADSSYELPYVMDAGQEGSLPPFPNDVFMVPQYGYCGLVTGNTSQQQTDRNAFYCLEYFPSQMLRTGNNFEITYSFEKVPFHSMYAHSQSLDRLMNPLIDQYLWGLQSTTTGTTLNAGTATTNFTKLRPTNFSNFKKNWLPGPSIKQQGFSKTANQNYHIPATGSDSLIYYETHSTLDGRWSALTPGPPSATAGPADSKFSNSQLIFAGPKQNGNTATVPGTLIFTSEEELAATNATDTDMWGNLPRRDSSVSNLPTVDRYTDLGAVPGMVWQNRDIYYQGPIWAKIPHTDGHFHPSPLIGGFGLKHPPPQIFIKNTPVPANPATTFSSTPVNSFITQYSTGQVSVQIDWEIQKERSKRWNPEVQFTSNYGQQNSLLWAPDAAGKYTEPRAIGTRYLTHHL

SEQ ID NO: 1779 - protein, 735 aa, Artificial Sequence
  source: /note="Description of Artificial Sequence: Synthetic polypeptide"
MAADGYLPDWLEDNLSEGVREWWALQPGAPKPKANQQHQDNARGLVLPGYKYLGPGNGLDKGEPVNAADAAALEHDKAYDQQLKAGDNPYLKYNHADAEFQQRLQGDTSFGGNLGRAVFQAKKRVLEPLGLVEQAGETAPGKKRPLIESPQQPDSSTGIGKKGKQPAKKKLVFEDETGAGDGPPEGSTSGAMSDDSEMRAAAGGAAVEGGQGADGVGNASGDWHCDSTWSEGHVTTTSTRTWVLPTYNNHLYKRLGESLQSNTYNGFSTPWGYFDFNRFHCHFSPRDWQRLINNNWGMRPKAMRVKIFNIQVKEVTTSNGETTVANNLTSTVQIFADSSYELPYVMDAGQEGSLPPFPNDVFMVPQYGYCGLVTGNTSQQQTDRNAFYCLEYFPSQMLRTGNNFEITYSFEKVPFHSMYAHSQSLDRLMNPLIDQYLWGLQSTTTGTTLNAGTATTNFTKLRPTNFSNFKKNWLPGPSIKQQGFSKTANQNYSIPATGSDSLISYETHSTLDGRWSALTPGPPRATAGPADSKFSNSQLIFAGPKQNGNTATVPGTLIFTSEEELAATNATDTDMWGNLPRHDSSLSNLPTVDRNTGLGAVPGMVWQNRDIYYQGPIWAKIPHTDGHFHPSPLIGGFGLKHPPPQIFIKNTPVPANPATTFSSTPVNSFITQYSTGQVSVQIDWEIQKERSKRWNPEVQFTSNYGQQNSLLWAPDAAGKYTEPRAIGTRYLTHHL

SEQ ID NO: 1780 - protein, 735 aa, Artificial Sequence
  source: /note="Description of Artificial Sequence: Synthetic polypeptide"
MAADGYLPDWLEDNLSEGVREWWALQPGAPKPKANQQHQDNARGLVLPGYKYLGPGNGLDKGEPVNAADAAALEHDKAYDQQLKAGDNPYLKYNHADAEFQQRLQGDTSFGGNLGRAVFQAKKRVLEPLGLVEQAGETAPGKKRPLIESPQQPDSSTGIGKKGKQPAKKKLVFEDETGAGDGPPEGSTSGAMSDDSEMRAAAGGAAVEGGQGADGVGNASGDWHCDSTWSEGHVTTTSTRTWVLPTYNNHLYKRLGESLQSNTYNGFSTPWGYFDFNRFHCHFSPRDWQRLINNNWGMRPKAMRVKIFNIQVKEVTTSNGETTVANNLTSTVQIFADSSYELPYVMDAGQEGSLPPFPNDVFMVPQYGYCGLVTGNTSQQQTDRNAFYCLEYFPSQMLRTGNNFEITYSFEKVPFHSMYAHSQSLDRLMNPLIDQYLWGLQSTTTGTTLNAGTATTNFTKLRPTNFSNFKKNWLPGPSIKQQGFSKTANQNYFIPATGSDSLIRYETHSTLDGRWSALTPGPPLATAGPADSKFSNSQLIFAGPKQNGNTATVPGTLIFTSEEELAATNATDTDMWGNLPVIDFSKSNLPTVDRLTHLGAVPGMVWQNRDIYYQGPIWAKIPHTDGHFHPSPLIGGFGLKHPPPQIFIKNTPVPANPATTFSSTPVNSFITQYSTGQVSVQIDWEIQKERSKRWNPEVQFTSNYGQQNSLLWAPDAAGKYTEPRAIGTRYLTHHL

(The sequence listing continues in the following parts.)

1. A pharmaceutical composition for use in the treatment of Huntington's Disease, said composition comprising adeno-associated virus (AAV) particles in a pharmaceutically acceptable formulation; wherein at least one of the AAV particles comprises an AAV viral genome comprising a polynucleotide sequence selected from the group consisting of SEQ ID NO: 1352-1379, 1388, and 1426-1438 or variants of the foregoing having at least 95% identity thereto; and wherein the concentration of the AAV viral genome in the pharmaceutical composition is from 1×10¹¹ to 1×10¹² VG/mL.

2. The pharmaceutical composition of claim 1, wherein the concentration of the AAV viral genome is from 1×10¹¹to 9×10¹¹ VG/mL.

3. The pharmaceutical composition of claim 1, wherein the concentration of the AAV viral genome is from 1.2×10¹¹ to 6×10¹¹ VG/mL.

4. The pharmaceutical composition of claim 1, wherein the concentration of the AAV viral genome is from 1.8×10¹¹ to 6×10¹¹ VG/mL.

5. The pharmaceutical composition of claim 1, wherein the concentration of the AAV viral genome is from 5×10¹¹ to 8×10¹¹ VG/mL.

6. The pharmaceutical composition of any one of claims 1-5, wherein the polynucleotide sequence comprises SEQ ID NO: 1352.

7. The pharmaceutical composition of any one of claims 1-6, wherein the AAV particles comprise an AAV capsid and said capsid serotype is selected from the group consisting of AAV1, AAV2, AAV2G9, AAV3, AAV3a, AAV3b, AAV3-3, AAV4, AAV4-4, AAV5, AAV6, AAV6.1, AAV6.2, AAV6.1.2, AAV7, AAV7.2, AAV8, AAV9, AAV9.11, AAV9.13, AAV9.16, AAV9.24, AAV9.45, AAV9.47, AAV9.61, AAV9.68, AAV9.84, AAV9.9, AAV10, AAV11, AAV12, AAV16.3, AAV24.1, AAV27.3, AAV42.12, AAV42-1b, AAV42-2, AAV42-3a, AAV42-3b, AAV42-4, AAV42-5a, AAV42-5b, AAV42-6b, AAV42-8, AAV42-10, AAV42-11, AAV42-12, AAV42-13, AAV42-15, AAV42-aa, AAV43-1, AAV43-12, AAV43-20, AAV43-21, AAV43-23, AAV43-25, AAV43-5, AAV44.1, AAV44.2, AAV44.5, AAV223.1, AAV223.2, AAV223.4, AAV223.5, AAV223.6, AAV223.7, AAV1-7/rh.48, AAV1-8/rh.49, AAV2-15/rh.62, AAV2-3/rh.61, AAV2-4/rh.50, AAV2-5/rh.51, AAV3.1/hu.6, AAV3.1/hu.9, AAV3-9/rh.52, AAV3-11/rh.53, AAV4-8/r11.64, AAV4-9/rh.54, AAV4-19/rh.5.5, AAV5-3/rh.57, AAV5-22/rh58, AAV7.3/hu.7, AAV 16.81hu.10-NAV16.12/hu.11, AAV29.3/bh 1, AAV29.5/bb.2, AAV106.1/hu.37, AAV114.3/hu.40, AAV127.2/hu.41, AAV127.5/hu.42, AAV128.3/hu.44, AAV130.4/hu.48, AAV 145.1/hu.53, AAV145.5/hu.54, AAV145.6/hu.55, AAV161.10/hu.60, AAV161.6/hu.61, AAV33.12/hu.17, AAV33.4/hu.15, AAV33.84/hu.16, AAV52.1hu.19, AAV52.1/hu.20, AAV58.2/hu.25, AAVA3.3, AAVA3.4, AAVA3.5, AAVA3.7, AAVC1, AAVC2, AAVC5, AAV-DJ, AAV-DJ8, AAVF3, AAVF5, AAVH2, AAVrh.72, AAVhu.8, AAVrh.68, AAVrh.70, AAVpi.1, AAVpi.3, AAVpi.2, AAVrh.60, AAVrh.44, AAVrh.65, AAVrh.55, AAVrh.47, AAVrh.69, AAVrh.45, AAVrh.59, AAVhu.12, AAVH6, AAVLK03, AAVH-1/hu.1, AAVH-5.1hu.3, AAVLG-10/rh.40, AAVLG-4/rh.38, AAVLG-9/hu.39, AAVN721-8/rh.43, AAVCh.5, AAVCh.5R1, AAVcy.2, AAVcy.3, AAVcy.4, AAVcy.5, AAVCy.5R1., AAVCy.5R2, AAVCy.5R3, AAVCy.5R4, AAVcy,6, AAVhu.1, AAVhu.2, AAVhu.3, AAVhu.4, AAVhu.5, AAVhu.6, AAVhu.7, AAVhu.9, AAVhu.10, AAVhu.11, AAVhu.13, AAVhu.15, AAVhu.16, AAVhu.17, AAVhu.18, AAVhu.20, AAVhu.21, AAVhu.22, AAVhu.23.2, AAVhu.24, AAVhu.25, AAVhu.27, AAVhu.28, AAVhu.29, AAVhu.29R, AAVhu.31, AAVhu.32, AAVhu.34, AAVhu.35, AAVhu.37, AAVhu.39, AAVhu.40, AAVhu.41, AAVhu.42, AAVhu.43, AAVhu.44, AAVhu.44R1, AAVhu.44R2, AAVhu.44R3, AAVhu.45, AAVhu.46, AAVhu.47, AAVhu.48, AAVhu.48R1, AAVhu.48R2, AAVhu.48R3, AAVhu.49, AAVhu.51, AAVhu.52, AAVhu.54, AAVhu.55, AAVhu.56, AAVhu.57, AAVhu.58, AAVhu.60, AAVhu.61, AAVhu.63, AAVhu.64, AAVhu.66, AAVhu.67, AAVhu.14/9, AAVhu.t 19, AAVrh.2, AAVrh.2R, AAVrh.8, AAVrh.8R, AAVrh.10, AAVrh.12, AAVrh.13, AAVrh.13R, AAVrh.14, AAVrh.17, AAVrh.18, AAVrh.19, AAVrh.20, AAVrh.21, AAVrh.22, AAVrh.23, AAVrh.24, AAVrh.25, AAVrh.31, AAVrh.32, AAVrh.33, AAVrh.34, AAVrh.35, AAVrh.36, AAVrh.37, AAVrh.37R2, AAVrh.38, AAVrh.39. AAVrh.40, AAVrh.46, AAVrh.48, AAVrh.48.1, AAVrh.48.1.2, AAVrh.48.2, AAVrh.49, AAVrh.51, AAVrh.52, AAVrh.53, AAVrh.54, AAVrh.56, AAVrh.57, AAVrh.58, AAVrh.61, AAVrh.64, AAVrh.64R1, AAVrh.64R2, AAVrh.67, AAVrh.73, AAVrh.74, AAVrh8R, AAVrh8R A586R mutant, AAVrh8R R533A mutant, AAAV, BAAV, caprine AAV, bovine AAV, ovine AAV, AAVhE1.1, AAVhEr1.5, AAVhER1.14, AAVhEr1.8, AAVhEr1 AAVhEr1.18, AAVhEr1.35, AAVhEr1.7, AAVhEr1.36, AAVhEr2.29, AAVhEr2.4, AAVhEr2.16, AAVhEr2.30, AAVhEr2.31, AAVhEr2.36, AAVhER.1.23, AAVhEr3.1, AAV2.5T AAV-PAEC, AAV-LK01, AAV-LK02, AAV-LK03, AAV-LK04, AAV-LK05, AAV-LK06, AAV-LK07, AAV-LK08, AAV-LK09, AAV-LK10, AAV-LK11, AAV-LK12, AAV-LK13, AAV-LK14, AAV-LK15, AAV-LK16, AAV-LK17, AAV-LK18, AAV-LK19, AAV-PAEC2, AAV-PAEC4, AAV-PAEC6, AAV-PAEC7, AAV-PAEC8, AAV-PAEC 11, AAV-PAEC12, AAV-2-pre-miRNA-101, AAV-8h, AAV-8b, AAV-h, AAV-b, AAV SM 10-2, AAV Shuffle 100-1, AAV Shuffle 100-3, AAV Shuffle 100-7, AAV Shuffle 10-2, AAV Shuffle 10-6. AAV Shuffle 10-8, AAV Shuffle 100-2, AAV SM 10-1, AAV SM 10-8, AAV SM 100-3, AAV SM 100-10, BNP61 AAV, BNP62 AAV, BNP63 AAV, AAVrh.50, AAVrh.43, AAVrh.62, AAVrh.48, AAVhu.19, AAVhu.11, AAVhu.53, AAV4-8/rh.64, AAVLG-9/hu.39, AAV54.5/hu.23, AAV54.2/hu.22, AAV54.7/hu.24, AAV54.1/hu.21, AAV54.4R/hu.27, AAV46.2/hu.28, AAV46.6/hu.29, AAV128.1/hu.43, true type AAV (ttAAV), UPENN AAV 10, Japanese AAV 10 serotypes, AAV CBr-7.1, AAV CBr-7.10, AAV CBr-7.2, AAV CBr-7.3, AAV CBr-7.4, AAV CBr-7.5, AAV CBr-7.7, AAV CBr-7.8, AAV CBr-B7.3, AAV CBr-B7.4, AAV CBr-E1, AAV CBr-E2, AAV CBr-E3, AAV CBr-E4,AAV CBr-E5, AAV CBr-e5,AAV CBr-E6, AAV CBr-E7, AAV CBr-E8, AAV CHt-1, AAV CHt-2, AAV CHt-3, AAV CHt-6.1, AAV CHt-6.10, AAV CHt-6.5, AAV CHt-6.6, AAV CHt-6.7, AAV CHt-6.8, AAV CHt-P1, AAV CHt-P2, AAV CHt-P5, AAV CHt-P6, AAV CHt-P8, AAV CHt-P9, AAV CKd-1, AAV CKd-10, AAV CKd-2, AAV CKd-3, AAV CKd-4, AAV CKd-6, AAV CKd-7,AAV CKd-8, AAV CKd-B1, AAV CKd-B2, AAV CKd-B3, AAV CKd-B4, AAV CKd-B5, AAV CKd-B6, AAV CKd-B7, AAV CKd-B8, AAV CKd-H1, AAV CKd-H2, AAV CKd-H3, AAV CKd-H4, AAV CKd-H5, AAV CKd-H6, AAV CKd-N3, AAV CKd-N4, AAV CKd-N9, AAV CLg-F1, AAV CLg-F2,AAV CLg-F3, AAV CLg-F4, AAV CLg-F5, AAV CLg-F6,AAV CLg-F7, AAV CLg-F8, AAV CLv-1, AAV CLv1-1, AAV Clv1-10, AAV CLv1-2, AAV CLv-12, AAV CLv1-3, AAV CLv-13, AAV CLv1-4, AAV CLv1-7, AAV Clv1-8, AAV CLv-1-9, AAV CLv-2, AAV CLv-3, AAV CLv-4, AAV CLv-6, AAV CLv-8, AAV CLv-D1, AAV CLv-D2, AAV CLv-D3, AAV CLv-D4, AAV CLv-D5, AAV CLv-D6, AAV CLv-D7, AAV CLv-D8, AAV CLv-E1, AAV CLv-K1, AAV CLv-K3, AAV CLv-K6, AAV CLv-L4, AAV CLv-L5, AAV CLv-L6, AAV CLv-M1, AAV CLv-M11, AAV CLv-M2, AAV CLv-M5, AAV CLv-M6, AAV CLv-M7, AAV CLv-M8, AAV CLv-M9, AAV CLv-R1, AAV CLv-R2, AAV CLv-R3, AAV CLv-R4, AAV CLv-R5, AAV CLv-R6, AAV CLv-R7, AAV CLv-R8, AAV CLv-R9, AAV CSp-1, AAV CSp-10, AAV CSp-11, AAV CSp-2, AAV CSp-3, AAV CSp-4, AAV CSp-6, AAV CSp-7, AAV CSp-8,AAV CSp-8.10, AAV CSp-8.2, AAV CSp-8.4, AAV CSp-8.5, AAV CSp-8.6, AAV CSp-8.7, AAV CSp-8.8, AAV CSp-8.9, AAV CSp-9, AAV.hu.48R3, AAV.VR-355, AAV3B, AAV4, AAV5, AAVF1/HSC1, AAVF11/HSC11, AAVF12/HSC12, AAVF13/HSC13, AAVF14/HSC14, AAVF15/HSC15, AAVF16/HSC16, AAVF17/HSC17, AAVF2/HSC2, AAVF3/HSC3, AAVF4/HSC4, AAVF5/HSC5, AAVF6/HSC6, AAVF7/HSC7, AAVF8/HSC8, AAVF9/HSC9, AAV-PHP.B, AAV-PHP.A, G2B-26, G2B-13, TH1.1-32, TH1.1-35, AAVPHP.B2, AAVPHP.B3, AAVPHP.N/PHP.B-DGT, AAVPHP.B-EST, AAVPHP.B-GGT, AAVPHP.B-ATP, AAVPHP.B-ATT-T, AAVPHP.B-DGT-T, AAVPHP.B-GGT-T, AAVPHP.B-SGS, AAVPHP.B-AQP, AAVPHP.B-QQP, AAVPHP.B-SNP(3), AAVPHP.B-SNP, AAVPHP.B-QGT, AAVPHP.B-NQT, AAVPHP.B-EGS, AAVPHP.B-SGN, AAVPHP.B-EGT, AAVPHP.B-DST, AAVPHP.B-DST, AAVPHRB-STP, AAVPHRB-PQP, AAVPHP.B-SQP, AAVPHP.B-QLP, AAVPHP.B-TMP, AAVPHP.B-TTP, AAVPHP.S/G2A12, AAVG2A15/G2A3, AAVG2B4, and/or AAVG2B5 and variants thereof.

8. The pharmaceutical composition of claim 7, wherein the AAV particle capsid serotype is an AAV1 serotype.

9. The pharmaceutical composition of claim 7, wherein the pharmaceutically acceptable formulation comprises:
a) one or more salts selected from sodium chloride, potassium chloride, and potassium phosphate;
b) at least one disaccharide, wherein the at least one disaccharide comprises sucrose; and
c) a buffering agent selected from Tris HCl, Tris base, sodium phosphate, potassium phosphate, histidine, boric acid, citric acid, glycine, HEPES (4-(2-hydroxyethyl)-1-piperazineethanesulfonic acid), and MOPS (3-(N-morpholino)propanesulfonic acid);
wherein said pharmaceutical composition is an aqueous solution.

10. The pharmaceutical composition of claim 9, wherein the pharmaceutically acceptable formulation comprises:
a) sodium chloride at a concentration from 85 to 110 mM;
b) potassium chloride at a concentration from 1 to 3 mM;
c) potassium phosphate at a concentration from 1 to 3 mM;
d) sucrose that is 5 to 9% by weight relative to the total volume of said formulation; and
e) a buffering agent at a concentration from 1 to 20 mM.

11. The pharmaceutical composition of claim 10, wherein the pharmaceutically acceptable formulation comprises:
a) sodium chloride at a concentration of 95 mM;
b) potassium chloride at a concentration of 1.5 mM;
c) potassium phosphate at a concentration of 1.5 mM;
d) sucrose at a concentration that is 7% by weight relative to the total volume of said formulation; and
e) the buffering agent at a concentration of 10 mM.

12. The pharmaceutical composition of any one of claim 9-11 which is buffered to a pH from 7.2 to 8.2 at 5° C.

13. The pharmaceutical composition of any one of claim 9-11, wherein the buffering agent is sodium phosphate and the formulation is buffered to a pH from 7.2 to 7.6 at 5° C.

14. The pharmaceutical composition of any one of claim 9-11, wherein the buffering agent is Tris base and is adjusted with hydrochloric acid to a pH from 7.3 to 7.7 at 5° C.

15. The pharmaceutical composition of claim 7, wherein the pharmaceutically acceptable formulation further comprises a surfactant.

16. The pharmaceutical composition of claim 15, wherein the surfactant is Poloxamer 188.

17. The pharmaceutical composition of claim 16, wherein the concentration of Poloxamer 188 is 0.001% by weight relative to the total volume of the pharmaceutically acceptable formulation.

18. The pharmaceutical composition of claim 1, claim 7 or claim 15, wherein the pharmaceutically acceptable formulation has an osmolality of 400 to 480 mOsm/kg.

19. A method of treating; Huntington's Disease in a patient in need thereof, comprising;
administering to said patient a therapeutically effective amount of the pharmaceutical composition of any one of claims 1-18.

20. The method of claim 19, wherein the pharmaceutical composition is administered by infusion into the striatum of the patient.

21. The method of claim 20, wherein the pharmaceutical composition is administered by bilateral infusion into the striatum of the patient.

22. The method of claim 19. wherein the pharmaceutical composition is administered by infusion into the putamen and thalamus of the patient.

23. The method of claim 22, wherein the pharmaceutical composition is administered by bilateral infusion into the putamen and thalamus of the patient.

24. The method of claim 22 or 23, wherein the pharmaceutical composition is administered using magnetic resonance imaging (MRI)-guided convection enhanced delivery (CED).

25. The method of any one of claims 20-21, wherein the volume of the pharmaceutical composition administered to the striatum is 15 μL/hemisphere or less.

26. The method of claim 25, wherein the volume of the pharmaceutical composition administered to the striatum is from 5-10 μL/hemisphere.

27. The method of claim 20-21, wherein the close administered to the striatum is between 2×10⁹ to 3×10¹¹ VG/hemisphere.

28. The method of any one of claims 22-24, wherein the volume of the pharmaceutical composition administered to the putamen is 1500 μL/hemisphere or less.

29. The method of claim 28, wherein the volume of the pharmaceutical composition administered to the putamen is from 100-1500 μL/hemisphere.

30. The method of claim 22-24, wherein the dose administered to the putamen is between 1×10¹⁰ to 4×10¹³ VG/hemisphere.

31. The method of any one of claims 22-24, wherein the volume of the pharmaceutical composition administered to the thalamus is 2500 μL/hemisphere or less.

32. The method of claim 31, wherein the volume of the pharmaceutical composition administered to the thalamus is from 150-2500 μL/hemisphere.

33. The method of claims 22-24, wherein the dose administered to the thalamus is between 4×10¹⁰ to 6.8×10¹³ VG/hemisphere.

34. The method of any one of claims 20-24, wherein the total dose administered to the patient is between 8×10⁹ to 2×10¹⁴ VG.

35. A method of inhibiting or suppressing the expression of a Huntingtin (HTT) gene product (RNA or protein) in a tissue selected from the group consisting of the striatum, putamen, caudate, thalamus, cerebral cortex, primary motor cortex, primary somatosensory cortex, temporal cortex and combinations thereof of a patient comprising administering a therapeutically effective amount of the pharmaceutical composition of any one of claims 1-18.

36. The method of claim 35, wherein the expression of the HTT gene product (RNA or protein is reduced by at least 30%.

37. The method of claim 35, wherein the expression of the HTT gene product (RNA or protein) is reduced by 40-70%.

38. The method of claim 35, wherein the expression of the HTT gene product (RNA or protein) is reduced by 50-80%.

39. The method of claim 35, wherein the expression of the HTT gene product (RNA or protein) is inhibited or suppressed in the putamen and wherein the inhibition or suppression is measured in one or more medium spiny neurons in the putamen.

40. The method of claim 35. wherein the expression of the HTT gene product (RNA or protein) is inhibited or suppressed in the putamen and wherein the inhibition or suppression is measured in one or more astrocytes in the putamen.

41. The method of claim 35, wherein the expression of the HTT gene product (RNA or protein) is inhibited or suppressed in the pyramidal neurons of each of the primary motor cortex, primary somatosensory cortex, and the temporal cortex.

42. The method of claim 35, wherein the expression of the HTT gene product (RNA or protein is reduced by at least 20% in the cerebral cortex.

43. The method of claim 35, wherein the expression of the HTT gene product (RNA or protein) is inhibited or suppressed in both the striatum and the cerebral cortex of the patient.

44. The method of claim 35 wherein the HTT gene product is the HTT protein and the HTT protein expression is inhibited or suppressed in the striatum, putamen, caudate and/or thalamus of the patient.

45. The method of claim 44, wherein the level of the HTT protein is reduced by at least 10% in the putamen.

46. The method of claim 45, wherein the level of the HTT protein is reduced by 15-65% in the putamen.

47. The method of claim 44, wherein e level of the HTT protein is reduced by at least 5% in the caudate.

48. The method of claim 47, wherein the level of the HTT protein is reduced by 5-50% in the caudate.

49. The method of claim 44, wherein the level of the HTT protein is reduced by at least 10% in the thalamus.

50. The method of claim 44, wherein the level of the HTT protein is reduced by 15-80% in the thalamus.

51. The method of claim 44, wherein the level of the HTT protein is reduced in both the striatum and the thalamus of the patient.
